United States Patent Application Publication US 2026/0022370 A1 - sequence listing, part 7

SEQ ID NO: 36003 - DNA, 445 bp, Mus musculus
  source 1..445: mol_type = other DNA
taaagctttcagcaattttcaagttcaacaatggcctgaagtcactccagtagatactactgccagaaataaagaggctcttgttacaatttgtgttggtatacagcagtgtccatcctatatagacttcctactaggcacttcctacataggcaggtggcagtgcagttttgccaatcactgcacaatcatctccaaacttagcaaaaaatctagctcttaaccctggttaaataaataaatgtacctgccaaagatctcttcagatccagctatcagaactaaaagattttgctagacgaacaacctgtcaagcagattgtacgggtgatccgatcaaagcccagaggtgacatctccgcgaatagccgcagaggcgggcgccccacggagggggcggtgcccgggccgccagctctgctgacgccacataggccgagatcac

SEQ ID NO: 36004 - DNA, 432 bp, Mus musculus
  source 1..432: mol_type = other DNA
gcagttttgccaatcactgcacaatcatctccaaacttagcaaaaaatctagctcttaaccctggttaaataaataaatgtacctgccaaagatctcttcagatccagctatcagaactaaaagattttgctagacgaacaacctgtcaagcagattgtacgggtgatccgatcaaagcccagaggtgacatctccgcgaatagccgcagaggcgggcgccccacggagggggcggtgcccgggccgccagctctgctgacgccacataggccgagatcaccctccgccaggctcgtccgtgcccgctgccggggccgtgctcgttaagcacgcgggacctcgtggtctgcctcggtgcgtggccaccagaagccccgccccgtctgtgacgtcctggtggcgcgcggaagggcccgggccagactaagcca

SEQ ID NO: 36005 - DNA, 356 bp, Mus musculus
  source 1..356: mol_type = other DNA
tcacatgtcactatcctttcaaaacgaaatggcaaaggagagagacacaactttgatacaaagttgtctgatatcgaggttgtcttgctttccgcaagcaggcaaggaataagctgtgatcagtagtttcactttctgagtaaactgattattaataatttaaattcccaaatagaaatctttattcttggtgcaggctcagccccagccagagggaagccttggcgccgccctgtggtctcgaaccagcccagagcccacagccgccccctgctgggctcccgcggtcaggcggccgaggattaggcacagcgcgccgggctagtgacgtcacctctgcgccaggccgaggccgg

SEQ ID NO: 36006 - DNA, 240 bp, Mus musculus
  source 1..240: mol_type = other DNA
caggtggagcacccaactttacttctgtttctgatacccatttgacagcgatcgggggaattattggagtcatagtttaaacaaaacctcgactctgcaaaagcaaaagcgacctagcctgtccggctttgtgccggagcggagtctctgccaccgcctctgctgcgggctccagtccgggctcggagggaaagggctccctttgcgctgtgacgacggtccctgagccgccagctccgc

SEQ ID NO: 36007 - DNA, 211 bp, Mus musculus
  source 1..211: mol_type = other DNA
catgacttggcacaatttacttaaagattgcatgccctgatctttggttatgcctcatttacatatgacaaacgttatgcatatactttaaaaattgaattgagcaggataaagtgcatccctttgattaaatggcactgcattgcaaatcaatatctttctggaggctgcaatgctgctgcagagcccgctcgccttcctgggaacccca

SEQ ID NO: 36008 - DNA, 360 bp, Mus musculus
  source 1..360: mol_type = other DNA
agcccagcgcctggggagtactggtcattactaaatttaccataaaattgaatatttataattatagattaccatgttattttaaaatttcttctgtaagttattggtgcttctctttccaggcatagaaaatcctatgagggagagatcagcctctctcctgtagggggcgctaagagagtagcagcatgacttggcacaatttacttaaagattgcatgccctgatctttggttatgcctcatttacatatgacaaacgttatgcatatactttaaaaattgaattgagcaggataaagtgcatccctttgattaaatggcactgcattgcaaatcaatatctttctggaggctgcaa

SEQ ID NO: 36009 - DNA, 545 bp, Mus musculus
  source 1..545: mol_type = other DNA
gagaacacatttcatattacagcaaacagtgctctgtttcatgtctgcctaatagacaaggaaaaaaccgaattcttgatcatgtctttcctcctttcttagatacttcattagtaagtcacaatatagatcataaatatgtgaggaatatgggaaaccattccatcatccatttttaaaaactggtacggagtcaggagtgctccaggcccagtttgtgtacaattattatatatctgaaagttcatttttttaaaacatagatttaccttaaaggggaaagtttatatccttgtcattgtatattttaactactaaaagattatgaaaataagagggaattttcagacagtgagtttcacagcctcctgtgtaccacaccgagcagggtaagaattcatttatatctgaggcatgctatcctgaatggcaaaccactttatatattatggacattggaaattagaacttagtcctttcatcaaagagtgtgatcttgaagttcttattctagccagaacattctaagattctgctaattatgc

SEQ ID NO: 36010 - DNA, 671 bp, Mus musculus
  source 1..671: mol_type = other DNA
ggggctttttaaaaaagccactcttaagatccttttttcactgaagtacccacagtgacattcctgtcacccagagacaggtgtgtcggtctccgggtcgtgggccaacacggaccgcaccgggtggactggcccgcctgcgggctgcggtcccggagcgcgcggaaggagcgcggccgcggcgggcggagcgcgggcggccgggagggggcgccgcccgggcgcggcgggtccgggagggcggcggaggcctgggagtcggagtcggattcggagccggagcgcggcgcggggtcgcgcgggggtcccgggcgccaggcctccggcgagggcagtcgcaggtctccgtgcagcgccgcccctcgggctggggaacttgtcccgctcgcccggtccgcagccgcctgcgcctcctcgtccgcggacccccatctccggccgcggccgcgcggctcttgcttacaaaggagggaaaatgcggcgggcggccgcgcagcgcgggggcccccgggcggcggggatggcggcagcccccggcaccacgtaagacgcccccgcgcgcccagcctcggcccaggcccgagccccgcagcctggcgagcgctgcgcgtcgcccgcggcccgcgaggaggcggaggcggaggagcaggacgaggcgccgccttccccgc

SEQ ID NO: 36011 - DNA, 417 bp, Mus musculus
  source 1..417: mol_type = other DNA
agaccaatggagttaacttggggctctcagagtcccagctcatatgtgggccccaaacaactggtgtaggagctaccacctggctgggcagcccaaagaaaagagttgtcaacatcgacagtttttgtttctctattttatataatttaacttaaatactgtgtatgaggacatatttatctgcacaggatgcacatatgagtcaaattagaatacttaataattagttttatgtatggaatttgcacttaatgaacaacttttgattgagtaaccaaacgaatctcaaatttgtccctcatgcgtgtgattgagagcattctaaagcaagggaattggcccgcggccagcggcccgatggatgctaggaactgtagttcagcggagccaggggagagcctgactggttccctgaag

SEQ ID NO: 36012 - DNA, 330 bp, Mus musculus
  source 1..330: mol_type = other DNA
tagtggctatgtacaaatttttaattgcctacatggttgggctatttcgtcaataaattccactaactaggccagactgtttcattgtactctatgtatgaagtgcgtgagacttctgtccctcttgcttatcgtagaagtttgtctaactgttcaattaggccagtacaaaagtacaacatatatatatatttgtgtgtgtgtatatatacatatatatatatatatatatatatatgtatatatacacacacacacctgggctgtaagcaagggaccagcttggtgaagagccccgcccctagcaacgcccgggcttgtgttagcaac

SEQ ID NO: 36013 - DNA, 357 bp, Mus musculus
  source 1..357: mol_type = other DNA
attggagtcctgttttctagtctaggactcaggcatgtagcagaatgcccgtaactgcaattttcagagtttctatcagctgcactgccctggccagtgaccatgactgagtctctaaacctaataattctaatgatagaaggagaaagattggcgaaatgggcctgccattcagtgagccttcaaatgaaaggtgaaaaatctagatcgtcacacttctttcaagtttttagaaaaattgctcaagccatcatccatctcagttcttcagctaccataaaaatgtttgtgaggcaggccagtcccttcctcgagcgcgatgcagcacgcaggcgcggatccgctgagacgtcacct

SEQ ID NO: 36014 - DNA, 531 bp, Mus musculus
  source 1..531: mol_type = other DNA
aaacaaagaatgtttcccaggttgaacttgcagaggttaatctgtgtatgcctttcaaagggttgttctgatttgtctagttaataaaccaccaagaaagataatttttaaacctaatttgctgaaatgagaatttactaacgtgtaaatttgacaattttcgacaaattggttttatattaaaaaaaaatctccactgacacttttgactaaaaaggtaaataaaagatccccatctacttgttagctcagcgaaccctggatgctccaaggccacgtttaaaatgcggttcgtggaagggcatttctgatcattccctttcaaggacatgccgaaagggagaaaaaaagcgcactttcttcgaggtttgtggatccacgtagggctgctcccacggggggtctccgcaagatcgcgcgcaggcgtggggaccgcggccgggtgggtccccacgcactctgccccgaccgacccgcgcccctgctccacctccccggcgcggcgcggtccggctcgggggcaggaggagc

SEQ ID NO: 36015 - DNA, 426 bp, Mus musculus
  source 1..426: mol_type = other DNA
acagaacccctgtggttgtgagtcttattttcttccttggaaataaaagctgcaagcgtctattttgaaaggccctttaattggagacgcagctccaccttggtcgttagtgtgtatcatctgacctccacgtgtgtatcataatattcattaaacttttctgactgtcctaacagctagtcgtctgagaaactgctctgttggaagagcgctccaccgcggactgcagatttcgaccaggtcccagtcggtttccagtgagccctgctggtgaccctgggtcccccttgattcgcccccggcgacgcccctcccacggcggccgcagcgaagcccctgggtgtgagcaggagctggtctccggcagggggcgctgtgcgcgcggcggccgaggggcggggtctgcggagcgggctgtgctgggca

SEQ ID NO: 36016 - DNA, 590 bp, Mus musculus
  source 1..590: mol_type = other DNA
caaatggtttcgcatactatttttttttttaaataaacagagtccatgtctcaacagcttttaaagatattttaaatgtacaacttacctgttttctgtaataacttatggctttgtacaactaataaaaacgtgataacctttgctagaccttatgtaattaaaagtgttagaaataccctgttttcactatttgacagtagttgaagtgaaacaataaacactgatataaaatgtaaggattttttttctcaatggaaagtatttcccagtgcctaaactttaaacctcagctatgcttttcacaaggatcaaacaaagaatgtttcccaggttgaacttgcagaggttaatctgtgtatgcctttcaaagggttgttctgatttgtctagttaataaaccaccaagaaagataatttttaaacctaatttgctgaaatgagaatttactaacgtgtaaatttgacaattttcgacaaattggttttatattaaaaaaaaatctccactgacacttttgactaaaaaggtaaataaaagatccccatctacttgttagctcagcgaaccctggatgctccaaggccac

SEQ ID NO: 36017 - DNA, 454 bp, Mus musculus
  source 1..454: mol_type = other DNA
tgcagcactagaacatggtgctaagcactgcagttatatgagcctattctagggagacatgtcatctttcaagaaggttgagtgtccttcgaccaggacccctctgggtcaaaatgggtggcctattgctcttattaaaaggaaatgggggatatgggagccgccctaatctgcgcatgtgccaagggtaggccaatgggctgccctaggcggaggataattctccttaaaaggggctcctgaagatgtaagcaataaagcttttgccgttgcgttccggtcgcgatgtgtgtgtgtgtgtgtgtgtgtgtacagagagacagacagacagacagacagaatagataaataaatgtaattttttaattaaaggattatcttttctcaccaagttacattaaactgagttgaaagtatgcataagttttgaagtttttctaacttgtaccaagac

SEQ ID NO: 36018 - DNA, 301 bp, Mus musculus
  source 1..301: mol_type = other DNA
cataagttctgagaacacactcccctgaatttgggttcctctatagaaagatacaccaacccaattgtccatgggttttccaagcatggtttcaataaacaatgaatcaaaactatttagaaaaaaaatatattcatcttttctgcatgaggtaacatttgtattgcattgttaccatgtagggaatacatatgcatttgagatgaagacctgaaaactctccatcttttaagctctgatcctctagctaggctgcagctgacctgggatgccccctccgctctttggcttaaaagcggga

SEQ ID NO: 36019 - DNA, 467 bp, Mus musculus
  source 1..467: mol_type = other DNA
ctattctatttcacttgttatgtatcacacaattaaagatttattaaatcacttctggaataatttatcactgcaagtcattaaaaataatgaaaatctcaggagaaaaatgttctctgaggttcatatttttattaaatatttttcctgtcatgttataattattgtttagatctcatgtgaatataatattaaaaggtaattttattttgaaagctaagaattaacctaaactcacaaatagtatcataaaacattatttttataacagatgcattattacagaaattcagataggtgtttctaaagtttgtaactagtgtttaagtgaactataggaagatataagagaaagttcccagatctgctacttgtctgacccacaaaccacagcactgttgaggtttttgttgtgataatctcatgaaatcagacctaggtattctatcccctttcatgactatggt

SEQ ID NO: 36020 - DNA, 225 bp, Mus musculus
  source 1..225: mol_type = other DNA
gaacaacccacgtgagtttcacatcctttgggttgtttctattcgaatcatccagaaaattaaactgggtcatcgcccgagtgtgggtcgcagacggcgctgacacagcacgggcggcactcgggatgccgcggggcgatcggggtgggtggcggcgagcggcggcccccgcggggcggcgtggtgcgctccggggcggctctgggccggacgggcggagcagca

SEQ ID NO: 36021 - DNA, 373 bp, Mus musculus
  source 1..373: mol_type = other DNA
tgcaaaagcatgtgcacacatatgaacatgtacacatgtaaacagtattctatttggcaatttattgggtataataaaaaataggcagtttaaaaatattattttaaaattctgtactttattatatttattcaaaattttaagtaacatgaaatgagagttgttagaacagcagtaattcactggccagtgagctaccctcctgtcttgtgcatgcatccgacacacatgcaaagaatgtgtatttcttttatccattattaaacaagaacatacaaaataattactggttggaatcctttgtagcttaaaaaggctactttctgaatgtttacatgtgacacattctctggacgttcaagaccctctgaga

SEQ ID NO: 36022 - DNA, 371 bp, Mus musculus
  source 1..371: mol_type = other DNA
acaaggctacacttttgaatagtgccactccctaggtagggaaactagacctctgggatcggaggcactcccttaggtatcaaaattaaaatgaaatcaaatgtcaattcaaacagccttgggaaaattcttaccaaaaaggcttttctgtgtgactccagtccagatctgtgattgacttgtcctgcactcaaggcatggtctcttggaaacacaagggtagcgtcgccttagagaccagctagctggagggaacctggtgcgcgcggccgggtgcggcgcgtggggcaagtgcaccaccagggccctgcgcacccggctctttccccccgctgtgctggccaccagcccgggcctccgcctggggatga

SEQ ID NO: 36023 - DNA, 590 bp, Mus musculus
  source 1..590: mol_type = other DNA
gactgtctgtttaaaacaaaatcatttcttttagcaatgctaatccaacttgatgttgtcttatttgtactgactgtcttgagggtactccatcaaaaatcaatactataaggagtgtctattatagccaggagtaagtatactccaaacaagttttgtgaggcattttctcatttacaaagcaaaattaaaacaaattgaatttcgttattgatgaaaaacccttcattttccactcttttattgctacaaaaagggagagtcggatccggcgggtggaccccggccccgccgccaccgcggccacccgggacctttgcggcccgtctgcaaggtcggcgggagcccagggccggccccgcgtcccacacaggggtgaagcctccgaggctaaccgcgcacgcgggagagccgggtctgaggccccgcgggctggcgcgccgggggcgtggtcagcatccgggggcggggcccgcggggcgcgaggcggggcaggtggagcctgcgcgaggccggccccggcgtaggaagggcggggagcgcgtctgggcgccgcggtcgcgtgacgcgttttcaaatctttaaccgcc

SEQ ID NO: 36024 - DNA, 402 bp, Mus musculus
  source 1..402: mol_type = other DNA
tgtagaaattttcttaataattaatttttattttaacataattatatttaagaggtagtttgtcctgattttagattttcaaaatttaaaaacaaacaaacaaatcctcccaaggggcttattgggactccaaggcagcaattcagttcagatctcactgcactgaggctactgaagcctcaggaccaggaatctgccttgtcagggtgactatggaccacagtcaaggcacagcaaagccggctttccaagccaaggctgcctcgccgggctcaccaaggtgctgcacgagccgacccgcgttctgacagaggcccacgcgccagggcggggcttaagcgagcctctttaaaagctcctggggcgggtcccgcccccacctggggggcttcacctcagcgg

SEQ ID NO: 36025 - DNA, 685 bp, Mus musculus
  source 1..685: mol_type = other DNA
gcactttgtttacatattaagaacccatccatcttttattttaaaagcagatgagaatcaaacatcttctttaaattaggaattttccctataatgaaaattttttatattaaacattgagattgaaatctgcttttgtctatgaggttgaaacacacacacatacacctctccgtctccctcacgagtgacgggaacagtcacaaatgggcgtgggcgcctcctccgtggggccgtcggggacccgcgcatgaagcctgcagccccgggaatgccgggtcgctcgcggccgaggcggggagagcatgaggggcccggccagcgtcggtccctcacggagaccagcggcgggggaggggctccatacccgggagcgaggttcatggcagccaccaggcacctacatgctgggtccgcaccgggggccgcatggaacggcctcccagggcctccccggccccggctccggcctcggcctcggcgccgggccgcgcttgagggccggttccggcgcggaggctcggagcaggccgcggcggttaaagatttgaaaacgcgtcacgcgaccgcggcgcccagacgcgctccccgcccttcctacgccggggccggcctcgcgcaggctccacctgccccgcctcgcgccccgcgggccccgcccccggatgctgaccacgcccccggc

SEQ ID NO: 36026 - DNA, 500 bp, Mus musculus
  source 1..500: mol_type = other DNA
ataggcccccattggacttgcaaactttatatgccccagtacaggggaaatgtaaatgagttaaatacctaagaaactggaaaaaaaaagttatgtttaataattccaattgaactgtaagaatttcagggtttagtacctaaaagttcaaaatattatatatttttaaataccattttacactgaaatactccatttactggtttgctttgttttgtttaataaaagaaataaaccaatctacctgaagaaaagcccctgcacgggggttctcttaccttttcaagagtgcttcaaagaagggaaatttactgacaggcaaggtctgtacccattgtttaattgtctgttagattatgcatagaatacgtcttttaacttagccaaatgcagaaggccaagtgcatatctacaaacacataactctatatatagacatgtgcatggccgtgtagaggagtcaagctgggctggttaacctccaggtcaaacgggcgtag

SEQ ID NO: 36027 - DNA, 529 bp, Mus musculus
  source 1..529: mol_type = other DNA
aaagctcttccaatcactaaactgtaatgagtgatacaagatttggaatgctttttcagtgtttgaactaacaacccttcaaatatttttttccaaaggtttttacaaatggcagaacagcaacttgttttcctcttcaggtaaatgatttgtttttacttcattaactcaagtagatttattaaaatatgtattggtctttctcatgaaatcattcctccttaaccatggccaatgaaagcggataaatggaaacagtgatgtaataacattgaacagattgctctgtgggaactaaagtacaggctttatggtaagccctgaataagagaaaaatcttcgaaaagggtttttcttcactaaataattaaaagattcattgtggtaaatgagacactatcttcctgtaagagtgccacaggtatttgaaaatgtacaggtgctcacagtctagctttggtgccaagtctgagtcagccatgactgcacacccacatgaaggatccatgcatttcctctgtgtaatgcc

SEQ ID NO: 36028 - DNA, 525 bp, Mus musculus
  source 1..525: mol_type = other DNA
ttaagattttaaagaccaagtaaaatctccatcttgttcaagaaggatacttcttgctatctgtggaaacagacatcttggtagaagaaacaggagtctccacccaggtggtcagtgcttcaatgtcattgagacaaggaactctgtctatctcaggttgacatttctcagccactgagttgcatctgattccagagttagaagttgaaaatactatgtactttgaaatatcatttctaccttgaaattgtataggactatcatccaagccaagaccatatatatatatatatatatatatatatatatatatatatatatatatatttcacagaaaaatttctaccagcctagaattacagaataagcaaggtccctggttgctttattaattatattagatgtgtactatccaggtatatacacttctgtatggacacttacctgaacacgtaaagacaagtctatgtaaaccacccaccaggctgattggctgccgggccttagggcggccgctgttaatcc

SEQ ID NO: 36029 - DNA, 541 bp, Mus musculus
  source 1..541: mol_type = other DNA
tgtactacccttttcagtggactaaaaatgagtgactgaaaaaaatcatactgatgtttcttattctaatttcacattattaaatgtaaagtttactttcactttgtacttaatactattaatatagctactaattcctattatcttagtttacaattttctatatataatgaacccactgaggtaagtttttaattactggcgacacgcagtccactatgataaaaatatattgagagtaactattttctcttagcaattacagtttcaatttttctaatttaagtataggtaagcaaccttaaaccatataactgtattgttcttgaattcacagaagcatccatctgtcacacacatctgaaggactgctccaagcagaggagttccgcggggaccggcagagctcactgccccacgggccgagaggaggaggagccccgccctgatgctcctggggccgggcctgggggtaactcaccccggggaatcccgggaagctgtgtcacccgcgtggaccgggtgctcggctctgggtccc

SEQ ID NO: 36030 - DNA, 459 bp, Mus musculus
  source 1..459: mol_type = other DNA
tcacataggccctaagagtaactttgcatcggtgccagtctgaaagatgcagcgttgggaatggagttagcttctctgaacaccgatgtcttcacttttgtgaaaaccaaaccaaaagtacgtgcttttttctctcgcacatgttccatgatgcatgtatgaaaatcagagaacaaagctctattcctgcagagacttgacaataaaatgaataatattttttaagtgtgtctcccccgtgtgggacaccagcgatattcctcatctccaaggagtttaagctgacgattctgggctggacctgcttaatcagactcgagccgacatgaaattacttccccagtgtgttctaaaagaaaactcactgccagaggaggcatcgagcaggcttatcggctgcagctggtgctgcgttgcgggctgctggcagctcgcccgggtgggcggccgcggagacgc

SEQ ID NO: 36031 - DNA, 507 bp, Mus musculus
  source 1..507: mol_type = other DNA
tataaattcttaaatttatatctaaagtagtataaatgcttggcctccttacgcagccacagggctgtgcccgagctcccgcagcatccggaaggaagctgctgtagctgcgttcccggggtctgcagcctaggacgccaccagagcccgagaacccggcgggggcgggaccagcaagcctcgacagcccaccccttccagcgcggggtgggaccctcgcggcttcccgtccaatcccgttccccgacgcgcacagggcgggaccctcgcggttttccgttctggtccggcctcaggacagcccagagcctgcaggccgggggccggctgctcgctctccttcccctcccacatggcgagggggtcgaaggtgcagtcgggctgtgcgcccaggcgccccgtctggcgcgggcgtggtgcccccccccccccccgagcatcttgctagagtgctagagtccccgcgggcaccggaaggttccctgtgccccttggtgatataaatct

SEQ ID NO: 36032 - DNA, 613 bp, Mus musculus
  source 1..613: mol_type = other DNA
aggatttcacagcagcttttaatatactaatttgaaatgaagtcattaaactgttgaataacttaactatgcaggagcaggtaaaatatttttccttccacgaaaacaaaacagaagtacaaataaaaagtgtatataagtttaaaattgtatcaatttatttcaggaggtaaatgaaaaaaagggctctaggacgtgctagctttttaaaaacgcaacttcttggatgataaaaatattcaggcaaggccaaagcttgaagcttgaccatcgctagagactgcaagggcttgccctagatctagggtagacaaaataaaatgtctcagtataaattcttaaatttatatctaaagtagtataaatgcttggcctccttacgcagccacagggctgtgcccgagctcccgcagcatccggaaggaagctgctgtagctgcgttcccggggtctgcagcctaggacgccaccagagcccgagaacccggcgggggcgggaccagcaagcctcgacagcccaccccttccagcgcggggtgggaccctcgcggcttcccgtccaatcccgttccccgacgcgcacagggcgggaccctcgcggttttccgttctg

SEQ ID NO: 36033 - DNA, 387 bp, Mus musculus
  source 1..387: mol_type = other DNA
aaggattacagcctagagcctcaaaaatattttttgttgaatgaaactgaatataagtaagtgaattaatttgtaggaccttttaatatgaatctttaaatagaacttttaatagaagtatatgtataatcgaactttcttgaatctagctaggtatcttcaaactctggcctgtggcacctcttattctgtgtgtaatacagaataaaacacgcatagtcgggttttaagacgccaaattcgagcaccgcgcagccgccaattgccaagaggcggagaaacgcttggcagcggggacccgcgcctcggtgggacgacccgcacctgcagcccaggcggcgcctctgcccgtgggattggctgcctgagtcgtgacgcgatctgggc

SEQ ID NO: 36034 - DNA, 671 bp, Mus musculus
  source 1..671: mol_type = other DNA
cccatcagcttgccgacgcagacggaagtgacgtcgggggtggcgcgcgggcccgccccccaggagaggcgggccgcagggggggtgctgggagggcgggggcggggcgcggcctcgcggctccgtttccggtgagctgcagcccatcctggttcttccaaagtgcggtccgggcctccgccgcagccgctccgcccagtgcggccgagccggccccttcgcgggccttggctgtcgccggctgggtgccgcgggcggggtcggagtccgggcttcgcttagccgccgcggcaggccccgcacgccgcgcccgcggtctccgtcgccggctcaagcggccgctggcggctggaactcccgagcgatccctggggcgcagcggcgagccggtggggggcgccgggacccctgggggtgggcccgagtcgcggaggacggcgccgggggccccgcgggcgtgtgcgtgctgggcggcggagctgccagcctggcttggctggggtgcactgagccccctcggctgcgtgggtggggtgggcagggcagtgggggcgggggtcgtcccaagcccaccatttcccctcgccagtcggactttctctttagagaccgcgcgggacgggcctggggtgcggggagagtcctggcccagccaactagtaattgtcagg

SEQ ID NO: 36035 - DNA, 309 bp, Mus musculus
  source 1..309: mol_type = other DNA
gaagacttctgttgactgctgaggaagagtcaacttccttcctcactgaagtacatctgggctacatgtgtgtacccagaaatacaccccaaatgcatctattcatgtatgaacctgattcttaaagataactttaaatgcatgctcgacggcgaccgtccgaccctatcgctcgctgcccatcagcttgccgacgcagacggaagtgacgtcgggggtggcgcgcgggcccgccccccaggagaggcgggccgcagggggggtgctgggagggcgggggcggggcgcggcctcgcggctccgtttccg

SEQ ID NO: 36036 - DNA, 517 bp, Mus musculus
  source 1..517: mol_type = other DNA
ctttaatctacttatgttgaataaaatgggctttgttttaataaagaaagtgtttttaattcatagacatatggttaattgttgacaaagataatataaatttggctcacataaattcttggtggattaaagaataaaaatacctgtttggctactcctaaactgtaagtggaagaaagtatatatatttgagtgaacgtagctgctgcagacatattcaggtcagcttttgtacaggataaatgctttcccagaagcaaaaaggtatacctaaatagcaggaagtaggtttggtaccacctgttatcattttcattaaatagatgagataaccgagctggtctagagaggagcgacactccggagtctctggtctctcgcgcggttggcagcgccaccgctccacgcgtgctgggctgggcctcagccgcagcccgcgccacctgctcccggctcccgcgtccccgccccacgtcccgcccccgcgccgcgcccgcgtcccacggtccctccctct

SEQ ID NO: 36037 - DNA, 405 bp, Mus musculus
  source 1..405: mol_type = other DNA
acaacgccttgcatagatagtggtgggttatgaatagagataatttctgtgtgtgtgtatgcaagcgtgcacatgttggcatgcatgtacactcaggttgatgttggatctcttcctcaagtatgaagtcctctgccatgaaagaaaaggagctgttactttgaattaatgaatcaatgtcttccagaattacaggtatacgttattaattaaaattgttttactctaactacaataagatggttaggtttgactgtaatttctcacctggtgggtttatatttttaatccaattgtcagatcctatagatggaatcaagaccaggctggcctccaactcagggattaaaggcgtgagccaccaagtcatcatgaaaaaggacaactgttctcttttaggagaaa

SEQ ID NO: 36038 - DNA, 496 bp, Mus musculus
  source 1..496: mol_type = other DNA
cctccccaggggttcgcaatgtgcagttgaaccgcgtgtggggcaaagttactaggaatgactgtaggtccctgcccaccgcgtgccgtgagccttagcagagcttcaaagttggagccactgtatgcattgcctaaggactgcaaaccttggggcagagaagctctcaaccccgccaggctttctctgcagctacacaggtccgtgcctctctgcctgagtcccagttagatgcgactaggaggagggcgcctgggctctaaagctcccctcccttctgctcctccttgactcggaggcctggatgctgggccaccgggcagtggtccagcgcgcagccgggcgggggcgggggcagggggcactgtgacaggaagcttcgcgcacaagttggccatttcaggggcaaaataagttctcccttggatttagaaaggacaaaggcagcaagctccctcttttgagccagagcttgggtgcaggctcaccgctgccg

SEQ ID NO: 36039 - DNA, 398 bp, Mus musculus
  source 1..398: mol_type = other DNA
agaagagactatctaagcacttccctagaatctttttccacctaagaaatttgggagaatgcgaaaaagcagcagcccagcattcttgaagaattccttcagaggtgctgcacaagcctccccaggggttcgcaatgtgcagttgaaccgcgtgtggggcaaagttactaggaatgactgtaggtccctgcccaccgcgtgccgtgagccttagcagagcttcaaagttggagccactgtatgcattgcctaaggactgcaaaccttggggcagagaagctctcaaccccgccaggctttctctgcagctacacaggtccgtgcctctctgcctgagtcccagttagatgcgactaggaggagggcgcctgggctctaaagctcccctcccttctgct

SEQ ID NO: 36040 - DNA, 171 bp, Mus musculus
  source 1..171: mol_type = other DNA
ggtgtcagtaccatgggatgatcgactcaaagatgttgagatctgaagactgctttgacatcagcttacagttaattaagttgaatgaatctcagagaccttgaagacttttaacattgttgcaactgttatagaaagttggactaaatgcattttgcattatgctatgtt

SEQ ID NO: 36041 - DNA, 229 bp, Mus musculus
  source 1..229: mol_type = other DNA
tctattctataaaggagggaaattcgctgagattgcattttaaaccccaagattgtactatattctgaaaataaaaaccctttttatagtgagggcagaaaggtcagaaatgtatttattagttattccattcgattacatctcacacacctggatgagggtgctgctttacaatgtacctggagctatagatccctccttatgttggttccaactgtcagttgctggc

SEQ ID NO: 36042 - DNA, 343 bp, Mus musculus
  source 1..343: mol_type = other DNA
ataaggagggatctatagctccaggtacattgtaaagcagcaccctcatccaggtgtgtgagatgtaatcgaatggaataactaataaatacatttaaatcgcacccagctgaccttcctgccctgttgaacttaaagaaaaaagggtttgtttttgttttcagaaaatagtacaatcttggggtttaaaatgcaagaagtcagtgaagttccctcctttatagaatagaaatcctgacaagtgttctggtattgaaacacatgaacatgtgcagggagtaaaggctgtagagatcctggagagttcttggcatctcctgtgatgtcaccagtgttgtaacaa

SEQ ID NO: 36043 - DNA, 274 bp, Mus musculus
  source 1..274: mol_type = other DNA
agctgaattaagtcatttttgaaggttgcatgggaaccttgaagctcctgtgttagcctgtgaattttgagaaattcatcaaagtaagctatttatacaggattttcttaactggggaatattactttccacaaaatatgcccgaagtttgtgctcatattccgtgtgtgtgtgtgtgtgtgtgagagagagagagacagagacagagacactgatcctgtctcaacccttcaggctccttccaaggcaattggaatttttaagtggcaattgg

SEQ ID NO: 36044 - DNA, 395 bp, Mus musculus
  source 1..395: mol_type = other DNA
ttagcctgtgaattttgagaaattcatcaaagtaagctatttatacaggattttcttaactggggaatattactttccacaaaatatgcccgaagtttgtgctcatattccgtgtgtgtgtgtgtgtgtgtgagagagagagagacagagacagagacactgatcctgtctcaacccttcaggctccttccaaggcaattggaatttttaagtggcaattggccaccctggacagcgcggccgagacagggaaggtttgctcgctctgagggattgccagcacatcacatcccctttttagaaagaaggagtctctcacttggagcaactggtgggtcactgtccgagagagaggcgctgcgctcgggggacaggagcgccccctgccttcccgc

SEQ ID NO: 36045 - DNA, 490 bp, Mus musculus
  source 1..490: mol_type = other DNA
atgtgtgtttttaaaatagatttataatataattcacgatgatatggaagtttcttacatatcaattatcatcacatcgtaacctttagtatcagttgttacgaaccatttaaataagaaaatggttctgatttttaaatgtaaattgtattcattatgattatttaatgcactttattgtcaaaaagcatggcatagaaaggtctgaagttttcataggttaacttaccccgtaggagcatgcagacatacttacaatgaacgcatccctgttgcagagtgtcagtctgtctgacagtgtaaatctccttaaggcaatttaattcagattaaaaagataaccttggcttgtgtagccagaataagggatctgtttcatattaatccttcattaatagttataatgaatattacacatatctctataacttcttttatcaaatttatcgttttccttactaaagagaacagaggcctgctgttttaatca

SEQ ID NO: 36046 - DNA, 784 bp, Mus musculus
  source 1..784: mol_type = other DNA
ctttaaggcctaaatttcaaggattacatggtttctgtttatgctgtatagacatactctatgcatatgacctgcatatgaccagctgtcaagagctgttctagcaagtgtctaggaccagctacctacaaaagtcttccctggcaggccagtttggagtactgccttctacgagaagaaacacaagctttctttatgaaatacaactttccaaagttcttcacggaataaacttaagaacattgtggaaatcaattctaaactttcctttgtacaaatgcatttaggagaagttattcctctgtggagaaaacaacctccagtaaaaatctcagtttgcttctggatattttcacgaaaggactcatggaaattaacattttcaagttataataaaaaagtcataaactttttttttgttaatcaaacacctatggcacatttactcacactaaattcccatagtcttttaagtttgttagtttcctagagtagaaagtagtaagtaaaataattctatgaaattatgtaaaataaatgactcactcttatttgtaattaagcttaaaatgaataagtaaaactttaatgtactttgaggtacctacaatagttaaatattttagaaggatgtgtccataagtatcttcacttccatcatgataaagactttcatatttatatattctcattcctaaattatacttcctatttagataatagtcaagtataataggagttagaaaaataatgttccacataaattgatatgtaatgtagtaag

SEQ ID NO: 36047 - DNA, 195 bp, Mus musculus
  source 1..195: mol_type = other DNA
gaagtgagaggtgctgccttgcagagtcagccactgctttccagaagctgcagtctttttaaaaccacacacacacgcacacgcacgcgcgcgcgcgcgcgcacacacacacacataggtagccaaattcaattttaaaaaaaaaaaatcgcagaggtaaataggggagtgggttgagctcgctcctctcccatt

SEQ ID NO: 36048 - DNA, 452 bp, Mus musculus
  source 1..452: mol_type = other DNA
ttatcgcaagggataaatccctacataatttagaactcagttaaacaatgttcctatttatatctaaaatggcctgatcagaactgatcacttcatatgtttgttttgtttttctttataagttaacaaagatagatgtttggggccatggctcagcacccaaaacctcagcatattcaaactggtgtgatttctattagtttttaatggctcatttgctgattgaagaaattttaaagtagacaaaccctggctttgaagtggaacattgtaagattaaaaaatgtcattcagaacacaacatgatgtgatcaccatgaccttgctcttagtcaagttattttctatgtcagtgattggcaggcatattacagcaacaatctatagccatactggtgggtataagcctcagcttgttcttggcatcccctgtgatgtcaccagtgttgtag

SEQ ID NO: 36049 - DNA, 437 bp, Mus musculus
  source 1..437: mol_type = other DNA
tggaaattagcttccaagtcagtttctcaggaagcaaaaaacaatctggcctggaattcacaatatagaccaggctagccttgatgaataaaccaatttatatttcattgcatattaaagtagcagactaaaaattatagatttggaattttctacataaagataataataaggatgaaccattgaagtttttaatctcagcagttaagaacacatatttctattgtgaaaaccgatttgagactcacaagacttttataagtacatatgtataaattttaaaaagaagacatttaaaacatttagcatttatttcttgaaatttaggcttgtgatttttatatattcagaaagagaaaccgagtcttgaaaaggacgaacaaaacacattgtttgttctttcgtggacataacatgagcccctgggcagcctctca

SEQ ID NO: 36050 - DNA, 583 bp, Mus musculus
  source 1..583: mol_type = other DNA
aatgacctaagttatctttttgttataatcatatcactttaagcacataattctgcagccattgctatatataaagaagaaaaagccatcatagcggatatcatttgtttacagctgtgagaccaaaccgctattacagcttactgctgtcttgaaataatacaattcatttccatgccagcagctcttggtttagtttttgaaactgcttgaaagtagattgaacagctgacctattgtgttaagtttacttacacaaacatggtgtcatgaaaataaactcttagagagtctctttcttaaatgtgagctgagatatgtttttgttttaggaaaatgaatatacggcagatttcttttttcatattaactcatttatgaaacgatggaaaagtgacattttacccctctggctcttgaaataccactttcctcaagagtcaaaagtaattgttggaaacagtgaacaaattaatttatttcaaagaggccacggctcagcctttcacatgcaggtcttcctggccccgccccgacagggtgaggacctgtctcccttgcctggcgggcgggtcagagccgg

SEQ ID NO: 36051 - DNA, 583 bp, Mus musculus
  source 1..583: mol_type = other DNA
ttagcttttgatctctttaagcttaaaagttgagacttaacactttataagaaaacattacatagcaaattttgagtttcagactcagcaataattggaataattactctagagacagctttgttgttaagcagctgtgtgattaacgagatttatctactgagatttttctctttttacatttgttaaattagaaataataaaatggatggacagaaaccatgacttagaagttttacataaaagcaaatttcaaaaaattttcccaatttactaatgtatcactttgaaaaagtcaacctaattttaaagctctctaagataaaggccatttcatctcatattgggaaattttctttaaaaactagacggataatctttcttaggaaattttataaatcctttcacagtcgcgaaaactcaggttgaggcatcctgctatatgcctgaaggaagtctacgcgcgatgcgacgcagggcgggtaggcgtggcggacatcacctgttcggggcggcgcacgcgcagtaccggcgcggcgagggggcggggcgcggggcggggccgtcggcgcggggctggccg

SEQ ID NO: 36052 - DNA, 305 bp, Mus musculus
  source 1..305: mol_type = other DNA
aatgaatataaataaacagaagaaaggtcttttttttgttttttgtttttttttctctgtatagccctggctgtcctggaactcactctgaggaccaggctgtcctcaaactcagaaatctgcggtctttaagttgaacaatgtgtgtcttttaaaaatgtattcattaatcattccattggattacatcgcctggttgaggatactccttcattgctttcaggaaggccattctctgctacaatgtatctggagctgtagatctaatgagttccctgagctcagtgtaatggttgagttgtggc

SEQ ID NO: 36053 - DNA, 260 bp, Mus musculus
  source 1..260: mol_type = other DNA
tgaatataactaaacagaaggaaggtctttttttgttttttgtttttttctctgtatagccctggctgtactaggcgtctttaagttgtaggaaggtcagcgtctttttaaaatgtatttattaatcattccattggattacatctcacatgcctggatgaggttgttgctttcagcaaggccattctctgctacaatgtatctggagctgtagatggagcactggctggtcctgccagcagttccctgagctcagtgta

SEQ ID NO: 36054 - DNA, 468 bp, Mus musculus
  source 1..468: mol_type = other DNA
ccaaaacttgagctatgtgtgtggtttgtggggccaatcatgaacccaaatacattgaatatattatttacttcatacagaatctcatctctcagagagggctgtaagcaatggtgagtttggtgcagtgaggaaagcccccacccctctgagggcctctcattggtggcaccaatatttcagtttcctctgccaacagatctctagactgttgtcagaagcatgatgactgcatgatgaaactgtaactggccctgcaggctcagcctggatgagatttcatgctaatggttcatattgctgatgaggaaaatttagatacataggaattacttaggtgttgccaaaagcctagagcaaaccctggctttggtcaacttcctgtcagtacagcccttcctggacattctattgtctcctggagagttcttagcaacctctgtgatgtcaccagtgttgtagtgacaa

SEQ ID NO: 36055 - DNA, 371 bp, Mus musculus
  source 1..371: mol_type = other DNA
gtctttataccttaacaaagatcgattttgggggccctatttcaacccccaaaacttgagctatgtgtggggccaatcatgaacccaaatgcaatgttgaatatattatttacttcatacagaatctatctctcagaggggtgagtttggtgcagtgaggaaagccccccccactccccacccatctgagggcctctcattggtggctccacctctgccaacagatctctagactgttgtcagaagcatgatgactgcatgatgactgcatcatctggccctgcaggctcagcctggatgagatttcatgttagatacataggaattacttaggtgttgccaatcaagcctagagcaaaccctggctttgg

SEQ ID NO: 36056 - DNA, 376 bp, Mus musculus
  source 1..376: mol_type = other DNA
cccaaaacttgagctatggtgtgtggtttgtggggccaatcatgaacccaaatacattgaatatactatttacttcatacagaatctctcagagactgggtgagtttgctgcagtgaggaaagccctgagggcctctcattggtggctccaatatttcagtttcctctgccaacagatctctagactgttgtcagaagcatgatgactgcatgatgagcaactggccctgcaggcacagcctggatgagatttctaggaattacttaggtgttgccagcctagagcaaaccctggcttgggcagctcagcttcctgtcagtatctcctggagagttcttagcaacctctgtgatgtcaccagtgttgtagtgacaa

SEQ ID NO: 36057 - DNA, 546 bp, Mus musculus
  source 1..546: mol_type = other DNA
cccagagtggaggtaaaaccagccacatttcagatgcaatttgcagagggcctgatgttaacctccgctctgtgttcacactgagaaagtgaattcagcagagcttgttcacaaagcagtccaaaaattttcaaccagttggaaggttgcttgctaagatgttgccaaacgccaggtaaaccaagtctacttgtacgtgggttagagccctgtcaaaggccctataagcacgccccgtagatacgcgcggccggccggtggtccctcggggagcacctacgggctccgtccgctcggcctccgcacgccccgcggcgggagcaggcgacggcgactttgggagttcctccctgccttgtacggagggctgcgcccgggccgtccccgcccggctctgacgcccggccctccacagccgcctccccgagacccgcccggggaaggcagccggagccccgctccggccacccccatccccgcagccgccgcgtccccgcgccgccccctccgcccccgccctctcctcggcgaccgcggataaatcag

SEQ ID NO: 36058 - DNA, 319 bp, Mus musculus
  source 1..319: mol_type = other DNA
ctcaagtgaaagtcttagtgcatacatactgacgtgtgaacatgtgtaactgtacacaaggtcagaaagaccattatctatttgcttgtcagggagatgcaaagtgccatgtcgaaacatttaggaaagctgccatgctgagcccactagactgggcaattttctggcctgaaaacgggatcagtgtactgcaagctcgcagactatgagctagatagatatgtaaacacatgcattttcctctcccttccctagggagctccagcttccaaattgcagctggcctcgggccaggtgaccacagtcttaccgtaaaagc

SEQ ID NO: 36059 - DNA, 464 bp, Mus musculus
  source 1..464: mol_type = other DNA
ctcaacccccaaaacatcaatcaacttagggtctgcatttaatgaatcattcatgtttgactgttttgtgtggttggtggatccaaacatgaacccaaatactgttgaatatattatttacttcatacagaatctcatggtatctctcagagagggctgtaattggtgcagtgaggaaagcctcccccccccacacacacacacacaatctgagggcctctcattggtggctccaatatttcagtttcctctgccaacagatctctagactgttgtcagaagcatgatgactgcatgatgacaactggccctgcaggctcagcctggatgagatttcatgatattcgtactggtatgacttctcagttaggaattacttaggtgttgggcagctcagcttcctgtcagtacaacttctgtgatgtcacaagtttttagtgacaacaagctcactgagatttccc

SEQ ID NO: 36060 - DNA, 477 bp, Mus musculus
  source 1..477: mol_type = other DNA
ttttaagccgtttacaaggagtgaaagtcttttcttttgatgttcaatcatttaattcaagtctcaaaacaaaaacgtgaaaattcttacaacttctgttttgggataccgtagttactctcgcccgtttaaaacggtaactctttgccttaaaaggatgcaggtcctaaacgcatgcttttcaagaggcgcgcatagcaaaactggctgagcgcgctcagcgactgttcactgccaaaggcagcgctacggagaagagtctagcctgcagcagagccttcccgcgcccaggccagcctgtgctccgccctcaggctcgctgccacccgcggccaggcgctccctgggtggggcggcggcccgtgcagatgcggcgggccacgcggggccgctgctgcagccggctgggcggtgcgcccgggcagcctcagccgcgcgccgcgtcgctgtaatcggacaccgagcgctcgcccccgg

SEQ ID NO: 36061 - DNA, 288 bp, Mus musculus
  source 1..288: mol_type = other DNA
atggcttatccctgagctaccttagaatattcttcccattgtagatctaaatatatttaggctattttttttataagcatatcaccatcctcttgaaatttcagctaaattagaacaatgggccatttaaatttgtttgtcatccctgttgattgacaagagtttccaattgttttccaaattatgaatctgaaagtcttcaggttctaggtagtatagaaaaacactcttctctgcactttattcaccagaaatagaaaagcatctgacattgaattttttaaagct

SEQ ID NO: 36062 - DNA, 272 bp, Mus musculus
  source 1..272: mol_type = other DNA
tgtgaatgtatgcaatgcacaaaaggagcagtcgtgctgttccaaagctgcaggatctctatgacacagacaacaggagaggagtcctggagaggatccagtattaccccggcatgctagagctcccacgatgagatgagatattttctctgctttttgaacctcacaaagaatcaataaaattttttttaattttatgattataatgtcctatgtattgctaaacatcagaaacttcactgctgcactagagtgtcaatcaaactctgtaa

SEQ ID NO: 36063 - DNA, 312 bp, Mus musculus
  source 1..312: mol_type = other DNA
gtcaaagtagttaaataaatatattggtgttatcccctgggaaacctcatgaggctaagaaggagtttatggcttatccctgagctaccttagaatattcttcccattgtagatctaaatatatttaggctattttttttataagcatatcaccatcctcttgaaatttcagctaaattagaacaatgggccatttaaatttgtttgtcatccctgttgattgacaagagtttccaattgttttccaaattatgaatctgaaagtcttcaggttctaggtagtatagaaaaacactcttctctgcactttat

SEQ ID NO: 36064 - DNA, 393 bp, Mus musculus
  source 1..393: mol_type = other DNA
tgtgtagatcaacagctcactactggcacaggatttaaaacaattctttgattctttgtcaaacgtttctgtcggattaggaagaaattccttagaaatgtgttcccttatttggcaaccccaagaccccaattcctggctgcaggctccgggcatgctcaaatgccccgcagtggtctccaaagcgtgggagggggttagtgagctcccaggcggagctggagaagtcagcggccgcacggggcacctcgtggggggacctgcggctcggcgatcacgcgggcgcgcggcggtcggagggggcgctgtccgacggcacgtgcgcgggcgggcgtgagcgcgcgctgggagtggtcgcggggcgggcaggggcggggccgcggcggcgcgcgg

SEQ ID NO: 36065 - DNA, 350 bp, Mus musculus
  source 1..350: mol_type = other DNA
tcactttcccagtcattttgtatctgaaacagttggtcagtaggctccctgttgtctaccaagagtgtttagcagacagtggccacacacttgggcactttccctcccagggatggcatagggccagggccagggatggcatagggaggaggggcccactaccactgatccattaagttacctgttataaataggaaacaaattagtgattttctcttgttattaacattgaaaagtttaattacatttcattatactatgctagctaggctcaatctctaggagtttttttgtaatgtaaatgtgcccgtgtggatattaaaactcacacatccctttcccagagggaa

SEQ ID NO: 36066 - DNA, 386 bp, Mus musculus
  source 1..386: mol_type = other DNA
gttgtcaatgacagagaatttgtaatcctaacacaagtgatgccaggacccctttaagaaagtctctaagaagattttgcttctagatttctgaagttagaaaaggaaatatttttttccttctaaacaagtttttttttctttcctagaaatttcattccaaaaacattagaatacaaacatttttatctactcctttcctggctgcgatagaagtacttacttaatgtgagtaaataaaattgctattaatcacatttggagaatctctgtggttaacaaaaacaattgtttatgaaaagggcagatttaagatgaaaatgccgcttctatgaggttaacttggcaacattctagttgattttaataaaaatagctgctttgag

SEQ ID NO: 36067 - DNA, 464 bp, Mus musculus
  source 1..464: mol_type = other DNA
cttggggtaagaaaattccagggaaatgttattgttatatatacttttttggaaagtcaacatagttgcttggaaggcaacagagtaaatcctcaatggccttaaagctaggctttctagaatcagtttatcttaaaaaaaaaaaaaaaaatcaaagacaatgattttcttttcgggcaagaaagcaatgatagttttcagatgaatcaacttattaggcaattgctgagaactatggaggactcagatccatccctgtggggacggaaccccggggtgcggctggctgccctctgggcggggcccttgagagcagccgcctggctgccagcccgggtccccggcatgggggtgggggagttagctggagcgcggggacgcggcgcgccctaacgcctgagacgaaccccacgcctggagtgctgccgctgccgccgccccaggcctgccggaagtaggcgtct

SEQ ID NO: 36068 - DNA, 637 bp, Mus musculus
  source 1..637: mol_type = other DNA
aaagcaaaactgtaaataatatttggttgcattttataaacaggcaatggaataaaacgccactttccaggtcctggactgtttgcatgtatgaaaaaaatttttaaaaataatttagggtaccagatgaattcaagccatgtttttaagttagtaaattacatagatgaggtctgtaattgaggatccttgtaatttctaaaattataatgtaaagcgagttcttatcatttacttaaatagttatactcatctaatgatttattatttgaccacatttgtattttaatcaaaattaaacatatatcaatgatggagtaatggagaatatttaaacttttttaaaagtttgctttaagtatagaaaaaaaacgctctaattctcaaagctctttgttttgttttgtttttaaacaataactctaatttcctgaaataatattgtgggttcctattataaaatcaggataaatatactgccaaattaaatttaaagtttaaaaattcaactgtataatcagataaatgtatatataaccaatggtaatcaaatctctatttagctttcctttttagagtacagctgtatatggatacagcctatagtgtcattatataaagtgatttttttttttag

SEQ ID NO: 36069 - DNA, 462 bp, Mus musculus
  source 1..462: mol_type = other DNA
aggtgttttttgcaagacgccgtcgtgcaaacgcgcccgcacgcagcatgagtgccgagctcccgactcacctggtagagcggctggccggagagccgagacagccgcagctgaggccctccgcacctcaaggttccgcacatccggggctgttcccgccgcccttggcctatcccggagagcagagcgaacggcgttcggcgctcccgccagtaactgactgccctccgttttagagcgataaaaaagggaggcaatgaccgcgccccctgggcccgccccacgcccgccgtcgggcccgccctcgctcgccgggaccctcccacccctctcgcccggtcccgtaacctgcgggctgcggcgcagactccgtggtcatgcgaggagccgcggaggaggcggggcgtcccgggaggcggagcgcggtgcgggcggcgcgagcggcgcgagggtggaggcagc

SEQ ID NO: 36070 - DNA, 893 bp, Mus musculus
  source 1..893: mol_type = other DNA
gcccctccgcggtcgctgtaggagccgcaactcccgtgcgccggagctgcgggagcagcagctgcccttccgcgcgggcagtgcctgcacgcagggcgaccgctccgcgagcccgcgcgcgcctcgggccgctagaggacctcgcgtgggccccggcccggccacccgccgcccccacacgccctctggggaccgcgcgaccccaagccagaggagcgcaggggcgcgcgcgcccacaccgcgccgagctccggcccgcagccgccgcgccccggcgaagggagggggccgcggccgagcggggcccgcaggtgcccgtggcagggggcgccacggcgaccacgaagcccgcgcccccatcccgcccgccgctccgccgcccggtccgcacagccctgggatcctgtcagagtgcggcgacctccacatggcccgccgagcatggagctgtggcgcctaccgtagccgccggcgccgcgccgctgggaagcggctaggagacgcgcagagtcgcgaaggctagtgccgccgctggagcccaaagagctacagccccgccgccggcggcgcgctgcctccaccctcgcgccgctcgcgccgcccgcaccgcgctccgcctcccgggacgccccgcctcctccgcggctcctcgcatgaccacggagtctgcgccgcagcccgcaggttacgggaccgggcgagaggggtgggagggtcccggcgagcgagggcgggcccgacggcgggcgtggggcgggcccagggggcgcggtcattgcctcccttttttatcgctctaaaacggagggcagtcagttactggcgggagcgccgaacgccgttcgctctgctctccgggataggccaagggcggcgggaacagccccggatgt

SEQ ID NO: 36071 - DNA, 406 bp, Mus musculus
  source 1..406: mol_type = other DNA
actcacttctgcagagaactcaggctgcagcattttataacttaaatcttatatttaaccactgcaacatagagatttaaaatactaaccttttcctaaggcaactcctaggagcattgtgaatgatgaacttttctattcagataatttttcaagatctaaggtaccattagatcagcagtgacaatgacaacgtatatttatataacctcgtgatcacctattagtcagatctctacatatccacagatgactagaacattttaaagactctgctagcttacattaaaaagacgtcaaaacatccgattttatcatttgctgaacgagaaagattggtgccctgcgcacgacctcatcgggatgaaacatcctggtccccgtggtccctgggagcttccagctt

SEQ ID NO: 36072 - DNA, 438 bp, Mus musculus
  source 1..438: mol_type = other DNA
ttgcagtttcctgaaaggcaactgttagctgcggaaagtaacctgagctaatatgatcatgtgttatctttacattctaatctcacaaaagatctaagactttaaggcatgctcttgtctaaagccttatcttttgagataaaaatcaaggagcgctgactctgaaatacagaactctatttaaagaataattaaagtgaaaacctttagcactcaagctcaatttaaagcctccaaacggtgggtgatttttatctctgcagaaactctcttttaaagtacgaacttttacgaccttagttaaaataaggcacgacaaattttctccgagacgagattcggggctcccgagcgacggtcgggagatcctcccttctcaggcgcccaatgggagctcggcctggacctaggcaccccgccccgcgcccccgctccggg

SEQ ID NO: 36073 - DNA, 573 bp, Mus musculus
  source 1..573: mol_type = other DNA
acatggaaaggacagattctttctattctacgaaagaatgtcacccattcaactaaccgtgagaatttaaagataggaagcaatattgtcttcctcttggcaattgcgaagagtaaaccctttcactctggaaactattggctcaaagccttgggagaccctcaccaaggcattcgtaaagcgaaggcgggcactcctgcaggcgggtcttgtagtcccagcccgcggccggcagtagcgctgaagcacttcagctgggcttggccgggcttccagacgtaggacgtccaccagaagccgcagcgagcggcgagcgccctaggagagggccacgccccggaagcggcttccagccactcagagcgggcgggggcgggcccgggcgggcgtgcgggggcggctgggtcttcgctctggggcggggccgccgtacgagcccgcgcgtctgggtggcggcgggggcgcgcccgtggggagaggcggctgcggctgccgtgttcctgaggcggcggcgtctcggactgaggctgggggttggggccggcgctagcccgcggctcgcctcgtagtagg

SEQ ID NO: 36074 - DNA, 261 bp, Mus musculus
  source 1..261: mol_type = other DNA
agttaccaggcaccagcactgggtctttcagttttagcaacagtaattacctgctgtagtttaacagcaccctgtagttccctgctgctgtttattacctaaacacctcgagtctcctcaggtgacctggccctgccacagttccctgccagcgccagcggcaggggaggcgttgtctctggggtagggagaagtgctccccggcgtaggcctggaaggggcggtgctcgggatcctcggggctggaccgcccagaaccct

SEQ ID NO: 36075 - DNA, 474 bp, Mus musculus
  source 1..474: mol_type = other DNA
tagataaagatgagccaagtctcaagtttctttagaaatgtctttattttataataaaaaggcagtggctatttaagcacaagcaatgttttaagttttgtttctcaagtaggcagaaaagcatgaaaattataggaataatgagacaattcaatatttgacttctgtgaccagaagttaatgtcaaagtaggaaaactacttaaaaatatctggtgaaatattgattaatctctaatgccttatgaatatctcgtaactacaaagtacatatctgttcaactaccaaaacttactttatagtttattagccatgtggagtaaaagcctttactttttaaatttcaaaaggtattctatattgtttgtccataacccaacagtattggctaatgctgtgggcatagcttaacccatgaagtgtttgctatgcaagcactggccagccctagcgacagttgattccactggatcc

SEQ ID NO: 36076 - DNA, 312 bp, Mus musculus
  source 1..312: mol_type = other DNA
agagagatcaggagttcaaggccagcctgagctaccagagaaagaatttgggtttatctgtgtcagttacgctgaaataatttttaagtaataaaatcccttttaataagaaaccttatgaggtaaaacagccgtattcttttaagtacttaagcactagtggaccaagtatataatatggtatcttttgggcactggtattacaactgttttttaaacaaaagactttccttgtgctttactaaaaacccagaatcttgaatacaatgcgtggcacccacggcaggcatgtcaggcggggctattaaagcg

SEQ ID NO: 36077 - DNA, 301 bp, Mus musculus
  source 1..301: mol_type = other DNA
attgtttcatttgataaatgtggtaaaaacgaaatagtgtcatcattttagttaagaaagagccagaattctaacactttttcttttccttttgacagggtttctctgtatagcccaggctgtcctggaactcactctgtagaccaggctggcctcgatgggagttcccttaaaggacagagatctctattcccagggaatccacattagtttggtgacctttggttctctacctaaagaaagtattcctaactttgcaaagtaacccactgtctcctggttcacagttaccagaacacct

SEQ ID NO: 36078 - DNA, 480 bp, Mus musculus
  source 1..480: mol_type = other DNA
attaaacactattagttttgtgacgcgttcacctccaccgacgcctgggggtcgatgtcgtccgacagaattgccgatcagcatcactgacctgcaggctgtccaggccgcgcgccacgtgctccacgccgcacaccgccacctgcacgcggtcgccatccgggtgcgcaaggggatccaggggcctcacggccaggtggcaagggagccgcgccctctcagagccccacgcgccaggccggccccagagtcatcgggcgctgatccctgccgctgcgccccactggagccgcaagtccgagccccgagagctccgaccaaggcgcccgcccgcactcgggacgcgcaaggagggaggcggccgacttggctcgctggtcccgggaccacaagaaccacgagctgcctcgcttaacgccttataggaaagttaaaacttcaaagagaggtgttctggtaactgtgaaccaggagacagtg

SEQ ID NO: 36079 - DNA, 300 bp, Mus musculus
  source 1..300: mol_type = other DNA
atgttcagggaaccagctgcataagaattccttgccccgtggtgtccgcctccaggtgcttatcatgtgggtttttaagagtttggcaactacagctagctggttgtggttagacatttattttaaccagctctcattatgaagaacatagtatactactgaagacatcaatactatggaaactataggccatatctcacatctttgtaatatttaggatatgtatgtaatgcagttttaaacatttaaggttgatgtgacgcgcctgtggacagaagccaggcgcctgctgtggccatg

SEQ ID NO: 36080 - DNA, 448 bp, Mus musculus
  source 1..448: mol_type = other DNA
agctcttattttaaacaaagaagtgcgggtgtctagggcacctccaacccagcctggcctgaggtgggtccggagccccgaaccagtccacctgccgggcagcccatcgcctcacctgcggatcgcgaagggcgcagtcggcgaccgcctcgccgcggtccccgagtcagccggtagatacagtagcaggcgccggcgcccaggaccagccctgctgccacccagcccacgtcccgcgcgccacccatgctgctgcctcggagctgcagggagccgaggagccagggccacacgcaggtgcagctgggccagaaccagcagctccgccttccggaagccgccctgctaaaatcggaagccctcccaccctgtgtggcggttcctcaggcgggatgcccctagtgcaagcagctttttcctggaccaagaccgggactgcggcgcgttg

SEQ ID NO: 36081 - DNA, 228 bp, Mus musculus
  source 1..228: mol_type = other DNA
gcaggtgactcttcttccctcctgctaacaacgaggcggggcgaagccgcgcccactgtgtgagaggctatgtgcagtacctcacagatttgagggcgtagtgaagcaacgcgccgcagtcccggtcttggtccaggaaaaagctgcttgcactaggggcatcccgcctgaggaaccgccacacagggtgggagggcttccgattttagcagggcggcttccggaagg

SEQ ID NO: 36082 - DNA, 578 bp, Mus musculus
  source 1..578: mol_type = other DNA
ttcaagagtatttaaactgtcagcctatctatttacctttgcaagttatctcttgaaataatttcaaccagttaagaatttcagaattgtaattttatgttttgatcttatcctgagatttcaaaaagccagacatttagaacattagctgacataatttaaaatgtaactgagtacacaaggtagtggagccatttatactcagtactcactatatataatcagtgtctgagtgggccacgacaggcactggtcagagagctgctcgaagatggcctcgaggcctctgcgcctctgtcctccggggcagcaggcagggggtggctcccggtatgacccggctgcagcctgggaccgcatggtcagagacgaccgccaccaaagatggggaggcggcgcgtgctgaggcgctgcgtcctcagcggagcgtagagcggctgggcccgcagagccgaggccctcaggcgaggagacgcgacgcagcgcgcgcctgcctgcgctccgcgcaaggtgagcccgccccttcggcatggccccgcccacatacagcgcgccgccttcccgggaacctgagcgcc

SEQ ID NO: 36083 - DNA, 489 bp, Mus musculus
  source 1..489: mol_type = other DNA
ctgctgctcactattatgtttaaaaagaaagtttgaccggatgttgaaaaaaaaaatctgtttacactgttggtgtaaaatactgcagtgctgaaaataactaaaataaaatctatataaactagttatcctactgctaaatatcaaatgccaaaaagttggaaataggatttcaaagagatccgtgtacagccctatttatagctgcattggttatgggaatatagtattatttggccttaaaaaaataaattctgtgaccattatactagtgaatcacatagagacaatgttataatatataacattattaatataacaatacaatgatatatagttatatgattccacttttatgagagtgagtgaagttctttttcaaaattatttcctccgtcttgcgaactgatgcgtctaggaactgttccttcgcggccgcgcgcattggcgcgaggccgtgggggtggggttggcggccgcgccgtgcga

SEQ ID NO: 36084 - DNA, 343 bp, Mus musculus
  source 1..343: mol_type = other DNA
acttctaaagttacagcgcacactctttagtgttaaacagcctgttaggcagccaatacctcagttcccactgtaaaattagcaaaaggggcttgcaggcagctcagcgggtaaagtcacttgcagtgcaagcctgtccacctgataagttaaataaaaagctttaattttaaaaagtgcttgctattttacaattggctaaagtggctatttgacaaattttaacattaaatcatggtaacagaatgtaagattatgtttgcaaaggtattcctatggaatagaattattcctgctgccgccacagggtggagccagcctctagttctggggcctggagtca

SEQ ID NO: 36085 - DNA, 494 bp, Mus musculus
  source 1..494: mol_type = other DNA
gggaaacatttaaaaattatattcaacaagtgcctaatgtagatcattaaagcgtgcagataaaccaaaacccctacagcgtttacaaggctttgtatctctcccggcacgcgggtgcgtgcagcggggtcgctccgccgtgggcaggttcagcccgctccgtgagtcagcagcctcacaggggctcgtcacagtcccccgagtcccggagcagattgccggggctggggcaggggcgcccgaggcagggcgtgggtgatggcggtgccctggccctccgcggcgctcggcaggagcagcatgctggttggggctggtcccgcggacgccgcggctcacggccggcaggcagggccctccgcgtccgcactacctgtggtctgagcctcgcgcctaggctttacgccccggagccggcgcatggagagcacttccgggatggggctcgcacggcgcggccgccaaccccacccccacggcctcgcgccaatgcg

SEQ ID NO: 36086 - DNA, 407 bp, Mus musculus
  source 1..407: mol_type = other DNA
cagcaactgatgctctttcagctttaaggaagcatttctgatgaaccaatcataagctttgctaagccatacaagcagagctggctgtgcattgtggatgctggcattagccagggcttgcaaatcctagctgttgggagttctttgtaccaaataacatggtaatctgtaattggctgatgcccgagtcaactaatgattatacttatttcatttacataataccaaaccacactttctttttatttatttatttattttaattaggtattttttttatttacatttcaaaacggcatgagagctgactgtcagcccagtcacgcatcttagaaagttctagatgggaagccggaatcccgggctgcgaggcgaggcggggcggtctcgagttacagctccaccac

SEQ ID NO: 36087 - DNA, 581 bp, Mus musculus
  source 1..581: mol_type = other DNA
acaagcaaggcttattttgaatgcattaaaacctgagtcctgcgtgagatagacagtggtcatgcatgacatgtagaagtacagcctggctgccactgaagacccgggccggggcagcgacggggccgcgaggcctgactggaaagggctcgcgcgcgcggggcaccgtcgcggttggggccactgacgggagggtccccaggacaagcgctggccgtggggactggggggcggcgggccccgaggggcgagggttgcagccggcgacaaagaacagcgcggtccccgccgccctcggcttccccgcgcgtcctcgcagaacgggcagccgtgagcccggggctccggttccccggggcagcccgtcggtctctggccgctctcgttcgcgcagcggccgagcagccctgcccttccgggcggagcgggccgtgggcgggaggcgcgcgtgtgctccgggcacagcccgaggtgcgggcaagcccgagggggcggggacgggcgcgggggcgggggcgcggctgggacacgtgtggcggcggcgggggagggggcggcgcccggggctttaagaaggtgcg

SEQ ID NO: 36088 - DNA, 554 bp, Mus musculus
  source 1..554: mol_type = other DNA
actaagttggccttcagcctaaaggctaggaagtagggaactgctgttaacccatcatttatgaaattcgtgctaggaagaaaaagaaatacaaattattctattacataattactcttttctaacattcttaattattgttggacctaaatatttgttttttaaaaacatttataagattctggagcataatgattgtggtgtcctgtgaacaggaaaccttcaaaagatcctgtcccatgatcatcctccagagtattcagcggatttttacgctgctgaaagaactcagacacctggtgagcgaacattttgtgtgtgcacacacacatcacatacaatatatgtgtgtgcatatctgttagaaaattttaagacaagcttctagctgagaatatgtgtcagaaatttatctgataagaaaatcgtatattcattgttagttatacctttccgttattatatgactggttcccttttagaaagcttcagtgaaggcactgagggagactcacaaacttcagttaatatttaatacttcatctctgtggtta

SEQ ID NO: 36089 - DNA, 397 bp, Mus musculus
  source 1..397: mol_type = other DNA
gcggcccgacgcggcctctccgccgaggcgtggagacgtcacgctagaggccgcgagttcatccatccgccgacggttggtgacagcagggacggggacgacccccctcccatcacttcagccccctccccccggcctggcctgccagctcagggtgagcccggtcggtcactcgacgcccactagtggctgaggaggctccagtgcgcaggcggagctggcgagtcccgcgctgtctcgatggaggagcgagggggtaaaagctgccgttgccgctgccggtgcagtcgctgccgccgcctcctatagcaccggggaaggattccccgccgcgggacagtgtgctgggcggggagggtcggcagccaatcggccctcatgctgcagcagcgggtgg

SEQ ID NO: 36090 - DNA, 526 bp, Mus musculus
  source 1..526: mol_type = other DNA
caggtagtaattcaaacttgtacaaccactttggaacattacctccacaggcagttgtattgttcaataatacataatgggtttatgaaatctatgtgtagcagacactgcgtacattatcttttattcttaaaaatactctactatagtccttatgttctatataaggaagtttataaataacaacatctcaaaattcagaaaaagttgagtcaatgtttccagaccaaattttttgtgcaaggacaacgttaattttactcaagcttgcaaagacaaacaaatgattttatttagttagttccgccagaggaaaaccaatttttttttaaagaatactcgtttcacagaaggtgggcggtgaggtgcccccaggtcgcccttcagcttgtggggtttcaggctggaaagctcaggccagagtgggaagcgataaccacttgactagagcggcccacgttgtcgcgcggctccctgacgtcactcgaccgcgctggctccgcccccagcccaggcttccggccgg

SEQ ID NO: 36091 - DNA, 437 bp, Mus musculus
  source 1..437: mol_type = other DNA
aaggaagactaaatggctatttgtatttgctcatctcccagataagatccaagtgcaatcaattctaattaatgagcagcctgtgttcacttcagaggctaacctctcccctcgcgagacttctcctggcttttataattctagaaaagctgaaggattttaaaggctttagtagcagcaacttgcagtagctatttggggctcacataatccacctgtagagcaggccagctaataggcacctcgggggcatttgggaagcagtctgactacagtggacacttgggcctctcgacagaggaccatgctcctgcagagcagttggcctccggtcagccctgcgccactcaggcgtggttcacgtagaacaaccgcaagctttccggccggaagcctgggctgggggcggagccagcgcggtcgagtgacgtcaggga

SEQ ID NO: 36092 - DNA, 443 bp, Mus musculus
  source 1..443: mol_type = other DNA
actgacctgtgatccgggcgaggttctcagcgctcggtcgacccccgacgacagccactgcggtcgccagcggacgaggagacgctgaggctgctccgagtgtctatgccccaaatggcggcggcgacggcggcggcggcggcggcagcggcggcggcggcggcggcaagcgcacggggcccgcccgccccgctccgcaggggcaggggggaggggacgaagctgggctgcggcccgacgcggcctctccgccgaggcgtggagacgtcacgctagaggccgcgagttcatccatccgccgacggttggtgacagcagggacggggacgacccccctcccatcacttcagccccctccccccggcctggcctgccagctcagggtgagcccggtcggtcactcgacgcccactagtggctgaggaggctccagtgcgcaggcg

SEQ ID NO: 36093 - DNA, 454 bp, Mus musculus
  source 1..454: mol_type = other DNA
cccgcccagcacactgtcccgcggcggggaatccttccccggtgctataggaggcggcggcagcgactgcaccggcagcggcaacggcagcttttaccccctcgctcctccatcgagacagcgcgggactcgccagctccgcctgcgcactggagcctcctcagccactagtgggcgtcgagtgaccgaccgggctcaccctgagctggcaggccaggccggggggagggggctgaagtgatgggaggggggtcgtccccgtccctgctgtcaccaaccgtcggcggatggatgaactcgcggcctctagcgtgacgtctccacgcctcggcggagaggccgcgtcgggccgcagcccagcttcgtcccctcccccctgcccctgcggagcggggcgggcgggccccgtgcgcttgccgccgccgccgccgccgctgccgccgccgccgccgcc

SEQ ID NO: 36094 - DNA, 445 bp, Mus musculus
  source 1..445: mol_type = other DNA
taccctctccggagaggatgaggagcggtctctctcctacaaagagagatgcccaacttctctctgtgcagctggaggaggggagagctggcagctcgcgggacctctccgtccttcctcaccccggaggcctgaatccgctaccagggaggagggcgccccctccctaactcgacgtggccccagcacaggcgcctggggttcagtgtggacgcccggctcccgaaggacagcgaccctcactgacctgtgatccgggcgaggttctcagcgctcggtcgacccccgacgacagccactgcggtcgccagcggacgaggagacgctgaggctgctccgagtgtctatgccccaaatggcggcggcgacggcggcggcggcggcggcagcggcggcggcggcggcggcaagcgcacggggcccgcccgccccgctccgcaggggc

SEQ ID NO: 36095 - DNA, 622 bp, Mus musculus
  source 1..622: mol_type = other DNA
ttatatttttcatattttaattttattaatgtagtcagcattttaaaacattgttttatttctaggaaatacacacttatgtgtgcataattctgagaccttatagcttttcaatgattacagttttaattttagtatgtggactttttattataaacagatactgtaattaaagaaatatagttagaatactttttaggactagacaaaacagcgtttcccacgaagtaagaacccggggctttactcagcagagacagccctggttccagcaaccatcttttaattaaattgaagttgcagttacatttctgatgtaggtggcgttgccagtccttcctgaaaggacaagaatatctgaagtctcttccaatttcattaaaaacaatcaggaaattataacattttgatcattgaattggttaatatttcattcttaagtgacagaaatgattcactgagccatatttcattgagaatgaaacattttaatttaggcttctcaaattatttagtatattgagttgttcaatttgaaaccctttaataaaacccgttctaccttaaaaaaaaaggacacccctctgcttaaaagaagtggtacttcctgctttcataaaca

SEQ ID NO: 36096 - DNA, 457 bp, Mus musculus
  source 1..457: mol_type = other DNA
tcaaattgacaacactaatcatcacatatgcaaacctcacatatgtaaatacaaagatctgaaataacaggattttgtttgttttggtctctgtatagccctggctgtcctgaccaggctggcctgcccaggtttttgtttgtttgtttaaaaaaaaccaaaacaacagggtcttacctaggccatgtttacctgggtcttgatttattttattatattttattttaccctgagttgaaatctggcaaaatattagacctgcttgaagcatgagaagaaaaatatattttatttttctttacgccaaattgaagaccacaattaacaactaataaggtagtctctggcaagtcacttcccaggcgccgatgggcggagcgtcctcgggagcggagggccggtggagcgggccccgccccggggcgtggtcggcgcggcgcagcgccgcacgtgtgcg

SEQ ID NO: 36097 - DNA, 322 bp, Mus musculus
  source 1..322: mol_type = other DNA
tcttacaaaagaggttacccttttaaatggtacaacgcttaaacagtaataactattagttagttcgaggccagcctggtctaaaataaataaataaataaataaataaataaataaataaataaataaataaatattagttacctttgcacgtagacttttgtctctctaagactgtgaaatatagaaagagcacttctcctacctagtaccacgtgggccaagtatggatgtagctggagtgaactcagcagcctgggaagcagtagggctgccaggttccctgagcggccaagcggcgcgcagatatgcctctctaggc

SEQ ID NO: 36098 - DNA, 322 bp, Mus musculus
  source 1..322: mol_type = other DNA
aacagcatttgctgttacggggcagtactccttttatacagaactattttcaactaagaatattgaaaaggctttaaactgcagttttctgggactctcacacacaaaagtctataacttcctttatagtaaaacagtgatctcattaagttccttggcagtccttgagatgtcagatttgaaaatgttgttaaatttctcaaagatcatcgctgggatgtgcactcgagacgctgatgcagtagcagctccatgggaaggcgacggattacggcctctgtcggcgatgcctcacgactcctgccgtaaaggccccacgtgg

SEQ ID NO: 36099 - DNA, 493 bp, Mus musculus
  source 1..493: mol_type = other DNA
actctgtagaccaggctggcctcgggatgtgccaccaccgcccgttttttttttaaagatttatttattattatatgtaagtacactgtattcagacacacccacttgtgacagtttaacttcacagaagaatgaaacaactatttatttgcagaaaaaccaagagccttttatcataatgggcatctctggtggtataaaggctcatgtggcctataaacctataaaaataattctactttgtgtattttcatttcttctcatttttgcagtactgaaaacattgggtctgtgtactgcacatgaagttttgaatgatgatggacatttaatactggataaattcaaggtttttaatatcttaatgacatggtatgattttgaagtatcaataccattgcatgtgtgtgcatatgtgtgctcactggagtgtatacatgtacaatcaatcccatgctaggcagcctgtgagcgtctactacatctctacctt

SEQ ID NO: 36100 - DNA, 358 bp, Mus musculus
  source 1..358: mol_type = other DNA
cggggcttttaagcttgaaatccataaacgtgcccaccaatcaggacttagggaacttaaactttgagttaaggcctgttccaaatggcttcagttggcctgtgacgctaaggcaactcttttgagggaacagtgttctgttcttgtagaggacctgaatttagttcccagcattcaatttaggaggctcacagctgtctgtgagtccagctccagggaagctgacacctatgtctggcaaatatcacagacagacatagtttaggccagtggctctggtgccgccagggggcgcgtgagggccggcgctggggcgctgggccactctggttggctgagccccggtgctcaaactcgg

SEQ ID NO: 36101 - DNA, 425 bp, Mus musculus
  source 1..425: mol_type = other DNA
cctaaggtccacttgatcttagaagccaggagcaagggcttcatgcccttgcatgtgtatgggtgtaactcagctatctatagttctaagttttgtagggcagtgacttagctatccatgcccaaggtcagatcaaggactgcctagaatctaacttagctatatgtcaaaattcttatcgattccaggagactaagtttccatgaaatagaattacattagactttttcctataaaatatattaattattcaggtctcatttttagtattaatatatctttcttcttatgaatttttttttaatgagagaagagtttcaccaggctgtcccccaccattatgatggaaaaattttttaaagatcactttgatacaactgtcaaagtatctctatttgcagatatggttttatacataaaatacc

SEQ ID NO: 36102 - DNA, 346 bp, Mus musculus
  source 1..346: mol_type = other DNA
agaaatatacttaatttttttctaaagaaaaatatttatttatttaatgtgtatatatgtatgagcagatctgcttaaaattacagtaatattttttttaactcttcagttgtcttttagacaccatatttgaaattttcaaggctaaagtcaaaagcaatgaacataagaaaaggtagtattttaattgctatttgacagacagacagacagtcaaattttgatatacttttgggaaatgattcgagtaattgaatatctaaagcatctggtaagacttaaggtctaaagggctcagagagatcctgagaccttcatggaacttcttagggaccaccctgggggt

SEQ ID NO: 36103 - DNA, 482 bp, Mus musculus
  source 1..482: mol_type = other DNA
atattttttttaactcttcagttgtcttttagacaccatatttgaaattttcaaggctaaagtcaaaagcaatgaacataagaaaaggtagtattttaattgctatttgacagacagacagacagtcaaattttgatatacttttgggaaatgattcgagtaattgaatatctaaagcatctggtaagacttaaggtctaaagggctcagagagatcctgagaccttcatggaacttcttagggaccaccctgggggtccggactcgtgctgctagaaggagaggggcaggtggcgcggctgccggcggagcgcagtcgcccggtcgccgtggtcgccgtggtcgccgtggtcgtgggggggccgcggtaggtccggagctgctctggtgagtctgccgcgagccgtacgccggcccctgaggcgccgggagaccgaccggcggcggtcgtcctggggcggcggcccgttgcgggtaacggc

SEQ ID NO: 36104 - DNA, 455 bp, Mus musculus
  source 1..455: mol_type = other DNA
gataaatatatttatctaatctcttttataaagaaacatactgtccagtatgcagcttaaaataatttatttaattttcttttaagcagttattgttttagatcaacagcggtctagatcattttacataaaacttctgtctagttcttcatacatctaggtagaaaactgaggctatgtagaaagttcattactagaaataacgacttcagtcctgtgtattcctaaacagcaaaataaaaaactcattatgaacatgtttctgtgagttctaagttctgtattccagtaaaacctcaataacaggacaatggttttgctttctgaatctcaaacaagtaactcttgtcttagtttgttctattacacaattatccaaaatagatcagacgccgcaccgcgcgacgcagccggttgctagggcgtcgcgtggctgtgacgcactgccccgcccc

SEQ ID NO: 36105 - DNA, 489 bp, Mus musculus
  source 1..489: mol_type = other DNA
attctaaaagtaatcaagttgacagtatttaccatcacaagtgttaggattactagttagagttttgcttttgatcataaccaaaatataaaatgagactcaaggtatactttgagtctgaggagtctctaagctgctccaagagcaatttcatttcattgttatataatgtacttgttttatactgatacagggtcctactttcagaaaacctttatctgaaactgctcctgagtctttgtcatttttcctgatgaaatttcaaaaggcaacatttacgtgaaattttaagacattaccgaagaaactaatctttctgtaaataatctctcttgataaacagattttttgcagactgtatacagccaactagagggttgctggttgtctggattcgggtccgggttcaggtccgggtccgggtccgggtcagggatccaacgcgagcgctgacagctcggctcacggcacactggtcacagagcctct

SEQ ID NO: 36106 - DNA, 244 bp, Mus musculus
  source 1..244: mol_type = other DNA
ggtcaggctgggcttgagcctagcagtgaggtggctcacaagaccactgcctacgcagccatagctgctgtccatgttggcccccatcgctgctgccctgtgagggagctgcccagctctgggctcggcatctgcccagttcctggacccaaagcctgagtagggctgcgggagcggctgcagcaggaaccctgcaagggagggggcccgctggccaggcacggggcagagggcgggcacgggc

SEQ ID NO: 36107 - DNA, 567 bp, Mus musculus
  source 1..567: mol_type = other DNA
ccccctactcaggccccaacaggcggtgggcaggcagtgggcaggcggctggtggacaccctgcctgcccttgagcaagctgctgctggagcgagccagctggcagggggaggggcccaaggcaaggccagggttttccgagggggctgggccgcccgggccgcctcggggggccccaagccctcctattgggcctatggaggggctcacggggatcccctggctgggacctcgcactcaaggaagggcctcgctttgctcttacagctaaaaggccgccggtctctttgtacgtcatccatggagagattcgaataaccaccgagaggttataactccctggagacaggggaggcgtgcctctcttacagctgtgggtactcagcctgccctaggcgcagggcgatatgcccttctcccctctcggcggagcgcgagtcccgggggcgcggtagcggagcgaggggttgggactccgggagcgctcggcgcggctcagcctcggggagagggcggtgctgccggcgcgcggcgacaggagggggccgggaggcgggggccggagcc

SEQ ID NO: 36108 - DNA, 384 bp, Mus musculus
  source 1..384: mol_type = other DNA
attgctcatggttgagctgcacatctttgccatgggaatgtctggcacaagcgcaaaactgtctgtccctggttagaaactacagagaggtgtctgggactcactgtcaaagaattaaatgaaaagtctcattttcaatcattgtaactcacatatgataatttttcaataaataccgggatgacttagactttgccttgcaaccaatgctgtagagagagggtggctagccttccctctttccgggagcgggtcaaaggaccagggcactgcgcccctcagctggcatagatctaccctagcccggccaggtctgcacgccgatgacgtcaccggcttcatccagctccatgccgccctctgttgccagaattctctgcacgg

SEQ ID NO: 36109 - DNA, 340 bp, Mus musculus
  source 1..340: mol_type = other DNA
tgaggggcctctgaggtctcaaactcagctttctgtcagctgcagatagtacagaactattagtccactgctgccccagggaaagggggaggcgacatgtcactgcatccttgctgaacccgtgtccccaagttcccaaaaaccttgagatctctgtggtcacaggaatatgatacggacacctgggttcccacttatcagctagccctcatggcggaacccaggcgtccggcctcccaccctctgggtcagcgggcatgaagccgaggttttgtgggacaggggcggggcgaaggccagcatctgagagccccctcccaccacctcctaaggaaaaggc

SEQ ID NO: 36110 - DNA, 365 bp, Mus musculus
  source 1..365: mol_type = other DNA
tgctccataagtcaatatctcaggcatgggcttcagtagggggtgactcatggccttgggaatggcgttgggcaaggacgtgtctcaggaggccccgacaccaggtcaggagtggaactctcaaggaaccagccttttttccttacactaggatggccctctttcattcagagaaagaaaatatacagctttttttttttttttttttttttattctctactgactggtgcccacaggtaaagcagagatcataggtgtctcttccgtcccaggcatggggcttgggccccaggttgccttgcaaggagtgtgagtgatcacacaggtggctgagggttggcatgcctgaggcctgcccagcctg

SEQ ID NO: 36111 - DNA, 228 bp, Mus musculus
  source 1..228: mol_type = other DNA
tgcaaagctatgctttgtggtatgacaatgatactagtaacataacaatgttctagtggacaatagcgtgccttgcgggtatgagtcagagccactctgtctcaggctaaagaataagcttagcccaaccttaggccagtgattcagacccaaatgaagaaggaacctaaaggttagctcttaggttgcactttgattaacttcatgacctacatactaataattcac

SEQ ID NO: 36112 - DNA, 254 bp, Mus musculus
  source 1..254: mol_type = other DNA
gacaatgatactagtaacataacaatgttctagtggacaatagcgtgccttgcgggtatgagtcagagccactctgtctcaggctaaagaataagcttagcccaaccttaggccagtgattcagacccaaatgaagaaggaacctaaaggttagctcttaggttgcactttgattaacttcatgacctacatactaataattcaccttcctgtgatgccagggagcatagagttagagctgctgcttgcagcaa

SEQ ID NO: 36113 - DNA, 304 bp, Mus musculus
  source 1..304: mol_type = other DNA
ctctgtagaccaggctggcctcgaactcagccagaaactctttcagggagtttctctatgatgtaccgggttctggagctcatgatccccagaatatgttcctggatacctctagtccataggccactggatatggaacctgaagagggcccttgtcatgtagtattactaggatgctaggggcataagaagagatctgcattcaggggctgtgactgggagcctaaaaggcctcaaaggcatcccaaacccctggtctctgacagcagagactcctaatggctcagcctgtgcccccaggatc

SEQ ID NO: 36114 - DNA, 327 bp, Mus musculus
  source 1..327: mol_type = other DNA
gccctcaagaatgcaatcatgagacaattagagagtagtgcaagaaaatctataatcaactcctttataggatgccacaccctggctgactccagtgaagactgggatctgggggacacccaggctccagtcagctggcctcggcagccgctggtgtgcagctggggtcaccaggtggcccccggagaggcccttttctggaaactgggagcctccgcgccttggcggagacgcccgacacgcgatgcttcctttgcctccgcgatggaaacgagtccctggagttgatcgctgcagagagcgggaactatggcttccccgggactc

SEQ ID NO: 36115 - DNA, 440 bp, Mus musculus
  source 1..440: mol_type = other DNA
ccagatcccctcactggagtcagccagggtgtggcatcctataaaggagttgattatagattttcttgcactactctctaattgtctcatgattgcattcttgagggcgtttgtcaattaactcacttaaatctgagtgcttttgcataaacaatattgtgatttgaagacgcataaagtgtattctttatctgaaataattgataacttagttgagaaagggaggaatcttcaacaagttgtcttgttttccagacaccgggtgcagaagcccggagcttcgccgcgggtggcgggggggggggaacagccggaaggccgcgccggcggtgtcggcggtgtcgggctgtgcctgggagcgcgcccccgccgcggaggctcagcgtccgctttccgcctctcagctagccgcgccgggggcgcgcacggcgcgctgcggg

SEQ ID NO: 36116 - DNA, 289 bp, Mus musculus
  source 1..289: mol_type = other DNA
ctgagcagcttatgccctcagtgtgcatgggcaccccagtttgtcgtcaggagggctgtcctgccgtccattttcctggcccagggctagggagggaaggtagtcctgctggcctgcctgcctttggggagcaccccctcggcctccacatgtggggtgtctctctaaggggccactgtgaggcccttcaatagcacagtctagaaggatcttgtacagttggagactcgggagtggcagacagccgaggctcctttccttcctggagtgggaccgggctagcctactc

SEQ ID NO: 36117 - DNA, 524 bp, Mus musculus
  source 1..524: mol_type = other DNA
ggccccgcccccgcgacgtgcgcatttcccggaagcggagggcggggctcgcggctcctctgctcgcagcgcctgctgggagccacgtctccgccgccctggcgctggactgcgatcggtggcccgctgatgaggaggccgcggggggagcccggctcccgggccccaagaccagacgcggggcccgggcttggggccgggacagggtgtgggggcccctcccgcggacagcatcagctccgcgccttggcagatagctcactcgggctcggcgcgcgccccgcgagcttgcgctgtgttcgcgcccagcatgggacccagcaccggcccgctactgagcctgcgttccacccaccccgccgccgccgcctcctgcgggacggggaggtggtcttcagggctcatcgcccggaccaccggggctcccaggctgggtgcgaccactagccctctccgcctgagacgatatgcatgtgaaatgtgaatagaattgcactgagcacacttataccagggcaatcaca

SEQ ID NO: 36118 - DNA, 461 bp, Mus musculus
  source 1..461: mol_type = other DNA
ccaccggggtcagagcccggcccctccgggctggaaatcgggctcctgctctggtactgccagatccagtaccggcgcctccacgggcttttggcagtgtagccagcccctctggacctcattccccaaggcgcaaagggagctgcggagcccagctttgcgccgcagaggacttcgggggaggccccatctcctggggctgctggacctcagccttcgctggcagtgggctcaggcacttgctgtcgctgccttggccgccagggcaccccaatgggcccatcttagtcgacagaggatctagatacttctagtttcaaagagctgcctaattaaagaaactgtgggccccgcccccgcgacgtgcgcatttcccggaagcggagggcggggctcgcggctcctctgctcgcagcgcctgctgggagccacgtctccgccgccctggcgctggactgcga

SEQ ID NO: 36119 - DNA, 483 bp, Mus musculus
  source 1..483: mol_type = other DNA
aaaaaatacataaattttacagagctgtcatacttatttaataaaacgagtttcttctttccaactgacctagaagaattatacttgttcagagattaaataacccaccagagattatatagctgatgagtgtctacatgtgtacactagaggccaggagacagctggcgtcaggcactctccctagcaagtggggcagaatttagaaaaccaagctgctttttggcgtccacaatgacacaggcttggctgggtagtggccactctgacatgctgcaggatgtgtcaggagtgacagatgctccagcagctggcagcggagatagagtttcttgctgctgaccaaatctctgtggacaagcagaaaccccagggtccttcccgtgggcccatcgacgatccaagggtaccggcaatggtccaatgctcccgggccgcggcagcagggaaggagagggacctcaggtgtctgcgacctcggtg

SEQ ID NO: 36120 - DNA, 311 bp, Mus musculus
  source 1..311: mol_type = other DNA
tgaggcggggactcctttaatccaccagaggcagggcctgaagttgaagatgtgaactctcagcgcatggtaggtcgcatgacataccatcatgtcctatttatttatttatttatttatttatttatttatttatttgagaccctggctgtcctggaactcactttgtagaccaggctggccttgcactcagaaatccgcctgcctctgcctgtgctgggattaaaggcgtgcgccaccacgcctggcttgccctaacattcctggactttgagtgtgcacaatgggttggaattcttcaaaccaaactg

SEQ ID NO: 36121 - DNA, 386 bp, Mus musculus
  source 1..386: mol_type = other DNA
agcctccctggaagtcacagacgcaggtccagtcctggtctgggacaagttatttgtgtgtccctaggcacccccccaggtggagattttcagccgggtgctaactgcgtggcccactccagccatgcctgggggaagacgctctggagacagccccgaggaaccctgggtcaccaccgctgctgtgccgtgacatggctctgcagaatgcactgtacactggggacctggcgaggctgcaggacctgttccccccccacagcacagctgacttgctgctggagagccggacagctgagcctcgctggagcagccactgtctcgggaacagaggtcccggaccaagatagaagtcatgtggggcccagaatagctcctgttggaca

SEQ ID NO: 36122 - DNA, 646 bp, Mus musculus
  source 1..646: mol_type = other DNA
ttgagtgaaactctcagagagaactggacataggaacggggagcccgtcccagtctctcaggtgcagtcgacagtggagactgggggcccgggggccggggtcgggggcagagagccaggagaaccctggcaagatccctagggctgacctcgaggcctggggtggcgcccctgggcgagcttctccgccagacagcgtgatcgtgtccccaggcgggaggccctcgaggcttcagggcctacgcgggtgggtggggccgcgcgtcgcggccagcacgcggttctgcgtgtgccggagccggcgggggcggcggtgcgtgcgcatgacgcggggggagggcccgggccgcgcgctcccggtcccgttgttgtgccgctggaggcagctccgaggcggcgggatctcagcgcgggtaaacgccgggcggcggccccagcgtgcgcggccgcgccttctggcctcggctccgggcctcatgcgctagaccggcgccgcgcgcttgggttccgccagccccgcgcgcctggtcgctgccgccgccgccgccgccgcgccgccccaggccctggctgggcccgcttcggggcccgcgcctccggagccatgaacttccaggcaggcgggggccagagtcctcagcagcag

SEQ ID NO: 36123 - DNA, 333 bp, Mus musculus
  source 1..333: mol_type = other DNA
gaatgcactcaggggcactaagtttccttgtgtcatcagtgatgacacaccagtggacaggaccatgttcctaacactaagtctgctttagattttagacagtgagactggacgcgtctggcactttcaaaaagtttcgttgcctttctcgaacagagttctgttagcagcctggtaatcctttgggagaccagcccacctctccgaggagcacttgcagttttcagttcttcaaaccggcttgtcgcgcgttctgatgccgtcactagccctcgcggcagcgcgccaagggccgcccggggccgtgattggttggggagccggccgcacgcg

SEQ ID NO: 36124 - DNA, 297 bp, Mus musculus
  source 1..297: mol_type = other DNA
agcctggtgacagtacaaatgtattctgaacactgacatacatttataaatggtaaaagttctccaaatgtagcatagggaaggtgtggtacacacctttaacaattgtggtatcagaagacaacatggagtcagttttctcttttcaccagacatagaactcagatatcagttggtggtgagtgcttgcttcaagcgataatttagtagagaaacatttcttgagccgctaaataggcgctggtgttgcgcggccccgtggcgctaggagccagggcgttggaatccgcggtcacc

SEQ ID NO: 36125 - DNA, 632 bp, Mus musculus
  source 1..632: mol_type = other DNA
agacggggctcccaagtgtcccctgcagggggctagcagggagctctggagcagctcaatcggcgctatcagccccgcctgcgcttccggaagcagcggcttctcacgacttgctgctggaagctgtgactcagcgagggcacagacgctccctggcccgcagagtgagcctgctgaggccactgagcagagtggaaatcctgcctatgccctatgtcaccgaggctacccgggtgcaactggtgctgccactcctggtggctgaagctccggccgcccgatatgggccccgggaaggccgagggggccctgacccatttctcggaccaggggcgaggctggcctggctcgctgtgcgagcagaggccccttcgcaggtgcgactcatggatgtcatctccaagaaacacctgtggacacactcttcttccttaccaccgtgtggacaagaccaatctcgggctggcaggccttcttcaccacagagatctcccccaggtgtccctggggctgatcccccctcccctggtgtggacccttctaggggggctccggtcgggggcagcagcagagggctgctgactacctggcagcccgcgcccggctggctggcgaactggcaggccaggaag

SEQ ID NO: 36126 - DNA, 563 bp, Mus musculus
  source 1..563: mol_type = other DNA
ggccgtgtcctgccccgcacgcacgcgcgcaggctcggcggctcttgtgaagggaagcacacagactgggcgtttgtcagtgcacgcacataaacatccacacccaggtgtgccaagggcacacacatctgcgggcgcccgggagcccgcctagcccggcacacccaccgcgctggccctgggacaggagcaaggcctgcttcgggctcgaactgtctgttccctgcctggccatgggattccctaaccgagggcagagtggctggcgagccccttgtcacctcccgtggtgttccctccccgagccgccaccgatgggccccgggcggcctgggcgcagcgcagctgcccatcgcgcagcctccgggcagatcggctcgtctcgccgcttctgtgcgccgcttggaccacgcggagtgcacaggagggccgctccgtccccggcgcgtcgcaggcagaccccgggccgccggactatttctgtgcaggaatgcggcagccgcggcggcggcggcggcgggcgggcggcggcggcggcgtgggccgtgggccgtcagggcagc

SEQ ID NO: 36127 - DNA, 343 bp, Mus musculus
  source 1..343: mol_type = other DNA
taaatgttatccttataagaagcacccatctgactccctcttctggagtgtctgaaacgctacagtgtacttacatataatgaataaataaatcttaaaaaaaaaaaaaaagttgtcttggtcatgatgtcgtggagactgcatccaatcaagatggagactgtatccattatgatagtaaactgaaatgaagttactatgtagctgtgtgtatcgatagatagcttactaccctagaactattttaagagattcaatgataggtcatgttattgtttgaccctataattggatcataatggctctgaccttatcaggggactaagccatttatgacatcata

SEQ ID NO: 36128 - DNA, 165 bp, Mus musculus
  source 1..165: mol_type = other DNA
cattgtttcttttctcatagtatttaaaaaaaaaaaggcctttttttttttttttttttttggaattaaggcgcataagggcacatgcatttttcacagcgctgagcaaagcagattagtctaggggatcccctaggcctagtttcctctgactctgattgaaga

SEQ ID NO: 36129 - DNA, 170 bp, Mus musculus
  source 1..170: mol_type = other DNA
aattaaggcgcataagggcacatgcatttttcacagcgctgagcaaagcagattagtctaggggatcccctaggcctagtttcctctgactctgattgaagacggtcctcgaccggccttccggacagcgcgagggggcggagccgggggcggggccggcctcacccgga

SEQ ID NO: 36130 - DNA, 273 bp, Mus musculus
  source 1..273: mol_type = other DNA
cctcagctggctcctcagtgtctcctaagctgattccctttctttctggactccaaaaagagccctggagggtgggggtcaccctgagctccgggagggctggattcctgcagagctccctcaaaggcgcgcgcccagctgggcgaacctgacctctggtcttacctccaacccccaacggccaggatccagcctggcccaagtagaatttggagggcgtactcggggttccgcagctttaagactccagtgccttgggctctggggacaagg

SEQ ID NO: 36131 - DNA, 313 bp, Mus musculus
  source 1..313: mol_type = other DNA
atgccttcataaagacaaacacaatttgctttgtgttgggtcttcagaagaaactgtcaaggagttcactgtccgccttgagtacttcccatagcaaagacccaagataagagggcccatgagctcttccccagagtgcagagggcccctggagtggctctcttcaggcttcctcagtttagtgggaaacactttgtacttacagcacaaagtactgaatgctggcggcttagcacgcccgacagcaacacgcgggtgccaggttttgtccctgggggcgctgagccagcaggcgccacagagtatataccgg

SEQ ID NO: 36132 - DNA, 364 bp, Mus musculus
  source 1..364: mol_type = other DNA
gaaataacctctcgagtgttcagtatgaaagcaggactcccacgcgcgcgcctgtctgtgcgaggtgcgtgccacccggcgtgttgcccgagtcggcaccaggactctgacatttgcgagctgcacagatttcattagctagggccacgcgcctcgctccttttaagggccggcaggcgcaagtcggcgttgcctgcccgcccgcccacccgccggtagggccacgcttttggaccacgcaggcgccccgccgagagacggagtttccattgctttaaagtaaaattccccgacgctcccccgcgcgttccgggctgggaggcggcggcgggaggcggcgcagacggggccgcgcgcggtcacg

SEQ ID NO: 36133 - DNA, 330 bp, Mus musculus
  source 1..330: mol_type = other DNA
cagtgcacccactgtgtgcagacagctgttcagggccagaacaatcttcaagcattttgaaatgtttttgaactttcatgattcggactggtcctagagtggtgaggtctgtcttcccacagtacttcctccccaggagggtggtccctggggaacacttgtgtcacagcgttcctgttctgcaaacgacagactgtgctttactattgaatgctttagttcagaacaaaggcacagcagttctgaggacactctagtgtgtcccctcgtgcgcgcatacagagacccagccgctgcatcagcgcattgctatagcaacggcaagtggct

SEQ ID NO: 36134 - DNA, 563 bp, Mus musculus
  source 1..563: mol_type = other DNA
atgttcaggtttttttttttttttcactacaaagcatgacaaactgcatttttttttatcacaaaacatcttaacaaaacttttttggacactttagatttaggaattgacccagcagctttgacaagttccctcccaggccggtagccaggcaggtgctggccatcggcaggcagcctccgggcccttcccggcagcagacggctgccagccttgcggcctgccaaccggagttaacccaagtgcccggggcgcgggcgaagcgcggccccgaaggcggcctctccttttaagggagcggttcgccgccggtgcggggccccaagagggaggcgcgcacccgccgagggtgcccatggacccacacctgcgcgaggacgcgcgtgtccgctggcgcacgcggacggcgaagcactggggccgccgctcccccttcccacgctgcaggggggagcagagcgtgccatcgcggcccacctgcggctgcccggcctgggcggggacgcgctccaccctggcctgccgcgcgctcccgccgccgccgcgcgcgccccccgccactg

SEQ ID NO: 36135 - DNA, 191 bp, Mus musculus
  source 1..191: mol_type = other DNA
ctctggaatgttatatgccatcttaaagaggtgagactcaggagaagagaacattaaaaatgcttttccaatttttccagtgctgctggcaccgttcctgtttacacctgacaggtgaagctggaagccacaaaggtcagagacaggcccaggactctggcgttgtttaaaccagacaaaatacacagcta

SEQ ID NO: 36136 - DNA, 410 bp, Mus musculus
  source 1..410: mol_type = other DNA
ctgtcatgggtgccaggaactgagcttggatactctgaatgagcagtgcatgaaatctcatcctggctaagaaaaaactaaacaaaacaagttatttccctctcttatttatgtcagatcagacactaggcttatggtggatgagattagtgttggagtctcatctctgctaccgtacctcagtttcccaataagaggggttgaatgagatccccgcagccaggctccgtgcttccatctttctgtgttccccagagggaacaaagaagacgccgcagcggctagctagccctagcgctctcccagcttcctcggccaattggtgccaagggtggtttccttttacagtcttcttaaagagacatcacgcagacctgcacatgactagcaggctggtgccggctctgcct

SEQ ID NO: 36137 - DNA, 575 bp, Mus musculus
  source 1..575: mol_type = other DNA
tgtgtgtttccgggggctggacctaaacagagacacagccagatggatcagaatcagctcctggcgagtccggagctgggtgcacggcgaccacccgggggcagcgtgggccgcgtggagtgggacagtggcgccgcacgccgcgcacttcctgttcaacgcgcgcgccgcctgccaccgcccagcgctcccagagcctacgttggtgccagacccggcccccacagttccccgggtcccgggggccgcggctcagaggccgcccggggcgggcgccctgccctattctcccctaggggctggggcgcgcccttcggcccgcagaacccagccagccgccgccacagtcctgcggccacgccctctcgcccaaagaggaggccctccgggtcccctctggccaccgtttccatcgagaaaatgttgcttcgctttgcagaaggaggaaaactttatcacccagcaacgagactctgccccggcattccgcggactgccagcccctcgggtggagccccgcgtgttacctgcgccccgccctccccgcggaagtccccacgaggtgttttcagggt

SEQ ID NO: 36138 - DNA, 568 bp, Mus musculus
  source 1..568: mol_type = other DNA
gaccagaagccaaggtcctgctgcctgggaggaacaccagggccctgagcagcccgcagtaccagatctgcagccagtggctctgaagatccgggagcacgtggcgtgttcgccccaaagatcaaggtttgttgcgcaatctttgatgaccctacgccgcaggggggcggccccgaaccactttctgtgtgtttccgggggctggacctaaacagagacacagccagatggatcagaatcagctcctggcgagtccggagctgggtgcacggcgaccacccgggggcagcgtgggccgcgtggagtgggacagtggcgccgcacgccgcgcacttcctgttcaacgcgcgcgccgcctgccaccgcccagcgctcccagagcctacgttggtgccagacccggcccccacagttccccgggtcccgggggccgcggctcagaggccgcccggggcgggcgccctgccctattctcccctaggggctggggcgcgcccttcggcccgcagaacccagccagccgccgccacagtcctgcggccacgccctctcgcccaaagaggaggcc

SEQ ID NO: 36139 - DNA, 460 bp, Mus musculus
  source 1..460: mol_type = other DNA
aatgtgcactcgcagtgaccgctccccggggttcaccctgaaaacacctcgtggggacttccgcggggagggcggggcgcaggtaacacgcggggctccacccgaggggctggcagtccgcggaatgccggggcagagtctcgttgctgggtgataaagttttcctccttctgcaaagcgaagcaacattttctcgatggaaacggtggccagaggggacccggagggcctcctctttgggcgagagggcgtggccgcaggactgtggcggcggctggctgggttctgcgggccgaagggcgcgccccagcccctaggggagaatagggcagggcgcccgccccgggcggcctctgagccgcggcccccgggacccggggaactgtgggggccgggtctggcaccaacgtaggctctgggagcgctgggcggtggcaggcggcgcgcgcgttgaacagga

SEQ ID NO: 36140 - DNA, 403 bp, Mus musculus
  source 1..403: mol_type = other DNA
tgtgtgtgtgtgtgtgtgtgtaggcagagatagctacacatgtacatgtatgtatatatgaagattggtgtgtcctgaagctagcgccatgcatagtctgcattaataccattgataaatgaaatagaagtgcttagaccttcatgctctagagaagccccagcgcaccactgcctctattgagctgatacaggggtgtggtggttccaagcctctggggggaggggtccaacctcctgctgatcttaaatgctgagcaaaaggctgcattcaggccagctgttttgtaatctcatttcacaagagctaaccttagctgaggaggaatgacactagacttccagacagaggcctctgtgggccaacagtgccttgtgtgatgtcactgggctctgagagccag

SEQ ID NO: 36141 - DNA, 315 bp, Mus musculus
  source 1..315: mol_type = other DNA
actagtaagtatttggcagggccactatgagttaattttgtgccactgtgttgacaacttaaagacttcaggtggtaatgctagctagaacaatttattggttcaggagatgctgctttcttaaaaataagggacgcagaattttctttaatatagataccgcttctctctggagtgaacttcactaaggccctatgggacagagctcagctccacactgggcggggaggagcccgggcctcgtgacgccaggccgcgggcggtgacgtcatcctcggaggcgagggcgtgcgtgcggtgacgcgtgccgtgacg

SEQ ID NO: 36142 - DNA, 388 bp, Mus musculus
  source 1..388: mol_type = other DNA
gctattataaataaggctgctaaaaactatctcaataatgcaagttattgtcattttagaacttgagtgatgccctattgctcaagacagtaaaaatgaagctgctttatgtcattaaacgtcagttttgctacatagcagcatcccatggcccaagatattaggcagttaaaatataatgtgacttgtttttcccggtaaagccttctcgaactttcttccagaattcttgtttggcaaataatttagaaacagagctgtttaccatctaggttgagggcttcaagcaatttatggttcactctgattttaattgactatagaaataagtaatttataagttgtatctcatgcagactccataaattcatggccttttaaaaggtat

SEQ ID NO: 36143 - DNA, 325 bp, Mus musculus
  source 1..325: mol_type = other DNA
ttttttaaaaagtagtttggtctagaacttacagtattagcctacgagttgtatattttaaattctgaaggcattcatttattgagtcagggcctcatataattcatagagatatactttcttgttccttgaagaaaattgttcatattttgatagaaaattgcattcaattgatgtgttgatcaatttgagctatgttgtttttttaaaaagtataatagatttttttcatgcaatatattatgtttagtgcagacactacacacttgctcatagaagctgtaatatatacacaaagtacttgtaatttttttttttttttttt

SEQ ID NO: 36144 - DNA, 441 bp, Mus musculus
  source 1..441: mol_type = other DNA
ttcttgtttggcaaataatttagaaacagagctgtttaccatctaggttgagggcttcaagcaatttatggttcactctgattttaattgactatagaaataagtaatttataagttgtatctcatgcagactccataaattcatggccttttaaaaggtatcctggcttcgttttacatgaaatcctaaggagagagaaaaatagaattactaaaactctatttgacataactgttagaactagaaagtaggattatcctttgttttgaactaaggtctgagttatatcaagtgctggggctatagacacgagacaacattgtcttgaatacagatgggacatgcagtacttgtactcccttcaccagcaggcaaacatgtcagctattttgttcttctaaatgttaacacattctgtattttttaaatctctgttaaca

SEQ ID NO: 36145 - DNA, 672 bp, Mus musculus
  source 1..672: mol_type = other DNA
ggctggaccctgatcccggatgcccggtccgcagcttagcgcccgccagagcccgagttgcagccaccgccgcgtcagagcgggcgggggaggggcggtgaggtcagcggcggcggccgggtagcgcggggcgcatgcgcggactcagccccgtgagtggcagcagcgcgctgggggcggtgtggtgcgggtcgccccgggggacccgggtgcaggcctcgcgcgacggccactgccgtgtgcgtgtttgtttgtgtggtgaacgcacagccgcaaaacttcctcctttgctgcggagcgttcgcgagcgagcggagcgatcgccagcgcgcgaccgaggggccggcgctcgcaccaccccggctgtcaaaacttcgccgcggcgtgggcctgacgggctgacggcgcgggggaggggtggctggccccgccccggcccggcccggcccgccgcccccctccgcggccctttctcctcccgccgcgggcggcctgggggaggggccgggcggagacccctgcggccgcccccggcccgcgcccctcgcgtcgcgccccgccccgccccgctcggcgccgccctccggcccggccccgccggccccagccttggccgcggcgccccgccccgcgcggccggccccgcccgccccgcccgcttgcccgccgccc

SEQ ID NO: 36146 - DNA, 250 bp, Mus musculus
  source 1..250: mol_type = other DNA
ccagggcagggaatagaggtgtgcacttcattgcctggctagcagcccaggctggcatggagtttgtgatggtcccacagtctccagggactgggatcacaaggataaaccacacagccaattgtgtcttgttttattactatagatcaggctgtccttgaatggcatttctggtactatagctctataatacaatttgagttcaaaacaccaaagacagtcttcgttgggaactagaacaagtcccagg

SEQ ID NO: 36147 - DNA, 215 bp, Mus musculus
  source 1..215: mol_type = other DNA
atgtttgaatgatctgggtgagtttgggaccgggaccaggtatcgaggcccgggctcccagacccaggcgcctggcgcgagcggcctgggacgcgtggccaatggcagggcgagcggcgtggcccccacctgcttgtagctccggcgcccccgccccgcgaggccctgcgggtggccccggggccgggccgcaccgcttcctcttcctgcccgcg

SEQ ID NO: 36148 - DNA, 287 bp, Mus musculus
  source 1..287: mol_type = other DNA
gcttgaaaacttcacaggctcagtgtatttccacagtaaataccacagccagtcatacttgctcagtaacggtgttactgcccagagtagtctcctgggctcgagccttggtgatcgcctttaatcccagcaccaggcagacttctgtgagttcgaggccagcctggtctacaaactaaataagatttagaaatcacgtacatgttaattttgcctgatacggcgccgcatttactgcgcttctctggctccgagcccgcacagtgcgcacgcgcacacagggtcat

SEQ ID NO: 36149 - DNA, 317 bp, Mus musculus
  source 1..317: mol_type = other DNA
tggataatcctatctttgatattagaaaatatttcctagtaatattgatgttattccttaagcctaattatgcatatgttgattttctcccaggatacattatgcagtgctctatcatagaaagtcataagtatttttctactggttatttattcgtaaactagctttaagtgttagaaataaaatcgcgaagagcacttgctgctcttccgctgcatgggatcctaagcctctggcttccaaataatctttaaaaaaaattggctagcctgaacttgtttctgccagctgacaagagggcggtccccgattggcca

SEQ ID NO: 36150 - DNA, 459 bp, Mus musculus
  source 1..459: mol_type = other DNA
ttcttgtctttataagttaacaaagatagatttttgaggctatggctcaacccccaaaacctgagctatggttctgatcaatcaactttagggtctgcatttaatgaatcattcatgtttgactgttttgtgtggtttgtggatccaaacatgaacccaaatacacaactctgttgaatatattatttattacatacaaaaatctataagcaatactgattggtgagtttgccccacacaatctgagggccactcattggtggctccaaccaacagatctctagactgttcatgatgactgcgtgatgactgcatgatgactgcatgcccggccctgcaggctctgcctggatgagatttcatagtagattttaattgctcctactgctgactgaggaaaattagatacataggaattacttaggtgttgccaatcaagcctagagcaaaccctggctt

SEQ ID NO: 36151 - DNA, 374 bp, Mus musculus
  source 1..374: mol_type = other DNA
ggatttttgaggctatggctcaacccccaaaacctgagctatggttctgatcaatcaactttagggtctgcatttaatgaatcattcatgtttgactactatagtattagcctatactttgcaactctgttgaatatattatttattacatacaaaatctcatagcaatacccacacaatctgagggccactcattggtggctccaataccatgatgactgcatgatgactacacctggccctgcaggctcagcctggatgagatttcatacacagatacataggaattacttaggtgttgccaatcaagcctagagcaaaccctggctttggagttagcaacctccgtgatgtcaccagtgttgtagtaacaa

SEQ ID NO: 36152 - DNA, 491 bp, Mus musculus
  source 1..491: mol_type = other DNA
tttttgaagctatggctcaacccccaaaacctgagctatggttctgatcaatcaactttatctgcatttaatgaatcattgatgtgttttgtgtggtttgtggatccaaacatgaacccaaatacaagatgctagacccttgctctgtcaactaacctgtctatcaactctgttgaatatattatttattacaaacaaaatctcctataagcaatactgattggtgagtttggtgcccacacacaatctgagggccactcattggtggctccaatatttcagtttcctctgccaacagatctctagactgttgtcagaagcataatgacgagtgatgactgcatgatccctgcaggttcagcctggatgagatttcatgccctagatacataggaattacttaggtgttgccaatcaagcctagagcaaaccctggctttcctggagagttcttagcaacctccgtgatgtcaccagtgttgtagtgacaa

SEQ ID NO: 36153 - DNA, 495 bp, Mus musculus
  source 1..495: mol_type = other DNA
gatttttgaggctatggctcaacccccaaaacctgagctatggttctgatcaatcaactttagggtctgcatttaatgaatcattcatgtttgactgttttgtgtggtttgtggatccaaacatgaacccaaatacaactgcaactctgttgaatatattatttattacatacaaaaatctataagcaatactgattggtgagtttgccccacacaatctgagggccactcattggtggctccaaccaacagatctctagactgttcatgatgactgcgtgatgactgcatgatgactgcatgcccggccctgcaggctctgcctggatgagatttcatagtagattttaattgctcctactgctgactgaggaaaattagatacataggaattacttaggtgttgccaatcaagcctagagcaaaccctggcttctattgtcttctagagagttcttagcaaccttcatgatgtcaccagtgttgtagtgacaa

SEQ ID NO: 36154 - DNA, 454 bp, Mus musculus
  source 1..454: mol_type = other DNA
tttttgaagctatggctcaacccccaaaacctgagctatggttctgatcaatcaactttatctgcatttaatgaatcattgatgtgttttgtgtggtttgtggatccaaacatgaacccaaatacaacaactctgttgaatatattatttattacaaacaaaatctcctataagcaatactgattggtgagtttggtacccacacacaatctgagggccactcatttgtggctccaatatttcagtttcctctgccaacagatctctagactgttgtcagaagcataatgacgagtgatgactgcatgatccctgcaggttcagcctggatgagatttcatgccctagatacataggaattacttaggtgttgccaatcaagcctagagcaaaccctggctttcctggagagttcttagcaacctccgtgatgtcaccagtgttgtagtgacaa

SEQ ID NO: 36155 - DNA, 457 bp, Mus musculus
  source 1..457: mol_type = other DNA
gtttttgtctttataaattaacaaagatagatttctgaggctatggctcagcccacaaaacctgagctatggttctgatcaatcaactttagggtctgcatttaatgaatcattcaagttgttttgtgtggtttgtggggccaaacatgaacccaaatacaagatactaggacattgctctatcaactaaagtatatatattatagcaatgctgattggtgagatttgctgtgagaaaagccccccattggtggctccaatatttcagtttcctctgccaacagatctctagactgttgtcagaagcatgatgactgcatgatcctgcagtctcagcctggatgagatttcatgcaccttaggaattacttaggcaaactccggctttgtgtagtccatgtcctggacattctattgtctcgcaacctcagtgatgtcacccgtgttgtagtaacaa

SEQ ID NO: 36156 - DNA, 281 bp, Mus musculus
  source 1..281: mol_type = other DNA
cctcatggccatgagcggccagaaacccccagtcttgggcattgttttccagccatcatcccttcataagaagcggtttgaccaagaatccttggggacagcatggccatccacacagtgactatttgggcaaggccatggatgggagctgaggatcaccattatcatctgtgtccctcttctcagctttgatagtatctatcagaactatgagaaatactttcagctacttccccttcttaggaagtgaggtgagacctctgtgacctcacagggttgtg

SEQ ID NO: 36157 - DNA, 377 bp, Mus musculus
  source 1..377: mol_type = other DNA
tggagagaagtttccaaattcttttcccccgccattgcccttccctggcaggcgagggcgcccttgggttttggagcgctctaggtccatctgtaaaagaatgtgccagccttcggcacccgcatactctggagctccctgctgtgtgagacaatgttaaacacctggaatctaggcttggccaccccaagtgcaaccatggagacaccacgtgtgtcgcatggaatctggttccctgtgactctgctccctgatctgggaggcgcagccctaggagcagctggtggctgctcatccattggcagctaagctaactgctgcagcccgcgcacgcgtgtacacgcgcacacacactcccgggtgtcgccacccttggg

SEQ ID NO: 36158 - DNA, 417 bp, Mus musculus
  source 1..417: mol_type = other DNA
ctggattccaggacagtgttaattagtggctattagtgacattatcaggtagccaatttccagtaaatggctgaggggaaggcctctggcattaaccccttggttaaccagctatgtctagtagaagcagggaagcccctactagccaacatggaggcctaggccttaggaatttctgggtcagatgcagcagggagcctgtgacctctaagggcaccatcagttgatatagatttatccactctaaaggcgaaacgcatccttcttgatccccctgaccaggtgggagccataggactagtactgctgcagtcagcaatgggggcgcccggtgacctggattcatgaaggtttcctgggcttcggcgagcttgtagcgtccacaggcccgcccccagccaggcagagcacagccgg

SEQ ID NO: 36159 - DNA, 377 bp, Mus musculus
  source 1..377: mol_type = other DNA
cctctcactgcatctcaatgtcaaaatggggtggaacaaggtttggaaaggttgcaggctggagccagacaactcgaaggccttgttcatgaggcttgaaataagccttcttcagatgatcaaaagaaaatatatcttttttttttaataaaaaaaatcttaggtgatgaaggaagtccgggaacaaatgtttcccttccagggtctttgtcaaagttatgcctgtcaggcactggaaaacagctgtgcgggagccacgatccggaagccccggggccccaaggcgtgagcttccctggtgccaccgctacagcgggagctgcaaataatggggtctagacactccgacccttggcttctgcgctgccggggagggg

SEQ ID NO: 36160 - DNA, 533 bp, Mus musculus
  source 1..533: mol_type = other DNA
atcagtaatgagatctgatgccctcttctgatgtgtctacagtgtacgtacatattataataataaatacatcttaaaaaaaagtatcacgagttgcgggacttgtttacacatccatatttaatataattatctgctaagataatttttatagattttgctgtttacctttaaaaactagctcagcagttcagaacccacgtgtcgtgtaacttcagttccaggggatcctgaagccaccttctgactgttgtgggcaccagacactcaccgtagaaaaatgtacatttgaactcagattggcggcagatgtctgcctgctgagctatgtccccgccaactacctcagtagatgcggaaggggcaagccagggtctgcctgactctgggccggatcgcgtgctgtccaacagcagcgctggcgacagctgaagagcgaccgaggctccgcctccttggcgcatgcgctgtcaggtggccgcacggggtgacgggagtcccgcccaggacccgccccctggctagtccactgc

SEQ ID NO: 36161 - DNA, 387 bp, Mus musculus
  source 1..387: mol_type = other DNA
gatttttgaggctatggctcaacccccaaaacctgagctttcttatcaatcaactttagggtctgcctttaatgaatttaatgaatcatttaatgaatcattcatgtttgactgtgatttggggggccaaacatgaacccaactgttgaatatattatttattacatacagaatctcatggtgtacaacacagagggctgtaagcaatactgcttgcacccattggtggctctaatacagaagccctgcaggctcagcctggatgagatttcatgcaccagatacataggaattacttaggtgttgccaatcaagcctagagcaaaccctggcttagctcagcttcctgtcagaacctctgtgatgttaccagtgttgtagtgacaa

SEQ ID NO: 36162 - DNA, 277 bp, Mus musculus
  source 1..277: mol_type = other DNA
accaggctggccttaagcaaggcagtgctgttaataaacaaggccagtcttaatttttgctgaataacaatttaatctaggccatggaattaatttctgcagtaagtagaatcctaggaataaagaggttagcctctctctgaccagagagcaaaggggaggcagggaacctgggggccagccaggtgtctgcctgcctccgtgacactcagcagtgctgcccaagtccactgctgctcaattggctgagtcctcccagctcacccttgtagacaaa

SEQ ID NO: 36163 - DNA, 365 bp, Mus musculus
  source 1..365: mol_type = other DNA
tttgatagttttacaagcatgcatgggtaatttttttaaattttatttcatttattttggctgaaccatcatgactgtctcaatacttttcaagcatgtttcaagcatttcaagttacatgcttgtatgtgtaagccaatgatcttaatggctgagccattccctccagcttcttttccatagaaacttctgtagagtcactagagaggctcctgtaagcctctttctatctccgagttagttagcctaacccaggacacctgtacttcaagctactaattaattcccggccactgacccagtggtaaagagcgatgcgtggcagcggcaccgtggacagcgccaagcactgagctgctgatgcc

SEQ ID NO: 36164 - DNA, 391 bp, Mus musculus
  source 1..391: mol_type = other DNA
ctctctctctctctctctgtgtgtgtgtgtgtgtgtggtcatcactcatttctaaattagaagatcatgttataacccttcttaaataatccttttatttctctttcttaaatggtgcactaaagtgtatacgggtggaatctttccgtatgcatgcgtctcctgcacaggcacaaacatgcatgctgagagtaggattctgcaggtacctgtgcagtgacaaaggctcccgcgccgggagccctgggcacggccactttaaaggggccgggggaggggcggcaggcggttcctgtcaccaagctgccgcgggcgcgtcacgtggatgagcggcgcggctgccattggcccgaggcacgtgtccaggagaccggcccgcgacgtcacttga

SEQ ID NO: 36165 - DNA, 391 bp, Mus musculus
  source 1..391: mol_type = other DNA
cagctgaagctgggcaggcccctgctatgtctctgagaaacagcctgcttaggagggtgactttgtctggtctgagctgtgaaagcactcaggaggctcagaaaccgaggtcgcatcggaccatctgactcgctggccgcccgctccggtgcccgccccggcgcctgcccgaatagcgcgcgctcgagcgcgtgccgggcaccagccccacccccccggtggcgtgtgcatacgtcatatgggccgccctcctcccattggctccggcggcctcaccagaccccgagcggacaggcgcgcggacagggcggggccgcttgaagacacgccccccagcagggcgcgcgggcggcggataggctgggctccggtggcagcctgccttataagc

SEQ ID NO: 36166 - DNA, 576 bp, Mus musculus
  source 1..576: mol_type = other DNA
tataaactgacacttttacgttaacagttaaggaaagatgctcaacagtcgggtaaactctccgagtttaccggagagtcatccgatttaatttcttctttgcaacttataaagcttgaaaagcacagataaaaatgccatttgtatttgaaagtgccattgtagaatctaggtttttcactgtagacatttatttatttttagtttactgaatttgaaaaaaaaaaaacttgacacctgctgtgaagtgttctcattttagttcgcagacgcatttaattaattgctcttgccctgaggttcacctgggccgcagcaggtgcggcgcgatcctcgtgctccgtcctgggggcggcggcgatcagggagtgttcctctcgggctccgccatcgggggaaacgtcgggaccctttgtgcgccccgagcgcgccagtgaatgtcgcgcagtcgttggcactctgcagaaaccgagttcattccgcgggcccggacgaacgcccttggcggctccacgccccttccggaaggagccgcagggacccggcctcctgcaccttgacccgtctagacgccgc

SEQ ID NO: 36167 - DNA, 491 bp, Mus musculus
  source 1..491: mol_type = other DNA
cctggtaaccggactggtcttcccagacaactataaactgacacttttacgttaacagttaaggaaagatgctcaacagtcgggtaaactctccgagtttaccggagagtcatccgatttaatttcttctttgcaacttataaagcttgaaaagcacagataaaaatgccatttgtatttgaaagtgccattgtagaatctaggtttttcactgtagacatttatttatttttagtttactgaatttgaaaaaaaaaaaacttgacacctgctgtgaagtgttctcattttagttcgcagacgcatttaattaattgctcttgccctgaggttcacctgggccgcagcaggtgcggcgcgatcctcgtgctccgtcctgggggcggcggcgatcagggagtgttcctctcgggctccgccatcgggggaaacgtcgggaccctttgtgcgccccgagcgcgccagtgaatgtcgcgcagtcgttggcactc

SEQ ID NO: 36168 - DNA, 707 bp, Mus musculus
  source 1..707: mol_type = other DNA
ctgatattatcttgaaaatattctcagttggggatatgaattaatgtgctttctgacagaaatctagttagtcagtgaggctccatgccaggcttactacttcatgacgattttttaaaaaaggaattttttttccttctgtttcttaaatgaacattataaagcagggattttagggatttttttttttttttatgaggaaaaatttcaatcacctaaaagttgaatttttccgggaatgtggatgcccgcgtctggaattctcactgagcggcgaccagcctccatgccgggcctctccaagggcccacctgcggggctgaaacctcgtcctcaaagccgcaggcttggggacttgcgcgaggctttccgccagctcgcgcgaacgcgagtgcgcgtgcgtcgatgtagcgttcgcgcgcctcaagcttgggggcgcggtagccagactcggccgttagcgtctccggccgcgcttcggctccacttgccacggcggctcagccgtcgtaaagcgcagccgcgcctacttatgtcgactttacggcgtgtggccgtccacactcctcccgcctgaagcctcggccttccagcccggccgaaagcgcgcgccgccgggcactcgctggcgttcaggcacccgggaccttaggcgtccgcccgccgccgcctggctcttccgcccgccttgctcccggcgtgcaccg

SEQ ID NO: 36169 - DNA, 514 bp, Mus musculus
  source 1..514: mol_type = other DNA
aaataatatattttcatattttacactttcaaaaaatgaaatgtcattcagttaggtattgatctctcaaaaatctaatttacaattctgtgtataaaaatataatttgtggatgtgagtagttaaggctcttgaaggtccgttcatatttttaaaacatctattcatacgaaacaataacaacagaactccccggggtttttgcttccctacttattattattattattatcattattattattattatgaattattcttataattaaaagtctcctgcccggtcccgtcgggcttcagctggacttgaccgccattcccaagggatgatgcccgcagtcggctccgcgccgcgctgcagggatgctgcccccgcccccgccgtccgtgcgggcgggtgccagcgcggccagcagcgcgtgcgccaggcggaaaggcgcgaaggcccggtgtgcccagctgtgctcctcgatgacagcgtagcacgagccgtgcgccgtgagcggcgcgtacg

SEQ ID NO: 36170 - DNA, 347 bp, Mus musculus
  source 1..347: mol_type = other DNA
ctttccttgaaaattagcttgcaaagctcctgtgaaatacaacttttgctaggatagattgggcatgcagccttgcccctgccctccatgctggggtgcagcacatagaccctcagctgggatgcatccatccacctgcagaggcttgaatgttgagatacaataaaggacagtattttagggcacttaaaacatgattatcctctatctaaagatgctaaatattcaggagagctttaaccaaagcatcttccatttaggcagtgcggggtatttttccaataaacaggcctcctcttttttaaactggaagccttcaggtgaaaacagaagacaagcttgtatag

SEQ ID NO: 36171 - DNA, 321 bp, Mus musculus
  source 1..321: mol_type = other DNA
cagaataccaatcttccagctcggtaacttctgtagacccaggtgaattatgtacaattaaagtacatcaatacaatatttctgcttggcaccaagaagtactagtctttcgactgaggggacagcagaaagcgcactccaaagagccgcacgggtcagcgcatcctcgggacgcatcacgcagcctggctggaggggagagcccgtgcacgccactccacgcgcctaggacgcggcgggcggagccagccgctcgcagcaagagccaggcggagccggccggcgggcgtgcgcacctagaagcgcagaggccgctggttg

SEQ ID NO: 36172 - DNA, 396 bp, Mus musculus
  source 1..396: mol_type = other DNA
gggagcaagactcaggttccccagatcaaaattgcaaataatccttttaattccctcttgagtttcaggacaaccatactcctttaaattccaattttaaaacaaaaattgcataatgaagtttaaggcctacagaggatcattaaccatagacctgggggccctaggctaagttctccaggacagggtctcgaggcagaaggacgcaacggcaattttcaggccgagcccagtgctaaactcagattctgagaacaagggtggaggtgcacctgcaggcccagctccgagatttatgtcctgctgcagcacgcgtcagaaggcgcctagcgaccttcggcccagcgccccacgcgcagaggcgctcttctctgacgtacggcgctctcagagtga

SEQ ID NO: 36173 - DNA, 327 bp, Mus musculus
  source 1..327: mol_type = other DNA
cgaactcaggtgaccagaggtgggcacaagtcagtctgcagcagacccagtggggtctggtctacgctgcgctcctgggtccaacgcgcggcgcagcaccagggaaccgccctgtggaagtgctgctcccgcgccgaccgcagggccgcccgcgtctgcgcgctccgccgcaccattgcccgcgggcggcggggctatacagtctctcgtggccggacatcactctgagagcgccgtacgtcagagaagagcgcctctgcgcgtggggcgctgggccgaaggtcgctaggcgccttctgacgcgtgctgcagcaggacataaatctc

SEQ ID NO: 36174 - DNA, 377 bp, Mus musculus
  source 1..377: mol_type = other DNA
cccttttctgtagggattcctaaactaaactgtatataaacccagtgttttcctttaaacaataaaagactctttcgagttgcagtggactttgcaatttcatcgattttggactcagacatttgtaattgtgataagcactaaaaggaagaaaggtttatttagtttagactttcacatcaagtccacctttgagggaaaacaatgtttgctgacactgtgaaactactcatgggtacacacgcacgcaagaaaatgcaaggatgtgtgaaaatttatgctacagccatacctaggaaagtacaagagcttcagattttaaaggactctactagtgtctgcgcttccggaagtcccgccccttccggaagtgatgc

SEQ ID NO: 36175 - DNA, 723 bp, Mus musculus
  source 1..723: mol_type = other DNA
ttctatcatgtgcacatggtaatgcatgtgtatgtgatatatttatgtatctgtatatatacttgtgtatacacaatatacataacatatatgtatgtacacagagcatatactatataatactgtgcatgtacatgacatatatgcataatatatattttttttatgcatgccatggcatgtatttgtgttaaactctatgtatatgcatactgttttatgcatatgtatatgtgtatatatgcatgcatacatgatatatatttatgttggtttgtatgacatatgtgtatgtatatatgttgtatatgacatcgattcatttacattactttgtgtatatttatgtttgtgcttatgtatatgtaatagcacgtttttatacatgtacatacatatattaaacatgcataagtgtatagatatatgatagggtatatttgtgcattatgtatttatgatgcatttatacatttggcatgcatttatatatatatatatgaatatgtgaatatatatatgaatataactttcatttgaatacctttgttcgtataacatatattgcttccggtctccagcagtgcgcgcgacccggtcggcgtcaatgggcggcgggcgtgcacccgcggagccgcgcacgccggagtcgatggcggccctggcgtcggtgcccgcgctcgcgggggctgccgggaggagcgccgcgccgtcgatgaccgc

SEQ ID NO: 36176 - DNA, 350 bp, Mus musculus
  source 1..350: mol_type = other DNA
ctgaaagtcaattagaaaagagatctggccaaattctatgtttcacagttctattcctacatgtgagggagcatccaaggatctgtgacttcagatcatgggtctccacatcttctgtgctttctcaggcgttgagaaggtgggcgtccaaccataacattctgagatcaatatgtgttagctatgtctatttatttatacagcacatacaaaaagtaaatacatctttaaaataaccgtgtttgaaatctagctggattcaggtcggccgaacctcagaggctgtgagccagcctgcttccgggcaaacgcaggctccttggttcggctacaggcctcaggccaagggg

SEQ ID NO: 36177 - DNA, 577 bp, Mus musculus
  source 1..577: mol_type = other DNA
caaagcttttaaaacttgacaaaaaaactccatctccaaagtttttaagaccttttagtttgcagtgcagtaaattaagacttagtgtaaactccagttacataaactttagttttaaaagtaagctgagccaggcgggtcgcctagcaaacttcacccggcccccttcgctgcctggaggcctgggccggtgccatgggagtcctgctcttcgcaggccacctgaccccttgcttgcagaatgcagtgaggacgccaggactgggtgacaccagccttgcctactcagcctagactggaccgttcggccttgtgagcagtaccggccccactgtcgacccggttcctgcacccgtattccgggagccaagcgggttagccctcgccgcggctcgcggaccctcaccgaggacacggcggccagcgaggagggaagtcaggcggccggtctcctcgcggctgtggcacagctgcgctggtggcggtggcggcggcggcgtctcctcgcgctcttcttttctccaacaacaaacaggaagtgcgtcacgcggtggcggcgcggcccggcgacgtcgac

SEQ ID NO: 36178 - DNA, 415 bp, Mus musculus
  source 1..415: mol_type = other DNA
gttctattcctacatgtgagggagcatccaaggatctgtgacttcagatcatgggtctccacatcttctgtgctttctcaggcgttgagaaggtgggcgtccaaccataacattctgagatcaatatgtgttagctatgtctatttatttatacagcacatacaaaaagtaaatacatctttaaaataaccgtgtttgaaatctagctggattcaggtcggccgaacctcagaggctgtgagccagcctgcttccgggcaaacgcaggctccttggttcggctacaggcctcaggccaagggggacgcgcacggaggctgctgcgcacgttagcttcagggccgggcggaagtcgacgtcgccgggccgcgccgccaccgcgtgacgcacttcctgtttgttgttggagaaaaga

SEQ ID NO: 36179 - DNA, 303 bp, Mus musculus
  source 1..303: mol_type = other DNA
atcttatcttccatataccagaccttcaagcctccttgcatgaaagccaaaacaagcaatatgcaacattactgtctgtttgtatgatctgaaaaaactcaggtcagaacatctgtagatccttacagacatacaaaagaatcctagcctcttattcatgtgtaagaaaaaaaagaagagtgctcatgcttcttagggctagcctcaaggatgacttaaggacgtcacattgtgcaatcttaataagagatttttatcaaatgtgggattttcccatgagtctcaaaattagagagttgacaa

SEQ ID NO: 36180 - DNA, 275 bp, Mus musculus
  source 1..275: mol_type = other DNA
ttctagatcaaaccaggtgctggttctttgagaaaatagattgtattacaaaaagctttaaatcaggatcagattaatattactgtggttcccaaacaaaggctctttttgagactgggtctcaagtacctaggctggccttgaacttgctatgaagtgaaggcttgccttaaacaatctcccaggagctgggatttaatggcatgcatcccatcctataggctcttaatgccataatagggtactggcggccggaagtttcccagcaggaagag

SEQ ID NO: 36181 - DNA, 238 bp, Mus musculus
  source 1..238: mol_type = other DNA
tgtgcactaaagtgcaaatatgcacagcccccacatttttattctaatggttacgacagtaataaccacactgtcacctcattcattcattcacttaatgaatgaatgtccgcagccctgtggaatggggcggatctcacgctgagcactgagcctgcttcggcccgcctggtgctcactcgggtctgaggaggggctgccagtccaagaacagcaccatgcgagtgctggctgccag

SEQ ID NO: 36182 - DNA, 374 bp, Mus musculus
  source 1..374: mol_type = other DNA
gccatggctcaaggctgtaatgcctggcctgtagtactcactgaatagagtccatacttttaaggaccagactagggaccaaggtccttcttgaagagcctgcacctgcagagggcgccgcagagcaaagtttctgggaaaggcttctcctctaagaactcgagagcttcactgagcatccccgccgctgagcttggagtagcggatgtgagcaacgcagcaatcctgagtccggactccgcgaggccttggcacgaggggcggacccgagcaccctgtcacctgggcgctccgggggtgcgggcccggcgggcggggcgcggggcgggccccgtggaaggaggctggccacgtgactcccgaggctcagctgg

SEQ ID NO: 36183 - DNA, 338 bp, Mus musculus
  source 1..338: mol_type = other DNA
tttaaactaagatttgatctgtaaggcttgtagtagagcctcaaaaatgtgacaggtcttacttagtcctccgaacttagcggtgtgcctgacactgccggactcggaacagtagccccatttccacgggtcccgggaaaggggtgggaggcagacagtgagaggcaaacgctgctcccgagactctctctccaggctcacctctggagcgtaggatcctagggtcctaaagcggagtgtctgactttctgctcaggcgttcagcgggcagcccgtaaatgccgcggtgatggcgggcggggcgagagggggtccttgcggagcgggagccgcccctc

SEQ ID NO: 36184 - DNA, 259 bp, Mus musculus
  source 1..259: mol_type = other DNA
actctcaattaaaagtagacttaggttctagactaattctaccacctgtggcgcagtctcagtcactagctcgagaacgcgaccaccgcccgccctgaggcggttcgcactgaggcctggaccagcctgtccgcccacgccgaggggcggctcccgctccgcaaggaccccctctcgccccgcccgccatcaccgcggcatttacgggctgcccgctgaacgcctgagcagaaagtcagacactccgctttaggaccct

SEQ ID NO: 36185 - DNA, 378 bp, Mus musculus
  source 1..378: mol_type = other DNA
gaacaagggaactattagactcactgataatctgtttctaatagggctatatttctaattggtaaccatttccaaccaaataagtgcttctggataggcattgtaatttgaatttcaaatgcctctcatctcataaaaagtagcaattattaaacatttcctattattagacacatattaaccactggtgacgtgttctttcctgggccctagtttaaacacagggttcgcaccggctgaaccagtggaataagggactggcccgctgtggcacgtggcaaacttggcgatggccatcccgtgggcggtgtccctacccgcgggagccgcggggctgcgcttgcgcactgggtgcgctacgcgtgcgcggtgggcgga

SEQ ID NO: 36186 - DNA, 440 bp, Mus musculus
  source 1..440: mol_type = other DNA
ttcttattttaatttagtttagaaatggaaggatgacctggaacacaatcctgagttctgggatactggtgtaggtaaaccctttatagttttaattcttaaagagaacattaaaaaacaacaacaaaaaaaaaaccactttttacacctatgattttgtgtgtatgccactgtggcatgtgaaggtcaaaggacaatttatcagtactggtactttttcctaaaggattgaactcagttggtcactctccaaggggaggtgcctaggcaccccccccgcccccgcagactgctgctttgagagagcggtggtgtcctgggttcttccccgcccccttcggtcatggctacagatgatgagtgtacgtctcccactcagcttaaggaaagagctatataatacaatgctaagctgggctggagcgccgcgcgacagctag

SEQ ID NO: 36187 - DNA, 380 bp, Mus musculus
  source 1..380: mol_type = other DNA
tgtgtagatatacagatgtgtttatgtttatgacttgtttatttaaagacgggtctctttagcaacaccgcagagctgggttagaagtaccatagactctggaatctaaacatctcctttgccctcggctgaggcacagcatgaagaagtggcctgacccctcatctgtggcacagcttgctctgccctgccaagtggcaggagcttccattccaggagctggcaggagacacctgaagccggacagggctttatctcggagctggtgctgctgaataatggattcagcatgcgttcctgggcttgggctgacaacccagaggggcggggctgccggggctgcacagctctgatgagctgcagcagcggaggcggcagcc

SEQ ID NO: 36188 - DNA, 213 bp, Mus musculus
  source 1..213: mol_type = other DNA
cttcagggctttgatggctacagataccaaactttatttaagacaatggtttcaacccatcctttgtcttagtgagtgtgtgagggatatacagactcaaactgtaaccctctgatgatggaaccctcgtgatccaaatgggatcaaacaccatatctccagtagatatgaacaccacacagtaaccttgtgaggggttgccaggcatgtggt

SEQ ID NO: 36189 - DNA, 340 bp, Mus musculus
  source 1..340: mol_type = other DNA
ttgaagggatgatggtccatctttcatctgccagtagaagatactctaggctgaagagactctcatgtgtagggattcccagaagaaccagagcagctctgtggaccttctgtccctacagggactcagactgatggcataaagtcgccaaacttagtgagcaccctgcatcgactcagtggatcccggcaatgatgctgagactttcatccccttgaaggggtaagagcaaaaagcaccacagaggttgtgtagcttgctccaggtcagtggcagatctgggattccatcccaggcatcgtgactccctgatcttagccagggcatcaaaagtgctggt

SEQ ID NO: 36190 - DNA, 235 bp, Mus musculus
  source 1..235: mol_type = other DNA
tgccgctcctgtgtgtcctgggccacagcagatagtggagaggactgagccctggtcttgccccaggttccttatccatgggctaaagattgagccagtgggacccaaggtcccctccagcctcagcactcctgggtctgtgtggttagtctcctccatcacacacacacacgcgggagggcaggcgggaggtggcggcccgcggccggggggcgggcgcgggggcgggcggggg

SEQ ID NO: 36191 - DNA, 297 bp, Mus musculus
  source 1..297: mol_type = other DNA
agatgaagtcagagcacctgtggcccaacctctgaacactgctgcacagaggtccattgaaaccactgattatataagtattttcctgattagagttcatgatagatcatttagaaaactcaaaaaagcaaaatgacgaaattctctttattctaattacggagatgacctgaattcatattactcccgggagaaaaggaaaagccggtttttttctcagtcttctgaaaatctgaatcactcaacgtttgatagaaaagcataaaacttttgggtggggaaatcctgccttccttc

SEQ ID NO: 36192 - DNA, 348 bp, Mus musculus
  source 1..348: mol_type = other DNA
gagtccatcttggagtacacagtgagctggaagacagtctggcttatataacaagatcctgtctcaaaaactaattaattaaatatggtgttttacttatatttcaagacacccagtttgtgttttagctgttaaacaccctatccctagggacatttctctcaggactccagttctctggagatcctggagaaaattgtttataaaatgctctaagagcgtacgctgcagaagtacagggctcgctcagcatgccttggcccgggaccctgcactctgcttctccgctcctaccaaagaccggtggcagctccggggcggggctatcatgtgactcccggcccggaa

SEQ ID NO: 36193 - DNA, 460 bp, Mus musculus
  source 1..460: mol_type = other DNA
caacagcagttgtagatccccaggaatccaggggcgggggcagtattaatgctgcatttccacacgggtttgcaacaccattggggtgacatcaagtgaagagattcaagttctgaagctatatttaagctgtcacaataatgacagactacactcagggaaaggcctgagccataaattagttaaggaaaaagaactgtggtgctgatgtgaaatgagtttaaaacacttcttttaaaggagcctgggcgctggacatcgacgtccaagcgctgcccttggtctatgagaacagtgttcctgtcagtctcagactcagcctcggagagaccccgccaccgcattgtttcagcccctcgggtggggtcttgcaggaggaggggaggcgatgtgtcctccggagacgccctataccctcccaggggaccgagccataccgccccagcgcctgggctttgtg

SEQ ID NO: 36194 - DNA, 466 bp, Mus musculus
  source 1..466: mol_type = other DNA
gtggtgctgatgtgaaatgagtttaaaacacttcttttaaaggagcctgggcgctggacatcgacgtccaagcgctgcccttggtctatgagaacagtgttcctgtcagtctcagactcagcctcggagagaccccgccaccgcattgtttcagcccctcgggtggggtcttgcaggaggaggggaggcgatgtgtcctccggagacgccctataccctcccaggggaccgagccataccgccccagcgcctgggctttgtggaggtcctggggccatgccctctgtcccttctcggacccggggcctgcaaaagggactgtcgcggaggacgcggggcgctactggtcccgcctccgcctaacctgctagctcgaggtggcgagcacttggggcggagccctcggatccgtgattggcccaggcggctccccgcccccaccctcgtccgctcgccactcgggact

SEQ ID NO: 36195 - DNA, 294 bp, Mus musculus
  source 1..294: mol_type = other DNA
taccatgaattcactaggctagaaaagtgcacggtctggaattaagggtcagtccttcgatgaagacttttccaagaagcatcccgctactactgtagaaatagaagtaaaggcttgtcccttctttgactaggcaggggagaggaatgttgctaaggaaaagggaaggggctgttcccagttgccatggtgacacggtaaaagcgtccgccgccattgctaggacgaggctggccgcccggttgcctggagacggcgggtgccctggctccgccccgctggtcctgacagccc

SEQ ID NO: 36196 - DNA, 323 bp, Mus musculus
  source 1..323: mol_type = other DNA
catatggtctacagacttaagcttctttaatcccagcactggagtctttttcaagcctttagtgcacctgactgaaagggttgcttttagcagatagagcagccagcgacactgtgactctcccaatgacacctttccctggacagtggcatccccgggaaactgccctgtgctgagacctcaacagggctcactggagaagcgctggtcccaggtgcctctgccaccatccaggttgggtgcatgtgtgcgccatgagaaggaggtgattggctaggcatgccagggctttgtgacccgctggcagaaccctctgtctctgg

SEQ ID NO: 36197 - DNA, 446 bp, Mus musculus
  source 1..446: mol_type = other DNA
tgaataatttacccgtaagaaaagtggaccactccttgtcagtgatggtcactaagcaacatatttccttaaatgtgatattttcctagctgggatcattctgaacatctggaacatggcatgagccagagcctgtcctttcctggcatggcctggctgccccaattaagtttgttggccgccaaatacgaagtttaattgctaacagactactactttctaagaagtaagaacacatttattgagaactattttcattccatccttcaggagcattgcaaagataagaaaaaaggttccatgcggtcagaggcgagcccgcccgcaggtgcatgcgccccaggggcggaacctggccgccgccatcactccccaggcgctcggcgcggcgccgtggcgcgaacggactacgacccagggtgccttgcggcggcggaggcaccgcg

SEQ ID NO: 36198 - DNA, 366 bp, Mus musculus
  source 1..366: mol_type = other DNA
tcgaaggacttcgtgcacaccgtattttcagttaagtagtcgaagtacaacgtaccttgttcgcatattaggtgttaaagctatagtgacatgtacttcaagaaaagtccttattgcttatgtatgtattacatcctactttatattgtgaactacattagaaaactgagtctcagagcgcttgcgagaggtagcgggatcgatgcccgcatctgaaagcctcggggaggcgggccgttaaccgcctacagagaagacgcctagtgagccgcacacggcggtggcccgccctcacaggtacctgccaacgtgcacggaaccctgcgtggcgaccagtagccagctgcagctgcggccaataggcaa

SEQ ID NO: 36199 - DNA, 486 bp, Mus musculus
  source 1..486: mol_type = other DNA
gttaaagctatagtgacatgtacttcaagaaaagtccttattgcttatgtatgtattacatcctactttatattgtgaactacattagaaaactgagtctcagagcgcttgcgagaggtagcgggatcgatgcccgcatctgaaagcctcggggaggcgggccgttaaccgcctacagagaagacgcctagtgagccgcacacggcggtggcccgccctcacaggtacctgccaacgtgcacggaaccctgcgtggcgaccagtagccagctgcagctgcggccaataggcaagaggtcccgggtggagggcccgggtgccggggcccgaggtgccgcctcgctagcgggagagggagcgggggggcttcgcgtggactgcggccccgccggcaggccccgcccccttctcagcccgctctgccggagcccccgtcgaatgccaccccgccccccggcctgccgcggccggcccgccgaccccgcc

SEQ ID NO: 36200 - DNA, 390 bp, Mus musculus
  source 1..390: mol_type = other DNA
ctttggctcagagaagcagaggcctcccctgagcccaggccccccctttaccgcagtccagcccctggccctgtcttcagaaagactaccacccgtgagattccatccccacgccagcgagcctgggaggggaccgggaggtgggtcggagcctagaggtcaggcccagcctcccgcctgcccactcctgggctccagggaggctgtcacccagcgtctgaagctaaccgcggattccgccgcgccagctgcagccagctgcgacccgggcgggattcccgcccctgccgagcggaccacgccccgttccgccctcgccgcaggacggcctaggctccgcctaagaccggctcttttgcgcgcgccgccggagcagacggccggaagtgc

SEQ ID NO: 36201 - DNA, 436 bp, Mus musculus
  source 1..436: mol_type = other DNA
agcgctgtacttactgggcaccgcacgctccaacctgggcgtggcccgcatagactcgggaggctatgaaccaggcgctactgcaggtcggagacactgtctgcatcgacctggtcatggggcagctggcacactccgaggagccgctcaccatcttcagcggagccctgctctacgagccacctggatggtggctacccaccaagtcggtcactccgtacgttgtgactgcgtggtctatggtctccgggacccaagccggtattcaggaataaagacactttttttttttctacaaaacatagctattctcaagggcacctgcggactcagggtcacggccaccggtccccacagcggccgctagggggcgctaggccagaaccactgcgaaggctggcagcgttccccgtcacgtgacaccgtttctggcgcg

SEQ ID NO: 36202 - DNA, 277 bp, Mus musculus
  source 1..277: mol_type = other DNA
cttgagtcactacagtcatttagagtctcatcccagccattcattgacttgatgtgtcaccttggacaaagtaattactttcccactgtaggcctctaaaaggaggcagtaggacccaatggtcctatgagtgcccccaacccagggcttctgggtctctggctggttcctggttctagccaccagcacgtggcctgtctgagaggctggcctcaagcccggcggggagactggcccgcccatggtcactcttgtgcctctcaacagccacaggagc

SEQ ID NO: 36203 - DNA, 538 bp, Mus musculus
  source 1..538: mol_type = other DNA
gcggagccctgctcgagccacctggatggtggctacccaccaagtcggtcactccgtacgttgtgactgcgtggtctatggtctccgggacccaagccggtattcaggaataaagacactttttttttttctacaaaacatagctattctcaagggcacctgcggactcagggtcacggccaccggtccccacagcggccgctagggggcgctaggccagaaccactgcgaaggctggcagcgttccccgtcacgtgacaccgtttctggcgcggggggggggggcggggcctcggccgggtgggccaccttggcggggcgagggagagaacgcttgcttctgtgctccgcctgcgaagtgctagtccgggtggtccagggtctgcagcaggcgcagagggatcggaaaggcgatgcattactagtgcgctttcgctttgacagctgaggcggaaaagtgagagggcctgccattggccgggctaggtaacccacccttgcaaagcagaaagctccctgcgggaggagttctgcacgc

SEQ ID NO: 36204 - DNA, 291 bp, Mus musculus
  source 1..291: mol_type = other DNA
ctgagggtgcctcatggcttctgtaagaaattaggcgtcaatcctaagagttcgggctctggaacatttagatctcatatagatactctgtgactgagccacagcagaccgcaagcaccaagatggcagctgtgggggcgctgctagccggagtggaggatcgtgggcgactccgctactgccgctggggcttgaggttaggcacagccagacaccgcccctcgcctcagaactggcggtgggcggggccgacggcgggtgggatctgcagaagcctgccaatggcttgca

SEQ ID NO: 36205 - DNA, 470 bp, Mus musculus
  source 1..470: mol_type = other DNA
tgtgacactccgtcttgatcataaagccgtggtcctagagctgcagcatttgcactggaaatgttcgtggggaatctcagctccatcaacttgagaggactttgttcccatgtcgtgattcgatactgtcacattcttagataatcggccacatactaacagtaagtcattctttttagtcactaacgagtttctcagataatacatgtctatgtgtctaatacacacatgcacatcagactcaccattctgtgactctgtatacacagaaccgactcactactctgtttcttgaatctgcctccatctgagtcacagtgacacacactccaaggaggggcggtggccctcccgtggctgtcgctcgctccggactctgcccgggcctgggcggcggctgcagccgggagggcgacgtggaatggccacgtggagccgcccgggggagggccggctgcgggcagccgggc

SEQ ID NO: 36206 - DNA, 417 bp, Mus musculus
  source 1..417: mol_type = other DNA
aagaatgcagtacttccttgccctaggagctcattgatccctattgtctagggttgttttaaaaacaaatatttcatcatatatactggccactggtgactgaattcagtgtatcaaaagacaccatggtaataaattcatgtatggttgactggaaatataaaccatattcaaataatggtccttacatctctataatgtgaacatgttccaaaaacacttaaatagtagggtaaccaaatagcccggtttatctgggattttcttcatattaggatattaggaagcaaaaggcccggcttgtacgagtcggggctaggacccggatccgacgccagggttccgtgacagcgcgtcccgctagtgctgacggtcttgcgcttgcgcagagagagcccaggagctcggcgcgtgcgc

SEQ ID NO: 36207 - DNA, 252 bp, Mus musculus
  source 1..252: mol_type = other DNA
acacacacagaggatctcttttctttatggttgctctggagaataagtaagatgctcatataatatgcagaccacaatagtgagctaggaacatgctattaggatactagtcagattatgatcctgcaggttcagaaccccagactatggacttgaaccccgtactctgtcaggtgtcagggtctaagcatgggcttggccactcccagcatgcagtgcctccacccctcagccggaatgggaggcaggcgg

SEQ ID NO: 36208 - DNA, 455 bp, Mus musculus
  source 1..455: mol_type = other DNA
agtggcctgcactacgtgagtactgggcccggggcgagctggattccgggctgacggccagcaacctggccagggccctctccacgcccagaaccaggagcagggcggccgcccgagagccgcctgactcccgcgcgagaaccgagcgcgaggctccgcccccagcgtgtcacgcgccagccttgaggcgaggggggcgtggcctggtccgcccggggcacgagccgtggagcccgaggcgtaatttgcccgcaggttcgggctgcagcgcaggcctgtccatgaccctcagcccggtgcggacgcccgggcagctccatccgcccttagtaaacatggcggtcctgctgtcccgctgtcaccaagtcaggaggtgcgagccgagccgagccgggccgggctggcctgcgggccagctgccctcatgtggagatctgttcagtcgcctggaggcg

SEQ ID NO: 36209 - DNA, 433 bp, Mus musculus
  source 1..433: mol_type = other DNA
tgtatcctcacagtaagcagccactctggacaaattgtgcatacctcttcccataatgcaaagcggaaaagtgccttttgtaaacagaacccattttttcaagcatcactatatatttagatagatagatagatagatagatagatagatagatagatagatagatagatagatagatagatagatagtgcaccacgcacagcattcgtgcaaggagagctggtatttaaaattattcaaagtggcctgcactacgtgagtactgggcccggggcgagctggattccgggctgacggccagcaacctggccagggccctctccacgcccagaaccaggagcagggcggccgcccgagagccgcctgactcccgcgcgagaaccgagcgcgaggctccgcccccagcgtgtcacgcgccagccttgaggcgagg

SEQ ID NO: 36210 - DNA, 402 bp, Mus musculus
  source 1..402: mol_type = other DNA
gtaccaaaggttctttccgaaattggtttttccttggcaaggcaaagaacatgagttaaggaagcgtctttcccgcttcgcgcctccaggcgactgaacagatctccacatgagggcagctggcccgcaggccagcccggcccggctcggctcggctcgcacctcctgacttggtgacagcgggacagcaggaccgccatgtttactaagggcggatggagctgcccgggcgtccgcaccgggctgagggtcatggacaggcctgcgctgcagcccgaacctgcgggcaaattacgcctcgggctccacggctcgtgccccgggcggaccaggccacgcccccctcgcctcaaggctggcgcgtgacacgctgggggcggagcctcgcgctcggttctcgcg

SEQ ID NO: 36211 - DNA, 182 bp, Mus musculus
  source 1..182: mol_type = other DNA
aggagcttggctcttcagggatttacttcgttgacaattactggccaatgagcagaactgtttaagggccattgataatgaaaggtgtccgtactaatttgtattattgactacaataaaccctatggtcccgcccctgacgtgcccggccccgcccctgacgttgccggctgcttgcgccg

SEQ ID NO: 36212 - DNA, 223 bp, Mus musculus
  source 1..223: mol_type = other DNA
aagtaggtaaggaaggagttacctgctgacaaactcgataaacagtgatcgtggaccctcgagaggtgagaaggttaggtactttttgttacccaattccagagcctccgcagtgtggggagagggcgctgtgccggttcaccaccactataacctccaccccaccccatctcacaatttggcgcgggggaaatggggagctcgccccgcttggggcggggct

SEQ ID NO: 36213 - DNA, 524 bp, Mus musculus
  source 1..524: mol_type = other DNA
aaatatgcatgtcacgaagcatggccacctgagttcaatccctgggacctgcgaaatcagaaatttgttcaaggatgttataagcttttcaatgaattatgtatggtcaagtagttataaacaactcaatatacagcctagattatataattacattatggtgtctccttagtatgggtgacttttggaaaggatcaaaaatatcactttgaagggacatgccaacaaactgttacagtctaatgccataaaggccttaacaggagacaactgaccggggaaggtcagatttttccagaacactttcaacatttgtagagaagttttcctgccttacctctcatctgctaggtcaccaagcccatagacccatgacggtgatcgggatggtcatggcctctccctggagatgagaaggctgtgccttcggccctgggggctggaagtaacgatcagccctgagcctgagggtcaggcttcgttccgggcccaatatgggctcccgactcggtcctgctggcggc

SEQ ID NO: 36214 - DNA, 348 bp, Mus musculus
  source 1..348: mol_type = other DNA
aaatgtacttgtcatcaattctgatgactcaagtttgatttctgggccaccactccccaaagcaaattagtgtggggttgtttgaggccagcctggtctcaaagctatactgttttaaaaaagaaatagaagaagaagaaaagttctctttcttggtctgggatgacaccagatctacagatctatccagaccttgccccccccaaaggctagtttagactttgtttctgtttggaaaaaggtcccaagccagaattcctgaatgagtcagggccactcagtccggggacagctgtggctcaccttacatgagctaaattgggaacccccacagtaatgttaatctct

SEQ ID NO: 36215 - DNA, 278 bp, Mus musculus
  source 1..278: mol_type = other DNA
aggaacttgggccaaagttttctcccagtctggcctcaaactcagaaaggtaaaaaggtataatagtactgtttctgtgtttcctaggaaaaagctgactttgccaaactcaggaggtgattttagtttgtactgctgtacaatggtcagtagaatgggtcagacccactgtattgggactgtggagcccctgccagcagagcatcttctccccagaacttctgtccagattgtggctgtgaagaagttcggaaccacggacaggaaacgaagatggg

SEQ ID NO: 36216 - DNA, 373 bp, Mus musculus
  source 1..373: mol_type = other DNA
cagacatcaaataagttgacctttttcaaggcttggagacgtatacatctttacctacctcaggaagggagattaagattcctaaaatgtttttttttttttaaatatagttttagaggccagcctggtctacagagtgtgttccaagacagccattagaattcaaggagccctgattgcaagacagggtctgcttgtccagaaagatttttcagacaaaacttaaaaatttggtatcaagtggagactgacagtctggcctgatgaagcacagactgtcctacaccgatgtttggtgcagtccacgagaagggggctgcccactccccttaagtggtcggctgagccgcctcgcaagggacgcccggcccct

SEQ ID NO: 36217 - DNA, 481 bp, Mus musculus
  source 1..481: mol_type = other DNA
tttctgagacatggtctaatatagtacaggctgatttccaatttccaagtagtcatggatcacgttgaacgcaccattactctttgtaaagatttaaccaagggaataaaggggaaagctgccatatttcacctacatggttttaaaaggctgcggaggccacttcccagtgaggctctttaaaagcgcagcctacccacccaggcttggctcattcactggcagcagaaaatcaggagatctctgggggcgagggattgtctccttccacaaggctgctggtggagctgcggtgccgcgcaggcgccgacctccccttccggtcgctcccagaaggccctgcagtgtcctagggccgcggaagccacgctccagctcgcgggcgtcggagggctcagtgccgcgccgcgctgcattatggaacacagagtcggcaggaaacgcgttccagaccaagcttgcgtttaccttgtctcggggc

SEQ ID NO: 36218 - DNA, 399 bp, Mus musculus
  source 1..399: mol_type = other DNA
atctgttactccctataaaatgtttaggagctattattcaaaatgctgtcatttgacctgaattcctgagctcaagagatcttttctgagacatggtctaatatagtacaggctgatttccaatttccaagtagtcatggatcacgttgaacgcaccattactctttgtaaagatttaaccaagggaataaaggggaaagctgccatatttcacctacatggttttaaaaggctgcggaggccacttcccagtgaggctctttaaaagcgcagcctacccacccaggcttggctcattcactggcagcagaaaatcaggagatctctgggggcgagggattgtctccttccacaaggctgctggtggagctgcggtgccgcgcaggcgccgacctcccc

SEQ ID NO: 36219 - DNA, 424 bp, Mus musculus
  source 1..424: mol_type = other DNA
ttgaagctgcatctagtcccacctgctcgtgcagccccagaagctggcttcaaagcagaaggcccagtcccgaggacactcgggcgcttgtgcggcagtatccctcccggagatgtagtgcccaccgccagagcagtcgcggcctggccgctggaggccgctccgagagctccggcccgttccacgtaggcggagccgccgctgtccccactgcgggactctaccaggttcgcagcgcctctgcagctcgccattttggtgggcctgaactccgagacggctctgcgagcagcaacctcggcatgctgggagggtcctcaccgcgacccgtagtcctgggcgggacccagtgcacgccggaagttgtagtccgctggggactgactccgcgggaggcatcaggggagccagcagcccaggtggc

SEQ ID NO: 36220 - DNA, 493 bp, Mus musculus
  source 1..493: mol_type = other DNA
tctctgacttctgttacaagtctacgtagtaaccagttctactaagacacagctttctgtgtagctcttgttaccccgggccgaggagaaagttcagtcttcatctcggatctcgattctgcatcagaggctccggcgtcggcgcagctggctgctgggttggcatgaccacagctcggctgccgggcgcgaggcgctctgggatccgcgtggggacgcactgcgcgttctgggaacagccggcaagcagcaccctgctgcgccctaaaggcgctccggaccccgcatcagcgatagccaccgccaccgcagccatgactgtgggtcctaggctcctcccgccgagccacctgggctgctggctcccctgatgcctcccgcggagtcagtccccagcggactacaacttccggcgtgcactgggtcccgcccaggactacgggtcgcggtgaggaccctcccagcatgccgaggttgctgctcgcagagccgt

SEQ ID NO: 36221 - DNA, 354 bp, Mus musculus
  source 1..354: mol_type = other DNA
cccccccacgcggcagcctgggaggctcctcctgagtaagcagcccgctggaggccatcctgcgctgttcgccttcagattggttggctagcagcgcatcacaatcacttcctggtcatgctgcgactgcagcccgcatcccgtgttgcgaagcggcggcggcggcgggagcgacctgagctggattccggggccggggccaggggctgcccagggcccgcaccggtgtatgggggcggttcgtggatcctaagagcaaggaccgacggcaggaggggcggggccgggaggcctcgggccggaggcgcgtcgggctggagccggtcacgaaaggtcaggggtcaggggccttga

SEQ ID NO: 36222 - DNA, 214 bp, Mus musculus
  source 1..214: mol_type = other DNA
tgacgtgcatcatcatttgcttcaagccctgggtggctttcctcagcccgagggccccccaccccccccacgcggcagcctgggaggctctgcctcctgagtaagcagcccgctggaggccatcctgcgctgttcgccttcagattggttggctagcagcgcatcacaatcacttcctggtcatgctgcgactgcagcccgcatcccgtgttgc

SEQ ID NO: 36223 - DNA, 270 bp, Mus musculus
  source 1..270: mol_type = other DNA
acagactcttcctctggtgtccagtgcacaacagacctttttcctttgtcagtacaggcagcacggtcagcgtggagatggccgcacatcgccatggctccctccagccccagccgttggtgggcgtggcaaccagtctcgcgggagcggcggttgggcgggccgttgtccccgagggcggggcgagtgcgaaatgaccgcccgcagcggctcaccgcgccagtagggcggggcctggagcagcgcggtttccgcttccgccctctcccc

SEQ ID NO: 36224 - DNA, 532 bp, Mus musculus
  source 1..532: mol_type = other DNA
gaattcacagagatctctctggcatgcttgttgaaatttcagtttttaaagcaagcattttaaagtgaagagtgattgtgacattctcagattcagatgattcatccttcttccttgataatacatgtataatggtattatacatctcttaaattctgcctttaactttctaagatcaatggctaagaatctattgtaattctttacactcacagacaatgtaaactctttccaaataataccttttcaaagacagttttaacttaaatttgattgccaactatcattggataacttcaatgagttctccctaatgttatgcaaatcagcaactattagttttcatgttaagcgattaaaaaaaagctttctgaaaatttgatttcccaaatggggaatgaagagagagaaggccttcctttcctggcaggcagtctgccggaacccgcctcggtctgtgggaaccgccccccgctgccctgtccaatggaaacctggcggcggtgcggcaccgcccactgttggtccggac

SEQ ID NO: 36225 - DNA, 524 bp, Mus musculus
  source 1..524: mol_type = other DNA
cctctcctttcttttgcatatcccttgaggggacatgtcagggacagggacagggacagtacttgacagggctctgatctggcagctgagctggtgcagctgggcttgccttactgagctgcttccccaggctgatcagagccgcctgacttctctgctggaggagacgctcaacaagttcaacttcaccgagccaggcccctagccaggctgtggctgtccctgggcatgctcttctcagcagccaccttctagctgggggctagtagctgacctgctgcctcctgccctacttgtgtggacaggaggcccacgggcactggggaagctgagttctacaatcccgctggggcgcgctgcaggggtggccccccggggggggcattcgaatcacctcagctgtaataaagtctactttttgctgtggcaccgccgcttcggttggggcggggcgggcccaggtagggtggccccttggaggccgggccttaggcaggggcggggcggggccaggtggagccgcc

SEQ ID NO: 36226 - DNA, 198 bp, Mus musculus
  source 1..198: mol_type = other DNA
cgggcttgcccattctgtctcttgatcttttgggagaaacaagaacaaaaattattatcccaaagaagatggtatctttttttgcttactggtctatatccaccatatcctggataatttcctgagactgtgtgactgtcagtattgagtggcctcccgcaagtcacctaagttttgggacagttcgctccgtcgcga

SEQ ID NO: 36227 - DNA, 334 bp, Mus musculus
  source 1..334: mol_type = other DNA
gtttctctgtgtagcccgctctggaacactctaccagactggcaagagtctttaaaaaccttctgtcactgtatgaataagtattattcaacaacttgttagttgttgcattcattcagtaaacatgtagacatgttaggtccttaaattatttcatatgttagctgacttctatgtatctatgtgtccatgtgtccatgtatccacatgctgacatgtgatcaagccatgaccgagggtcctcttctccaagggcagaggctggcaagccagagtatacgcaaagaggaccctcaggagctcctgtgagggctggatggctcagataagacct

SEQ ID NO: 36228 - DNA, 400 bp, Mus musculus
  source 1..400: mol_type = other DNA
tcagctaacatatgaaataatttaaggacctaacatgtctacatgtttactgaatgaatgcaacaactaacaagttgttgaataatacttattcatacagtgacagaaggtttttaaagactcttgccagtctggtagagtgttccagagcgggctacacagagaaactgtccagtgtttgacactattgatattctaacaattgtttcatgtttctatgctttaagccgatttctctcaggaatgtgttacactcacacccacggggggggggggggggggagagagagatgatcagtaaatatttgctgaagaggttgttaaaacaatatgcctcttcctaacggggaaggaggtgctttctcaggtgcacaagaccctcacacctgagcctgtcctg

SEQ ID NO: 36229 - DNA, 406 bp, Mus musculus
  source 1..406: mol_type = other DNA
ccagagaaacagtcttagttcctctgtaagaacttatcatagctctttgatagaagaccctcagggagtagctccttgaaggaaccttcacagtccctcagggagatagacttctagagagaagagggcacattccttctgtgaagaagagtctacacagtctttcagggaggagtcagcagactctctattctctgagatggaaaggagccatggtaatttctctgaaagatccttttccgttcccgaaaggacatagttctggatcaagcccacttcttctaagaacaggatgtctttcagggaccgcaccaaaaaaaaaggagagttctgtccctcacctgagtttaatttaagatcaatatatcacgtgactcctttcccgccgcagccccctcggaagcag

SEQ ID NO: 36230 - DNA, 293 bp, Mus musculus
  source 1..293: mol_type = other DNA
cattaatttaaacttttaaaattctcttggctcaaaagctagcttgatagaccaggctggccttgaactcacagagacccgcctgcgagaattaacttcgatctcaaagcaagggttactcttatcccctggcttttaagaaactgtccatttcattcttaagacaatggacaacatggacaattacaccaactgtgtctagcttggtggaccccaggttacccagagaagttgtccagaagcatctcaaggtatcatgtctagagaggtggagtcactagagagacttctgt

SEQ ID NO: 36231 - DNA, 335 bp, Mus musculus
  source 1..335: mol_type = other DNA
ctgactcctcttctggagtgtcggaagacagctacagtgtacttacatataataaataaataaatcttaaaaaaaaaaaaaagagttttatccactttccaattaaaggggactgagcaataagggtcacagtctctgtgaaaataaagtacagtattgttacgctaatttttacctaatattttctagaacataatgacgtttaatttttttcttcttcttcttagacaataaaataaaaggtagagcaacaagcggtttggatagtctggccaatcgcaacggatcgttcgaccaatcgtccggaattcagagagcccgcaggccgccgggcg

SEQ ID NO: 36232 - DNA, 424 bp, Mus musculus
  source 1..424: mol_type = other DNA
aagatttttattttagatttttctacctacccgcattacatgcccgacgtggacggatccgccccccggtgctgtagtacagcatggtaccgagacacggaaggatgctccagacatatgtcaagcagcagctcgtgtgatggtgccacccttcagggtttcgagactgtagggggccgtggctgggctgccccacgatggctctcggtacggaggagcccgggtcggaccgccagacgcaggagctacccgcggggagcggagttgctccaccggtggacccccggtctcctggctgtccggctgcggtggcgggacctcgggctcctcacatccagagtccagctgcgccgcccccgtactgcggaaggcactggtaatttcaagactcgcagagttttaaagatggaggctctcagagtgc

SEQ ID NO: 36233 - DNA, 360 bp, Mus musculus
  source 1..360: mol_type = other DNA
tctgtcaaagagttataatattaactatggcttagttcaattttccataaattttatgacaaattaacactactatttccaatttttcagatgtttgttaagccactaaacatgctatctcaatattttgttccgagtaataaaagaatgaacaataataaattgcttctttactaacttcataaaaggaataaattcgagagctgcagatagggactccttgctccggatctggaggcttaggcttaggcgccgaccacaggatcctctgacaggtcggagtcctaggagccttgtttattgattaatggaccaagcactctgagagcctccatctttaaaactctgcgagtcttgaaa

SEQ ID NO: 36234 - DNA, 333 bp, Mus musculus
  source 1..333: mol_type = other DNA
ccagatttgaagcatgatgctaaaaaataaattataatatagggagagtcacaaaaataataaaatcctgattattaattgggacacaggcataattgctgggcaatatctcgtatgaggctatgccagtgcctggcaaaacagaagtggatgctcatagtcatctataagatggaacatagggcccccaccgccccagcatttgaaatgtatataaagaaaatatataataaaattaaaaaaaaatgtatggagggggggtccttcccataactgagtcagagactgcccgaacttcaggggcgtgtctaccggaacccgcgcatgccccgg

SEQ ID NO: 36235 - DNA, 527 bp, Mus musculus
  source 1..527: mol_type = other DNA
ggaaacatgtgcccccgttgacgtcatggaacggaaaggggtggcctcctgctgcatcacgtccacgtcatatggcgcacgaggagcaatttctccacttccaaagaatgtccacccattctgaggagaaagggatgatgccctgaacgcgggccttctcttgaagagacatggctctctgcgccacctgtgtccccgcaccagcccgggtccaggtacctggaacttaagtccgatcagtaaccggcgactagacggggtacaggttacccgagcgcgcccccgaccgacgcaccgacctgcgcgcgaaccgcgggccggatgcgtgcgcgctcccccggacgtcccgccctctccggagccggccgggcgtgcgcgtccccgcgccgagaagccggaacgaccgggtagcgcctgaaggttcccgggagctctggcctagtgcttggggccgggccctgtccggagggcccggcacaggcgggtggaacgcccgcgtcgttaaggaggacggggcggcgtccctg

SEQ ID NO: 36236 - DNA, 463 bp, Mus musculus
  source 1..463: mol_type = other DNA
tttaaattttgaattcacacttaggtgttacatttccacataaaagtaaactgtaacccagttgggtctggtggacaaaacacttcttgtgctctcaaccctggtacatcatgttctcactggggggtgtctatcaaagctttcattcagtcaggcttggaaacctgaagctttcaggaaagttccaatggtgggtgcccaccgatccgaggcccgggcatccacagtgtggctcgccctcccgctgcggccccgcactaacctgaccaggtcggtcatcagggacgccgccccgtcctccttaacgacgcgggcgttccacccgcctgtgccgggccctccggacagggcccggccccaagcactaggccagagctcccgggaaccttcaggcgctacccggtcgttccggcttctcggcgcggggacgcgcacgcccggccggctccggagagggcgggac

SEQ ID NO: 36237 - DNA, 543 bp, Mus musculus
  source 1..543: mol_type = other DNA
gaccaagggcgctgcgccccagggggggtggaggagttcggcgagaacgcgggcggcctcggcgcccccgtagtgcgagggccgcgctctcccaccctccccgcctcccgccttcctcgcgcggggtctgtggctggcgtcagcgcgaccgcgagcgaggccgggaggggagcgccccgcccgccttctcccctcccctcgctcctcccagcaaggctcgggcagagcgcaggggctcgaagcgagacaggcttggcaggtcctggagccagcacggggtgcaggtcactgcgacgcggagccacgtccctctcagcaccgctacgggcgctgtcccaccggcgcgatcggggccgctggaccggcgctcaccgccttcgagtcgccgggaaactcaggcggcgagctccttttctaaaaggaggaaacagaagtttcgagagatcggggagggagtcccccagagctgccaagcgacacccgcggggctgggtcccggcagagctccggctgcgcgcgggggcggaagggcgcgcgcagggg

SEQ ID NO: 36238 - DNA, 227 bp, Mus musculus
  source 1..227: mol_type = other DNA
tcaggatccttaacaagtacttttgtgtacaaacgagggtgccccctcaccccgtgaaggggggtcttgacccacaggttgagatccagtactttagatctagcttttctgagctcatagcttatgggcaggacctggaaacaacccccaagcgtcagttcagtgttcttgcgaccttaaggcaagggtgggctctggtccttctacaaggtccctgggagatgctc

SEQ ID NO: 36239 - DNA, 435 bp, Mus musculus
  source 1..435: mol_type = other DNA
agaactgaaccagggaggggaattttatgctcccgagctaggatagctgtgctcattaaagcgttaccttctagttactgactagttaccttttagttacctactagtcaccttctagttacctactagttagttaccttatagtaaacttctaaccttaaacacatctaaactttgtgtgtgtttgtgtgtttgaaactttgaaaatgcgaataataactaatagttgtgggtgctttcgaaataggatgaaattatcttcctttctgtggggaaaccaaattcatttgttaagaaaaatacgtatttgttcaacattcaccgagaacttataacatgccaggcattgaatgagcaagcagatgaaaacagctgcctatgatggctctcacattctagtcaaagagagagcagtcacccttagatgacagaaat

SEQ ID NO: 36240 - DNA, 246 bp, Mus musculus
  source 1..246: mol_type = other DNA
tacaagcacagcttttaccccatcctcaaggttctaacggtcaggaattactgtgggaggaatggccatggttagcaaggaaagtccctcttgtcaatcttcacactctggaccctaaggaaactccccagtgcgtgagcttagaagtcttgccagagaccttgcttcaggggctaacccttgaaatgtgccaaagctagggttttgacttagacccaagtgttttaggcatacttgtgactgcac

SEQ ID NO: 36241 - DNA, 429 bp, Mus musculus
  source 1..429: mol_type = other DNA
ttctttttattttatttttatcagaatcaaaattacagatagatagttgtaaccaaatttatcccaactgcaagcatttattatgtagctgaagatgaccttgggcttctggatcttctattacaggtctcttatgcccggtaaatgatttttatccaattagagcccttgatctgaacagagagtctcaaaccacgtttcggaaatacgagcaattgttttgaaaaccagtgagaaccaccaggccctggggagcagggaaggaaggtcattccagcctacgccggctctgcgttcacaagcaaggcaggctccgccctgcgcctgcgtagtgagggaatcgctcctgcgcgttagcaaccgcgggacgtggcgcgcgtgcgcgcagttcggcgcggctaggcggcccgcaagggcggacggggctgt

SEQ ID NO: 36242 - DNA, 451 bp, Mus musculus
  source 1..451: mol_type = other DNA
aatttatcccaactgcaagcatttattatgtagctgaagatgaccttgggcttctggatcttctattacaggtctcttatgcccggtaaatgatttttatccaattagagcccttgatctgaacagagagtctcaaaccacgtttcggaaatacgagcaattgttttgaaaaccagtgagaaccaccaggccctggggagcagggaaggaaggtcattccagcctacgccggctctgcgttcacaagcaaggcaggctccgccctgcgcctgcgtagtgagggaatcgctcctgcgcgttagcaaccgcgggacgtggcgcgcgtgcgcgcagttcggcgcggctaggcggcccgcaagggcggacggggctgtccgtggcgctgccgagctttgcggagctgggccggctggggtctgacgcggcccggttcctgacgcggcccggttcc

SEQ ID NO: 36243 - DNA, 421 bp, Mus musculus
  source 1..421: mol_type = other DNA
agcaggagtacttctagacttcctttttctacaaggcaagcagaaattcatcttgacttcttcacttcatcatagctgtcaagaagagtcacagtcactctaagtgagagtcagcatgcctgagccaggcggagccccgcttcgcccgttgcggtagtcggcgtgcgggcggccgcctgcttctcctcacgccccctcgggagcacgcctgacccctggcgccatgttgggccggcaggcacgacacggccgggcctcccagcggcccgcggaccccgcgcagagctcccgcgccggaaggcgctcccagcagacagcagagcgcgagttccggtgagcgggcgcgcgcaggtagccgcaacccccgccccgcgcgcgatccggagcggaggggcggggccggcggcaggccgcggggtgc

SEQ ID NO: 36244 - DNA, 415 bp, Mus musculus
  source 1..415: mol_type = other DNA
tccaaaggttgccatggaatggcttggccaagcctcctttttcaagacatcagtgctggctgttgcccagcccccagctagttttcgcgtgcagcttgtgaagatgcctggactacacacagtcagagtgccagtacatgatagtcctctgagggaggggccatcagcctggagcccgagggagggctcagattcccaccttgtgctttcagaacccagtggcgcctggtcacctctctaccaggctgactggagcagacagccccagggctttacccacctgccgcactccagcagaggatagggctggcccagtacaagggcttctgccctggcagcaaacccagagcaggtgaccgccagcaagccagcaagcactctcgagcgcactctcgtggaggctcacaccctccct

SEQ ID NO: 36245 - DNA, 367 bp, Mus musculus
  source 1..367: mol_type = other DNA
taacaggatgtcatctagttccaatcaggttatgagtctagcatgaaagactaagtcccacttggccattgtgagttgactacatagacatgaatgaagttcatttgatagaatggatggtctgctgactgcagtccagaatcttccccttcattccacaaggtattcccagctctgaaagcactgcctggtttcttgccagggttaaccttgttaattgaaattgtaaggattactgcatctgtagaacttctgtccttacaaggcctctgtcttgtaatgctgaggatccagggtccctgaactcccaggaggcatcctctggagagtgctgacagggtggggccagggcccctgctggcctctt

SEQ ID NO: 36246 - DNA, 389 bp, Mus musculus
  source 1..389: mol_type = other DNA
accagggtggcctggcctctgccgtaagtgaatttaagtaactatccagaattaatctaaagcactaattagcttatccgtttggtgtttactagaagaaaaatcagggctgcctttctagggccttaatggttttgacaccaatgatgtagaaatactggattttctattattatacaattttttaggataaaactgttatgtaccactgaaaaattcgttttcccctggccgccgagggcgccagcatccttcgggcacaggagcggctgtcccatcgccccggcgcgcctgcccacacactccgcgggggtgggcccggcagaggcggagccgtacgcagaagcttccgggcccagcctttcacgttcctgattggcccggtgacg

SEQ ID NO: 36247 - DNA, 467 bp, Mus musculus
  source 1..467: mol_type = other DNA
aaaataaaaatttagtaagatgaataatactttcatgtgacttaagaaaacgaatcacatgcctattttccctttatccaaaaggtcaaggcagtttcagacttgcctcaggctgtctcctaatcaaagaaaaggtaatttcaattttctttgtagaccaggctggccttgaactcaaaaatccgcctgcctttgcctcccaagtgctgggattaaaggaatgcttcttccagacacttctttaggtgctatgaatatagacaaagtgtaatcaaatactttcctgggttatcttttgaattttgattatagcagacagggcccatctgtccacctcagagatatggaccatagcactggtaacagtctgagacagggtaccagccgggaagagccgccctccggattgcgcgcgcgccgtgcgggggcgggatcgagacccgtccgcatggctggctttggccccg

SEQ ID NO: 36248 - DNA, 444 bp, Mus musculus
  source 1..444: mol_type = other DNA
caggctgctcgaactcagctggttggaattcaatgttttgaatattttttttaatcaaacaaactttaagtttactgtacacttgttttgacttatgtacattaggtttaattttgacaacaaaagagtatataatgggtaatgtaaaatgttacatttgtacttatcattaacttgtacttcttaattatatttaacagttttcaataagttagtaactcgctcatgaattatatacatagcccaagaactctagggaagaagaggtaagagtcgactctctcgagtttctcccctgtagacggtggcgggaaacgccaacgggaactcggtttgaagtcggactgccccccccacctccccgcagccccggaggaggaagtggcgcggccaccgagacgaggcggaggctgggctagagcggccaagccggctgagcaggga

SEQ ID NO: 36249 - DNA, 387 bp, Mus musculus
  source 1..387: mol_type = other DNA
aagccagagctggcccaaggtcctaccctgtgaggggctgtcccaaagggcaggacccaccccacgccgctgacagagctgaccgcttgctggaggtggaacacccaacaaagccgcccctcggtccggggcgcctcgcgttttcctggccagggctgcgacaacgcctgcctgcggaaccacggcgggcagtactcctaaggcgcctgcgcagctctccagcgcggccctcgccgcggctatttatagtaggtgacgtcaccaaaaagaccgttagggctgggccgccccgccccctcccgtagctcggcgggctgatccgagtgcgcaggcgtggtcgcgtcctccccgcccgcccgcccgcccgcggcgccccctactctctcg

SEQ ID NO: 36250 - DNA, 460 bp, Mus musculus
  source 1..460: mol_type = other DNA
cataattatatatatatatacacacatacaacatgtgctttaaatcatttctaggttcaccatactgtattgtttaccagttcagtacaaaactctttccatccacggttggttgaatcattagtgggaccccttcgggtagctcccgcagtgggtagctcccgcaattgcttctccaggagaccaagaacttggctgagttctctgagaagtcctgcactcctctttcacagagcaggtctgcttcaaaagcacctgccgcagatgggccccagcctatagatgcttggctccaggtgccacgtgggactccgtggcagaccaggcgtggcaacaggatttgtgccaggcgccggccaggcgcccaggcgcccacacctaggagctgcttcccgacggtgcggtgcagcgcagcagcacaggggcccagcgttcctgccgcgcagccccactgtcgcgg

SEQ ID NO: 36251 - DNA, 442 bp, Mus musculus
  source 1..442: mol_type = other DNA
tgagcactgggatcacaggggaaactggtttcggagcacattacaagttaatattgaaattcaagtcttttacatacaatggcataattatatatatatatacacacatacaacccacatatgtgctttaaatcatttctaggttcaccatactgtattgtttaccagttcagtacaaaactctttccatccacggttggttgaatcattagtgggaccccttcgggtagctcccgcagtgggtagctcccgcaattgcttctccaggagaccaagaacttggctgagttctctgagaagtcctgcactcctctttcacagagcaggtctgcttcaaaagcacctgccgcagatgggccccagcctatagatgcttggctccaggtgccacgtgggactccgtggcagaccaggcgtggcaacaggatttgtgccaggcgcc

SEQ ID NO: 36252 - DNA, 441 bp, Mus musculus
  source 1..441: mol_type = other DNA
taacacaggctagcttgcttattgtaagtgagtagctacagccacagaagctttaggcttcttggtgactttcaccagcagcttgagacgtgtctggtctctaggcctggtgccttgaaatgagggtgaagtcattctcttttattctctctcactgtctgtctgacagtgaaacattaacttggtccaaaacccagaatgtgtcttggagcgcactgcagtgctggccaagtgggccctcagacccctatgagaaagaggtgtctggctggctgaaacccagagccccaaagcctggtagatctggggctcctcagcacccatttgtcaagtggagaaatgtgggtcacatctcgaccacatctgtggcaaagttcagacagggcaccaatgtggcctctggccccagactccaccacccagagacagcctgtgagagga

SEQ ID NO: 36253 - DNA, 540 bp, Mus musculus
  source 1..540: mol_type = other DNA
gatctggaaagtgtacatctgctggctttccccccttccatgtctgccaatagatggaattggaaggtattttcaaagcattttttctgtaaacagatgtctcaaagatttgattttcaaaactcgtaatgatgttattattattattattattaattattattattattttattttattttatttttctgtctgacagtcccaccaacagtcagtcgcttggctggggcgctgtccagctcctgggtcctgggtccgcggccccagctctagcgcacaaggggccgagtgaaccgctctcgctgtcctcttgaggccccggcgactagactggtagcgccccacgcggatgggctgcgcccaggtcaccgcgccaaggagtggcaggggcgcagtccggggtacgtccagggggaatccagcctgggaggggggggtgggggccgagcgtcgggccggcgggcagctgggcccctgagccgcccgcgtacgtccagcgcgccgccttgcctgagcagaccaaccgaggccacgcccgcg

SEQ ID NO: 36254 - DNA, 212 bp, Mus musculus
  source 1..212: mol_type = other DNA
atgaacagactgattctcaggtcttgtgacatgtgctgtagggtgaagcctacatcacagatcaggaattcaacttgactacaagtttaggccaccgagcgctgaggcagggggggtgcgaccacaacgtgagtcgtctcagccccaaccctggcgtcgggagccgctctctagagcttccgctcgggcggcccggtgacacgattggtgat

SEQ ID NO: 36255 - DNA, 389 bp, Mus musculus
  source 1..389: mol_type = other DNA
aagacccggatacacagggagaccggtgtatgcttctcctttgctaagcgaagctagccgagagctgagactgaactgacattttaaaacggcagccttgcaacggtgcctcccaccatagcctgtcctggggtggacaactgacccggtcagggaggcgggccgacccttcccaagtacataggccgcgagcctcctggtggccagagaactgatcccccccctggaggagcgttgcgtcaccgcgttgccgcgtcctcgcgcctgcgctgtggagccgctccaggcaaatgacgggggactggaccagagcgggcgcgtcgcggtgacttccgctcctgcgccgcgggtcctgctctctggggcctgtaacagagagagctctgtct

SEQ ID NO: 36256 - DNA, 263 bp, Mus musculus
  source 1..263: mol_type = other DNA
gttcactgacccggattcaggaagacccggatacacagggagaccggtgtatgcttctcctttgctaagcgaagctagccgagagctgagactgaactgacattttaaaacggcagccttgcaacggtgcctcccaccatagcctgtcctggggtggacaactgacccggtcagggaggcgggccgacccttcccaagtacataggccgcgagcctcctggtggccagagaactgatcccccccctggaggagcgttgcgtca

SEQ ID NO: 36257 - DNA, 410 bp, Mus musculus
  source 1..410: mol_type = other DNA
gccagggcccagacttctggtgtgccccaggaatactttctacatcaagtagctgtacctaaccctgcaacattttttaaaattactttttgttgtttggcgcctgtctttaattccagggctcggaaccttcatactgagattttgctataaaagagcctataggtattcgatgccccgcggacacccgaaacgtcacacccggcgcgggccagctcgcacaggggggcggggccagcagcggcgcacggtacggggcgtcacgaggccacacccacaacacgccgggcagtgacgtcgcccgcctagcggtgctgcggcggcttccgcgggcgggtgcgcgagcggacggctgacggctcggggcggtggtagcggcgcggcgaccaatgagggcgtccggacgcggt

SEQ ID NO: 36258 - DNA, 705 bp, Mus musculus
  source 1..705: mol_type = other DNA
gcagcgcgccccaggcgcagcgggcaggccttaccgcctggcgtgcaggagcgcgcacatggaggggtccccggactcgccacgagttcggggagctggggcccaggggactctagggagctggggcccagggttctttcagatgctgggtccccgaggaccttaggatgtcggggacacgggacacgaggacagtgctgggcccggggcgcgcggggaccttaaggtgctgagacgccggctggccctagagggtgttccgcgcgctgtgccgatgcacccggctctcgacgtgcggctgcgcggcgccggccgacgtacggagactccgggatcgcagcgcaaggacacggcgttgcggtggctggagctcttagcgatgagcagacgacggcgcagagcactctccgcgaggcgagtgagcaccgagctccgtagctggggcagggcgccggccgcgcaggccgcgctccgcgcatggggacggtgagcctcagtcaccgcgtccggacgccctcattggtcgccgcgccgctaccaccgccccgagccgtcagccgtccgctcgcgcacccgcccgcggaagccgccgcagcaccgctaggcgggcgacgtcactgcccggcgtgttgtgggtgtggcctcgtgacgccccgtaccgtgcgccgctgctggccccgcccccctgtgcgagctggcccgcgc

SEQ ID NO: 36259 - DNA, 561 bp, Mus musculus
  source 1..561: mol_type = other DNA
ttatttttaaccacagaagagttaattttatacaaataaatgtaaatgtagttaaatgatacagtatttaataaagtgttccttttcaagtgatgtacttcattttgtttaacctggtagtaaaaccaaacttttgcagtattttcagtgtcagtgcaggcccttactcttaagcccagcaggggcctggcctgcgtgctggagactcaagcacggcgggctctcccgccttactgtggcaggggccgcatctcggtgggccggccctcgccgtggccacacctcctgactttgagaggcagtggcgcgcactgcccaagcccgcgtgctacagcgccagcctcctggaaggccgtgggggctgggggaggtccccgcccttcggacggccgcattaggcagcgactgcccgcaatcccaaggcttgggttggagccgggtccgtcaggcgggcgcgcagagctgagagggactcccctgcaggtgcgcgtctcatggtttcgcccttcgccgcgcgcgcgcgggagttaccgaggggcggggccgctgcgcacttaaggg

SEQ ID NO: 36260 - DNA, 492 bp, Mus musculus
  source 1..492: mol_type = other DNA
tgggcctctccgaggtcccactagcacttggggcaccacataccatggccttggacagggccatagacctagcccggcaaaggaatgttgtaatgaaatcaacaggagctctttcctatagaaattccagccgcagtgatgtaaagactggagcttagccactcgcaggacagcgccagggccgccgcctcccaactggaagggtgctctagagcgctcagctaggtacgaaggcggcgtcctcgctgcccagccagcccgctgcactgtgagcccggccgagtagaactcgttgggtaggccaacgtgaaggtcacctcagggctgtccatcccgccaccgctcactgggccgtgcagaggcaggagagtcccagccaccgccgtcagatcgcccgcggggcactctgggaaacggagtccaagtccggctgtcccctcctcaggctgcccgcggggcactgtgggagacaatttccctgttgggttgacc

SEQ ID NO: 36261 - DNA, 296 bp, Mus musculus
  source 1..296: mol_type = other DNA
tccgtggggctgatcggttgccaagccctgggcccgcgcggacgcccaccgcaagggaggagcgccgtgcccgcttcgcgctcccttcttgcgcagggagttccgcttcccagtgactgtgagagccatcatggcccagaaaatctcatggctccccactcagaatgccgggggcggcctcgcgagactctgactcccagggtgcccttcgggtcaacccaacagggaaattgtctcccacagtgccccgcgggcagcctgaggaggggacagccggacttggactccgtttccca

SEQ ID NO: 36262 - DNA, 398 bp, Mus musculus
  source 1..398: mol_type = other DNA
aggtacgaaggcggcgtcctcgctgcccagccagcccgctgcactgtgagcccggccgagtagaactcgttgggtaggccaacgtgaaggtcacctcagggctgtccatcccgccaccgctcactgggccgtgcagaggcaggagagtcccagccaccgccgtcagatcgcccgcggggcactctgggaaacggagtccaagtccggctgtcccctcctcaggctgcccgcggggcactgtgggagacaatttccctgttgggttgacccgaagggcaccctgggagtcagagtctcgcgaggccgcccccggcattctgagtggggagccatgagattttctgggccatgatggctctcacagtcactgggaagcggaactccctgcgcaagaaggg

SEQ ID NO: 36263 - DNA, 473 bp, Mus musculus
  source 1..473: mol_type = other DNA
gcactgagccaggtccccatgtatctggctcccatcagaccttgtggaacttgtctgaaagtgagacaaggttccctgcttacagaagttctgccaggcaggacctacagcttgccagcatgatggggtgaccaggctgatcctccacactccccagatggaatgtgtcccacatgatgggcgtgctgtgctaggacatccataggcaggcagccttagggtagggcaggctccccttccgagaggctgctttgcacagggttcattcagctcagggggccagttcactgtgaagacgccctaggggtcgagcgtgcgacccttgcctcgcctgctccgccccagctgggctcccacgccctctgggaccgcccggcgcccccgcctgcggatctcccgccccctggccgccggggaaggggagtgttcggggcgtggcgggagcaccccccaacccccgcccgggctgctgc

SEQ ID NO: 36264 - DNA, 313 bp, Mus musculus
  source 1..313: mol_type = other DNA
gtcttaggagattctctgccacctgagtccttctgattcagaaaatggtgaagcgtcctcgctgggagccaggcacagccaccaccctttaaagaagaggatgctgccaggtctagctaccatagaggggacctgccaggagtgcagccccatctgctatgggctagtataatatagggcaagactcggcgcacgctgggacttgtagtcgggagaggcaagcctcccggatgcactgggcgggctcgcccctcacctggccagggcgggtgccgcagggccaatgggagccgtgccggccaggcctgttccg

SEQ ID NO: 36265 - DNA, 375 bp, Mus musculus
  source 1..375: mol_type = other DNA
caattaggagaaaacaatttacatttagttatatattttcattctgtggctcaaaatggacatctgagctcaaattccacccatttaggcttctcagcagctgtggaggatcagcctttgaaagaaggcagcactgtattgtctgtggagaacgagcccagcgcgctctccggactccttccaatgagccgcacaccgggaaaccaaactgttgcgcctcactgcggtacacggcattgcccggcgccctagtaggtgcctcggctcgaagcctccagaaggcggggccatttgcagttgcactcgagaccccgccccgcgccaacgggtgccgccatgttgggggtcctcgccggggacacgtaggcgtccgcg

SEQ ID NO: 36266 - DNA, 469 bp, Mus musculus
  source 1..469: mol_type = other DNA
ctcatgggagagatcccacctgggagatacaccaagttgtctggccctgggcagacaccaagttgttctcagccctgtagaaatctcagtggtttttctgaaaatgactcacctggatcttcatggtcagtctagatcctggaatggaagagtgggagggagccccacccccacccccagagcctcgctttccaaggaaaggagagttcctctggctactgtgacaaaccagtgtggcgcagcgcccctgttccccgccggctcgagtctggctgccagactcctgggcaggagctggccgaggactgagcgcgcggccagagtgacaaggtcgcagtaggctacgcggatgcaccacggagcctcgcgcagagggaaagcagccagagccaggcgcgcgcggccgcggtgtttctatgacgacgacgtcagggggccccgggtggggtcggcttgggcgcatgcgcgc

SEQ ID NO: 36267 - DNA, 749 bp, Mus musculus
  source 1..749: mol_type = other DNA
cttctgggggctgtcctcagggggctgagaacactctgtggctagaaaactccaggagataaagcccagatttctggcctgcgcacgcgctttcgcaaagcacgcaagctacccccgactcgctggggctgcgttctgatccgcccgccgtagcagctagcgcatctccggatcctgggctgttgacagcccgcccgaccgggcgtctcagaacctggagcgcccagcgaacgctaccagtgacgcgcgccccgcccgcagacgactccaagccgccgtgtccagctgtccacgcagggaggcgagcaggctccggcgcgccacgagctgctcccgccagccgctggagctcgaggccgggacgctgggcggggccgcggcctcccgcgctcttcttctgcccgaggccgtgtgcccgcgtccgcgcccacgccgggctccggggccgcgcgcggcgattgggcggcgggcgtgacgtcaccgcgccgtggctcgccgtggttgcggagctggccgccgcccgcgcgccgctcgagcagcgggagcgggagcgggaggcgagcggagcgggcgcgcgccgagctccccaacacccgcgctcgggatcgctgcctaccacgcgcgccctgtcgcccgccgcctgccgctctccgcgcgcggccccggcgcggatttgaaaagcccggtccgcgggcgactcccgcggcttctgggggcggcggcggccccggcggctgcggcggcgggcg

SEQ ID NO: 36268 - DNA, 288 bp, Mus musculus
  source 1..288: mol_type = other DNA
ttgcacctattctaaggcttacaggcttcagtgacccgcaaacctagggtcctgagtcagaacttctgcctgactgtcctcagcccttacaggccggctcgcctctgggacccagatacctccggcccggagagggtctccgcgagcacgtgggggtgcccattcccgtgacctaggaaagtggatatgccactacgccggggactgtgagaccgcggctctgaagcgagcccccgctgcacctgcaccaaggccacggggcgcatgcgcggaccgcggaaggcgggg

SEQ ID NO: 36269 - DNA, 508 bp, Mus musculus
  source 1..508: mol_type = other DNA
cctccggcccggagagggtctccgcgagcacgtgggggtgcccattcccgtgacctaggaaagtggatatgccactacgccggggactgtgagaccgcggctctgaagcgagcccccgctgcacctgcaccaaggccacggggcgcatgcgcggaccgcggaaggcgggggccgagccgggaggggtcctgcaattccgcaggtccgctgccggcaggcagcgcgtgcatcaaacctcagtccgttcggccccggccgcgggctcggagggcgcctgccaaaggaacacggggcccctcacgaggacttcggccgggcgccgcgcggccgcgctttgctgcaggaacgcaggtccgagcgcagcggcagctttgcgggacgccagccacgcagcccaagtgtgccatcgggcgggcgcagaggcggcgtctgctcccacccccgagagtggacgctaggaccctgcgggaccccgggcgccgcgactgcaccggcgccgctgcattat

SEQ ID NO: 36270 - DNA, 454 bp, Mus musculus
  source 1..454: mol_type = other DNA
aattctacctagtagcaactagactagacccttgtctgatacatcaccctatttatgattagaagaggggaatactatttttttaatgatcaaagcccagatcttgtgaatttatatatcatcttacaagatcagcattctgtctttcattgaatgacggcgggcatcctcagaatgtctgtacttctgagttaaatgcattctaaaactgatgtattttacaccttgacattttgaagatgggtgatttttgttaaataaccattgtaaaagattctataggttattagcaccaacgctggatcaccctaccagtggtggtggtaagagctgttgggggaagaaggggtctgttcggcctcaaacttcctccaactcccgagcgggggcggggtggctaaggggcggtgcgtccgtaggaaagccaatcactttaccccggctcgttgaaggg

SEQ ID NO: 36271 - DNA, 454 bp, Mus musculus; identical to SEQ ID NO: 36270
  source 1..454: mol_type = other DNA

SEQ ID NO: 36272 - DNA, 421 bp, Mus musculus
  source 1..421: mol_type = other DNA
gtctgtcccccatgcatctataggccagcatgagggcctcgggtcattagggccaggagttcaccctcttgtcaccaagtctgccagagacgggcaacaggtcgttgcgaagcgccagggcgcgtgtccgcagcgcatcctgcctggtgtctcccgagacacggtccacgtcctcctggcccccgcgtaggccgggcagctgcccgggcgtctcattggccccacgccctgtcactggccattggtccgagaccgttctggcccaatcggcgtgcaatgccatgcacgatggccgccagtcagcgagcactggggctgggccaccacgtgctgtctggagccagcctatcctagccaagcttcgcatctggctctgcccgaggctcggccagtccctattgggccggagcgcccacaccta

SEQ ID NO: 36273 - DNA, 297 bp, Mus musculus
  source 1..297: mol_type = other DNA
atgtgtgctgtgtgagcatgtgtgcacacatgtgagcagccagagccttgtgcatgcgaggcgaatgctctgcctcttgagccatggaaggagtccttcatacgcctgggttctcctcagagtttggctgttgcgagaccagaacccctctgaggtgaggacactggtgctccccagtgtctgccagtcactttcatttcagtggagtgaaataataataatgataataataataggctccttcctttgtggattaaacaccttttcttggacaaatttatccagggccctgggccc

SEQ ID NO: 36274 - DNA, 425 bp, Mus musculus
  source 1..425: mol_type = other DNA
cagtttttatgactgagagagtatacagtgctgttagttgtacaaatagtaagcatttaggctggagggaaaaaatgtttttaaaaccacgtagctgcctggaactacatgctccctgtggcggccccctgtccaggcgccgcgggcgggagcgttcactggccagctccggtacccgcagatcgcctaggcatcgtttgggcgccgtcacctagcaacgccgcgcaggccctgcccgcggtgggcgccgggacctgtagtcctgagcctccctcccttggtgcgcgtcccgggtgggggttgggcggggattggcggcctcgccgggctcgccccatccaccacttgcagcgggccgggggcgtgcggcgcctccggcgcatgtgcggtcgtgaccggcggaggcgctgggtgctcttaagccg

SEQ ID NO: 36275 - DNA, 178 bp, Mus musculus
  source 1..178: mol_type = other DNA
tatggatagaaggcaggtaagagagattctgtaacatgaattccaggccctggtcttggggtaggcctcccaaacgtataggtgagcaccgccaagttctcgtgggaggagcgcgactggcggcactctcgcgggaagtggaagctcccgcaagcaggcgggtaatagatgtaaaatt

SEQ ID NO: 36276 - DNA, 368 bp, Mus musculus
  source 1..368: mol_type = other DNA
accgccaagttctcgtgggaggagcgcgactggcggcactctcgcgggaagtggaagctcccgcaagcaggcgggtaatagatgtaaaattaggctgggctccgcagcatgcggcggggcagggcggtgcgggcgtggagcgcgggcggcctctcggcccgcactggggttggtggccgcccgcctctcgcagaaccgcgcttctgccgcctctttcccggagagcacgcggttgtcggaacatggagcggcgccgtcgggtatccgctcgccaacccgcggcctggccggagaacctctttcgccaagtaggaagaggctcggcgtcgcccaaggtcactctcggggccgtgtggtcgcgtcgccgc

SEQ ID NO: 36277 - DNA, 423 bp, Mus musculus
  source 1..423: mol_type = other DNA
gccaaatacttctgtcctcctttaagtaaggagtgaggcaggctcctgcttactgcaggccggatgccggccctctttccactggccctggcataggccaaggtcacaggggcacgctcgaacctggactgggccaaagtcagcagggcccactatcttggaccccgcccgcctccagctccgtccgtgcgcggacacagggccacgcggcgccggacgtcaccctcacgactaactgcgcgtggccctacgggagtcgtggtcccgccccacacgcccgggcggagccgcgggcggctggaactacagctcccggcatgcctcgcgcgtggcgtcgggggcggggtcccaggccaggggcgcgccgcccgggagggcggagtgcggggggcggccgcccgcgcccctccccctgccgctgct

SEQ ID NO: 36278 - DNA, 129 bp, Mus musculus
  source 1..129: mol_type = other DNA
gggctgaagggctaggattctgggctccctgctcctctcctcactgccttcacctgcggagggggagggggagaggggccagcctggttaggctataattggaggcggggcctgcatcggggtgcctgg

SEQ ID NO: 36279 - DNA, 256 bp, Mus musculus
  source 1..256: mol_type = other DNA
tcttttctgagcagaagttcctgcaggctcaaccagagcttgcctgtgagcagacagggacctccatgagatcttagcaatgagccattgaaagattctcacggaggagagacttcccagtggaaaaacagtgttcatatggaaagggtttcttcagctgctgtaccagaggatacctagggtctgagtcagactcccggcagtggcggagtcagactccgggccatggacgaggcggagccaaacgttccgggaa

SEQ ID NO: 36280 - DNA, 326 bp, Mus musculus
  source 1..326: mol_type = other DNA
accttgctaagacaggtaagaagatggccaagcactcacagctgcctacttataactcacagttcacttgggagctggacggggaactgaggatcagtaagctggttatctggaccagtacccattccacgcaagctgtagtgtaccaggcccgcctggaccataggatgtaactcagtgtctcaacactctctgagaaagaatttttgttaaagacataagtcagtttcctctccactgagcaccggagacaaacacaacccatcatcctggaatggtgctgcctgggctggcattcatgaaatttctggtaggaaaaatagttg

SEQ ID NO: 36281 - DNA, 363 bp, Mus musculus
  source 1..363: mol_type = other DNA
tgaggtctatcctgggattggggctcagacaaggaggagcagggcactcggtaccctagaacaacagcagtgtgcttgtccttgaggctatgtggacataaaggctgctttccagaaagccagataagagactgatgtctgtctgggcccaagctccttcctagtcactcagtggaagctatctctgtagccacacagctggccccagaactgagtaacctcagtggccaaacccagcaggctgctggagtactgcgctgagccccaagtggcttttaggaccttgctgaaaacgccttctccttgggactgcccagtaacaggaagtcccaaacagggaggaaaccctgttggcccctactg

SEQ ID NO: 36282 - DNA, 214 bp, Mus musculus
  source 1..214: mol_type = other DNA
ttctgggtaagatgttcctccagaaaccaatgccccaggcagccggacagaggcctccacagatagtccatcttggggcagcctgtgtcttctggaagggctggctcactccttggaggaattccgtcccgagggagacccatggagtggacatttaattctggattatacagacaagcccaccaccctcagtgcagtgggtggagaacactac

SEQ ID NO: 36283 - DNA, 362 bp, Mus musculus
  source 1..362: mol_type = other DNA
tcatctgagaacagtcaacaaactcagagctcactttgtagaccaggctggcctcgaactcagaatcgtgcgccaccacgcctggctgaggagaggcttggatacacacttctgtcacttgagccaggctcgaggcttcaacctttaatggtttgaagggaaccaggagcgggacccctttgtttcgccaggtggactggggagacagagcacacacagacatcgcgcacctagaccgtgtccgttcgcagtcagtttgtgggtctgaccgtcagcgttcctgtgagcaggtgcaccagcccgccgtcccgccttcagccggaggccggagtctacagaccaatggggctgtgcattgttgg

SEQ ID NO: 36284 - DNA, 412 bp, Mus musculus
  source 1..412: mol_type = other DNA
cactttgtagaccaggctggcctcgaactcagaatcgtgcgccaccacgcctggctgaggagaggcttggatacacacttctgtcacttgagccaggctcgaggcttcaacctttaatggtttgaagggaaccaggagcgggacccctttgtttcgccaggtggactggggagacagagcacacacagacatcgcgcacctagaccgtgtccgttcgcagtcagtttgtgggtctgaccgtcagcgttcctgtgagcaggtgcaccagcccgccgtcccgccttcagccggaggccggagtctacagaccaatggggctgtgcattgttgggccgcagcgccgcaggccgcacccagcttggcggcgggggcgaggctgctgcaggcggcggggggtgcgcggcagccaggg

SEQ ID NO: 36285 - DNA, 337 bp, Mus musculus
  source 1..337: mol_type = other DNA
ttctgggacagaggctgcatgacccacgaggggcctgggcctgacacacgcaggctctgccgtatggctctgtatctgatactgggcatagatttctaaaagatgtgttctcatacttcagagttgattgaggatgactaaatcctggctggtactagaggtgggcatcaccatccccaactccagcatggtttagagtaagctaaagtgaattcaaggtcaaccgtggctacatgagactgaactgcacagacaagctgtctcttacatacatggaagcctgcaagccttctccacggcctcccggaagaggaggtgcctgttccgaagcctccgg

SEQ ID NO: 36286 - DNA, 557 bp, Mus musculus
  source 1..557: mol_type = other DNA
tcctaggaggcgctaccttcggggagacggggagcccggggtgcacccacgtcgctgccgcggtttccgacgtcgaacgcggcagaagcctcggggcatcggtggccctccgcgacagcgaccgtctctgtcgccgccacaactgccaacaggagcgctgccgtcgtcgccgtcgctgtcgccgtcgcggtcgccgcggagatgggacacgggtaggctcgctacggaaggggcttccgctatcggcgccggcgcgcggtagctcgagctgcccaggcccagggcgcgtaaccctcagcgccgggtcctgggcagcgagagcggtctccagcggcgacggcgacagctccagcagcggcagccgcagccgccagttaactcgcaagacagctgggccccggctaacggttttcctccagagggagcccgagagctcccctcggggcggcgtctgaggatactgtggcggctctcgggacactacagatcccataaggcccagcgccaggaagtcgaggaagtgtgtaaactgtacttctcgcgaaatacgggaagct

SEQ ID NO: 36287 - DNA, 357 bp, Mus musculus
  source 1..357: mol_type = other DNA
ggtttcaattggaaaaaaatacttaggttctttaagaaagcatcaatgatggaaatatataagtgtaagccaaataaatctttttctccctttcactagccactgggcatagtacgcatgggtagatggcacgagcgcgggacaccccgggcaggcccacatcgtggcgcgtcttcctgccagccgggcctccggacgcccctgcgggcgctttgtggacctgagcttcccgtatttcgcgagaagtacagtttacacacttcctcgacttcctggcgctgggccttatgggatctgtagtgtcccgagagccgccacagtatcctcagacgccgccccgaggggagctctcgggct

SEQ ID NO: 36288 - DNA, 307 bp, Mus musculus
  source 1..307: mol_type = other DNA
tggacttcaaatgtagagtgtgtgaccaaagttgcatgaaacacagcgtccacggatcataaaggttgcagggagctcccagcacgctgcgttcgggaagctcaggccaccacctggcttgtcaggaaaatttcttccagggagccgcccctcttcactaaggggggctggctcatcggcggggcggagagtcttaaactagcagaggccccgcaggcctgcgtcctgacttcgggaaagaggacgacgcatctctggcgtggcctcgtctccgccggcatgacgtcacgggacgcactcgccgcga

SEQ ID NO: 36289 - DNA, 368 bp, Mus musculus
  source 1..368: mol_type = other DNA
ggaaggggaattctgcccttgacgtctttcaccaaagaaaggtctccttgtgtatcagatgacccctctcctggcaggtgggaaactttccacccatctggcttttctggaccaaggcggaagtcccgccccggcctccatgcctaggagtccgagccactgtccagtagggcggactttgctctccaggagcccggcccccagaagccggatcccgttggttggtgaataagcaggacccgcggggtcagagcccctcacgggtcccgcccccagagccccgccccctaggccctgggccccacccccaggagtcggagctcctctctcaggggccggaccctgcccctcccggagccccgcccccg

SEQ ID NO: 36290 - DNA, 419 bp, Mus musculus
  source 1..419: mol_type = other DNA
gagccaggctttgcactgctgtggggccagccacagcctaggctccaggaggggaggccttggcatctcagagaggaaccatgctatggccaggaccctggccacaggctcacctgaccaattgcaagtgtcctaatgagcccagtctgagctccctcagagaactgattcccagggcctgaggtggccactctcccactttgggtgtgtgtggttagagacacacacacttcctgctgagcagtgtctggtactggcaagcccctgccctgcagggtgccctcactggagatcagctgttatcacaggggctgttaataagactttgatgtcagatttgttcttttcaagtgaaaatgacggcaacttcctcttacagggagtcaccggctggggcggagttggagccccaaggcttg

SEQ ID NO: 36291 - DNA, 492 bp, Mus musculus
  source 1..492: mol_type = other DNA
gtcactgtgatctcattcctgcccactgtacccactgtgcccagtggagtgcctagggcccccagtgcctgcctggagccacagggaagctctgtgtatagcctgcccaactgaaggcatgcaggctatgcccacaggtaaccagactgggaaagcttactgggggtacccagggaattctgggggtcctgagtaccccaggcttagctggtcacagcacttggtccagggagcgggtagagggggtaccctccaccctgtgttgacaactggaacccccaggttcctgcatgcagcaggtcctggagtggccagcaatatggccagcacctgtgcctgggaggcctggctctgacctgcccaagtcacactggaagacttcctggaagaggcttgtagcctttgccagagaacaacagctgccccagcagagcaggcagagctgtggcagcagggtgggttaatcattatcatgtagccttgaccccacct

SEQ ID NO: 36292 - DNA, 317 bp, Mus musculus
  source 1..317: mol_type = other DNA
atggcccgcccactcacgtgtgctgcgcagcccctatgcctgctttcaaggcccctgcgaggctcctcctcaggattttctacgtaaggaattcagtgaagaggcttcagcataaaaacttaagtgtgtgacatttaattctgttaacagcacctgtctagctgccccaggactgcccaggccatgtcctgtgcatttagaaatttgcagccatttagaaatttgtagaggctcttttatatttactttcataagccagactatagacagggcctgtgactcagctctccagccccgaagcagagtcacagatctgc

SEQ ID NO: 36293 - DNA, 384 bp, Mus musculus
  source 1..384: mol_type = other DNA
gggagtctatgacataggtctaacagttcccaggcagcatggatccctaggcaagctggccttcagaacatgcccactttctcatctgcctggagggcggccacctctggcgatggcacaaggccacaaagccttctgtggggggaaactgcctgcttcagatggtcctgagacctggcaggagcagcgtgggctggcagccagcagagtgcagaggctgtccaaggccactgccacctactggcttgcactcagggtctaagactgaggcccggggtgccccgcccagtctccccccaggtccccgtgtcgctgcgccccgcccgccgcgccgggcccgccctcctggcgcagcccaaggccctcccggagcttttgaaagtg

SEQ ID NO: 36294 - DNA, 463 bp, Mus musculus
  source 1..463: mol_type = other DNA
ttcccaggcagcatggatccctaggcaagctggccttcagaacatgcccactttctcatctgcctggagggcggccacctctggcgatggcacaaggccacaaagccttctgtggggggaaactgcctgcttcagatggtcctgagacctggcaggagcagcgtgggctggcagccagcagagtgcagaggctgtccaaggccactgccacctactggcttgcactcagggtctaagactgaggcccggggtgccccgcccagtctccccccaggtccccgtgtcgctgcgccccgcccgccgcgccgggcccgccctcctggcgcagcccaaggccctcccggagcttttgaaagtgaccctgggctcaggcgcccaggacgcgtggagagggcgcggttggggcgccgcgggggcgcggggcgggggcgcgcttgggtgggggcgggggcgcggagcgggc

SEQ ID NO: 36295 - DNA, 372 bp, Mus musculus
  source 1..372: mol_type = other DNA
ggagttattcagttggggaaatgcctccacaattttctcaattagtgatcaagtggggaggtcccctaccaggctggcagtcttggttctataagagagcaggctaagccagtaaggaacatccctccatggccttaacttgcttcttgatcatgatgtttgtgcaggaatagaaaccctgactaagacactggtcactggtgcctgtaccagactcctgggttcctcgagcaccaggttgtcaccaggccaggccatgtccccaacaggcttttggattttctccagggctgcaggtgcagagactagggaagtgtctgggatgtgtcaagacggagctgagatagctgccggtcctacaagacccagtcc

SEQ ID NO: 36296 - DNA, 798 bp, Mus musculus
  source 1..798: mol_type = other DNA
ccgccgtgcacccgtgggtaccaccgcgttgtacctccgcagccgagcgcgaagggcgggccgggcccaggaggcggccggggccctaggcccagtgcccgggccctcgcctccccgcccggcccgctgcccgcgcgctgctgtcgccgccgcgtcgtcgtcgcgccgtcgtcgcggacgccatcgccctgggttgagcgccccgcgcccttggcctcggctgctagcggaggcgcgagctggtgtggcgcgcccgggctcggtcagctcatccggcatcgcggccgcgggcccgtcgggcaaggctgggatcctgggggtccctggttgcctggggcgcagctgctcttcccgtggcgaacggccgcctggcgcacgcgcggcctggccctggagagccgctgcccggagtgagggcgtcgggctccacgaggcgggcgtcggcttctggccgggctgggctgggcgggagcgggtgcgcgcggacggccgttcccgcagcagcctccctcgcgttcaggtcgccgccccggctggcctcacgggagggggagggggcggtgccgggggcggggcggcgcgagtttcgtaggctcagccccaacgacccgctgcagcccggagagaagccattgccggagatgctgcccggccggactctgcgcgcaggtggtggcagggcccagggcaggagacccggtggtcctgggggtacgaccccgcgagatgcgttccggcgccccccaccccggtacccgcgccagggagtgggagaaggcggggcgaggagagccttgc

SEQ ID NO: 36297 - DNA, 479 bp, Mus musculus
  source 1..479: mol_type = other DNA
tatggccccaaatgtcatctgggccagtattgtccccaagcttgtgacatgtgcacactgactggaccatagcagtggggcagtgagaaggcagatttgcacagagctagacatctgtgtcagggtctgtcctagagcacacagagctcctggccatctttccttggtctctagagtttggtcacctcatgacattgccttcaggccaccttctggggtagatgcacaatccttcaggaaggtcctctgagctaggtccctgctgggtcctgcggggacttttctgcactgacagcatcaaggcaggggtgcgatggtaccagcaccttggctccacacgcagcttccctgggagagaatccagctggctctgaccaaggcctggctcacttccagctggggtcagctctgggccaggacccatctcataagagggcaagtccctttctttagctcagccgaagggcccagcagcgcct

SEQ ID NO: 36298 - DNA, 691 bp, Mus musculus
  source 1..691: mol_type = other DNA
aaaacatgctgcgtctctgcaaacttgttttggcagaatccccgttttaaattacacgcgaggtcttaaaaacagtcggcagtgagcgttctgcgggttccgacacgctcccggagggtgagcaaggctctcctcgccccgccttctcccactccctggcgcgggtaccggggtggggggcgccggaacgcatctcgcggggtcgtacccccaggaccaccgggtctcctgccctgggccctgccaccacctgcgcgcagagtccggccgggcagcatctccggcaatggcttctctccgggctgcagcgggtcgttggggctgagcctacgaaactcgcgccgccccgcccccggcaccgccccctccccctcccgtgaggccagccggggcggcgacctgaacgcgagggaggctgctgcgggaacggccgtccgcgcgcacccgctcccgcccagcccagcccggccagaagccgacgcccgcctcgtggagcccgacgccctcactccgggcagcggctctccagggccaggccgcgcgtgcgccaggcggccgttcgccacgggaagagcagctgcgccccaggcaaccagggacccccaggatcccagccttgcccgacgggcccgcggccgcgatgccggatgagctgaccgagcccgggcgcgccacaccagctcgcgcctcc

SEQ ID NO: 36299 - DNA, 288 bp, Mus musculus
  source 1..288: mol_type = other DNA
agagtcacgaggaatacctggtaattgtgagggttatttttcaaaacagtttctaagagcccctaacaaaagcacatttgtatatggcaatggtcaacattcccaagcctgggcctaaaggcctagagtaggaggttactttctggcaagttaatgtattccgttagccaaccagctttgtagaatccttcatataagtgtggctttgtcgtgagaggtggagagctcttatttcgctgtatccacccgcgtcccaggctccgccagcggctccgaagccgtgagtca

SEQ ID NO: 36300 - DNA, 439 bp, Mus musculus
  source 1..439: mol_type = other DNA
ccctttgctattattattattaataattattagtactattattagtaataataataataattgtatagtgtggcactaatgtaccagggaatgttcctggagattgaaggacctctttctggagtcagtattatgagttcatcctgtgactgcaagtgtgttctgagtcagagccataaatgcagtaattgctgcggacaaagtagtgcagctcccagccttagctggcagcggcagagtccaccacaatgatgaaagtcctggctggacaagcagatatttgctcagaaactcctagccaggggtgctcatcttaattgagctgagctctcggaagcgtccgcgtttccctggcgacggggcggctcagaatgatgacgcaaggcttcagccggcagcaatggggcggggtggggcggggcggcaccaccagcttgct

SEQ ID NO: 36301 - DNA, 449 bp, Mus musculus
  source 1..449: mol_type = other DNA
gggaccttgcctctatgccctagaggactaaagccaggccagactatggcacgactgagtactggcatagatgccataacctatgctatgttgagcacaggctgagcagggcctgcccccctcaggtctctcctgtggcctgccctgtccacggctaagtatggtgaaggcactgggctcacagaggtagaaatgcttctcagaagaggtgggtgctgctgctcctgcctctgggcaggcataccccacttggactgtacattctgaataaacatatttaatccgagaatgcacaggtgcaaatttacaccaaaagctgagaatctgatcttgtcactgaatcttaaaagctgtacattttaagagccacgggcctgtgtggacatgggtcccctgccctctgccacacatggccaacatctagaatcttcagggggttctttagcagt

SEQ ID NO: 36302 - DNA, 418 bp, Mus musculus
  source 1..418: mol_type = other DNA
cctccagacccatgtatgggtgtgggcttgcaggggcctctacgggcctgaatctgggccacagggacattctcagtcccaggcttggcttgagcagagaaggagactggaccctttcttctccctgtgtgtgcacatgcagacatatgtgctaggtctgtgtatatgtctcccacatgtctgcattgcatgtgtatgcacgtgtgcagaaaagagagccggcctcccgtgagcacggggctggcagtgggcaggcagggacagggcctggctctggtccacaaggagctaatgatcaactggccactggagtccttgccgcagcacctcagcctgccttgggtctccaggcccctaggctcagggagggtactgagcagtcagccggctgtgggcggactctgcctgtccaggccag

SEQ ID NO: 36303 - DNA, 304 bp, Mus musculus
  source 1..304: mol_type = other DNA
agcagcccctggaaacccagggaggctctttcctgcactgcctggtgtcctggtactgcctggtgtcctggcacttccaacgactggcccccctccagctgaagatgggaggaagggagcacctggctgctttctaagcttgctgagcttggctgctcctggctaggactggagtttcccagaccctcattctgggccggcagaccgggagcaggaggctccgggtgggtccccaccagccggggcggggtcccgtggggcaggggcggggctggcggcgggcagggccgccccttccagcgag

SEQ ID NO: 36304 - DNA, 302 bp, Mus musculus
  source 1..302: mol_type = other DNA
cggaaagtcagaaccatgtttttacagtctttagcatatattgggggaggctctcagaaaatccccctggcccctccagacccatgtatgggtgtgggcttgcaggggcctctacgggcctgaatctgggccacagggacattctcagtcccaggcttggcttgagcagagaaggagactggaccctttcttctccctgtgtgtgcacatgcagacatatgtgctaggtctgtgtatatgtctcccacatgtctgcattgcatgtgtatgcacgtgtgcagaaaagagagccggcctcccgt

SEQ ID NO: 36305 - DNA, 521 bp, Mus musculus
  source 1..521: mol_type = other DNA
gacctgggccaaacgtccctggcctgtgcctgttcatgcagtggcagatcctgtatgcccacctgttgtcaccaccgacgccctgcgctggacgcctgacgtcacaagggaatcgccagagcctcctcagtgtgcaccgcctagcgtcagccgagccgcgaggctgcctatctttggagtccagacacctgcgtctggatcccaacccattcagacttcgccgtgtgtgtgtgggtaaggaagggaaggtctattgctgagaccttccatcactcttcagctctgcagagctctcggagcaggtgcaggagggtacctgcgctaccaccagtctgcgcctgagcggaacacacagcctgccgggatttgtagtccgcacgtccaactgcggtggcgcgcaggcgggcagccggggcacagcgcctacacttcccaggatgcgaccctcccgcggctcgacaaggggcgtggcctagctgaggggcggggcaaaggggcggggcgggagccccgagctgcgg

SEQ ID NO: 36306 - DNA, 332 bp, Mus musculus
  source 1..332: mol_type = other DNA
tcttgtgcctgggcaagcagatcatctgctgcatggactccaggactcactgaggagcggcaggctggcctgatcactgctgactctgatgagggtatccatcccaagagaagcatgctggttgtagagatacattccagaacagtcctctaaggcttctatgaggatcgcaattcggatggcaagaaccatcagccgagtaccactgagcttagtccacgtgggcgctgagcccgaagcgaagatcagcgcagagtcccgggtgccggctcggacccacggccccgcccagccaactccctaaccattggctagagggcggatggaggcag

SEQ ID NO: 36307 - DNA, 349 bp, Mus musculus
  source 1..349: mol_type = other DNA
ctgcaggccagctgtcagttcccaggaactggtacctttatgtttagttaacatttatagttaaaggaatatttgcttttgaatgtttttcaaaagatcctaacaggtgtacagagggaccctgggaccattgtctgtgaatgtgggaggaccctcccctgcccactgtgagtggtgccacctgacccttgtccctagacttgtgccaaggccaagtctcacccactgctgcgcaagggcagctgcttgcagtgtatgggtgcaggtgtccccgggtacatggcagccatgctggagcacctgacggccagctgagatcctggagctggctatcagcaaggacgagggc

SEQ ID NO: 36308 - DNA, 229 bp, Mus musculus
  source 1..229: mol_type = other DNA
ctgttccctggagtgaagagacccagcaggcagcggggcctttcagtgttggtctccttttattgacattgacagcagcgcccggaggaggcgccctccccacctccgcagaacggctactctggagttccccaagtgctcaggacatcctggcccggcctggcccagcccagagctgcggtggcttgcgcgcggccggcaggtggcggtgctcccttggctgcgtggc

SEQ ID NO: 36309 - DNA, 323 bp, Mus musculus
  source 1..323: mol_type = other DNA
cttcctccactggcccaaaggaagcagagtcctcttgggagggcaacaggaggcaaagctgttgcaaaggcagctgggataccttcccacataactgggaagtggattcctctgagccacagatacccatgtgtgggactcacggagaatcaacaggatgaggccgtggccagctgtgcatttgcctgatgccaagtccagtcagtccctggacagtggggccttaggaccagagcctgtggcgggcatgtggccatgaggcccaacagaatagaagcttcattcccaaagaagctagactttgaaaaccttgctgagcaggc

SEQ ID NO: 36310 - DNA, 318 bp, Mus musculus
  source 1..318: mol_type = other DNA
acattccgcggaggacatcctggactggattagggattagcaaccccagcccctggtcgggcgggcttctgcctggctgcctgaccttgggcaatcccggtgcacgggcaccgcctgcggggaccagcagagctctcggccgtgagtgaggcagtgccaaagccgggaggctgcggcgcgccagcctcacacaccgagccgccatgactgcccaggtcgcgtcactgcgcccacactgagcatgcgcggacgcagaccattagaattctgtttcctccttctccggtgggcggagactgaggcttctgggagccccgg

SEQ ID NO: 36311 - DNA, 273 bp, Mus musculus
  source 1..273: mol_type = other DNA
ctgccccacgcccacggcgggttaaaagagcgaaattaaataatagaattttggtcccttttttgacaaatagaccaggctggcctagtccacggaccacagccagcctgttgacagtcccttcccgggacacgttccgcccgcagaaggtagcaggagcctaaagcgagcaccagtcacttggcacgagttcccgggtccccccggggctcccagaagcctcagtctccgcccaccggagaaggaggaaacagaattctaatggtctgcgtc

SEQ ID NO: 36312 - DNA, 441 bp, Mus musculus
  source 1..441: mol_type = other DNA
gggcctggggcagccccctcctcaacaattgtggtcagcggtagagatggccggtggcagactctctggctctcgggacacggcctcgcccgcggtctcagcggcccccggactttccgggacctcggctctggctcctgctctacagggttggccggagtcagaggttcggagctaaccttgactcgagcgactgcctggccaggccttcctcggccggccccgctctgaggccggctgatggtttcccggggcaaccagggcgcgcggtgggccccgcgattggtcgtggcccgcacggcctacttccggtccgcgccccgccggctgacaggcttagggcggggcctcgcggctcctccagtccatgaggccgcgggaggcgccggcgcgcaggcgcagagcaaagactcggctgtccgcgagagggcgcgcgggggg

SEQ ID NO: 36313 - DNA, 679 bp, Mus musculus
  source 1..679: mol_type = other DNA
cctgctctaccagctgtgtgaccgctggtgaccaacaccgaagccgaactgctcgatggcgtccagcagcagctgctcctcgcggctggtccagccgccctccgcctcaggcagctggtagccgtggtagcggcggtggtggccgatctccgcgccggccgagaagcactcggggcacagctcgatgtcctggcactctgtgcagcggaagcgcagcgggctcacctcggccaagcagtacacgcagtacttccgctcgcccgccgcccggcccgcagccgccgcgcccccggccgtcagcgccccgccgcctgccgggctcgctgcgcccgccgcgcccgtgccgctgccggccgctgccacggccgcccccgcccaggcgccgccggagccggccaggcgggccgcgtcccgcctcagcacgcaggcgccctccggcccggcccggccgccgccgccgcagccgctgtctccccgccgcatcgcgcaggcgccccccgcgcgccctctcgcggacagccgagtctttgctctgcgcctgcgcgccggcgcctcccgcggcctcatggactggaggagccgcgaggccccgccctaagcctgtcagccggcggggcgcggaccggaagtaggccgtgcgggccacgaccaatcgcggggcccaccgcgcgccctggtt

SEQ ID NO: 36314 - DNA, 340 bp, Mus musculus
  source 1..340: mol_type = other DNA
gcagctaaggtgagtgtactgtcctaccctttgatggtcagagagaacagcaggtaccaggaatcccctttctccaggaacatccagggaggagctgggtcaagaagggctgcttgggcccatagcctttggggttggggcagcccccaggagggaggggatttcccttcctaaggacaaaactaaccatttggtttttgttttcaactcctggattttagggaggagatcagactgtctcacatggcgttcctgcagaacacatgaaactcacatggtcttgctatgtgttaaaacattgtgttgctgccagaaaatgactatcattgttcgagtataa

SEQ ID NO: 36315 - DNA, 439 bp, Mus musculus
  source 1..439: mol_type = other DNA
attggtacacaaatgctgtcaccactgtgataattagttggaaagagaatctttccagtgctctggactagcctactcactagaaataattttggcccttaatacagatttgtgaaaatttttctaaggtgtaatttacactggagccctctgacctaaagttaatagttttaatgaatgcatgttcagataatgtccagtcactctgcaaagtgtcaggtgaccctccaggtaactttccagatgcttataaccggccagcttctgagaagtgctaagtatatttttagcacccaactctgtggagctgggcagggaggcctctgagccttgactcagccagccccgccccgtctgttgtggaggaggtccttgacagctcgcccagcccaacctaggcactgagcagggatccgggaatcgctgcatctgtgagcga

SEQ ID NO: 36316 - DNA, 262 bp, Mus musculus
  source 1..262: mol_type = other DNA
cacccccagctgctggacaggggcgtcccatcgatgcgctccgccgctcggctccccacgccacttcccacttccaagatggccgcgggcggagccgaccaggtaaggggcctccgccaggcgtctttcctgggcctgaggacagaaagctcctaagctctacggagctgcggcggggggcgagagcccgagcgcggggcgtggtaacgctcctgtcccccggagtgtgactagggacgagcgtgctggctgcttttagccg

SEQ ID NO: 36317 - DNA, 316 bp, Mus musculus
  source 1..316: mol_type = other DNA
cattgttttctaggttgcaactttgaggctagcatttcctcctgcttgcttccaggtacctgccagggcagggaaattcctcttcctgtaaattttcggggtctgacaactcctagaatatgtatggatcctgtctctgtaatttttgctacttaaaaaggtaaaatgtgcataaaggtggcacacacctttaatacataggtggatctctgtatctcaggctagagaaagatgctgtctagtgaggcctcttctcacccccagctgctggacaggggcgtcccatcgatgcgctccgccgctcggctccccacgc

SEQ ID NO: 36318 - DNA, 592 bp, Mus musculus
  source 1..592: mol_type = other DNA
tatgaaaggacagttcttttaggttcctgaccttggcttgcttccagttctctgctcctcccgcctgagctgagcttgggaactccgggtctcagactctgaacccaagaacagggcctggtgcctggcggtgctcaatgagtttgatgaactacatgcaggtcactcccaaggcttaaaaggtcttttattttttgcctacttaataataacataaaaaagccatgtcactttttgtttttaattgaagtctttatgttaagccgcccactccagccattccaggacatggcgaagagggctctgcaaagccgggtctcagtgacccagcgggaggtcaccgacccaggagccctctctcagggcctggtaaagcttcaaagcctcggatcctggcctcgtggtgtcaggatcttcaggaccccagaatccagtcctggcctgctgctcccccacccacacagcacgagggcggagccccggcgcgctgatgtaatcccggcgcctgggcggcgtgaggctgttgccaggtaacgcagcggagcggctgccgcgcgccgcctcccgccctccgccgcctggcgctggggcc

SEQ ID NO: 36319 - DNA, 355 bp, Mus musculus
  source 1..355: mol_type = other DNA
tgttcttcccacaaggtggccttctagaaagaattacatgcaggaaatgccctggcatgtccccgttatctctgtgggaaagacaaataggagggatatctcttttcacaagaccaaagatgataacaccaggtatattttctgtacttgtatttgctaaaactaatcataaatgtcacctcatattttgcttcctttaataataaaaatgagaagttctttgtattattcttcggaatctattgatctgtctgtctgtctgagacagagcctcactccaaaggcctgtgccactggtctcagaagcactgcgggctctcgcgtgacgtctttaggaggcgccggaagcaggcat

SEQ ID NO: 36320 - DNA, 236 bp, Mus musculus
  source 1..236: mol_type = other DNA
attgagtaacagttatatgataattcacttaaactactgaactcagtctggaataaaggcgggctctttttcttttttaaaagtaaacttgtcgggtgcggtggctcacacctgcgacacgccgacctaatgtcagcgcgcggccgcagaggcgctcgccccgccccttcgtggacgcgagcgcgcccgcccctttcagcgcggccgtaaagagggggcgcgggcgccgagcgctg

SEQ ID NO: 36321 - DNA, 295 bp, Mus musculus
  source 1..295: mol_type = other DNA
acatatgtggtcacaacacacataatttaagaagctatgactcttcggacccaggtttgtcaggctgcccacttcttcatggaaaggtctgacctcttgtggaatctagaggtctcaggtccatctgaagggaactgctctcttaccaattgtaaagtcaccagttttaattggctgagagatggggacttcattcgcttccttaaaatgaactaaaaaatttcaagtcaagctggaggtgctcgtgccctgcccgtggctggcagcgctcgcgcattcctgccgacaggcggcg

SEQ ID NO: 36322 - DNA, 560 bp, Mus musculus
  source 1..560: mol_type = other DNA
ggacagagtcactctgctgggattcctctcaaacagtgagcaacctcctcctgataagatggtgatgctgtctctgtcagcctgacctgttggtgcagatcaccggggcaggtgcaaagactgtagttttgatctccaatagcacgtgcacacacactttttgtactcgctgctacggcgtcggaattagggcgcctggcacgaagtgcgcgaccttagtgtctgaagtctgaagatggggcctcacgaggcgggccaaaggtggcgcgagacttgttcctggtccaaccacctgttaagcagcaggcttacaagcggcgagggggcagggccggggccgagtccactcggaaacaagctgtgggccggccagacccgccctctcgccgccatctgtcctcctggcgacccaagagagcaagtcgctgcaaggcgaggcgctccgtgttgccggcgacttaacgagccgagtctccctgggtcgcagcaggaatggagggtggcagaggccccgcccaggccccgccccctttcccggggccgcgctgaatgtagggccg

SEQ ID NO: 36323 - DNA, 353 bp, Mus musculus
  source 1..353: mol_type = other DNA
gggagcagcctcggtaccccctctcccctgcagaacgttctgagaacccaggaaggtgttaaagaggtgagcacaccccgctcccgctgcagctctgcctggctcatgtgggatgctgcttccttgagcgcgttctgggtggggcgccctcccagaaaaaccccgtcttttccttaataaagggccgcgataacctggccaccaaggtggcctcaactctagataggtgtccctggttccggaggtgaccgctgtggcggggctcggctcatcagctccacctgcgcggtggctgcacggccgggggcggagaggcgtgcagcggagggaggggcctgcgacacggccccgcc

SEQ ID NO: 36324 - DNA, 354 bp, Mus musculus
  source 1..354: mol_type = other DNA
tcattggcagggaaatggcttgctcctgcctggaaacttccctagagacagctttccaagccttcactgagcccatggcccatgggttcgcggctagccccttcaattgaggtgggctattcaagagaatagcataaatgaagccagagagggtccttgagtgcggccctggagggccagagacacctgtggcgctgcccacagcttttgcccccaggctgtttgtttcttgcttttaaaacaccactcaaaaggcgaggccccggcttaagcgagggcgcggagcgcttcctggttcgagccgaaaggggcgaatccggttctgctgccgccaccgggaggagctgtctgtct

SEQ ID NO: 36325 - DNA, 266 bp, Mus musculus
  source 1..266: mol_type = other DNA
ttgtctcagatagaaagacccaggccgatcctggaggcacagctctgagctgtgaagagtctctgcaaactttgtgacacactatcatgtgtctctcacctgcttgggggacacatctgcttcccagagggcagtggccttgagagacccagaggtgagcactgtgtgactttggtagccttctcaaggccttccttaaagcacctgttcctttaagagggcagccttctgcaggtgtggcagagagccgcaccctggtagctggc

SEQ ID NO: 36326 - DNA, 284 bp, Mus musculus
  source 1..284: mol_type = other DNA
gctgcaggctgcattcctgacagggaatctctggtgtgcgcgcgcgagcgtgtgtgatatgtaccatgtacagacatgcttatgtgtgttgtgcacccgcgcaccgccccccgcgccctgcgctccttctagaggcggagagccgggtgcgtggagggcactgcggctcggccgcccgccctccgcgctgcggcccacggtttgtagctggcagtggcgctggtcttggtcaccgtaggctccgccccgccccggccacgcccctcgcgggccacgccccggcc

SEQ ID NO: 36327 - DNA, 380 bp, Mus musculus
  source 1..380: mol_type = other DNA
acaaacatcaggtgtgtgtagtcttctagatgagggtggagccgactcctttttctcccgtgcccagcaggtggcaggatgtggccagagataacccgaccctgggaagtctgggccagcagccggtgctgccaggcccactctggccccagcaagcctagggtccttaggcaagctcgccccagctgctgcagaagccgcaatttccaaaaaacgtactttttttttttttttttttttttttttttttttttaaacataaacggcaggagagaggttacatattagacatcgtggggagtcccgggaacccagcagctccagggaggccccttccctcggagtccccgcctacccgactgtgaagtggggggcggtgg

SEQ ID NO: 36328 - DNA, 354 bp, Mus musculus
  source 1..354: mol_type = other DNA
ttcttgacctgacctggataagaccaggagtaggcctgagcatccaaccaacacgttgcagcatgaagctattgccaggaagatgttccagttcccagggataccccgaggacaggaaggtcctcttaacaggtgtgtgacctgaagccacaggtgtgagcagacagattcttctgagctgtcagatcttgaatgagacacttcccctgacagttgtaacattcgctcataaagaagaatttttctcggggagaaagagggccttgaggtgctgctggagttaatctggccgccagctcaggactcagggcaacctgaacgctcagcgcgccccggctgcgcatgctcaggggg

SEQ ID NO: 36329 - DNA, 278 bp, Mus musculus
  source 1..278: mol_type = other DNA
gttggttggatgctcaggcctactcctggtcttatccaggtcaggtcaagaagctctccggcagctgcccagcaggacccctgtccctggataagggatccctctgggcactcaggggagccctaacaccccttgggggagcttgcccgaggctgggcaggtccagcaagatccccaacctagcgtctctgggaattcctagtgctaagactgggcagcaagcgaaggagctgcgcagctccctcctacgcagcttgcggcctcgttcgcactgagca

SEQ ID NO: 36330 - DNA, 397 bp, Mus musculus
  source 1..397: mol_type = other DNA
tcctatggcaggatcaggctttggcagaggccataacattagctcagaagtcttggtgactcctggtgtggcaatgctcctggcatcagcccattgcagggatagacacagtctgcccctccgctgtcctctggagcctgcagtggggactcagtggtggccacacagcagagagccagaggttcagaggaagcttcgcctccagacccgagtggctgagtctggtaccccaaccctactattgtcctgcccagcagacttgaaggattaggggcaccctagtcctcctttaccccctctctggcccaggggcaacactgccacagaaattaagaattcaggaccccttggatgcctggccctggcaggggccccacaggaaaaaggtggggagcct

SEQ ID NO: 36331 - DNA, 341 bp, Mus musculus
  source 1..341: mol_type = other DNA
tctgcaccagcagacagacccacagttagtatgagaaccaaactcatttcccagatcatgttacttgttccaacaggaccctggagacaaaggcccatttttactccgaggtaaataagacacttagggcggcttttttaaaaaaagaaattagtattatcccttgctactcaggagtgtgggggtccagccggaccgatgcccacctgacttagctaggcggaaaagctccccaggtacctccggctctgtcccgcctgtgcgggtcaggcccttccccgagcgcccccaggccgagcgcgcctcggggcacgagcacagcccaatggttctctccggcc

SEQ ID NO: 36332 - DNA, 213 bp, Mus musculus
  source 1..213: mol_type = other DNA
aactatgattcaagagagcgcttttcaaaagtgcttatatcatgaagttcactacattataagtaagaagacttgtataagttttatacacacattctgtttaattctctgtgcaaaaagggcagactgggaaatctccgagcgtccggctctgggttaaagccggaaccttccactctccgcgttacacgggcggagtgcgcagttagtgcg

SEQ ID NO: 36333 - DNA, 429 bp, Mus musculus
  source 1..429: mol_type = other DNA
ggggaacagaatgatggccgcagatgatgaggcgctgctcctcccgcgccgggccgcctgactgcagctgcggtcgggagattcccacctccctttgagctctgaacacctgttcccacactctaggcatgcatccctagtgggacagaagagccccgcgctcggccgccgccccagggttgcgcagcccgctcgggtatcccttagtcgggctgggagtctcaggttctccttcctccggtcggggagcgcgcggggtccccgggggacccccactgcagtcgcgtgctcctttgtgcgaccgatccgcgcgcgggcggcgctgcgtcaaggcggaggcgcatccgcgcggccccacgcgcactcccgcgcgcggcccccgggaacggcaggaaggaggcggcgcgcggaggaatcgccgatcccccg

SEQ ID NO: 36334 - DNA, 360 bp, Mus musculus
  source 1..360: mol_type = other DNA
tcttgggaccccaggggaagactatgagtggccctgcttcggtattgcaggtatctcctaggaggtagctgctgcaggaataggtctttggtcctctgagctccaggagccataaggtccttcctccggacctcaggtctataagccctgtgcgctgaggactactggccggccccgagtgccggagtcagccgaccccgccaacggtctcaaccggccgccgggagcacgtggagcggcagccacccagcgtagcaccgccaccggctcgcccagccaccccgccaatcccggcggcgcgcgccaacgcgcgtgcgcgcagaggccacgcccctcccagacggaagtgacggcggcgga

SEQ ID NO: 36335 - DNA, 410 bp, Mus musculus
  source 1..410: mol_type = other DNA
tccagaacctcagaatttgaatacctagaaggcaactgtattttaaaaattaaaaagagcctcttcgttctgtggcagaaatgcctgagctgcgagaagtgtgagaaactaaagctctctcaccttgctttaggagccacagcaaaccacgcctgggttgaggttttaggggcccggggaaataagcgcctctcctatctcggggcgacgcaggaggaggcccggctccggtgcccggagcttagctttgtgctccgccgagccccatcacacagcgctgcgagtaagccgcgcgcaccctacccgcgccaacccacgggagtcgagtgtcccgggccgccttacccgcggaggccgctctcgcccggccgctccgccgccgtcacttccgtctgggaggggcgtggcct

SEQ ID NO: 36336 - DNA, 435 bp, Mus musculus
  source 1..435: mol_type = other DNA
gaagtgtgagaaactaaagctctctcaccttgctttaggagccacagcaaaccacgcctgggttgaggttttaggggcccggggaaataagcgcctctcctatctcggggcgacgcaggaggaggcccggctccggtgcccggagcttagctttgtgctccgccgagccccatcacacagcgctgcgagtaagccgcgcgcaccctacccgcgccaacccacgggagtcgagtgtcccgggccgccttacccgcggaggccgctctcgcccggccgctccgccgccgtcacttccgtctgggaggggcgtggcctctgcgcgcacgcgcgttggcgcgcgccgccgggattggcggggtggctgggcgagccggtggcggtgctacgctgggtggctgccgctccacgtgctcccggcggccggttgagaccgtt

SEQ ID NO: 36337 - DNA, 269 bp, Mus musculus
  source 1..269: mol_type = other DNA
cagagttagtcagattgcatgctctttcactcatccaagctatgaaagtgaaaaattgaggaccttgaggcagtatcatctgcctcagagttatacttctgaacaaccttaaaagtgaggcgggtatggtggctcacgcgaggccagcctggtctacaaagtgagtccaggacagttggggctcagaatgctgaatatgaaccctgttacagagctgttgcggtttcttcgcccactaaaaccgccaatccgcccttggacctggcgcc

SEQ ID NO: 36338 - DNA, 321 bp, Mus musculus
  source 1..321: mol_type = other DNA
gctgcgcttcctcttggcaccggagcggagcgcctaggggacagtgctctcgagactacaacgggaccactggggaccttctctctggaatcatctccagaagaggatacggagggatgacttgtgtagtggcaccacttcttaccctgagccactcacaggtcgagggccctgagggcccacccaaaagtctaggggtctccccaccagtccgggaaccgacgggcggcacctgttgcagtcccgcgtttccggggagccgggggcaagccgggctggtgcccagagggagcagccgcccggggaccagactggaagatg

SEQ ID NO: 36339 - DNA, 320 bp, Mus musculus
  source 1..320: mol_type = other DNA
ctgggctctgtgaatccctggcatgtggtccctgcttaccctggacagcacttcacgtgcatgtgacaatcttccagacacagcttctcagagtcttgtgtggggatgaccatggctcactgaaaatacttctctgactgacacgagtaaattaattctcggccaccgacatcgctgcacgctgctcgctctttgagcagcagaactgactctgcaggacaattagagaaagatcaatatttcattttgcccacttgccccccatccagagccaggggagcaatgtcgctcgcttcctgttcaggcatgatcacagagcc

SEQ ID NO: 36340 - DNA, 337 bp, Mus musculus
  source 1..337: mol_type = other DNA
agtggctgccattggggagctgtcaccctccaaaccaaggggtgcctgcccgcttctccaatatgggatatctcagtgaccatattctcagagcataggaagctcaaggaagctagctcaaaccattgccgcttataatttcaggtgaaattcccatgagtgcattcatgcttgccagtgctcagcacctctctaaacatatgcagcctacagtgccctgtctgtctaggtgacagttaaactggggcttccttcatgacaggaatcatggcggcgtgttggggaccctcagacccccgaggcttgagaatggcacctccctcagacccccgaggct

SEQ ID NO: 36341 - DNA, 406 bp, Mus musculus
  source 1..406: mol_type = other DNA
ttaccagtaatgctcatcacagctgagtaatagtaatagtaatatgaagcagctgtgtttacacagggccagtggagtgctgctcttccacactcctggagttcagttcccggcatccaagtctagtggtttagtcgacctgtagctgcagcttccacacgcacatgcattcatgtggacaagtacattccatacgtgtgtccacacatgtaaaaatgcatacacaggcatgtgtgcgtcaactattcagatctctgaaaaaatctgcccaggctttggcatgccccaggctctggcccctgttgcaacgaagcagaaagcccatgtttccgtgttgggaacaatgagtcatcttcagttctgagccaggcttgggaacagtgatcccactgagcgatacctggca

SEQ ID NO: 36342 - DNA, 399 bp, Mus musculus
  source 1..399: mol_type = other DNA
tggagtccagtcttggcttctttgcacacagtgacgctgctcccatccagtagactgtaggtatgaacctaatgtgaaaagggaccatttacctactgtcacaacagaaatgacttcgtcgaagcttctatgcctaagccagtagaacttcaagtccgcaggacccaaggagggccaggcgcccatggaactcagttctttgcagaggaagctgcagagtgtgcaggacggagggatgcaaacactgcacccagtgggtgcgatcgcccccaagctcagagcccacagcccaggggcagtgaaggggcaacctcaggcgcccgcctctccgctgcagtcgcgccgcattgcgcacgcgcgccgccggcccgactccgcccccccgggtagggacctaca

SEQ ID NO: 36343 - DNA, 296 bp, Mus musculus
  source 1..296: mol_type = other DNA
acactggtgtgcaggcatcagttttcacaattgcaaaatgaaaaagaatattcttctcacgtagttaatccttcattaaggaaataaacttttttgaatttatcctaaacaatgtaggaatttgttataaatttcaacatcaataaaatccatttaaataacattaaatcctactgcagtgggcactcatggatgtcccattcaaacagagcaagaataggagccaaccacttctcttctcctgcacctgctacgaggccaaactgcccaggtctgtggctgcgtttctcggaaaa

SEQ ID NO: 36344 - DNA, 502 bp, Mus musculus
  source 1..502: mol_type = other DNA
aggctataaattcatttaactgctaactagatggcagttaagattaagccaggtgactggctccaaagcagaaatggactttttcatttgctgcaaattcgagctctcctttgaaagcccactttccgggtttccactgcgagactcagaaaattccaggttttgctttctttccctagagcgtgtaagaattacagttcccagtggcttcaagtcttttgcaagccggggcgccatcccggttcacgggtcgcgtcacgtcacttccggggcgggcccgcaagcggggcggggcggtgtccgcgcaggctcgtggggctgcagcctccgagccgagcgcttgaccaaagctgggggcgagccgcgccggggccgcgcttccgggttgggttgtccgcagcggtagcgcgcggggcaggcgcgtacgggtctcggagccgggtctcggaccgccccctccgcgcccggcacgcccggcgccgccttccgcgctgtccctggg

SEQ ID NO: 36345 - DNA, 412 bp, Mus musculus
  source 1..412: mol_type = other DNA
gttgcaaaacctctcagctttggaacgcaggaaaaacttgattagtttcagaggtgaaatttgccaacctagttacttttgctaaaggaaagctgaattcttcgggctcgccttaagtcggtccttttgaggtgaaaccgaagagagagggtttttccgtggcgacaaagcacactctgaagccacctcttcaagtggctcctgtccctgctgcagcgcaagatggagctaccggctccagagacctcccggtctgtgcaccgagcacaggcgccaggttcggacccatgagcggagccggctccttcgggacccaaaagcgcagaaatcgggttgctggaagtcggcgctcagggactcgctgggaggcgcccaaggcagcagtgggcgctcgagatcctcttctgccctc

SEQ ID NO: 36346 - DNA, 506 bp, Mus musculus
  source 1..506: mol_type = other DNA
agacagtatcattaaaacactgttttctgggattcatgaaatagttgcaaacatttattgtgcacatttatgggttcagaaaaagctaatccaaatttaactacaaatagaagaacagaaatatgttaatcagatttgaattagtaaaacaaaacccctgtgataatcaagttaataaacagaaaggtttgttagtacttgtggcttgagtactccattacattagcacttcaatacacattgcatgagtactttagtttgagcccatggtgacaaggtgtcagctaggaaacaaggggatattcttctgcggcaaaagctttattgcttacttcttcgggagcaagagaaaaaatggcgctgcagcccattggctgcaattgtcgtcaaaactactctggcacatgtgcagattatttgtttactccccacaaaacatgccctttgtaagttaactttctcatatcaagtcccatgtgacaagatcacagggcagtcaaactgca

SEQ ID NO: 36347 - DNA, 380 bp, Mus musculus
  source 1..380: mol_type = other DNA
gtttcttggaaatgttcaagtcttatacacaagatcttttactttacaaacaatggctttaaatatttaaactctcatttaaatgctcttagcttgtcacagatatttaaaatactgttgttacacacaactggtttcattttatatagcagcattcctccagcaaactacacttgtgaacacaaaccccagggctccagggccactctactctccaacctcctggtgggtgctcaccttcaccgacaggaaggatcctgtgcacgcgcagcccgaagcgtccccggctgcccaggtgagttatgttctcagactactcttctctaatgtggtttcacttcactgtaaaaaaaaaaaaacttgcttttgtctcctagccc

SEQ ID NO: 36348 - DNA, 433 bp, Mus musculus
  source 1..433: mol_type = other DNA
ggcaagggtcctggagtactcgagtagcttgctcaggggtagccccctccaatggactggctacatcaattaattagttaatcctacattaattaagaaaaagccagatcttagggaggcattcttcttaactagggtgctagcttgtgtcaaggtgacataaaaaggactcagtcttaggtgtcacccaaggactaaacgccttaacgcgtgtacgggtcatgcctgagacacaactctatacagatttcactcgctagttcgcactgcggcgggcttggggcagccgcaacagtctgcctcctctgagctgaagctacaggtggagagccagcgggcgcacgctcctagccgcgcccgtctcagcctcgtgagggcgcccgcgcctcgaggcggctggaattggcccgccgcggccccggtagccagactt

SEQ ID NO: 36349 - DNA, 720 bp, Mus musculus
  source 1..720: mol_type = other DNA
cccctgggttgtggtgacagcgcacccagggcttgcagcagcggggccaggaggagctggtctcagaacctactcagagctctcctgacgcagagcgcaaccggtgtttcgcgttttactcttaaaaaacaaacaaaaaggcaagggtgggtgacagcacgcgcggctcgcacccgaccgcaagcttagcgccctagtcctgctagcaggtctggggcggcacttcacgtgaccccaggggctgggacagggcgaggggcggttgcccaggaaccgtccgcaacgcccgcgcgtgctcgcctccgtgcgcacgcgcacggtgctcgagacccatccattcaaggtcctggactgagggacgcgccgcgcgcgcccgctgcctcgcagggtccacaagggcggggcggggcgaggccggcggcggcggcggcggcgcgctcgcgcgtgccagggcgcgcgacaaggggcggcgcgattgtgaggtggctgctgacgcacgttccggggttcttaagcggcgagggcggcggcggccgaggcagcggcggtggtgccggagccggttccgggaggcggcggtggcctccgtgaggggcggcggggccccaagtcggtgccccggctcagtcacagtgcaccacggccgcgccgccacggctcccggggctttctaggcggggcaggggacggggtgcgtctcctgccgcggccgccggcctg

SEQ ID NO: 36350 - DNA, 633 bp, Mus musculus
  source 1..633: mol_type = other DNA
ttgtacttattatttatatgctataaaatattttaaatgctacctattgtgtaatagttacttgactaatttgcataattctgagcagtgagcatacttaatggaacattaagtttgtcaaagtcatacatatgttgattcctataccaattatgaaatattgatcattttaagggagagtatgtatgcaaatcaaaattgacacaaactgtttattgctatacataagtccgttactatttactgagcctgggttactaagcaggcactaagtaagacctgttttgatatatatcataaaatacttttaaataaatatttaagccatgctttaaaagtttgctataattttaatacacacgtgtgtgtgtgtgtaatgtattctgatcacaggctaaaatatcagaaggtttactcaattacatagatataatttgcaaagtgtgtgtccttcctagatttatagcacacatgtggactaatgcttaaacaaaactaatgtaaataacatcatctgaagtactttcctgttccatgaagacatcgtgataaattaaggtgaaatcacagataaactttcctgagtgcttcaggaaatgatgcccgtcagtctctagatactacttgaaaggg

SEQ ID NO: 36351 - DNA, 594 bp, Mus musculus
  source 1..594: mol_type = other DNA
cattaagtttgtcaaagtcatacatatgttgattcctataccaattatgaaatattgatcattttaagggagagtatgtatgcaaatcaaaattgacacaaactgtttattgctatacataagtccgttactatttactgagcctgggttactaagcaggcactaagtaagacctgttttgatatatatcataaaatacttttaaataaatatttaagccatgctttaaaagtttgctataattttaatacacacgtgtgtgtgtgtgtaatgtattctgatcacaggctaaaatatcagaaggtttactcaattacatagatataatttgcaaagtgtgtgtccttcctagatttatagcacacatgtggactaatgcttaaacaaaactaatgtaaataacatcatctgaagtactttcctgttccatgaagacatcgtgataaattaaggtgaaatcacagataaactttcctgagtgcttcaggaaatgatgcccgtcagtctctagatactacttgaaagggcttcagggactccgttccacacagtgcaacgagtgtatatagtaaactctttgaatgctttaaatta

SEQ ID NO: 36352 - DNA, 161 bp, Mus musculus
  source 1..161: mol_type = other DNA
aatatatgcatttccttggagtcatttattgtctctaggaattagttagcttcagagatctatctaagacccatgcagtgaatgcttggagttaggcaggcagcctagcctaatcaccaatagctctgaaactgccactttaaaaaaaaaaagcggccgcc

SEQ ID NO: 36353 - DNA, 193 bp, Mus musculus
  source 1..193: mol_type = other DNA
cgggcagagtgttactgatccacatcactgatggacagagccacacagctgtcagatgtgtaagatgaaaaaagcccttttctcttcaagttgcttttggtcacagcaatagaaacttaacttaagctatgaccagtattaagttcaagtctaggaaaaaggaaagattgccactgatggccatagactatgg

SEQ ID NO: 36354 - DNA, 193 bp, Mus musculus
  source 1..193: mol_type = other DNA
aagatgaaaaaagcccttttctcttcaagttgcttttggtcacagcaatagaaacttaacttaagctatgaccagtattaagttcaagtctaggaaaaaggaaagattgccactgatggccatagactatggggtaactcagttcccttattaaagagctgctctcctggagaagaaacgagacagactgccg

SEQ ID NO: 36355 - DNA, 436 bp, Mus musculus
  source 1..436: mol_type = other DNA
gcatatcttctgcttactgttcaaagtttatggttgttgagaaaacggacaggtgacgtgcactggccccatcccactctgctccgtgccaggaggggtgaggaggggctgccaggtccccagctctcagccgcaggggagaggccatgctaggcccagagcggctgagggctcggcgcgcgcacagcccgcccgtccagagcacgcaggctcgatctggtcacgcaggtccctgcctcaaggccaggcacccggagaagcgcccttgaagaccctcgccctgggacagtgcgaaccggaggagagagctctgggcgcctcagcgcgcgcgccggtcacgtgggccgcggcaccgcatggcggcggcccgcgcgcccccgcgtcacggccccgcggaaccgcccgggcgcgcgcgccgacggggcgggcgcatgcg

SEQ ID NO: 36356 - DNA, 287 bp, Mus musculus
  source 1..287: mol_type = other DNA
ctgaaaactgtgtcatgagtgcggggtcttcttgggaaggagagctattactgcacatgagatgggttgcgagcatcctatcaataacttacatttattgagtaatcggttgttatgtcttagggattatgctaaacacctaggaggtattagccatctaatcaaagcaagctttgatgtaatgaatgtgaggctctgctcacatctatctagttcagagaggtaagtttatcttaacagcactttaccctctggggcaggctctgacccagtcagccctgtgctct

SEQ ID NO: 36357 - DNA, 200 bp, Mus musculus
  source 1..200: mol_type = other DNA
gcttcactaccatgcaaggctgtaaacatctctaatgggtatttgaacttattttaaccgtactgtattctcagacaaagttatctgtgagcacttgcctgtgctagtcaacttaggaatgtcacatggtaacagatttctatagaggtgtgtggtgcgcgcgcgcgcatgagtcctgccaaagctcagctaaggcctcc

SEQ ID NO: 36358 - DNA, 365 bp, Mus musculus
  source 1..365: mol_type = other DNA
gcatttgttatttcaactcttggataaagaatttaagcaatgagaaaacagcttaagatctcaataggaaatcttaagcgctgtactgtgcacaaagtgagagtgtggactgtcaataaattagagtgagactctaccaattattttcaaatgaaattccatagtggagagttacacagtagatccagctggctctcagcaaccaggaactcagagtcagatttcagcaacttcagtcactcacttctttactattaagagcaaatctctctgtctatgaaatggactagaggaaatgggccctttcctctgttcgggcttgcagcaaatgcaacccccctccaggactggctctccctgagggg

SEQ ID NO: 36359 - DNA, 452 bp, Mus musculus
  source 1..452: mol_type = other DNA
gaacagcacacactgtgctgagttctttacctgttagcatgttaacccgcactgtcacaggagacctggtcccgtttgaaacagtatttttgctatttagcaagtccataaagttttttatgcacttcctttctctgtgttctagttcagtgaagtaaacagatcaaagagcactagactagaggtcctgggttcaactcccagcatccactcacaactgtgtgtacctccggtttcagggaatccatggcaacgggtgcatggtgcacatgtagaaacacaagaaaatcacaacgctttaagtatggttgattttgtttgagagaaacaggttttgtcagttgtcaaaaacctggtttttaaggaccaggaagcttcataacacaagacaggttgtcaggcccccctgactaaaatgagttagaggcactctagctggcctcacaatgaga

SEQ ID NO: 36360 - DNA, 264 bp, Mus musculus
  source 1..264: mol_type = other DNA
tttttaaaaggccatgtgtccacatacttggttgaatccaggaatttgatcaaaaggaccagcgttgtgtttgtccctgatagcactgttttttagttgttttaaataaaatgcactgatctgtcccgtgggtgtccccagggcatcaatcagtgcgctcagactcagagccctaggctcctgctctttagttcccagagtcctggagtcccgtggtcctgactcaggcacccttagccaacccggggcggagcacttaaataa

SEQ ID NO: 36361 - DNA, 273 bp, Mus musculus
  source 1..273: mol_type = other DNA
ccgtgtagaggtcaatttcaatttcaccttcccctgctgagaaaattactaaattaaagttcaggcactccctctttgcagagtttttaaaaggccatgtgtccacatacttggttgaatccaggaatttgatcaaaaggaccagcgttgtgtttgtccctgatagcactgttttttagttgttttaaataaaatgcactgatctgtcccgtgggtgtccccagggcatcaatcagtgcgctcagactcagagccctaggctcctgctcttta

SEQ ID NO: 36362 - DNA, 230 bp, Mus musculus
  source 1..230: mol_type = other DNA
ataaattcaattatctgcaatttcttactcaactgaattttccatggacatttccttgtcttagaaatacctcttagaaataaaagcccattgctaagatacagctcagcttcctatccgaagtacaagtgttgtaacccacctctctgctaacaagcttagcaatgtaaaactcagccttagacttcttgtcagactaggaggagaattatacttctttaaaaacaagc

SEQ ID NO: 36363 - DNA, 590 bp, Mus musculus
  source 1..590: mol_type = other DNA
atgcttctactcatttaaaacagcgagcatccgttggtctcacggtgacaatctgacagaaccaggccgccttggctgcctgtccccggcgctttaggcgcatcgagcactttgcccgtcgggccgagtcccccacctgttggcacgctcccccgagctaggctttggacactgtccacggacaggccaccgggtcggcgccggcgggagccacagagctggagcccggccccagtcgccgtgcagccaaggccaggcgggtcgcgccggcgcactccggccaccgcacgggcacaaggggctccggccgcgcggacaaccacgccgagccccgctgccgcccaccgtcccccaccgcgcgacccggcggcatggagcccggcgcggcgccccggtccgcagagcccgccgcgcgccacggcgacggcaggaagaagatggcggcggccgtggcggcggccaccgcggcctcccacgcgccgctgacgccaatggcgcgcgccggccggcgggctacggatggcggctgcccgggcgaggggcggggcgaggcggcgagggggccggcgggaggcggaggccgggcgggc

SEQ ID NO: 36364 - DNA, 370 bp, Mus musculus
  source 1..370: mol_type = other DNA
tttgaggatgttgtcaccatggtgattttttccaagaggctctgtaaagtccctgaaagaacaattgggatagtgaaaatatgtgtcacacaattagaaggatctgagagagacagccaaaaatcttgcctccagcattctgtgggccactgacttgcataaaacatgctttttgtcttcctcaaatgcaatttaataagggtaagatatttgaaagattctgcttaaggagttcccaagatatttagaattacatccaaggatatgagcatgcctggtgtagaagccagaggacatcatcagtggtcatcctcaggaagctcaccagttagtctagacttgcttgggaatgagggcacacgatcataca

SEQ ID NO: 36365 - DNA, 425 bp, Mus musculus
  source 1..425: mol_type = other DNA
tatatactaatactatttcaaatatagtagtagtctttgttttaaaggcactaattccagaaatggaaaggtttacacttcagagcactacacattctgtattacagatttccacttttaaatgtgaccccttttacacagtttgatcaaatggaacagacttctaagttgctcagtgaattttaataaccagtattgattaggctaatagtgagcgctccagaaagctccctgcctgagggcggaacttagcactgtccgcgccctaggtagggttcactgcactgcagagagcgtgctgcgcgcctactgggctacaagaggaggcggggcgagcacgagcctagtatcacgcgctccggatttcgcaggaggcgtggctccgcaatgtctccgtctccacctcgaggcggagctttgggggc

SEQ ID NO: 36366 - DNA, 496 bp, Mus musculus
  source 1..496: mol_type = other DNA
agcaattatgctgaacacatacgatgggatgcctcttcatctgtggtgaatcagagacaggcagccgggtcctggcaccacgagctgctgaccaagagctgctgatccaagacactcttcaaaacagtttttgtaatccttccttattggataatgaaggatggcagatatgctacattaaagtatgccatctttgggtctcccatgcccaaatgaaccttatttagctaattatttagttactttttcataactatttactattcaatataatcactttcaggatcctcattttcctgtaagggcatgtatacacaaacttgttaaataaaattgacatacttctgttaaactgccttaaaccaaattctcgccccgcccccaagggcctgccgcccttccctaaggctcagtagcgggtctccgcccagttgccgacggccccgcccccaaggcggctttccaagcgcgcgtccggcgaccccggaggtcccgc

SEQ ID NO: 36367 - DNA, 392 bp, Mus musculus
  source 1..392: mol_type = other DNA
actcctgaggctgactaccaaggtgaagatacctaattaacttgtccaactaaaattgaaagggcaaggaaatctttcggcgaaaacttggtcagctgataatttttcttttttttttaagtgttgtaaaattaaacaacaacgacgacaacaaggctatttggcttctgaaagccgttatgaaaacagatgcagtcactttccctccggtgttatcatatacgattagaaaagtgccaggaacactggtatccttcagtgttccagccagaacaagtgactgctaaggtctttagggacagcccaagggcttggctggaggcttctccggggcccgtcatgtgaccaggcctgccacgtgatcaggctgcccgcgcctgcgcacacaggcc

SEQ ID NO: 36368 - DNA, 529 bp, Mus musculus
  source 1..529: mol_type = other DNA
ttccttccaggtttagtacgatgccacgaaaactgctagcactcaacaaatgattcaaatatttgttgaatgaaggaattaatgaatcgtgtttaaataggtctcacaacaacattccaggcatgatggtttgatctctctctctctctctcacacacacacacacacaccacctgctaagcaagcaggctgcgggagtttccttggcaaagaatcctgtctgctgcttccaaatgcagtctccagaaggtcacttcactcagatattggtctctgtgaccacccctactctgggtgcctgtggcacacagctggtctgcccgcagcctccagcccgagccaccgcgggcgtcggctttggagctcgcgcaagatgccatcgctttaaggagccctgcactgaaatgctctgactcgcgcgctctcaccgctggccgtgtgcacgtgcgttcgagcacgggcgtgagagctttctccagagaggtggcactgcagtcctgccagcacagccgcgtggctgcgcaccacc

SEQ ID NO: 36369 - DNA, 508 bp, Mus musculus
  source 1..508: mol_type = other DNA
agacatctctacagatatgtggagggaatctggagttgggaaattgccagggattctcaagtatacatactggatatattcaaccaagatcctgagatgaagtagggatatgggctggttccttccaggtttagtacgatgccacgaaaactgctagcactcaacaaatgattcaaatatttgttgaatgaaggaattaatgaatcgtgtttaaataggtctcacaacaacattccaggcatgatggtttgatctctctctctctctctcacacacacacacacacaccacctgctaagcaagcaggctgcgggagtttccttggcaaagaatcctgtctgctgcttccaaatgcagtctccagaaggtcacttcactcagatattggtctctgtgaccacccctactctgggtgcctgtggcacacagctggtctgcccgcagcctccagcccgagccaccgcgggcgtcggctttggagctcgcgcaagatgccatcgctttaagg

SEQ ID NO: 36370 - DNA, 210 bp, Mus musculus
  source 1..210: mol_type = other DNA
ggattctgtcttgtttctcaaagtccattgttcaaaaccaaaaaaaaaagccagaaacgattttggttctagtttcggtcactagtgacactttgagctccagatctcaacctcctagagactaaagccagcatatccacctcgggctggatcgctcacagtggagttggaagctccaagccacccagttcagcgctacgctgcatggtg

SEQ ID NO: 36371 - DNA, 460 bp, Mus musculus
  source 1..460: mol_type = other DNA
tggtgtttgtatgtgaaatatcacatgtgacttcagatcctcatgtgtccccaggtcctctagggattcccagagtacctacagaacatcaccaatgcaacacaccaagtaagtttcccggttaggcatttagaaataattttatatatccctctgcttagcagagttgttaggcagatttgtcaagcacatccgtcacgctggagcatctccaagcggctgcatgtctcatcgcggacgggcagttcccgcccggacccacggggtccgaaggactgcggaggccctcgtccaggacgccctcggaaagtcctattgggagaggccacaccccaggcgtcccagcagcggggcggagcggagggtggagtcagctccgggaccctcaggtctccgctctccgaccctccctccggcggaagtctcgcgagatctcatcctcccgcgatagttgtttgaa

SEQ ID NO: 36372 - DNA, 371 bp, Mus musculus
  source 1..371: mol_type = other DNA
tttttttttttttttaagtaattttaagtatatacttaatcaaaagattcctctataacaattacaaagtgttttgtaactaatctcttaaggagctgcccagagggcacagcgtcgctctcttgcgctcctcttgttcggacttccagcgctccgcgcgagggcagaagggaggcgttgctggtcccagcggaagcggcaggttgcttccttctctccgcgctccctccccgcctctccccgagggagcggtgggagggggaggggaggggtagtgacacgtgtcaatcaacccccctccggggggcgcgcgctccggggctcgcgccgagggctcgcgcccctgcctcgtgcctgcgccgctcgtatgt

SEQ ID NO: 36373 - DNA, 445 bp, Mus musculus
  source 1..445: mol_type = other DNA
ttacttcctcttccctttgccagctaagagagtaaaacctatccaaacccttggagttgtgtgagtttgtatagtgcccacgcaaccaaatccctcaccatggcgttttttaagtaagtgattataaagaagccacccaaacaaaatgtgtgtgtgtgggggtgtttttgttttaattttaaaatcataacctttaggatcgcgactcaaaaagctacaacagaggctcggctctggtcagctctgaggccaaggagtgctggatcctaggagtctgggcgcgagcaggggcgtacgggaacgcgcgccgctgtctgcagccggagctgccagcctgggcctcacctctcccgggcgaggtgcaggctttccgcgcgcggccagggggcggggcgaggcttgcgggggcggagcaagggcgggggctccggctgctatataaaga

SEQ ID NO: 36374 - DNA, 265 bp, Mus musculus
  source 1..265: mol_type = other DNA
acctattgctattctgcataaaagccatagcctaggtcatttcattgcctataagccattatacttcaaaagtgaaatgatattgcaatgaatgacaaatgcatcacacaatgctaagaaacaaggaagagaacataatttgttgtgtgtgtacatgtttgtatatgtctataaacctatgaagacaccacagatctcttgagcttctctgttgtcgaggaagcgggaagaatgcatgtcatgtaacattaggatgcttccacat

SEQ ID NO: 36375 - DNA, 451 bp, Mus musculus
  source 1..451: mol_type = other DNA
ggatttcctagcagaaaagtcttatttagaattaagggaggtttacataatttgtggtcatttttttaaaataaagaactggaaaattttgtgtatcatacatggtctaaggtctgaaataaaacatgaaacgctaagactttaggcttaacaaagagatttctagagtgaagtagaaaggtctaaaagaatttgatcatttaacagatattaccgaaattattgcttttcttgaaagtaattaatgtttgtagctataagattagagtattgtaaaattaaaattatgttataattatatactataaaattagagcattctgcagttgaatgttacttcctttaaggtcttcccagggctctgttgtcacctgagaaggtccacaggtgagccttatggacagtgaccattggaacgccccccagttgccaggcaacctctgagcgtcgc

SEQ ID NO: 36376 - DNA, 324 bp, Mus musculus
  source 1..324: mol_type = other DNA
tatagaaattccaaagaatgcttgcttcaattttcttttcgcaaatgcatatttgatatgttaaaatagctgcaaacattgagaatatttgtgagcatcgcaaactttgaaatactagtcagtactcaaacaattttagttcaaagtgagtgaaatcttcatctctcatcgggataaaacacacacttttgttttatctgaagagtaaagcacattcagaaagggctgaatgcaagctgccatgcctgtgggctgctcaggacaaggttctcaggtcctgtctgcagcaggaccagccctgagaatccactggcgggtgaggtg

SEQ ID NO: 36377 - DNA, 538 bp, Mus musculus
  source 1..538: mol_type = other DNA
ttgaaaaatactagttccaaatagaactgttacatgtttcaaaaatgctgacagacttttaaaataaggaatttgaatttcctttttgtactaaatatcacagtgacaaaatttatatttatacagagtcagtaaaaagcaataaaaagattaatttatgaaataatgacactttcaaagatgtaagcatctggttttcaggcatttattacaaactgcctgtgtagcgccacagtacaaaagtgctttgtgcacatcagattgctctcctagtctgtagggaaataacaagttgtatttgccttttaagaagaagaagaaactgaggcagttcctgcttttagcataatgcatagaactccacaactttggcttccaagttagtgttttatgaaagcaataatgacgtctggcttccaaatatctgagcccagacacagcagtatgagactctgaatatgatcatcggaacagtctgagttctgacttcaggcagtgagctggcatcgcaagccccgcctccctcggcatggtccgt

SEQ ID NO: 36378 - DNA, 489 bp, Mus musculus
  source 1..489: mol_type = other DNA
tccggcagagagcttagagaaacaagcagccatgggtgatgaaatcccctgggatctcagccatcccttcctcctctgtctaggcagtgtctagaagcctggttcccagaagggcactgcagtaagtttctttgccaaagacttcttgagccagccttgagccaggctctattggaccctcagataatccattggaaaatctcaaaagatgcctttttacctgaggcactgctacagcctcctccactttctcctttagtgacttggcagcaggtggcaaaggaggtgccaagcgtgccagggacggggggggggcgcctcgctctgtctggcggtacagcgcaccgacttctcagcggcgggtgtcctggcccccaccaccggcatagctctgccacccagagtggcacagcgcccccggcgccccccgccggcctccgcctgcacctgcaaggcttcgcgcgccctgcctgccgccgccgccgccgc

SEQ ID NO: 36379 - DNA, 517 bp, Mus musculus
  source 1..517: mol_type = other DNA
atcaagcatctgtgacagcctaagggcacaggtgtgtacacaggtgccacgccccactggacaggccactggctgtgtccacgggctgtgatcacgtgctcctacctctcaaaggagaataaaactcattttgttggcttgtatagtctctataaacttaaacatatctgatctacctgtggacagatgcatcctcagcctgcccacagctgcttcaggccaggggcagcttccgagtttattgggaagaaacctgtttctggctaaatcccctcgtcaggttggagaaaggaacttcaccccctccagccagggctcttaggggcgtgcagggcggctttgtctgccaggcggcggcgccaggaaacgtggagcagagccgcagggctgctggagttagactagtctagaactttcttccgctgggtccaggagcagcggagttccggccaggacctgggggcgtgcccgggtcgaggtcgggtcggctgcgggcctgagagcggggaggagccgg

SEQ ID NO: 36380 - DNA, 343 bp, Mus musculus
  source 1..343: mol_type = other DNA
gtccaggtaaccatgtcgcatgctggggcacgcctttagtcccagcactgggaggcagagacagcctactgaattccaggctagtgtctctgagtgcctaatatgcactcatatacctataccttgaacaaatagatgttatctgttctggagtcacagtaattaaagttaacattttttctccaacaactgcaaattctcgttcaaaaagtatatacacctggatacggcaaggcagctcagatcagctctcagagcacagcgggcgggacgggagttcccgcctccggacggcgtgcgcgcgcaccacgccggcacgcccgccgcggaggcgcgcacgcag

SEQ ID NO: 36381 - DNA, 385 bp, Mus musculus
  source 1..385: mol_type = other DNA
gagcctatgagatccacggaaagaatcgggaacccaagagtctagggtgttgtggcttgcttgctttacaaggagcaaggcaaactgcagtaacagtttaggagactgcattctctactgcctgatttggggtagagaaatttgtttagacctaaacaaatgtggcggttttgttgactctcatgaaaatgtatcacatgaggagcgcttgcttcagttccaagctgagtctggggcaagcacacacatttgcaagggtgtagttactgtgtcaggcctgttttggatggaaaataaatttaaaaaaaaaagacagtcacagtgtgatgcttgaagcgcgttacttcactgaggcagagggctgccttgggactgtagtaagaca

SEQ ID NO: 36382 - DNA, 665 bp, Mus musculus
  source 1..665: mol_type = other DNA
ttcaaacacgcttaagatcacttttttgaaaagtgcgtccaaaaaatacgtgttttcacaggcctaccccagtgatgctacttaaaagcaaagccggcttttaagcggcaacggcctctcctgaagtgcctcaatggaagaaggcccttcgtctcagacagcgcccgccgccgcccacgggggcagtgcccttggccatccggttccggctgcgggcctcacgcgagcaccgaggcctcgcggcccgctccgcacgcccgccgttccgcggcctcgtggccgccacaggccgctcgccccggccgcacacactcggcacgcgccccagccggccgacggcagacaaaggctcggcagccgggcctgcagcccgagccgcgactgcgcgccccggcctggcttaccccttgccggaggggtaatcctcccccaggtccaaccgatgcctcttggacatcctcgcactcccagaagcgctccggcagccggatccacgcacaagaggcccgcggctcaactcgcggggacccccgcccgctccgtgcggcccgaaccggcggccgcgacgagggcagggcctgcgtgcgcgcctccgcggcgggcgtgccggcgtggtgcgcgcgcacgccgtccggaggcgggaactcccgtcccgcccgctgtgc

SEQ ID NO: 36383 - DNA, 365 bp, Mus musculus
  source 1..365: mol_type = other DNA
aatccccagttacagatggaattgaagctagcttgggttaaatgcaactttgtttcaaaaacaaacaaccctcctttgtcattttaatacaacagtggcaacaatcataatgttattgtcacggtcattgttgacttccttatgactcctttgattctcatgggggatgagagctcaccatgcctgccccacaccttgtgtggtagcacagctctggagagagtgtctcactcagctgccaagtgcccatgtctgtcttaaacacataccaacaagagaccattgtgcctcaaacaagactctgcacgagccagggacagccaagctggctttgcttgcctccctgctgctcgctcacataacag

SEQ ID NO: 36384 - DNA, 423 bp, Mus musculus
  source 1..423: mol_type = other DNA
ttcttattttttctctctcataaaaaccaaaacaaacaaaagcatttaaaaaaatccgtgacgttctatttgaaatatcactctgttaagaaaacggattttattcagaatttagagttttattttcaaactttgtacttgcgttctagtacgacatcagatacttaaaaagaaatgttggtcgctttaaaaatcagtataatgtatgtagatgtagagcatctactcaggggaaagaagggcccttccgtttggcttctcgacctggggatgacacccacctgtccctccctcaccacaggcctgggaatgctggagtgagacacagctggtggcctggggtccccggggtgccgcggctggcaccggccccgagccactgtagggcagtggttggggcccggctcctcctccccttcctcc

SEQ ID NO: 36385 - DNA, 495 bp, Mus musculus
  source 1..495: mol_type = other DNA
tgttaacagctgggagcccagtgctcagagcaacaaactctgtctagctaccgtgttgagccaggaaacttttcttcgcaggctaggttcttgcaaggcccaacagccaggcaggggataccctgctgtagcagtacagaaacatggtgggccagccaaggtggcccagtcgggtccgatagagacctttctctttctaaaatttatttatttatttatttatttatttatttttcccgtagaaaggagtccactgtctgtgaaatcctttgcagccacagaaggtccctgctcccagggggtctgagccacggctggccccccccccccctcccccgcggggcgggcccccgcgtgcattattcattggtccgggcccgcggcaggcgcgggtgctgatgtcaggccagcgcgggtgaggcggtgcggcggccgcccagcagcccgggcgcgggtgggggggcgccgagtgggggtggcggccagcatgctgct

SEQ ID NO: 36386 - DNA, 566 bp, Mus musculus
  source 1..566: mol_type = other DNA
gaaagctggcttggcagtgatctctcagaacacgattctatgaaatagtgcattacagagtgtccatttttgttgtggtgcccaaaaaaggtgaggaactcttcttccctcaacatttcaaagtcatatagaatttgtgcttgctgacatgtaagtacatatatgttctaccagtggggaattccttgtactatgttctaaagatacactattcatggacaaatgttagtacaaagttcttaaaggaattctgtagatctaaacttagtagagaaaactctagatctcaggtaagatatgcataaggttcctcttcccataatatgaggttgagttattgcagattattgcataatttaaaatgaaaagagtaactatcatgagttctggaatctgacacagtctgggctcaaacaaatggaacagatcataaattgtcatttcctgagaagcccacagaagtactagtgttcttgattacaagagggcttgctctgcgcatgcgcggaagtcgaaggcggcgtcttccacggccgccccgtaccgtccgggcagcgcgttgcatc

SEQ ID NO: 36387 - DNA, 475 bp, Mus musculus
  source 1..475: mol_type = other DNA
tcctaaaagtaattataaactattatcagaaatagtagaccaggctggcctggaaccgatgttttaatctttactaaacaactaggaaaagaaaatacagcctttgaaagatttctaagtgttgacacaccttagtttaacttcagtcaaagcaaaagaaatctataaattaccactcaagaatgtctaaacatatttagtagcaaataaatgcatataatgcacagattatgattacaaaactatatatttaacatatggactatagtcatgaacttttagagaaaagttagtgaaataaatgtatattatgtatatagtaataagagcacctcccgcggaaatgacgctggtcctggctggatccactgcaatggctggcaacgctctgggagttgagacacaggtggccatcaatgccccccctgtccttctgcgcaggcgtaaggaaggcgtcccggggctcgagaggcgg

SEQ ID NO: 36388 - DNA, 329 bp, Mus musculus
  source 1..329: mol_type = other DNA
ttgtgagcccgagtctattgcagtgataaaaactgaaggatggttgttgcataaaaggagtatgtgcaaaaatagattccttggagtaagtagattttttggcatgtggtgaccaaaaataacaacttaaagacctttgtggtctcttgggaagaaccccatcagtgacatttcaagtgctgctcttttagatctgaacattgagagcccgtgatttcaatgagcggaaagaggaagagaatgtctttttcctttgacatctgcagatgtctcacctgaaggctttagaagcttcaggcggtagcaggcagctctgcctagcttggcta

SEQ ID NO: 36389 - DNA, 411 bp, Mus musculus
  source 1..411: mol_type = other DNA
ctgtgtacgttaaacaaatacatgcttcttttgcttggaaattctaagtggtatttaaattttatgtttagacaatcactgccagggtatgttagtctcatatcctgaaacttaccaaactcaagttaacctagaagttatttaaaaagtgtacattctttgatattttttatggccactggcaaatggcgattgaggctagcctggactaccaaaagactagacagttctttggcattgttaaacgcaatagagctgctgtggatctataatctaatcagatctttgttctaaagaagcttcaccccagaacccccacgggtgtgtgtgtgggtgggtgggcggcatggctcctccaggacgcgtggggcgctgtgggttccgcgtgccgcggcggcgctctttctcgcc

SEQ ID NO: 36390 - DNA, 607 bp, Mus musculus
  source 1..607: mol_type = other DNA
tgtgaaaaaaatcatttgacccccaaaggggttgcgacccacaggtttaaaatcactgctttaagacctaataactgtattttctttattcaataatccttagtaaagtgcaaaaattaaaactgtacgctgaaatcagatttgaaatcaaacaaatgaggtatccaatatcatccctggttcactctgtagcccaggctggcctagatggttcactctgtagcccaggctggcctagatggttcactctgtagcccaggctggcctagactgcagacatgtgctgtctgccgcacctagcttgagaggcttttcaaaggcttttggtggagaggagctgccagccgctgtcagtactgctaagaacagagaacgctggaggaacatctttccttttaagaggtaatttttcttgctaaatatgtcataagaacttgatgagccagactgtttaacgtgtcaaagttagagcacatggatttgtcgataaatttaaatgtgctagtagttgccattactactaaattgtttgagtaatatattatattcacattttaaatggatattgatcttcattcagtgactaaattggagcatctcaattctt

SEQ ID NO: 36391 - DNA, 265 bp, Mus musculus
  source 1..265: mol_type = other DNA
catactgacttcaaggcagctaggatgaggtcttaaagctaaacagttttgataaacagtactactgatgataaaatgtagacttatgtctgtccacattttctcacaaaattgaatgcttagatagccacagaataaatcaaacgctgtgcagcgggcagcccagagtaggggacctccgagacaccagagctcgctccgccctagccacgcccagctacggcctagctccgtagcctaggctaactttgcccgccccaccggc

SEQ ID NO: 36392 - DNA, 305 bp, Mus musculus
  source 1..305: mol_type = other DNA
cagctggcataggataagacggtctccacttggagggcaaaagcttttggccgccagaggggccactgcacgtcagggagtcagttgtcctgacagcaatcacaaccatcttttaaaaaaaatctgaaagtttaagatgatgtgctctcatatcctcctctggcagcagccggcggtagcggccgaccggtgtactcaccagcgctcccttcgcaggtaagggacagcaggaggcacccaggtggagcgcagctgagcgcccggtatatgcgcaaagaggccggcggcagtcgctgtcatcacgg

SEQ ID NO: 36393 - DNA, 270 bp, Mus musculus
  source 1..270: mol_type = other DNA
acacattttacagagcttagcccatcttggctcctgggcctctgaggcaaggctttgaagctctgatctgaggctctgatctccaggccacagaatcttgccacagctggtggtcagcattcgcaaactcccgcgggattcggggcgcgcggggcgccaccggggcgcaggcggttcggccgttcctataagccggcagaggcagtgccgtggcggcggcagcaggccgtgatgacagcgactgccgccggcctctttgcgcatataccg

SEQ ID NO: 36394 - DNA, 274 bp, Mus musculus
  source 1..274: mol_type = other DNA
atagctctttgctaggtccagaaactgcagccaagcacttcctggaactacagggcaagcccgagttgcttgccctgtccacgagtctcatgtcacctgccagtggcgtgtcctgattttcaaaaaaaaaaaaaagctgttttaagtcgccaatcaggcggcagggtggggcacagcctgggctctaaacctgcaaccctgcaggtgccatccctaaggattagaagccaagcggctgcgtggcccccgccctgccggaatggcgcccgggcca

SEQ ID NO: 36395 - DNA, 352 bp, Mus musculus
  source 1..352: mol_type = other DNA
tctgctggggtcaagataaatacttagctgcccagccccctgaggagatcatatcttctgactcagggaggctgtgccccaggcaaagagccagagccctagggacctgccactgactctgtgcaaagttagatcacttactgtgctcaagtcttgggtcagaagactcagtgactaattttgcaaataccttgcaaaccattcgccagtgtctcggcctccacgatggcagccggagggcgaggaggcgggtcttggtttgaggccccgccttatgccgcgcccttcctcggatgaccccgccccactaagaggcgcccaggccccgcctccgagctcagaggctcctccc

SEQ ID NO: 36396 - DNA, 258 bp, Mus musculus
  source 1..258: mol_type = other DNA
gattaaagcatgcacaaccaaggccctcttttttgtcttttcaaagacatgttgttgagaggacctattctgagaagcccaggcttctctgaaaaactcaatcagcaactgcccagacttaaagggtcccacgtggtcactctgcagaataaacaggaactggattgcatgcagccttgtgcgtgataaaacaccatgaccaaacatggggtgtaaagagttttaagaaagaggaaatggaatcccatgactttcctt

SEQ ID NO: 36397 - DNA, 559 bp, Mus musculus
  source 1..559: mol_type = other DNA
gagactccggctgcccgcattgcgcacatgcgcagtggcgcgagcgcgccgcgccaatcctgcggcgctccggagcgggtctcgggcgggctggctccctgcgggaggcaggcaacggagggacaggtctcgggccaccacctgccgagaggtgtcccggccaccgccggaggtcctgcaagctggctgctgccatgagttccccaggcagtcggagctgggcgggtagctcgctcccaagtgcccgggcttgtagtgtcctttgcgcgaggctgacctcgggatgaccccagctcgcatcggggagaagcggcgaaaggcacagagcttatcccctaatgcttttcccctgcagagcgggaagggcacgcggcgatcacgcctgtctcgccgcgtgtgcgggtcgtgcggtcgctggcaggtcaccggggaccggggctctgtcccgatctccgccgctccggcacctgatactgagataaaacacccactcgaggaggcgtctcctctaggcctgtgaaggacccctcctcccggccccggggccccgcctcctgac

SEQ ID NO: 36398 - DNA, 526 bp, Mus musculus
  source 1..526: mol_type = other DNA
cggagggacaggtctcgggccaccacctgccgagaggtgtcccggccaccgccggaggtcctgcaagctggctgctgccatgagttccccaggcagtcggagctgggcgggtagctcgctcccaagtgcccgggcttgtagtgtcctttgcgcgaggctgacctcgggatgaccccagctcgcatcggggagaagcggcgaaaggcacagagcttatcccctaatgcttttcccctgcagagcgggaagggcacgcggcgatcacgcctgtctcgccgcgtgtgcgggtcgtgcggtcgctggcaggtcaccggggaccggggctctgtcccgatctccgccgctccggcacctgatactgagataaaacacccactcgaggaggcgtctcctctaggcctgtgaaggacccctcctcccggccccggggccccgcctcctgacgggcgcgtccaccggagcgctccccatggactactcggagggcttgtccgcggaggagcggcctgcgcatgctccatcggcg

SEQ ID NO: 36399 - DNA, 559 bp, Mus musculus
  source 1..559: mol_type = other DNA
tcctgcaagctggctgctgccatgagttccccaggcagtcggagctgggcgggtagctcgctcccaagtgcccgggcttgtagtgtcctttgcgcgaggctgacctcgggatgaccccagctcgcatcggggagaagcggcgaaaggcacagagcttatcccctaatgcttttcccctgcagagcgggaagggcacgcggcgatcacgcctgtctcgccgcgtgtgcgggtcgtgcggtcgctggcaggtcaccggggaccggggctctgtcccgatctccgccgctccggcacctgatactgagataaaacacccactcgaggaggcgtctcctctaggcctgtgaaggacccctcctcccggccccggggccccgcctcctgacgggcgcgtccaccggagcgctccccatggactactcggagggcttgtccgcggaggagcggcctgcgcatgctccatcggcgcccttagtccgcgggcggcgcgaggcggctggctcccggcggcggcggcggcgaagcggggaaagacggcgcgggggccgggtcagcgatc

SEQ ID NO: 36400 - DNA, 396 bp, Mus musculus
  source 1..396: mol_type = other DNA
atgcttgaaaagtgctcaacaaatggttgactctcagcgaacagttctgggaagtgaacacaaatattgctgatttctatagtactaaggacctaggaatctgtattcggaagagtccccattctgattaacaaaggcactaattgcttttatataaggagataggaatgcagtccttctgtgtcccttagatcgatctgttttcaccctgaatatgtctgggaacaggcagagaagagaggtaataattggagttctctctctcttctctctctctctctctccacacacacacacacacacacacagacacacacacactgtgcacattctgtgtgtatgtgtgtaggccaggctgccactgctcagggcctcagactggcccggcttgacttg

SEQ ID NO: 36401 - DNA, 448 bp, Mus musculus
  source 1..448: mol_type = other DNA
tccctttcacaggacttgcttaagaccattgaaaaagggctggagagatggctcagtggtcaagagcactaactgctgtactcatatacattaaataaataaactcttaaaaaagacttcctttaaaaaaagaccattgaaaaacacatatatttatatgtgtttcataacaatagcaacattacagttatgaagaagctgcaaaaaaattatgattagggttcaccatcatgaattgcttcattggtgtaaattgaattctgcaatttaaatacatcgcttaagtgctaattttggggtgttaagaatctctataatacagagtctatatagtaaatttcaactgaaactttgtggctgcggaagaacaagcttttgttctgtgatcagactgggtaggaacaatgaaatcggaacgcatgtgcgaggtcgttgcctggcaacgccc

SEQ ID NO: 36402 - DNA, 453 bp, Mus musculus
  source 1..453: mol_type = other DNA
gcctctgagtgccatttaccaatggtagcatctacttgaagaaatagattccggttcttttccccttttagatcaattggatctggagcagaatttgcttcattgcagcagtgactgccttcaccatgtccatttatgagttacactatgccactgtaaattgcttagagaaattcctacgctttgccaaatgtttgtcaagcccccaccaacatccaagttaggggaggccgcacccacggggttaaagcactcagaggatctgcgacgtcgatacgcttttcacggcgtgggcgagactcactccttcctcccgctcagcttctctggctcctgaagcacagcctgggcggctgtcccacgccccgcctatcggtctgggaacgcccctaggggcggggcccacgaccacgcacgcgcagtgccgcggcgttgcgcctgcgccgtggcggg

SEQ ID NO: 36403 - DNA, 528 bp, Mus musculus
  source 1..528: mol_type = other DNA
cagtgactgccttcaccatgtccatttatgagttacactatgccactgtaaattgcttagagaaattcctacgctttgccaaatgtttgtcaagcccccaccaacatccaagttaggggaggccgcacccacggggttaaagcactcagaggatctgcgacgtcgatacgcttttcacggcgtgggcgagactcactccttcctcccgctcagcttctctggctcctgaagcacagcctgggcggctgtcccacgccccgcctatcggtctgggaacgcccctaggggcggggcccacgaccacgcacgcgcagtgccgcggcgttgcgcctgcgccgtggcggggctgaggcccggccgagcgtggtactacggcgggcgcgggccggagggggcggggggatgcgccgcggcggcggcgcgggcgctgggctggggcttggccgcgccagagcagcggatcccggtgtcgccgcggcagctgcgcgggtgtcgcgctgggtcggaagacgccgtaccactgcgctt

SEQ ID NO: 36404 - DNA, 256 bp, Mus musculus
  source 1..256: mol_type = other DNA
tctgtatattgggctctttaaaaacatacattaggctgttaataaacgttggttgaatatagaagtggatggagcatataggcaccttgcctgcatcagtttaaaagttatgcccctgaaaactgtataaaaaatggttgaacgggaggatatagttcactagcaggtgcatatatgatccataaagaattttgtactggaaatatagatgcagtaaatgctgtattatagatgtcatcttctagtgagcacattt

SEQ ID NO: 36405 - DNA, 373 bp, Mus musculus
  source 1..373: mol_type = other DNA
gccgggtttagtctaccagccctagagggggggctgagattgggcagttctcagtcggccccacgaagcgaagcctggcttcggtgagcgccgcggctgtagtttcggataccgccgccgccgctgcagcgtcggagtcaagtctgactccggagcccgcgggctttccgcaacaaccaccagtttatgcaaacttgcgggtttccggctaggagcgattcggtgtctcggaacagcggcgggagcgcgcgcaccagactctgcgcgccagggcacccgaatccggatcaccgggccagtgtcgcgcggccaggcttgctcatttgaactgcaaagggatcaagttcagctcgagggagagagagagaggctg

SEQ ID NO: 36406 - DNA, 407 bp, Mus musculus
  source 1..407: mol_type = other DNA
gccggccaccgtttactcgcagtactcacagttcacgggacactgcgcgccacgggctcggtgccccctctccaagccctgggaagggccggaaccgcttctgcgagctagccttactctactcgagttaagaccaggctctgtttaggctcccgaggtccagacaaacctgaaccgcttcctgcttcaggctctggggcgagcaacaagccagtcggcaggtcgctcgggcaaggtgcagcgaaaagacgcctcgcgtcacagctcggtccgcgaccgggtgctcccggcgcgccaaagagcagcccgcccgcgggggcgagagccgaaccgtgcgcaccgcgcggtgcccaagtttgggcgctgtgcgcgattcagggaggagattgcagcctctctctctctcc

SEQ ID NO: 36407 - DNA, 489 bp, Mus musculus
  source 1..489: mol_type = other DNA
caggtataaataatagttttctccttgcttactacttattatgtaagtaatgtactttctttatactatttaatgaaaacatcaacattttacaactgtttctttctaacaatagtgaaaataaatgaccacagaaaacaaacatttaatatttctcttgcagttcgtagttttatgcaaacaacgccaattatgttgaaaaattacaggggtttaccagtttgactagagtaaattctgaatcagatttttatcagccaacaactacctaatccaactgggcatttttattgttaacaaatattcataagatacatgtaggcttaaattattcaaaacctaattaaatatggattcttaaatgctttagcctcccttctagccctaactgaggctatcaaaggctgcttggactccactgttaggtgaggctagctaaaccttgaggattcatcttttatgacctaattgagtctctccatttgagat

SEQ ID NO: 36408 - DNA, 357 bp, Mus musculus
  source 1..357: mol_type = other DNA
gtagtttcggataccgccgccgccgctgcagcgtcggagtcaagtctgactccggagcccgcgggctttccgcaacaaccaccagtttatgcaaacttgcgggtttccggctaggagcgattcggtgtctcggaacagcggcgggagcgcgcgcaccagactctgcgcgccagggcacccgaatccggatcaccgggccagtgtcgcgcggccaggcttgctcatttgaactgcaaagggatcaagttcagctcgagggagagagagagaggctgcaatctcctccctgaatcgcgcacagcgcccaaacttgggcaccgcgcggtgcgcacggttcggctctcgcccccgcgggcg

SEQ ID NO: 36409 - DNA, 258 bp, Mus musculus
  source 1..258: mol_type = other DNA
acagtgtctagactctcaatttatcaaatatggattatctttggaacctttccataatgtgagcatgcatgagaaattttgaattcacagtttaacagaggaattagctaaaaatattaattataataaatttcaagatatcagtccacaaagagggtgtgtgcaatagatccacacttctgaataactcagtcggaagacatatttccaactgctaagcaatctttcatgatcaaattactgtatactgcatcagaa

SEQ ID NO: 36410 - DNA, 457 bp, Mus musculus
  source 1..457: mol_type = other DNA
gcaggaagataagtaagtactttcatgttttgagtagtagtcagcaaggatcctgcttgttcttcattgtatcaccaagatcatttaaggactgattcaaagactgagattcatctacctggaacctttctgcattcagaggcggcaacccagcgagggtctcagcgggagggtggcagggccaatcccccgccccggggggacgcgcccttccagggtcgccactgggcagacgcgctccaggtggcctgggcggcaggcgcggccgagcggcaggcgggctgactcagctgcgcaacaatgctgccgaaccgggacggcctgccccgccgcccccgccgttgagctcgggccgcccccgccggccgcggatccccgcccccggggctcgggaggaagcagccgggcgcggcgccgagcacctgggcggcccgggcaggcgcggcttccggggctg

SEQ ID NO: 36411 - DNA, 510 bp, Mus musculus
  source 1..510: mol_type = other DNA
agtctctttttgatccgaaaaacctaattcatatataaatggaccagtatcccatggaattattgaacctgagcatcatttattctaacaagaaatttttttcttcaaatcaataaatgacattcaacaacgtatgatttccctcgtaaatcgacatttgaaagcacaaaggtattttagcactaaaaaggacctctcactgcgagccttgagcatggagaggaaaggcgcaattgctatttcaagattaaagcaccggttctctaccccccatatcctgacactccaagggaaggggtctgaaaccacgtgtcccactaatagcctttggggcacaggcaagtttgtagccccacgaccgtccgctcgatctagtccccttgtccctgtcgcctgcgcacgcgggccaaggcgcaggtaaagggttacccttgcctgggaggctcgcccgctccccgtccacgtgacgcggcggcccaatgaccgcagcccgggctgaggctgcagcgc

SEQ ID NO: 36412 - DNA, 293 bp, Mus musculus
  source 1..293: mol_type = other DNA
ttaattcagaatattcaatgacagaatggtgtctatatgaaacatttaaagatacttcttttcttgccattattctcagcattatagtataacagtataatagtataatgcctggccctgagtgtgagccctggcacagcaatacacacgtgcttgtagcacccatggattccggtgtcatcagacatcctggccatcagagctcctgagatcgctactgctactttagcaagtgtcattttatcacttgtgccaggggacagtgtcatattgcatggaacctgtataaagct

SEQ ID NO: 36413 - DNA, 452 bp, Mus musculus
  source 1..452: mol_type = other DNA
agctagtcagaaaaaggtacattccccttttggatcatggtggcccaggtcatgcagacttcatgagctcaatggggacaattaaaaaagttttttttttttaatttattctccttaatgtttaaacgatcaaccattcctagaccactaacgaaggttaattaaccgcatctgactagtcccaggacccaggagaagggagtaacccgccccagcctgaggctcccgcgcagacccgccacttggctgggcagggttagcccgcccagcagaggagggggctcggggtggggccacggcttgggcgcgcggctgacgcgacccaacgcggcctggactcgggggcggggtcatgcgtgcggaggcgggtccaggcttcaagggaccggggcgcggcgatcaggggcgggggggcggggtcctggcgggtccaggctgagcgggtaggggct

SEQ ID NO: 36414 - DNA, 310 bp, Mus musculus
  source 1..310: mol_type = other DNA
gaagaacaacaggccaggccctgaactcacaacagtcccaacagtcgggactgcgcccagccaggtgtgcacatacatcacccagctttctagtgtgaaaatccagaattctctaatttaatttacattttgagataggatctctagtctagagttcactatgtagatcagattggcctctaactcacagagacctgcctgcctctgccatgtggctgccttcccagcgcagttaggagactagagtaaggcgagcctcccctccgggaagcacacccggaaccgggcggggtggaagggtgacccggcc

SEQ ID NO: 36415 - DNA, 512 bp, Mus musculus
  source 1..512: mol_type = other DNA
ctggcgtgcacacagacgcgcagtgcgtgcgtgtgtgtgctccgcacgcagagagggaaaaagcgcgcggtccgggctctgcgtcactccccgcacctggccctgccattcgaccccaatgcaaggcgggtacgctgcgcagtgatctccgggtccgtttcggagggtgcgtgcagagaagcaggatccctcagggagcgcgggctccgctgccacctgctgagagtgtgtgaccacacatcccgcacgcagggaatattccgggccaggacttcgcgctgagttgcaccttccccgagctctcgtggggtggcgcctggtggcccctgggcgggctgagggccgcggaggacccgcactgcagcagctgttgctcgcctgtgactcgccagtctgggccgagtcgcctagccagagtcgcggctcccgggggactcactagggagattccggctgctgtccccctcccccgcctctgctttccccagcgctcgcccagcccgggaggagga

SEQ ID NO: 36416 - DNA, 549 bp, Mus musculus
  source 1..549: mol_type = other DNA
cacatgatttgttaccaatcaatttggggacaacttgttaagtggcaacagataactaacaattgataagatgtcaaatatttggtgactactaaaatacattgaaggtctttcacaatgctgggtaacacggccgcatttgtccccggctttgttgcttcagctctggttttgaaaaaaaaaaacaaaaaacaccgggtggaaagcagggcagccaggcgttctctccaattctgtagttttaaaaatccaatcagaggaagaaagcgagagacttaagatttctgaagttgtacgaaaagccccggagacccggcgaatcttcccgggcttccgcagggggcgaccccagcacatcccaacttcccgcgtgagcaggtccgggtgggcggggctggggcgtgcccattcgaggggcggggccggaggagcccctgcatccccgccctcccccgcgctgcctgcccggcgggcgcgacctctcaggctgtgacgcgcggggagaggaggagcccgtaggctggccgccgtctcgggacgatgcccgca

SEQ ID NO: 36417 - DNA, 238 bp, Mus musculus
  source 1..238: mol_type = other DNA
gtgtccctaaggtcctagaagcaggtaggcagctgcagtagaggaagtgccagctcaggtgctcacaatgaccttggtgaaaccctgccaggctgtggctcagtggtgaagcacctgctcaacagggggcctgggccaatcaacaggctgggcaactcatcctcagtaggccaattatgatcaggatcctgacatgagcttagacgagctcctcttcatgctggcgccccaaaagtct

SEQ ID NO: 36418 - DNA, 830 bp, Mus musculus
  source 1..830: mol_type = other DNA
cccggggctgagccccaggccagccagagctctcgccccaggtgggaggatcgtttgctaaattttctggcagcaaggctgaccagcgaacctccagagcatcgggcccttggggagtcgcactcctccgggggtctccaccccctccaggctggaagcggcccctgcagggtaggcaagtctccgaacagcgccagcgcgcaggctgcagcgcgacccctgtgcacaaggcagcgatcgctcctggagcaccgcgctccccgacgtagggacagggcatcctgggccgcaacacccgctccaccgccctctgcccgggaggggcggcccttcccgcgggagcgagtgattgacggcctcgctcccccactcctcggctcgcctgcgaacccgggctgtgtggcgctaggggccgtagagcgtgtgacgcccggagcgggccaacgccgcccttccttccccccggggctcgggccgcagcgaggaggccaggacagctagggcggggccgcgggctcagggcgccgggcggagcgctcaggcggggtggaggcccagggtggagagccgggcgggggccgctcacgcccagccccgaggccgcgccgcgcctcccgggacaggtcgagccggcggggcggcgcccggctccggggctggccccgggtgactgggcggggcgcgggcgggggcggcgcgggcggggtgcgtgtttgccagtgactcgccgacccctccggcggctgcctccacccaagtgggtggggacccctcccagcccgggcggctgtggcggctcccgctgcccctccctgactctacttaccccg

SEQ ID NO: 36419 - DNA, 291 bp, Mus musculus
  source 1..291: mol_type = other DNA
gtcctgcttatccctcctaggaacagggaaactgggcttatttaaaagacacagtaacttttaaaaggaagttttgatcactaatttcctatgttgaggaacatttcagctgcagaagtccttctcaaggcttggtcacttgtaattaattattattattgtagcacagaaactactttgataaggtgtcagggaagggacctgcctggaccctattccttctagcttgtcgagctggtgactggcacaagcagctaaccaccctacgctggcagtcccaggctcccttgg

SEQ ID NO: 36420 - DNA, 480 bp, Mus musculus
  source 1..480: mol_type = other DNA
ttttaaatattctccactaaacaaattctgagttggggaacagagaaagacacagtcacactgtgaccagacactgggctgaggacacggggttgttttacaggagtatgacccccagaatagatatgcttgcattttctctgagaaaacagaaccctggtggcattttttttaaaaaaacaaaacaacagaacagagttttaaaaggtgatgttttgaagaaagttggaaaatatctgtggagaatttttgctccaaatcgcatacaaatcatcttttctcttaaagagaaaaaaaaatctcctgtaaaactttgattttgccccctgacttctgctcagtcactagacaaaaggccagcagttcaccctattagtggggacaacaatccataaggatacaactccatttgtgtttatgtctaccaattgggtttaaagagccctttctttcaatgcagaaagcagttactaattaaat

SEQ ID NO: 36421 - DNA, 285 bp, Mus musculus
  source 1..285: mol_type = other DNA
tgagtgactatgagcagtaagacaattaggagacgatcatctagttaatcctaaacgtgtttctcaaattctaaacagtctttagaaaaccacttctcttgaaaaccggctttccaaaaagcacgccatgagctttaagcttattaacttctatcctggtggcaatttaaaattcagtctgaaataatagtaacaccaaaatgttcataatctgcttgtttatatgaatctaaagattgaagcaaagatttctaagtaccgtggttcccaggcttaggactaggg

SEQ ID NO: 36422 - DNA, 318 bp, Mus musculus
  source 1..318: mol_type = other DNA
gtttagtcttcttcccactgggtttttattatgaagacatattgaagctttaagaaccaaggaagaaagcactggagaccctccttccttccttgttgtatacaggagtaaattaggggttggcccagagtcgctctgcctgccccccgccccctcgccggagccccgcccagtatgaggatgtccccggtgccccggctctcccagccgggacctgtccccttctggagaacggaggacccagctgcgagggggcggagcttagcaccctgggcggagcctgtcgtggggcggggcggccgcgccgggactaaccgg

SEQ ID NO: 36423 - DNA, 390 bp, Mus musculus
  source 1..390: mol_type = other DNA
gtgtttattgtttgcaactgcaccaaggccagcctggtctacaccctaccctaccccctgctgccatcagggaggggaggggaggggaggggttgtttgctttggacaaatacattttccacgccaaacgcagatgtgcaatgcccaggccaaagagaatgaatttgggctttgatccacatttccaagctggccttctagaaagcatgggactccttacaacctgcagggcttccccagtgcttcgtaatggaaggcaggggaccccgcgctctgccccgaccaccgatctgggacggcggagttcggagttcgagaggagggcggcccggggcggggcagcttggccggtccctcccctgcggccgcgtccccgccggtcctgccgac

SEQ ID NO: 36424 - DNA, 362 bp, Mus musculus
  source 1..362: mol_type = other DNA
actttaaaatcacaaattcttaatattacactattataatattttatattttgactaatcagtgcttttattcacttcagtgactgtatttattcattctggaggttagacatcagtatgtgtatattcctgtcttccaccctagaatactcaaagtaactctttagtattttaaattttaatttttttcgtccacagcactgctctgtcttgttggccacagaggccacagtccagtgctctaaagagttagtactgaccaagtggccaccctcaaatctcatttaaaatgctttttagaaaatgtgttctgtgatatgaactaagaactcacctaagaacttggtttaaaagcaaagaaa

SEQ ID NO: 36425 - DNA, 205 bp, Mus musculus
  source 1..205: mol_type = other DNA
aagtgacagagcaagacaatgcagaagtttctccatcttggagctgtgagcccagctagccaaccttagcaaaaaaatgaggaatgatacattagtttctccaagccttttttacaagtggatcttgtagaagccgtctggctcatgagcggagcttaaggagggctccgggggcagctccgccccacggtgacgagaacgcggt

SEQ ID NO: 36426 - DNA, 444 bp, Mus musculus
  source 1..444: mol_type = other DNA
agatttatttattatatgtaagtactcagtgaaccgctgagccatctctccattgggacctggacaagtcacatgatcttcttactgtaaacagtccgttaaatgcaaacatatacccacgtgatggaattgtcattccatcttcaatagataaatgtattaaaaagttaaaaaaaatgtccattcactaagggtctgttagtttgagccaaaatcaatagcaaacattaaatgtaaagtttccgtggtggcagtaagaacttctggaagcgcctgcccttgcagcacgtgcgtgtactgcaggttgaggaagtcagcctcagatcccaaattgggcgtctcccggccacgaggtagcaaccctccggttgctagggctgtggtcctgcacccagtgcgcagctcccgcctcggggcggggccgcggggaacgcgcgcctccga

SEQ ID NO: 36427 - DNA, 293 bp, Mus musculus
  source 1..293: mol_type = other DNA
gtactacatatcaagttcaaaaactaagacctaggtttgatctctagttctgccaaaagaaattaaatgaacttctccaagtgctccaatcacaaatcaactaagtttttttttgaaataaataacattaagactgttcttacatgtgtatgtaaaattgcttttcctaaaatgattcaataaagttcaaaacattcagaagaaaaccattctcaggcatggtttccatacatttatttaacacattcaaggctaatcattgacagggctttacaatcacaggcttttactgg

SEQ ID NO: 36428 - DNA, 572 bp, Mus musculus
  source 1..572: mol_type = other DNA
accagatacaaaatcttgaaggtctggtccattatgcaaaaattcctttttcttatctggcaaagaacttaatgctctaaccgtgaacgcatatcattcactcagtagactctgaaataatttagttttaacccattataataccaaagctaaagaaattgattcagaaattatgtaaaacgatttaagagctcaaactacgttaaccgctaaatataggttagaaaaccttagtgggtgacttaacatgccacgttttcatgtctaaaacaggtactaaaatatgttgtcaacaagtttgcaataattaagatatgccacagctgtcggggcttttaaaaaaaggatatctggaacaatttccctagttttgaacttaggataagggcgttcccgccgctcacccgggaccccaggctgcgagctgtatcccagcgacgcgtccaacaactcgtcgcttgagtcatgacgcgatacgtcgtcgccgaccggcgcgactcgactagctcggcaatcgagtagttccgccttaaagccgtcgctcgggtcgtgacgcgacacgcagggccctg

SEQ ID NO: 36429 - DNA, 640 bp, Mus musculus
  source 1..640: mol_type = other DNA
taacccactcggccacgcatgggacatcggttaccgggttttgttacaagcaagcacccgaagcatcggaagccttttcttcttcttcccaagaagacctccgcagagtccccctggggcccttcacaatgactgtgcgccccttcagagtgggaaagccgtcagcggccggcggggagccatctactcaccattctctggaatgtccacagtctgattgctgagaatggcgggtgagacggctggggcgggggacgctctacacccgagacccggcagcgttcccccaggtgtgtccgggacaaggactggaccgggggccccggatcggtgcgccatggcggaagggagatgggcctgaaagcccgaacgccagctcgcgccaccaagtcccaaggacgcacgtcgtgctgggggacgacaaagccttggggcatcggctccatgccgccggggtccccaaacagaggatgggttcagattcccggggcacccggtccctaagctcctggggcaaagagagaacgtctttcgtcatcaccagggccctgcgtgtcgcgtcacgacccgagcgacggctttaaggcggaactactcgattgccgagctagtcgagtcgcgccggtcggcgacgacgtat

SEQ ID NO: 36430 - DNA, 422 bp, Mus musculus
  source 1..422: mol_type = other DNA
atgaagaatttggctggaaagttttcctggaaaatacgccctccaggcgtgggcgcccgggttctctggccaaggaccaacccggagacactgagtccaggggccgagaacggagctcgggctcacttggcacgcgcgaaccttcctcatgccagcccctccctgcagctagtcagcctagcgggaccagcggcgcacgcagccacgcccagcgccgctcgctgcgggcgagggcggagcccgtgactattcgccaaggggcgtggtcatacagttcggatcccgccccctctgccgctctgggtccagaacctgcccggggggcgggcagcgcggggcggtggccgggtccagagtcccgggaggcttggctgcaggggaatgaagcctccgccttccccggcagaagtatttaaatacgg

SEQ ID NO: 36431 - DNA, 354 bp, Mus musculus
  source 1..354: mol_type = other DNA
gccttttaaaaaaagtttatgcatacagatgtctgtgtatgttcgtgctaacatcttagccctttctatgaagaatttggctggaaagttttcctggaaaatacgccctccaggcgtgggcgcccgggttctctggccaaggaccaacccggagacactgagtccaggggccgagaacggagctcgggctcacttggcacgcgcgaaccttcctcatgccagcccctccctgcagctagtcagcctagcgggaccagcggcgcacgcagccacgcccagcgccgctcgctgcgggcgagggcggagcccgtgactattcgccaaggggcgtggtcatacagttcggatcccgcc

SEQ ID NO: 36432 - DNA, 288 bp, Mus musculus
  source 1..288: mol_type = other DNA
tacatctgtagaattacggctgccacagctttggattgttgaaatacaatgcagccctggctgtcctgcaactcgcttaaggttaaggttgaacttaatttaggtctgttttatagccgggttgcccttccttctcggtggagcaaccccacccccccacgccgggcgcgcccacgcacgtcagcgccggagctgcgggagccgcccccctccgacgcaggtggcccgcgcgacacgcgcatgctccctaggtagggtcacgagcggctccgggtgctacaatctgtt

SEQ ID NO: 36433 - DNA, 529 bp, Mus musculus
  source 1..529: mol_type = other DNA
tgtaagtttaaagctcgtcactataataaatacagtctagagataggtgctaacaatcttttcaagtttgaaaaacaccttagttctgcagttcagcattgattatctaaacagggcaaagatgtaacttctggcttttgctacggcagtggatttcccgggggtttaccaacggacgctgggcaggacccagttcctgccacagggaggcactagcccgtgggttctgggtctggccgagttagagcggggctcggcccggctagggccggggacacccgccaggccgggctcccacctcgggtcccagcctagggacggggcaggggaggacccggcaggcccagaccccgcggacaggccgcgaagccgcaccctcctggccccagccgccggcagggcggagccacgcggccgaagccccggctgagacgcgcggcgcggcgcggcgcgggctcgctgctggagacgtatggggctcccactggagcggctgcgccgcccggtcgggtcagcgtggtgcgcatgc

SEQ ID NO: 36434 - DNA, 708 bp, Mus musculus
  source 1..708: mol_type = other DNA
aaaaaaaaagaggtctcagattcacataggtaatttgtaaatctctaaaagcttgagatcgcatgccaacttccttttgcagtgaaaaccttaatggtaggagtctaactaaggtcgtaggctgcgacctagggcgactctaaactttgcctcggcttccagattgagccccggactccgcgacagcggtggccgggagtgtcgcaaagccgcgcctcccggggtccgcttcccgccaccggggctcctcctccgcgcgccggctcggctgccggccccccggaggcgcccgcgcgggcaggtcttggcgccaaacgggtggcggcgctgtccaccacgcgcgcggccgcgtcgggctcgagggaggcgggggctcggccgaggggcgggagcgaggcgcgcggtgctctcgcgggctctcgcgccgctcgcgtgacgggctccggctgtgcgcggcgacgctcaggctccgcggggcacgggcgggccgggagcgcgccgcggcgagagggcgtctggtgcgggtgggcgcgaggtgcgggcggccggccggcgagcgagcgagcggccgggcgggcgcgggggacgcgcgggcgtgcacccgcgcgcgggctctcggaggagccgcggccgaggctgcgcttcctcagcccgacggagagcggcagtgtcgccccggccggcgcacgctcggcccgcttctccccc

SEQ ID NO: 36435 - DNA, 533 bp, Mus musculus
  source 1..533: mol_type = other DNA
tttcaaaagtggcatatattacagttattaggctcctaatagctgcttagaaacagattaataaatttcttttgtttaccatatttagaataagccttaataaagatgtttgtatagtatatatttttaaacactgaaactcaagagatctctaaaaagacaaagaaaataaaaaacacatccattcatattcttttctgtgtcatttatttgcttaagtacactagtttctttgcttaaatacaccagtttctagaaaaaaattctttccaaatctacattcagtttaaataattgccataacaattgacagataatctgtctctctgatgtggatgactctgatcgtttcatgtcaggacagccaggatcgttaacagggaaagggaacactgttgctttttcttggcaccgcagctcttttgggctcaggccagcgggttccgaccgcacgttggcggcgcgggctggatcccggcagcctccgtcccggttgctggggccgcggggccctttgttcccgcggggcgccg

SEQ ID NO: 36436 - DNA, 647 bp, Mus musculus
  source 1..647: mol_type = other DNA
ttcccgctctctttttggggcaggaataaagaaagcgagcgggataaactgccccgcggtctgactccgtctctcgaagcccggttttcggagagcgagggtcgcgggcgcacccgcccggagggaggccagcctgccggtgtgtaccagcccgggcaggcggcccaagttcccacaaggctcggcctgggaaaacggcggggcgctcgcagggggcgggaggggtgtgtcggggcctggaggcccgccaggcgctggaggagctgccggggaagctgccgcggcgcccgccttcgctcggcctcgggccccgcgccagggcccgcctcccgcgacgctccgcccgcccgcccgcccggcccgtgcctgcccggggttgccgcgtctctcgctccgggccaacctccgcctttacctgctgcgggagcggggcgtcgaagcccccgggccgtgtcgtcgagtaagcgccgcgggtccgcaaccctttcccgccgccgccagccactacgctctccggcgcggcgcggcgcggcgcggggctggcgagcagctgtgtccgcggtgcggagcgaggacacactgccgctctccgtccgaccggggaagagcagccgcgcaggagcccgccgcgagagggcgggtgggcg

SEQ ID NO: 36437 - DNA, 738 bp, Mus musculus
  source 1..738: mol_type = other DNA
ggccccgcgccagggcccgcctctccgcccgcccgcccgcccggcccgtgcctgcccggggttgccgcgtctctcgctccgggccaacctccgcctttacctgctgcgggagcggggcgtcgaagcccccgggccgtgtcgtcgagtaagcgccgcgggtccgcaaccctttcccgccgccgccagccactacgctctccggcgcggcgcggcgcggcgcggggctggcgagcagctgtgtccgcggtgcggagcgaggacacactgccgctctccgtccgaccggggaagagcagccgcgcaggagcccgccgcgagagggcgggtgggcggccgcgtggggaggggtctcgcggccgccgcaatggctgccacgtagccaggtggatctccgcccccgccccggggccgcgacctctgctcccgggctctccaggatgcgtcggcccgcgcccgccacggcgccggcccggagacccgagcccaccggtgctggcgcctcgctggctccgttacgagaagtgagtcccgggcctggcgggaggcgcagcccgggacccgcggggccccccgaggctctcccggaagcttgcggcccgccgctgtcccccgagggctccggggaaaggcaggcgctgggaccccccctactgctgcccgtgtaagcgccccggtgagccgcggccgggtctaacgttctggccctggggcagctgcgaggtcggcggggcgaggcga

SEQ ID NO: 36438 - DNA, 310 bp, Mus musculus
  source 1..310: mol_type = other DNA
cacacctggctggcacaggtttttagtcaaataataagtacctcccggcccaggtgctgcttttaaattgttactaatactggcagcacaactcattattaataaggcagagtgatacagagactctctgtgaagctctggatgttctagaattctctatgtagaccaggctggccttaggttctcagcccggaagttaagttcttagttaagtgcttttacttaagcttaagttaaccgagaccgattttcctctcttgtttcatttcaccccctttccttccctcaacaggagggaatggagagagat

SEQ ID NO: 36439 - DNA, 700 bp, Mus musculus
  source 1..700: mol_type = other DNA
actctgatcgtttcatgtcaggacagccaggatcgttaacagggaaagggaacactgttgctttttcttggcaccgcagctcttttgggctcaggccagcgggttccgaccgcacgttggcggcgcgggctggatcccggcagcctccgtcccggttgctggggccgcggggccctttgttcccgcggggcgccgccgcccgtccgccccgagtgagcgggcccccgtgggggacagcgcggggcccatcgcctcgccccgccgacctcgcagctgccccagggccagaacgttagacccggccgcggctcaccggggcgcttacacgggcagcagtagggggggtcccagcgcctgcctttccccggagccctcgggggacagcggcgggccgcaagcttccgggagagcctcggggggccccgcgggtcccgggctgcgcctcccgccaggcccgggactcacttctcgtaacggagccagcgaggcgccagcaccggtgggctcgggtctccgggccggcgccgtggcgggcgcgggccgacgcatcctggagagcccgggagcagaggtcgcggccccggggcgggggcggagatccacctggctacgtggcagccattgcggcggccgcgagacccctccccacgcggccgcccacccgccctctcgcggcgggctcctgcgcggctgctcttcc

SEQ ID NO: 36440 - DNA, 392 bp, Mus musculus
  source 1..392: mol_type = other DNA
ccctccttctgcctggaagtagaagggcggtgattcccaggaggttcaggtgtgaacccctgaggatccctgccagtttcgatctgagaggaccttgctgagtaggtaagcacccaaagtgacaggctgccattgctaatgtcaaaagaaagactttcctaataaacgcagccaacatttaataggtgggagcatggcagcatccatgctgtcatggcacaggcagagctgagagttctacgtcttcatccaaaggctgctagtggaagactaactagggttaggatcttaagcacagaaggactttgcaaatgccatttaaattgcatttattacttctcacaaggtagttggggaccccagacacctgcctaaggccaccctgagtccct

SEQ ID NO: 36441 - DNA, 122 bp, Mus musculus
  source 1..122: mol_type = other DNA
acataccctaaaattaatttttgggggttttgggctggcctgaaattcagaatagaagagatggagctgagagttctacatcttgatccacagaagcaggaggctaatcatttgaacatgag

SEQ ID NO: 36442 - DNA, 265 bp, Mus musculus
  source 1..265: mol_type = other DNA
attcatcagagctctgttgctctgatttacacagttttgtgaggaagttcacctcctcactcttctgtgtcaggcctgtggggcggaaccaattgtcaatacaggtagctaagagtatgttggaaacctggcttcctgcttagctaggggagacctgggctagtcacccgccgcaataattatttagtagctgggtgacaaacaattgcaacgctcagatagcaaagacctttgacagctgagaattgaacccagttcaaagctg

SEQ ID NO: 36443 - DNA, 405 bp, Mus musculus
  source 1..405: mol_type = other DNA
aacccgaggggtggggcgggggccgcggccctagggtttcccctgtgggtcagagcgcattcagaatgagccactttgaacgagcagcggcgcccaggccccaggccctgctgtgaaggctccggcaaaggtcagagctccgagctatgctcagcctcaggtaagaacagcccaggaggtcctggcttcctgcaggcccgcggcggggctcgtctgccgccctacctgctccagcgccttcctgccccgcaaggccgggggcggtggcactgctcaccccgggagtcaggcgcagggtccttagtccttgtgcaggctcagggtggcttactctaaacagccataggcggaggtggggcaggtgccactttcctggccttcggccagcggaggctcagaatggcc

SEQ ID NO: 36444 - DNA, 379 bp, Mus musculus
  source 1..379: mol_type = other DNA
accaggctggcctcgagtgctgcctaaatctgagtcagaattacgcgcgtgacacagacgttgggcacttcatggaaggcagggccaacttctctccacttcccttgaaacttgtacacgagtcgaaaacagtgagaatcttccagaaactcagagctggagggtaattaactaataatagtatcactaacaacagtggctaacgctatatgccgatattctatcagcttccatttaactagattcttttaattaaagtagcctactgtgaaacagtattttttttttcagttgcatgacattgcaacccgaaatcacaaccgcgctgcaaaaacccgaggggtggggcgggggccgcggccctagggtttcccctgtg

SEQ ID NO: 36445 - DNA, 502 bp, Mus musculus
  source 1..502: mol_type = other DNA
tttccagccctgtccttggaaggcatgggcatgttgtcttcctcccccttctgcctacaagtggactcgggatggagatactgctagcagatgcatgagtcctccataccatggcctttgaaaagcgaatttttgagtctcatgcctagactcagaatccctgatgatgggtccagccatggaactacttcacctacttcaatctctaagtgtttaaagaaggagctcaggaaccctggcctgagcgtcacccctaccagttcccactgggaaagcctggcgcagagcccttccccttgccatggagatccgggcaccctgagggacccgatttccgcatccagggttcagtgtggacccagctgtccccttagggacccagagctccgctttctttcagggacccggagagagccgagagctcggcctgagcagtgtccccggagcgcgagggcgagccccgaggaggcagcgtctccctcagggaccctggacgtagctg

SEQ ID NO: 36446 - DNA, 438 bp, Mus musculus
  source 1..438: mol_type = other DNA
tttctgctttcagttctgaacacaatggcaaacagaaagtaagattataacaggacaacgcctttaggaattcccttgcatgttctgtgacccaagcaaaatgagcatctttccagccctgtccttggaaggcatgggcatgttgtcttcctcccccttctgcctacaagtggactcgggatggagatactgctagcagatgcatgagtcctccataccatggcctttgaaaagcgaatttttgagtctcatgcctagactcagaatccctgatgatgggtccagccatggaactacttcacctacttcaatctctaagtgtttaaagaaggagctcaggaaccctggcctgagcgtcacccctaccagttcccactgggaaagcctggcgcagagcccttccccttgccatggagatccgggcaccctgagggaccc

SEQ ID NO: 36447 - DNA, 500 bp, Mus musculus
  source 1..500: mol_type = other DNA
aaagagccattacttagtagttataattattttcagaattaccttatgctgcttcagcaaccttcccagatgagtctgacttaggcaagacttccaggtgcctgcagtaaatccacttaatgcctaacgaacaggtagcaagtagataattccagggcaggaatgttcctgtgtggcatatgtcgaaagtttcaccttttaacctggaggggatacccgggctgccccgcaacccccagcctctgggtgtcaccctggcgccccttgcctccctgctgtgccgcagctcggccgcctccacctgcaggggtcgccctgggagcgcggcccgcccccttccgccgcggcctccgcccccggccccgccttgctgggttcgcccggctccgccaggcccctccaagcctttcctcgcgcagccgccgccaaagcctggagaagtctcgctgccgctgctccctgcgcgggcctcgcggagccgcactgggcatgctcagtcg

SEQ ID NO: 36448 - DNA, 408 bp, Mus musculus
  source 1..408: mol_type = other DNA
ataatgcccatcttcactaaagagccattacttagtagttataattattttcagaattaccttatgctgcttcagcaaccttcccagatgagtctgacttaggcaagacttccaggtgcctgcagtaaatccacttaatgcctaacgaacaggtagcaagtagataattccagggcaggaatgttcctgtgtggcatatgtcgaaagtttcaccttttaacctggaggggatacccgggctgccccgcaacccccagcctctgggtgtcaccctggcgccccttgcctccctgctgtgccgcagctcggccgcctccacctgcaggggtcgccctgggagcgcggcccgcccccttccgccgcggcctccgcccccggccccgccttgctgggttcgcccggctccgc

SEQ ID NO: 36449 - DNA, 282 bp, Mus musculus
  source 1..282: mol_type = other DNA
agaaccgcgggctccaaagtattgtggaccaaaatcttattatcccaaacccctgttctttgaaaaaaggtttcccctattttttttttaaatgctttttcctttaagctctagtctcaagtccattaaaaaccgagcctggacacaggttgaatttaacatgacaaatatttatattcatattaaacactacatatacctgttgattttgcaatgtttcagagaccctcgagctttggagtccaaattgcagtgagcgaggccggcgctttataacagcag

SEQ ID NO: 36450 - DNA, 515 bp, Mus musculus
  source 1..515: mol_type = other DNA
gaaagggtattggcttacatttccctatcgcacagcccaggaccaccagcctagggatggtgccacccacaatgggctaggctcccttgtttcagataattctaacatgtgtcaacttgacataaaactaaccagcacacattttaggagtttttgtttgtttgtgtgctgggtccggagctgcagctctaggcctcaggtctgtagctgggagggacagcaggtgccagtcagtcctccagttctgccgcagtagtgctaggtgcagctcgacctgctacccagtagccggccggaggcaggacaagcggggtggcgggccgtgttcctcccacggtccttgcatgagcccgggaaggacgcccggagctcctggcagaagcggcgggcccgggcgccactggctgaggtggccacggtgtcctccggcagtgcgcgccgctgtcctccgggacctgcgctcggtgggggcggggggggcggagagcgcgctcctgcggaggaggctgtgctca

SEQ ID NO: 36451 - DNA, 371 bp, Mus musculus
  source 1..371: mol_type = other DNA
catggtggactcacccaagcatttgaggggggggggggctgcagggttttcctcccagccctgcccccattccagcccccatgcccagttccctgaggtgggagatggatcaattcctgcaaggacgtgggttcccagaaactgcaaacatggagaacatcactttttttgtttgtcagaggggacctccatgtgcatctcgggggaaatccacagggcaatttataatcacagcctgtcaaagacaggcattgttctccctgctctgaacatgtgggtcagccacaagtgcctgccgctcccccaacgccaggagctggcggagagagaacatgcctggattcctctgtggcatcaggaaaacgcatttt

SEQ ID NO: 36452 - DNA, 342 bp, Mus musculus
  source 1..342: mol_type = other DNA
cccccatttgggatgctattttttccaaccccttggactaggtgtattttaaagaaatccgcttattcttacgctatgttacagggcgcctttaaattgagcgtgtaacactcttacaaaacaggttttcttttcttctccctaaggtatatgatcagttaaaaaggcttaaaagctcttggaacacccaactttcattatttccaagtagcgtgattgaattaaaattctaattagagccaaccgctttgctattgtccaagtggaaagagccaagtttattaggactatatactctagagacctcagacaaggcatctcacaggaggctttttcataaaa

SEQ ID NO: 36453 - DNA, 228 bp, Mus musculus
  source 1..228: mol_type = other DNA
gacatgaaattatggaagccacattcaagtctgtagcttggctccctagattgcagagttaagttcagaagttttggcatacatgcaggcagaacactgtatacataataagtctttaaaaatatttttaattaaaatataacttcatcattaagagagatcatagatatttctgaagcttctgtatatggaagtagagagattttatttccgtgccaattggctcgt

SEQ ID NO: 36454 - DNA, 369 bp, Mus musculus
  source 1..369: mol_type = other DNA
tcttgcaacgtatatgcatagataatataataatgttcaccaaagggaaccgtgggatcattttgttccagttttcaaatctggtctttcagagcctcagttttcaaatctgtagaatggaaagaaatgtatggaagcactaggccctgagtgctttctggttcggccgccagaacaaacctcccagcggcctgtgccacttcgtgcactccgagagttgggaggtcacgcaggagggcgccgggaactccttgccgcctccacagccgagagaaggttccgttcccccaccgggtcccctcgggccacgggctctgtccgaagcgccgatcgcgcgggccgcccgggcccaggccccgccccgccccc

SEQ ID NO: 36455 - DNA, 417 bp, Mus musculus
  source 1..417: mol_type = other DNA
agaggtggattccctcctgtgaagggagcctcaagtccactcaaagtggtgggtttttttattagatattttctttatatacatttcaaatgatatcttttccatttaaaattttattttacagtactttcactaagcgatttaaattaatctttaaaacaactggacatatttataatatagtagtatacgtatactgcacaggatccagtgtatagctatacagggtaactatttaaaaatgagaaccacgttaattataattaggaccaggctgtttgaaaaactggtgaccacggtgaggggacagaggcttaaaccctgccttctcccgccccggcggcgcttcgtaagactgtctcccgggacacggtcggcagcgcacaccgtcctggcccggtgctggccagaagcacc

SEQ ID NO: 36456 - DNA, 495 bp, Mus musculus
  source 1..495: mol_type = other DNA
acaaattaaaaatactgcatttgtttcgacttgttagattggattttactacacaaaataaaagctaggacataacgacttgtaattaacatctttatggattttatcaaacagcataatttttgcttggttaaccacgtggtcgggctcacacacccacgcaggttgtgtggctggaagccttaaacacagagtctcagaggcttagactgagctttcagagctaaagaagctcttcctctttttactggcctcaaggagggccgaggtgggccgagaagccggatcgaagtcccctccccgcggatggtacggtccgaactgggcgggacctggaggctcggcggccctgtccccgccccactccaggaggccagcgagtgagcgcgcgccccgcagaccccgcccccggcgccgtccccggctccgcccctcgagcccgctcctctgccactgcggggagacctaggcggctctgcggacgcagctccttcg

SEQ ID NO: 36457 - DNA, 481 bp, Mus musculus
  source 1..481: mol_type = other DNA
agggtgttcaaagcgtttgacaaaccgtgtggctgagacgctcggctagaggagccatcatcatttaaataaatgtgtttctttgcccgaacagaagttcagataggctcgattatacaccgaaatcctggccgaagtgaggctggcggggctgacccgggtcctccccggcgccggctcagcggtgcgggaaggaggcggcccagggacaaactgagtctgtgccgccacgctcgttttttaaaagaaacccgtggaactcaagcgcggcgcaagtcccctcgtgagctggcaggcgtggacggaagatgtgacagctaggtggcaggctcggcctggtcccctcggggtcaccgccaaggcccggggtagcgccgtgggtgggggcgggcgcgtgaacctgcgggcgtgcggaccgcatcgcggtgcacccgctgtgattagctcgcgcggcgaccccggagggcggactttcctcacc

SEQ ID NO: 36458 - DNA, 394 bp, Mus musculus
  source 1..394: mol_type = other DNA
tcatcctcttgctctgagagaagaaaaaaataaaataaaattgtcccctttctgtaaatggaatcaaacttatgagttttaaatcctaacaggatcaagggataggtaaagggggatctgcctctctctctctctctctctctctctctctctctctctctgtatacacacacacacacacacacaccctctctttgaagagagtaaagctctctggagtcgccaggccagcccccagctgtggctccagtcccagttcggagcttgagtgccacctcctgggctgctagtagttagcgccggcgccggcgctcccggctgaggcgcgctggctcgcctgcagccgggggtgagtcctcctgccctcccctcggagagccgcgcgcagcccccg

SEQ ID NO: 36459 - DNA, 303 bp, Mus musculus
  source 1..303: mol_type = other DNA
agcagcttttcctcggggcttgttgcctagccagcctagacagttgagcagagtaatatatttgtatctcagctgcagaaattaaagatctggatgaaacgataccatctcattttattttggtgttgagatctttgcgttaagatcaaatactgtatatttatttttatcacagataaatcatcagtaaatcgggcatgcacactggatgaatttgcccagattaccatattcttgcaaaccattaaaaagtgttataagatactgtggaggacagatttagaaagttttatatatagcagc

SEQ ID NO: 36460 - DNA, 553 bp, Mus musculus
  source 1..553: mol_type = other DNA
gttaaaaaatgttacagccacctcaattgtttagaccatgttcaggaaacatgtcctggtatccatcctgtgactagaagatgctagacttaatatccacagatttaaacctattgaatactattaagtctagttctaagctgtgttgtaacaatgttttatcaatgtacttgaaaaatactttttcctatgactttgttgttgttgttgttgtgtcactacaaaaagttcattgagaataaattctcttacctattttaaggtgagaattgcttttgtatggacaaagagaagccagcatccttctttgatgcattttgtttttattaataaatctatacttcatattggctaagcatgaaataattttcttcgtagaagccattcttaaaagaactcgatggccccagagtagagggactctgaggcctattgtattcgctggagtgagcgcaagagatgcgacacccgactccggtcgcaggacacgcgcttgaccggcaccgcgtagacgcgtcgacgtcataagcggcgcgacctgcaggcggcgcgt

SEQ ID NO: 36461 - DNA, 303 bp, Mus musculus
  source 1..303: mol_type = other DNA
actttttttgacctttacaaaaactgagacacacgttcagagtttatgtttcagtacaaactacacaatactataatctaacttaattttgataagagttcttaggatttcaatgaacagttactgtgctcgcaaagtaacttaaaccatcagaggggattataacatactctttgtttgaaatgctgagacaaattatcttggggtatgccaggcaacaactgaggtatataacatgatgcttcaacgcctttgaaaagcatattgttatgatcccatgaaacgattgcatctttggaagag

SEQ ID NO: 36462 - DNA, 567 bp, Mus musculus
  source 1..567: mol_type = other DNA
tgaggcaagtattcagatctaaaagcctcggggccattctaaatcataagagattgtttgaaaaattaaaaaccatgataccatatcaaaatatgttctccagaaagtattaatgacagtattaaagactttaaagctgatatatttgttaaaatacttctacacatgccaataatttttaatattgttttaaattcatattatgaacatagaactgttgagattttttgcctttaatataaataatataacatcccatcatattattttagtatttagaaataatattgtttgcgaaatcaagtttgagttagttaaatcgtctaattttaaactcctaaaattctaagtaattatattgctatttctttttcgtcaccattataagcatcttgaaataggagaggtagtttaaaggagttttgacctctctctgtggttttaaaaataatctcaaagttccctcataacttacgtgtaattaaaaaaaattcaaacttttcgttttttgattggtcagattggaacattggaaggtgtcatcttcacacaggaagtgcctctttc

SEQ ID NO: 36463 - DNA, 353 bp, Mus musculus
  source 1..353: mol_type = other DNA
ttcctgtctgcaatggaaagaaggcagcattagctcaggattccacgtaacgtgcgtttcgttacctcaaccacgcgggggacgagcggcagggagccgcccgtgggacctagggccggaagctcactgcctccagctccaggcagggtgtgggctccactcctccagcgcggtgtgggcgcgggcagcggcgctcccaggcgcactgtggtgccccgcgctaccccggctgtgctgccccaggtgcccagagggcggcggtggtgggggataaggggtcccctattccctggaacctccaggcgcggggctcgtgcccgctgctgcctgcctgcgcgcatcgcgcctccgcg

SEQ ID NO: 36464 - DNA, 326 bp, Mus musculus
  source 1..326: mol_type = other DNA
cttctggaattcaatcagttccattctgaaggagaatctgttatctttaaactgtccaacagtttggcaagtctgcccaggtagtagagacccggagcagggaccaaggaccgtgggtggcgtccccccaagttcaccggtgagcagcacttgcaagcttgacaaggtgcggagctgagcgccgggctctcgctcgcactgggcgcgagcggcgagggagggggcgggcgcgcaggtcccgcctcccctggccgcgtgcacacacacgcccaccgcggctaggctggaggagcgcgggcgagtgtggggcgagtgtgagcgcgagt

SEQ ID NO: 36465 - DNA, 274 bp, Mus musculus
  source 1..274: mol_type = other DNA
tatggaaattacttatgtcattgacacatgtcatttggaaacagttctgtgcattgtattaaagtaaagtacacccctcaataattagtaattagtgtgtgtttttttttttaaaaaggcctgttccaagtatttggtttttttcccataaaacattaaacactgtttagggttctcttttaagttcttctggaattcaatcagttccattctgaaggagaatctgttatctttaaactgtccaacagtttggcaagtctgcccaggtagtaga

SEQ ID NO: 36466 - DNA, 272 bp, Mus musculus
  source 1..272: mol_type = other DNA
aacatgttttttagtgatatgtactgaattgcatttcctaacttccctttatttgatacaagatttaccagcaacctggaaaaaaagtctcttcacttcccattccaagtggactgatggagatgcatacatttaaaagttatccttttccgggccggccggccgggcagtctctgcccatctaggacctctataactgtcaacaaaagagttttaaaatctgttgcctgttcgagtgagtaccctctgcgcatgcgcaggtccagggaatt

SEQ ID NO: 36467 - DNA, 418 bp, Mus musculus
  source 1..418: mol_type = other DNA
cattacatattgggttgtaatcaccctaattgttatggcacctcatgacaagaactttcttttttttggattgaaattacaactcaaagaattttggaatatatagttttttaaagatttatttattttatgtctacgaatacacagtagctgtcttcagacacaccagtctggaagagcagtcagtgctcttaactcttcttaaaataaaaaaaaattaaaaaaaaaaagtaactttaatttgtctttgaggtcaaactctttgactaggagacttgcaaaaaagagggaaaaaaaacttgctcttttttctacaggagaaaaccaatggctgaggttttgcacatgcgcacaaggactttgagcccgcccgccggccccgtggacgaatcggagcgtaagcctaaggttcaggcct

SEQ ID NO: 36468 - DNA, 405 bp, Mus musculus
  source 1..405: mol_type = other DNA
ctgcagggtaataaccgataactgagttaattctagaggattccatattcttgaagtagttgggcaaatgatttgatggttaatttttattttagaactacaattgaagataaagaaaaaaggttacattatcccgaccagatcagaactgtgatcctttttataaaagagttgctagttacaacaacttgaacattacatttttagaatgaatgtcttccctaaacgtaaccactaggtgttttaagcttagctaagccagtgcattgtttcacaaaagggaacagccagaccctgggtcactggcatgtcctggcggggtccaacagctggagctcgtgcccaattgctgccaggccccgccccttacgtcaagggggtggagcagcgggagattggcattcc

SEQ ID NO: 36469 - DNA, 312 bp, Mus musculus
  source 1..312: mol_type = other DNA
agcctgggcaggttcttgtcagacaatcggaagacagatttgcaatttgtgtaacacgaataatgcctgccttcgaaacctgacatcttttcgaacacaacaaacttgtcattggatcgctagtgtctgaagacattcaagagcagccctttacactgctcaacaactccatctgccatagaaaaataacttttttgaagcagcagaccctgagtataacttcactccgagtgaggagaaagacacccgtagtgcctctcctcgagctccggaggagtgcacacaggtcgcgtggcctgagtcctggtgact

SEQ ID NO: 36470 - DNA, 369 bp, Mus musculus
  source 1..369: mol_type = other DNA
tctagtagctacagtataaccttgaataattattgaaattttgaaaattttgattaaaaatgcatttaaaactcacgtttaagaaaacttaaatttttgttatccttggcttttttttttcaattttcgataaatatttaagaattgcaatgcaacctttgcagcctgggcaggttcttgtcagacaatcggaagacagatttgcaatttgtgtaacacgaataatgcctgccttcgaaacctgacatcttttcgaacacaacaaacttgtcattggatcgctagtgtctgaagacattcaagagcagccctttacactgctcaacaactccatctgccatagaaaaataacttttttgaagcagcaga

SEQ ID NO: 36471 - DNA, 354 bp, Mus musculus
  source 1..354: mol_type = other DNA
atgccaaaggctctcaaaatgctatgcacaatagatatgtacaattgcaatgtatcgatacaaatagaatttgtagatagctcaaaaaaccatgatcagtattattgttttttaactcttagactggacataaagccttaacattatttaagctatttatatatatgacttatatatacatagataaacttcttttgcgcagctgctgggcagccttattttcaaatgttgaaatagttacattcaatatgaaacctcacatgggactttatgttcaaatttaacctttgaactagaaaaattattttcaaaagaaaaagcggcagggcggggcctgcggtgcgggaaggcggc

SEQ ID NO: 36472 - DNA, 480 bp, Mus musculus
  source 1..480: mol_type = other DNA
agataatattaaaaaaactcatctcaataaattataagtgtaaaactttgtatatgtgcaaacacacacacacacacagacacacacacatatatatgtaaatattttgttaactaagggtaatttaaggattgtataacttcaaatatcaacaaaaattcagctcattttcatgaatttctgcaatctatacgtaaagattagctgctggctttcagttattttccttaatgatctaagggaaagcttgttttaaagtataaaaggggctagatttcattgtgagttctgaaagctttctccacttcctggacgaggacctgcctgctacctgcaagcagcaatttcctgggagcagccgccagtagcagcatgctcccggcacgggaaatgtctgcgagcattccttcgtctcttccgggaaaaagcggtccgcgggcggagggtagtccctggcggtgggcgccgtcggtaaggaga

SEQ ID NO: 36473 - DNA, 335 bp, Mus musculus
  source 1..335: mol_type = other DNA
aaaactacccctaggattactgtcggtttcatatatagagacaaaatttccacatatcctcagcacagtctctgaagacaggactcctgttatggccactttgaagaaagtaagaagaagaagaataagaatcttcagctttgaatactacaaagtagttctgtctcattttaatcctaatgataaacttatagtattataaccctgaggaaaattcaaaacaattttaagaaaacccactaggcagtattccttttggcttacttttttatgtttatcacttgcatacatattaatgagctcaggttcaagctaaggataatgatgacctggcg

SEQ ID NO: 36474 - DNA, 385 bp, Mus musculus
  source 1..385: mol_type = other DNA
tgtatctgcatgtatatgtaccatgtccacatcttgcctactgagctataaagactagattcttgatcatgaatgtgatacgttcacggtttcagtgaactgctaaagcgagcttgtagatgttatctattataatgtggaagtggccttatggaagctccctttcacagttagttctctgtgcgatgactctgcattgcaagcccatacatacgctaagcaaggcctttcaggacctcagggcccccttagtttgcttacgacctgggctcatgggtaagtgtgatctaatttaaaatcagataaagattaaggtcatcagttatctggagggaagttcagagctctctctgacattggagaacactgtttctgcaaacccatt

SEQ ID NO: 36475 - DNA, 360 bp, Mus musculus
  source 1..360: mol_type = other DNA
tgaatacctagagccttccggctgagggcttcagcagtaagtgtgaccacttcatgaggcataataaatacctcgtgactaagttactaactgtagttaataaattgtgctgtaaattgtccttgtgccacaatggccagcacttcgtctgctccaggacaaccagaagggggcggcaggtgtttctggactaagcacctgtgcagctcccgggtccaccctgcagacaccggtgactgaggtgggcggaaaatgagcctccatgccccacccagtcactctcattggctgagcctgccacgggggcggaggcagcgcacacccttcgctgactccaccgatccgccggaacgaaagcgg

SEQ ID NO: 36476 - DNA, 256 bp, Mus musculus
  source 1..256: mol_type = other DNA
tctagctagccaagtgtcaaacactttgctcactgagccatttccatagcccatacaaatgcttcctattaaccctggctgtcctggaactctatgtagaccaggctggccagagtgctgggattaaagacttttgccaccacacctagcgccagtttttaaaacagaggttttaccgaaattctgtgatttcttcaaagtgtttttataaggaagtgctaacacttcagatctggatacagagctctgaagtttc

SEQ ID NO: 36477 - DNA, 271 bp, Mus musculus
  source 1..271: mol_type = other DNA
ccatgtgcacgtaatcctgggagctgaacccaggtcctctgacagagcagggaatgctctgagccactggagctcagtttccttaaagaaaattaaggcatgaaaaaagtttcacattcaaagtgatttttggaactgttctatatacagatattatatgatgatcatttgaaaatctgtcacatcgatgtttcagttgttctatacactgagataaatttacctgagactgtagcacgctcacgtttcagaacacaagcctctaccatat

SEQ ID NO: 36478 - DNA, 276 bp, Mus musculus
  source 1..276: mol_type = other DNA
gccctggctggcctggaaaccactatgtttaccagactgcaaacagcttctcagttagctagctagctaggtgacaaacggcggagtctaagaattttacagtatttaaagtgaataacttgaaggttgttttcattattagtgtatcaacagtaataatggcccgcgaggggctaagcggaagtggacaagtgctattgctaccggctctccgagccggggacgaaggagggaagtccggacttagagagaccccacgccgcgtctgtcagcgct

SEQ ID NO: 36479 - DNA, 556 bp, Mus musculus
  source 1..556: mol_type = other DNA
ttgaaaaaaaggcagctattaaaaagtctttcattaattactaccgttgaaagattagtacaggttttaaacggatgaaataatgcctttaaaagtgcttagcgacttccgagctctgaaacgagccacagatggtctctggggctgctgccagctccgacagtctccggcatgcgaccaggcggggccgtccgaccgcgagtctccgcacagacgcctagggcggggctgaacccgagcccgagcccgagtcggagccggagccagagtccggttctgggtctcacacccgcccgcgatgagctttggggagggtagcagcgatagcttagcccagcccggccgggccctgcccacctttgccggcgccttccggccggggccccgccccaaacaatgaccagcccctccgggccctgtcccgtttcaggccccgcctccagccccgccccaccgcgagccgggcgcttagttctttcagcccgcgggcggccacgtcctcccccgacgctctgaggtcaccgaccgggctggccggcagggggcccgaggccgg

SEQ ID NO: 36480 - DNA, 481 bp, Mus musculus
  source 1..481: mol_type = other DNA
gcaaatgtgtgccaaaggctctcatctgatcgttagcattgtgtttgtgattaaaatgctatgccacccacaatagatatgtacaattgcaatgtatcgatacaaatgaaatagaatttgtagacagagtatagagcccatgggtttcaaaaaaccatgatcagtattattgttttttaagtcttagactggacataaaggcttaacactttcatttacgaatttttatttaagctatttatatatatgacttacatatacatagataaacttctcagcgaaagcattggaaatgttttcatcattaaaaaaaatcagataaatgtttaaggagctacattcaatatgacttgacaagcttatatatccaaacctcacatgggactttatgttcaaatttaacatttgaactagaaaaattattttcaaaagaaaaaaagatgggtagccaggcctagcagcagggcggggcctgcggtgc

SEQ ID NO: 36481 - DNA, 416 bp, Mus musculus
  source 1..416: mol_type = other DNA
aaacgtttttcttaggatattgacataaaataatatttgtttttggttgtccatggagagaagttgtcaccagttgacatcttgactgtcaggcaggaattagatatgccatattagagtagaaaaagccatcttaaacaactctctcaactgatggttatctctgtagagtaagtggcacacatcagggaacaactttgtcctgagctgagtatgacatccggcggggtaagcatcagcgtgctgtgcaaaccacagccgggtgtggagcaagattctaattccctttttaaaaaaacaaacaaacaaactatgttcctaaggccctttgcccgctgtatcctggcagcccagaggagacgactcaccctggcagcctgacatacagccgtgcgtcaccgcgagactgcacggta

SEQ ID NO: 36482 - DNA, 239 bp, Mus musculus
  source 1..239: mol_type = other DNA
cacagagtagggcgggccttccttctttagtaatcacccttataaggataagctactgaggttacatcacgcgttcgtgtattatctttagaaataggtcaaaataattccaaaccaggctgcccaacttgaggctctgtttttaaaaaaataataacaaaccaaaaacataactgttctctggtgcttcctgggaaccaggcgtcccagtatcttaggttcccggcagccaagcatga

SEQ ID NO: 36483 - DNA, 422 bp, Mus musculus
  source 1..422: mol_type = other DNA
atgtatgtgagtacactgttctctcttcagacacaccagaagagggcatcggatcccattacagatggttgtgagctaccatgtggaggttaagagcactgactgctcttcctggtggctcacaaccatcttctggtgcatctgaagacagctacagtgtacttagatataataataaataaataaatcttaaaaaaaaaagaacgcttgatttatgcacataatgagatctggtagcaaattttcaaattgataaaaattattttttgagtccaagttactctcttgcactcaagatcttaaatttatatgaggttttttacattatcacagtgaaggctgtcagagtctaaatgttaaaccttagcttagaccgacagtgttcggcctcaaacagctggtggccggccggctgggcttta

SEQ ID NO: 36484 - DNA, 218 bp, Mus musculus
  source 1..218: mol_type = other DNA
ccggaaaggagcaaagaggaatatatgtttaatctttccaaacaatttttaaaaataataaaaaatagctgctcgacctctaccaacatttaaaggtacagagtgggaagactttacgactgtctttcagccgtccagggagagtgataaaaggtaagatgtctttctaccaaaataagagttctccaagtatccttcgccaatcagtgggcagagct

SEQ ID NO: 36485 - DNA, 389 bp, Mus musculus
  source 1..389: mol_type = other DNA
agaaaagtaactaagaacatcttatttcttcccatcttattgctcgtggtagacagtgagtgagcagacagactaaggaggaaccattaatgtctcttacgaggttacttcatgttgtcagaagctaaagctcactttcttctttaaaaaatatttttattaattatttgagaatttcatacaatgtattttgattatattcttttctctttttaaaaaattagtattgttacacatatatgtataagaatataatatacagatgtatattatgtatgtatatatatatgtacatatatgtaataataacattttaatacatgcatatagatatacaaataaaacatgttttggacaagactaaggggcagcttccattctagatggaa

SEQ ID NO: 36486 - DNA, 374 bp, Mus musculus
  source 1..374: mol_type = other DNA
cttccaggaaggctttggagctcacccaatccggattcatgttttacatgttcataacgttttaacccaaaactgtgaaacacacattatttctgttattcagatgagtaaattctgagtctccgagttggagtgtatcctgactctagtgttagaatcaatcggacactagactggaggttctgacagttaacttaagagttcacgcttaaaattcactagaggcttaaagcataagaaaatttctgtaaatcttaaaattacttgtcactgaacagtctctgggagctgcaggccttaactcgcgcagccgcagtgcagctctggagcgccgcggcctggggcggggtttcccagctgacgtcatttcccgt

SEQ ID NO: 36487 - DNA, 379 bp, Mus musculus
  source 1..379: mol_type = other DNA
aagcgaccaggaactcttagttcaaggctgctttgagctatttcttaaaattctctgtatagccctggctgtcctggacctcactttgtagaccaggctggcctcgaactcagaaatctgcctgcctcttaaaggcgtgtctgagttgtgtttactaccaaagcaaaaaggaggctcctctcagactcaagccccagcatctgggaatccaaccctaaatgctggggatttaagtaaattaaatgatgtcccttcctccgggggcggggaaggggtgcgcaggctgcagggtggcatgtccccagcagcgctgaaggcatgggtggcgtcgggcggggcggcgcgcaggtgtgccagggaggaggtgccgcaccctgcc

SEQ ID NO: 36488 - DNA, 393 bp, Mus musculus
  source 1..393: mol_type = other DNA
aagttgcctctggaattgcaacttccaaattctgcaagactggtcagtcagtcagtctctgcagacagagcgtctttctggaaatatacatttacatagatacacattcacacatgtatacatgcattcacaattacatagacatacatacatacatgtatacgctcatatatacacttagcacaggtttatgctaacatatatttacatacatacacacagagacacacatatatactcatatgtgttcacatatatacttgcacattctcacatacatatactaggatatacgcgcgcgcgcgcgcacacacacacacgcacgcacgcaccataggctagccattgggaggcttctggaaagtgctggattctcccagtgtcaccaacaga

SEQ ID NO: 36489 - DNA, 463 bp, Mus musculus
  source 1..463: mol_type = other DNA
ttgctgggcttggtgacctccactgtacatttccccagtggactgttatggtgataagtaccctgagaggagaagagggtctttttccagccaggctggaggccctgtaactccaaggggggtgggggtggggggtcccaagttgcctctggaattgcaacttccaaattctgcaagactggtcagtcagtcagtctctgcagacagagcgtctttctggaaatatacatttacatagatacacattcacacatgtatacatgcattcacaattacatagacatacatacatacatgtatacgctcatatatacacttagcacaggtttatgctaacatatatttacatacatacacacagagacacacatatatactcatatgtgttcacatatatacttgcacattctcacatacatatactaggatatacgcgcgcgcgcgcgcacacacacacacgcac

SEQ ID NO: 36490 - DNA, 521 bp, Mus musculus
  source 1..521: mol_type = other DNA
gtgtttgcggtgggggcggggcgcccaccctcgcacatctcaattacctgtgattgtggagaactggttttcaagtactgaaaaactcctaaacagcggtttggtgtcaggctgaccccagagcctaatgtggcactagggtgtctgacgttcaatgcctgaagcattcgaaacctttggcactctgaaaacttcttctaattttccgcaatgggaaacgattgaggagaaccggcgggacccgggcgcgggcagtagcgggatctggccgcagtccctgtgggctggagcttggctctagcccgctccaggatccgcccgccacagggcggggcttcagggtcaaggttgacagccgttgggtccaacctgcggctccgaacagtggcctccaccaggggcggtcggaggcgagacgccgagtctagggggcggggcctccttgccagctgcaggcggcgcaaccagcacttcttcggtcaaatgagagccgaagaggggcggtcccccggctggggtct

SEQ ID NO: 36491 - DNA, 338 bp, Mus musculus
  source 1..338: mol_type = other DNA
cacagtgagcagttttaaaatattcttcggtggcaatcttgcactgtgacagaagcaaaataaactttgtgtgtagtttttttgcttttttaaaggagttaaaaacttgtttttaacttgatgaagaggagacactaaagtgctgctcatggtaatcttttgaacgacatcaagaggggcaaatatgccacacaaaaatatacctatgtatttcagattgatgacctctgtttacaataaagctctgtgaactttattaatgagcatctacattagcacaggcatcaagacctgccctctctgcaggcagaggtaaatctcagtttagatttaaaatc

SEQ ID NO: 36492 - DNA, 321 bp, Mus musculus
  source 1..321: mol_type = other DNA
tgactaaaacgcagtcccagtgatttgctgtgtgtcagagtatttaactccacagccctcccttgggtggcctagggtagtttgtagaaactactcatcatctgaggagttcttgaacttactcattctatttttcaacttaatcagtgcagagagcaaccaatgtgcacctgactgtctcctggtgctcactgtgagtcaagttaggttcctaaggacctaatatagtctccaatattaaaatgccccacctgccacacccatgcaacccgcgggcgacttacggtcgtgagggaccgccggccatcgagggtgtgagcc

SEQ ID NO: 36493 - DNA, 496 bp, Mus musculus
  source 1..496: mol_type = other DNA
gatctctgcctgaacagagagctcaggaatcgcagtcccagggaattagcaactccgttttaaaaagcaatttcgtgcaaatggaacagaggctagatttcctctgaacaaggtccctggtaagacacgagtgttgatcgtgctgaggaagacctggaggtagtgtgtgtctttctgtacagtacaaaccaacggacagaggacattggagtcccaatttcacaaatggagaattaatctactcaaaattttcatgaagttaacttgtacgcactgccacccagtacggggtgcagccccgggttaggtgccctgcggttcccagcgcagggtcccacagcagccccccaccccagggtctgggtgtcctccagaggttcgcctcgggcccgttacgccacggcgctggccccaaggtccccaggctgggagcgaggagtggggggcggggcgttgctccgacgctagccccgggtccctggcagccggccgccac

SEQ ID NO: 36494 - DNA, 275 bp, Mus musculus
  source 1..275: mol_type = other DNA
ccacagtggtcatatctccatcctggtcctctgaggtttactcagtgctgtgtgactaaatacctgatgtcacagttagggtttctacggctgtgataacactacctgcctaagggtggcactgcatgcagtgagctgatcttctctgaaaatatcttcataaacataaaagtgtttcttaatacagtcaggttggacaaaagaattaatcaccatattggatgagtgactatttttatttgaaaatgtactagaaaaataaatgcagctgcatt

SEQ ID NO: 36495 - DNA, 490 bp, Mus musculus
  source 1..490: mol_type = other DNA
tatattaatttctctcctaatttaattctccacaaaatacattggtttgggaatttatcacgtttcacatgcacaacttccctgtggaaagcttgggactgcaaacttgtctgcacaattggtgtgtacagtgtgcaccctgagcctgcagtctgggcctcctcctggcccagaacctgatgtaaactttaaagttgactaaccgggaagcgagcacgcccgtgtccccgcggtgtaggtccccagcccagtgcccggtacggtcctgggtccggcggaaaggccgcgggctggccttacggtgcagctggcaccgagcgggaccctaggtggggtcagccgagcgggtcctggctggcagcgggagcatagcagtggcctcggttccgcgcctcccggctccgggctcctcctcccgccggccgcggcccgggctgcgtcgctccgccactccccgccccgcgccgccgccccgccctcgccgccgccc

SEQ ID NO: 36496 - DNA, 386 bp, Mus musculus
  source 1..386: mol_type = other DNA
aacatttttagttttaatataagtttggaaatttaatttcttcaaattaaaaaaataattttattattattattattattattattattattttaaaaaccttgccaataaaatcatataagttaagcacatatccaggagctgaggcagaaggacggaaagttccagtcttgtctgggaaatagtggcatgcatgccagcaatcctagcactagagactctgactcgtagagctctgttccttgatcgcttccaacaccgcagtgggtggagaacctgctgctggaatcgaaacgtcccgacgcccctccaagcggccctctgattggttgcaggtctcggggggggggggcagctccgcccctctcccggatggctgtattaac

SEQ ID NO: 36497 - DNA, 378 bp, Mus musculus
  source 1..378: mol_type = other DNA
gaggaggcgtgactgggctagccatgcaagcttgttttgccccaaagacaaacgcccagggcagtgacctatggggctcccagcaggctgggacccaattcagagaatgcctagggactgacctagtgggtgcttctaaacccaccgcggatctgagatcccgcgggatctgagaccccgtgaccccgcaggcaccggtgcggccgcgtgctagcgcagcgggagccggctgggtcccgcacgttgccaccctcgcgccggccgcccggggccccgcactcgctctcggctcctgtgggggcgcagcctggtagtgcaggccgtgggcggggcctcgagcggggcgctcgggcggggcctgggccagagaaaacccgc

SEQ ID NO: 36498 - DNA, 302 bp, Mus musculus
  source 1..302: mol_type = other DNA
ccacatcatgtgttcacaattagaacagtaaattactaaatttttttatctcatgcatgtttccacaattaaataataataataataataataataaaacaggttctaaactgagatgtgtagatcagtatatctattcctcaaccttccacaattggcacatggaggacaacgaaggatcaaactcaggtcatacgacttgtgttgcaagcgctcaagaccaactattacgttgcagtagttgtttggcttgagaattcttaagcctgcgccgacgtcatcaccgcgcgcgcgaacgccgt

SEQ ID NO: 36499 - DNA, 458 bp, Mus musculus
  source 1..458: mol_type = other DNA
aaatccttatcaacatgatgtgtctatcatcttccattagaataaaggcttcatgaaagaaaggattttttttttaaccgccaatctatatagtcttgaagagagttgaattcagggaagatttttacgaggaaattgtacacagaagttgaaacaatttaagaatttctcaccagtttaagtaacttaaataaaactttcctccctgtatagcccaggctatcctggaactcactatgtagaccagggtgacttgaataattttttaaacaaagagaacgcatcctttatatattaaatttttcttttgttggttgttaaaatttcgacgaattgacaattgttcaggattttaaaatcgcgcggcgcttgcgcaatgagaggcccaggtgcccgccgccgcggaagcgtaaccacctagagacgccgcgccgcttgggtgcctgcggcgcatgcgc

SEQ ID NO: 36500 - DNA, 334 bp, Mus musculus
  source 1..334: mol_type = other DNA
agtgatctctgaatatctgcatgaaattggttctagcacacacacatatgtacacatacatgcacatatgcacacacatgcatacatacatgaacaggaaatgtgataatgtttccctatcacctatagtctgatacaatgtaaatactgtgtgattagttttacagtatattaattagacttttgcaaaggcagtacaattttgttgagcaattaaattcctctgtggcccatgtgaaaagttgggggttaacctacactatcttcttggtgtaagagctcagaattacagcgctagttcataagtacatgttcactgaggtaggaaccatga

SEQ ID NO: 36501 - DNA, 313 bp, Mus musculus
  source 1..313: mol_type = other DNA
tatgccagactctatcagaaatgcctatgtctgatctagactatgaacgttcagtgcacaggcaaagctcggcatgatcagagctagggcccataacccccatccaactttaagctggaatattatagtcatgtcagtaactgaggttcaggtactgcaacttctcaaagaaaacagtctggtcttctggggagcctgtcttcacaactggcattctgtgtcaggagctcaggaggggtggttcctttggctcccaagatgttttgagcatctctctgcagcaggctgcagaaagtccgaatcctgcaggagg

SEQ ID NO: 36502 - DNA, 320 bp, Mus musculus
  source 1..320: mol_type = other DNA
tataaaatggaatgtctcaggattcatttatttccttcccagataagaatactttgcagcctcttccatatatttattaatatagaaaagatagaaacaaaattcaaaagccaggcctggcgttacttactttagccaaaggtcagcaggcaacctatctggcctgaaggtaaacagttctaatccagactgctaaatattttccacaatttattacctttagtattgactttctattgtaaacaacaagacctttggataaaaaaaaaaggacaatctgaattttgtgaactggtctgcacatttgaactaactttcaa

SEQ ID NO: 36503 - DNA, 300 bp, Mus musculus
  source 1..300: mol_type = other DNA
atcctcttagctgtcactcaagtgccagctgagtcgtgccatttaaagtactcctaattgcaggcctactgtggactgtaaccagacaggccgaggtaggaatgcctgagttttaccaatgcctgaataaaggtatcaaaattagatttttttaagtagacttagctctggtttgttataatattaagtcccagatatggctacagatctgtacacggggctagacacgtgctatgctcagaaaggaaagtaaattccacttggcaaattgctctaactgaagtccctaaggtctcagcc

SEQ ID NO: 36504 - DNA, 573 bp, Mus musculus
  source 1..573: mol_type = other DNA
aaaacatttttcactacagagaacttgtcaactttgttaggtagtattgatggtgagatttcttgttaacaaacaaacaaacaaacaaacagaatatttggctttactgtttgccgggcagcccaactcgaggccagcctggtctacagaatgatccaaaaaaaagagaatgcactgctttgttaatctcaagttggcaaagtcaaccgactaaaaacgttttattaaaccggcctccagcctggctctaggagtcgagtcggggtcagcgcccccgatcctcacagacgccgccttccgggtcgctgaccctggagccggagggcggggccgcgccgggtgccggcgtcccgggagcgcgcgagaccgtccgcgtgaacgcgcccgcccgcccacccgcgcgcccgcgcccacgcccgcgcccgcccgcgctcccgggaagtctcgcgatgcggtagccggctgctcctgctgcgggtggctcgggctgttgctgtggttgccggagttgcggcggcgacggcggcggcgctggcgcgggcggcggcgctggcgggggtggcggccccggcg

SEQ ID NO: 36505 - DNA, 458 bp, Mus musculus
  source 1..458: mol_type = other DNA
ttgtggagaaaacatttttcactagagagacagagaacttgtcaactttgttaggtagtattgatggtgagatttcttgttaacaaacaaacaaacaaacaaacagaatatttggctttactgtttgccgggcagcccaactcgaggccagcctggtctacagaatgatccaaaaaaaagagaatgcactgctttgttaatctcaagttggcaaagtcaaccgactaaaaacgttttattaaaccggcctccagcctggctctaggagtcgagtcggggtcagcgcccccgatcctcacagacgccgccttccgggtcgctgaccctggagccggagggcggggccgcgccgggtgccggcgtcccgggagcgcgcgagaccgtccgcgtgaacgcgcccgcccgcccacccgcgcgcccgcgcccacgcccgcgcccgcccgcgctcccgggaagtc

SEQ ID NO: 36506 - DNA, 187 bp, Mus musculus
  source 1..187: mol_type = other DNA
ctagatggcagccacctagcaggtaggtgcacctggattgactctttgcagaagcggccgtctcaagctttactgcgcagctagggttggctcctagggctctctgcagtgtgtcactgtgaagcgttggacatggggagctgccgagtctgagctgagcggtactccgcagcatcacgtgccgcgg

SEQ ID NO: 36507 - DNA, 324 bp, Mus musculus
  source 1..324: mol_type = other DNA
cgtcgcgtgcgacccaaaaatccttctgccatcaagatgcagagggcaggcatttggaagggataaaggtcgttctttccttcttccggacgttagaatttctccccagggccatatttctagcgaggcccagactgtctatagaaaggataatttgaattctagatttatattcgttttagaaatgagcagcaattttacgtgtattttcttttcgaagagaatacaaaacaataaaattgggaagtcaactcattttggatcagctatttactttaagcaaatgattagtttttggaggagatataacattgaatcaattac

SEQ ID NO: 36508 - DNA, 359 bp, Mus musculus
  source 1..359: mol_type = other DNA
atgaaaaaaaatccagacctatttttaaaagcaatgtttttttttttttcaatcctatagccttccaaagaaattgttaggcttacatggaggaggtcggacctcggatgccggccgggcacactcggcgccagtcgagccatctggggccagacttgagcgcggcggtggcggctgcagcaccgtgagaggggcgcgcgggcgaggggcgcagctccaagcggaatccgcagtgcgctgggatcgtgcgcctctcactccagcgacggaggcagcggcggcagcggcggcgcggacgatccagcaactgggatttgaggaatttcaaactgcactccgaggggccctcattccagtgg

SEQ ID NO: 36509 - DNA, 255 bp, Mus musculus
  source 1..255: mol_type = other DNA
tgggatgcagagtacgcagctttcgctgactgcgacttggagagtctctttcttctacttcagttcccttccttccggaaggtagagaagctagaggcgaatcacagagcttggtccagcctttggttctggcggctgcggtcggtgctggctggcctgcaggaggcgctgtggctgagcatagagcctggggcgcggcggcctccgcagtcctgagcacacacacacacacacacggagagagtgagggagagg

SEQ ID NO: 36510 - DNA, 333 bp, Mus musculus
  source 1..333: mol_type = other DNA
atacacattaaaaaaaaactttaaaaggaaattattttgcttttatcttgctcctaaataggttttaaaaaccgagtttcaaagcttctgtagtccactggcccagtctgtattcttacaggtagaaactccccgctccggagcttggagcacctgccaggtggctggcccgtaccgctgctgggcttcacaaagcgcgggcagcacctgcgtggccagccagccgcctggactgggggctcctggtcttagagggcacagcgcccccgggatcagcttattgcagcccgagagccccgggcactatcgcgcgccgctagtggctctgggggc

SEQ ID NO: 36511 - DNA, 230 bp, Mus musculus
  source 1..230: mol_type = other DNA
agcatatcttggctgaaaggtcagctctgagcctggccattccgtggtccactggagaaggaccgggggctcttctctgttgggactttcagtgcagcgggcacttgcagagcccattaatgcgacttgccgcccggcacagttccggggtagtgggggagtgggaaacccaaacctggtatccagtggggggcgtggccggacgcagggagtccccacccctcccggta

SEQ ID NO: 36512 - DNA, 398 bp, Mus musculus
  source 1..398: mol_type = other DNA
gaacttggagggcccctcttggttatctcacaatactgggagcagtgtgtgtgtgcgcgcgcgcgtacggtatctcagcttttctttagaaaaaaaaaaaaaaatccaggatatcctatttcaggataaggcatcctgagccagtcaacaatgttttaaaatcacagttcctgccacgtaggtagcggggctggcttaggccttaaagacctaaggctcttgaggaagtactggtaggagcctggcagcctgacctctccagggagggggtctctggtgggacccgagagccatcaagcagctccagctacctggcccggcgcgccgggtccaataggaccagtgacctgccggaaacgtcacgacgccgggctgacgtcgggccaatgggaggtcgt

SEQ ID NO: 36513 - DNA, 395 bp, Mus musculus
  source 1..395: mol_type = other DNA
ggtgacttcctaagattttacagaacttcgtgaaataaagcactatctttattctgttacttactttgtaaaactgtgtgataaaatgacaattttaatggttttagagcacgtagcttccagtgttacacactgagtactgtgaacaaactcatacagtatttaagttataactattagtctgagaaatactgggttgtcttcaccttttatttgcaaaaaatagtgtgaacataggtagacatacagattagtttccacttctctttggatgtttactaagaatagaatactggatcatatggtaggttactctttgttaaagtgaggaaaactaaatcccattgctaagccataagaagaatgctttctctcactatgtagtactcagtagc

SEQ ID NO: 36514 - DNA, 430 bp, Mus musculus
  source 1..430: mol_type = other DNA
ttccactgatgcctgaaagacagcatctcatggactcgagccaatgagtgcatagctagttaaacactttgtccatggagcagatcaaaatccagagtttgccaattcctcaccgaggtctttccagaggtcatccctgaatttacagcgatccccacatcttgactcctgggggccccctctagggacccagccttttcgcagcagtaatcccgcagtcaaagtttacccaagctgttccacttaataaataggtgtaacgtatcatgctcctgcagaacttcaagttggagttgcatctcggaattaggtgagcagccagctcctgagcgcctagccaggggcggggccgcgcgtcccgcccaggagccgcgtcaccgccaagcgcgccgccgaggcgggagggagggagggggtgagagaaggaggg

SEQ ID NO: 36515 - DNA, 188 bp, Mus musculus
  source 1..188: mol_type = other DNA
caagtttaaaattgtgttacttagtacatttccgtgttcctagaaaatacatcctaggaaattccttgtcttaaacacagttataagcccgagctcctaaagtgaacagccttccgcagccacctgaggtagatcacaggtgtgtggtagaggcagaggcaggatctctcaactgagctaccgttgca

SEQ ID NO: 36516 - DNA, 645 bp, Mus musculus
  source 1..645: mol_type = other DNA
aggaaagattctcctggcagggttctggctacgtagccaggaatttgatttttttttttttctttcctgaatatacaccaagaacttaattcttattgagacaaacattaccaagagttgatttttaaaagaaattgctatgaattagcttctttcccagtaattcgggtgcagtagctaagaaaccagtgtaaactagggtcctgggccttttcataaaaggagcagcgtgtctctaggagccgggaaaccgagtcccaggcatttggcgtaggccaagctctctgctttcccggggacagaggcaccattccaggcggcggctcccactggttgggagcgccgcatcccggggaaccgcgagccgcccagggcgctgcgggcggccgcaccctccgctaggccccgcctcccggcctgcgaagggaagggggcctcggggcatcccggcttccctcggcggccgtggaacgagctcacgccggcctgcaagagtgggatttcctcgggtgcccgggatccccaggcgcggcttcggggctgcctaatcgcatgcgcgcccggcgcgctgagggaaggcggccgcgaggggaggggcgagtgcagagcctggccggccgcggagccccgcgcccacgacgcatg

SEQ ID NO: 36517 - DNA, 473 bp, Mus musculus
  source 1..473: mol_type = other DNA
ctttctttctttcttaaaaagaactttacactgcagatatgtcatgaatattaaatgaaattgcagatcagatgccctttttttctgcagaaggaaattagaattgtatttctcaggcagaatggccacctgttgggtgtatcatcttcacccacattgtggtggaagtagcatcactctgatgccctggggccggctgggtatactgtggcatctcaggcgacacaagggagagtgtggccacctcttccaacttgaccaccctgatctcaggctctgggaggctgctaccccctccgcccacccaagtccttccacaggtgggagtggaccctgagtcagacactcggccagggagcgcgtgtcctgcgggggcggcagcaggtccgggtgacgccagggagccaggggcggcgaggtcacgcgtgaagaccacgccagcccagcccacgtgtgcgccagatttaaaagtt

SEQ ID NO: 36518 - DNA, 339 bp, Mus musculus
  source 1..339: mol_type = other DNA
attatacaaccccctaatacagtgttcagtgtataaaatggtgacagtgctgcactgactcagtactagggcagaactggttttgaagaagcactacaggcaggatgaaacgacttggtggatttaacaagcaattggccttacatataattgctttatttgcttcaagaaaattcaggcaaaaatatagggggtatcctatgccttaatcgattaggccaagtagcaccatttggccgactcattgagagctggcattctgctctccagaggggaagggaaacttccttgaatgccatccttccctgaagtgaatgtgaatgcagtcggccagttttc

SEQ ID NO: 36519 - DNA, 417 bp, Mus musculus
  source 1..417: mol_type = other DNA
ttcagtataaaaaaattgaatggctttttttaatttttattttttaacctggaaatcaaaatttgcagcatttatgtttctcacactgaaacaagcaagcatcacctttaaaacaaagattctatttcagtatctgattctaaactagtgactctgacttaactcactaaagttcttccaagaatctagttagcagggttttacatatgcacaggagagaacatttaatgcgctctcaaatgaaatgctgcaaccttttaacctcatgttgcagtgggtcccaactattaaattatttaatttctactttaaaactgtaattttgctactgttatcaattgtaatgcaaatatctgatatattggatatctgctatatgaccactatgaacttccggtgcagagagacacgtgaccg

SEQ ID NO: 36520 - DNA, 518 bp, Mus musculus
  source 1..518: mol_type = other DNA
tctctcatcaggtagacagatgaccacacacctttgaggtgcatcttttctatactagagattaagccactgttacactgtcttccactaagtgtaacattgttcctgattcagtttgggaagcttgacaatccaaatagcatggggtcccctggttacggtggggcgtggaaagaagccagaagtggatgcttcttacagtgtgcctcccctgtggggaggggaagccatcgtgtggacaccctaatgctagtagaatggggacccagcttccaacacttggagccttgatatcaaaccatggctaaagcatagcagtttttgaagaactatgcaaagcctgtccaatggcttatatctgcactgcagtctgactgaaagtcaaagacacttcataagtactagttggcaagatcacttcgtaagtactagttagcaagattttctggaacaagcctgatagtcacagctcagctgggcaggtatggttccgagaaagagtgttaggaccacattct

SEQ ID NO: 36521 - DNA, 365 bp, Mus musculus
  source 1..365: mol_type = other DNA
gaccccaccaaacacactttgtgtttacatactatttgagtccagggtgtcatgtagatagtgctcaaacgccagttaggagtttcattctgacagggggcttccctggcatacttcaccgctgccatgatcgccaaacgaggagactccgggtctcggagtggccatcggtctccagcacccatgtggtggctcacaaccacctgggactatgctccagggacctgaacttcagcggcagggctgaatccgcacggaccaaacccgttgggccaaacgcggcggagacctgtgcgccacgtctgggcggagccccgtaggcgagagcccgccccccgacgctggagtgacgtcacgggcgcccg

SEQ ID NO: 36522 - DNA, 368 bp, Mus musculus
  source 1..368: mol_type = other DNA
ccagcgcctggaccatgtgtgcaggctccgggccccaggcgccgtcttggggaacccgatcaggcactttgtcggaaggcctgcatccgaccttctgacggagggctgggggaccctagggtccgaaagcaagttactcacctacgaacccgaagtaccgggctggctgtgcttggggctggagtcgtgtccccaggcttcccgccgcgcaggcgcgctgacgcgaccccgcttccgggcggcccctccccgcaggcagccaaaaagtggcgcgcatgctgcaaggcccccgctggccggactctctttgccctagctgattggcggagagcgggaggcggtcacgccccttctatgaagcgcgccgc

SEQ ID NO: 36523 - DNA, 270 bp, Mus musculus
  source 1..270: mol_type = other DNA
tatacttgcaagccttcaagtgttgcaggaccttcagcagcttatctctagaacagttctagtttcaaggagatctgaacggtcccttcccaacctggggtagcacagagctgggaagcggctccatggcgcctcggaaagcacgtggagggacctgctgccgcggcgtggtccaagcaccaaccagccctcaagaggctcgcgcggcgcgcttcatagaaggggcgtgaccgcctcccgctctccgccaatcagctagggcaaagagag

SEQ ID NO: 36524 - DNA, 450 bp, Mus musculus
  source 1..450: mol_type = other DNA
gatctgcttccttattaatctagaaacttgtgttgttccaagacagtgttttgttagtggataaagtaactttgcactctccacacctctgatcaaaaaattttggacctgttttcaaacactttaaactacgaaacttgcagtaaaggagattattggcatattaactttaccagaataaacaaaaaccctgatagattttcttggttgtttatctccagcgcctggaccatgtgtgcaggctccgggccccaggcgccgtcttggggaacccgatcaggcactttgtcggaaggcctgcatccgaccttctgacggagggctgggggaccctagggtccgaaagcaagttactcacctacgaacccgaagtaccgggctggctgtgcttggggctggagtcgtgtccccaggcttcccgccgcgcaggcgcgctgacgcgaccccgct

SEQ ID NO: 36525 - DNA, 327 bp, Mus musculus
  source 1..327: mol_type = other DNA
gtagcacagagctgggaagcggctccatggcgcctcggaaagcacgtggagggacctgctgccgcggcgtggtccaagcaccaaccagccctcaagaggctcgcgcggcgcgcttcatagaaggggcgtgaccgcctcccgctctccgccaatcagctagggcaaagagagtccggccagcgggggccttgcagcatgcgcgccactttttggctgcctgcggggaggggccgcccggaagcggggtcgcgtcagcgcgcctgcgcggcgggaagcctggggacacgactccagccccaagcacagccagcccggtacttcgggttc

SEQ ID NO: 36526 - DNA, 250 bp, Mus musculus
  source 1..250: mol_type = other DNA
tggtcttaggactataggtcgtttactcagggaccacttacatagctgcagtttccttaaagtacattaaggaaggcctccaggacgtagtttattgtatgacatctacctaagtcaatattaaacagtgccgttcactgtattagagtctacggttccttatgtcgcccggccacagtcggagcacaggggtctccccagaatgccggcggcttggggctaacagtttcggcggggcagaggtcgccct

SEQ ID NO: 36527 - DNA, 302 bp, Mus musculus
  source 1..302: mol_type = other DNA
tgctaggcagctgggagtctcactaaggctcctgtgctggacttgaacagcagcccagctgctgctttggatgagcagacagtgctcttaacctcctgggaactgaactcaggccgcattcttttaaaattttttttgcaagaaaaccttttaggaatttggggagaaattttcaaaaacacatgttactgactaccacattgtatgtaatcatattctttatgtctcaaaactgagtctcagggaagattcctgaagttacatgatctatttcagatatcgaggaggacccccaggcggaa

SEQ ID NO: 36528 - DNA, 326 bp, Mus musculus
  source 1..326: mol_type = other DNA
gtctgtaagcttaaggcccaaactctatgcttaagcaataggctaagcactgcagtagaatctgcggcatatatgagcctattctagggagacatgtcatctttcaagaaggttgagtgttcaagtgtccttcctccaggaaaaacaacagggtggcctattgcttttattaatagaaaagggggaactgtgggaagccgcccccacattccatgggctgcagccaatcagggagtgatacgtcctaggcgaaggataactctccttaagataaagttttgccgcagaagattctggtttgctgcgtctttcctgtctgagacatg

SEQ ID NO: 36529 - DNA, 343 bp, Mus musculus
  source 1..343: mol_type = other DNA
actaattcatctctagtgatacagcgtttattgggggcgaggaaacacacatgtgtatccgcctctgcagaggggcactccggactgtaacagtctagaatttaatctcactttgatagtgagctggctgtcctggaactcattctgtagaccaggctggcctcgctgaaattacaggcgtgctcctatccacttcttgtaaagagtttgggaacctcggaaacctaaccaggaagcgggagcaggatccctctctcccgcctctgtctcacggtgcggtgtctaacagagacgcaccctaggagagcgcgctgaggccggaccggcggggcggggccaggcg

SEQ ID NO: 36530 - DNA, 430 bp, Mus musculus
  source 1..430: mol_type = other DNA
tggttagctctgagcacactatccagataggcgattgttaatgcaacaagccagggtcgtctttacctcctagttttcaacaggaagcataggaggagggaacacacctggtagttttcttagccccatattggtgtggcgcagcaggaaggttgttgctgcgctgccttccgcatgctcatggctcagcctaaatcataaatcattataagtacattggaaagatctttaaagtatcatccaaaaattttatagccgttattactaagctggcaatttaattttgtacgtgctattttttaatcagggggaaaaaaaagagtaaataaagtgtgcgttgccctgcgctccctggcaaggcccccacgtgctagcccgcggcggaggcggagtgtggcggcccgggaggcgtgcccacggcgacgggagc

SEQ ID NO: 36531 - DNA, 292 bp, Mus musculus
  source 1..292: mol_type = other DNA
tgatttcagttcccaggagaatcaagtgggctttactttctacaggcaggtaagtaccttgcaccggtcacaggagcccttgggtactcgctcacaggctgacttttaaagggagcttcctttgtacattctgtgtccaaaagaaaatggggaaagagccaggggcctgatgctcttccatgtctcttcccagctgactctcagaagtgacgtaaggtcaggcgactttcagtggttcctgcctgcccacgctgcaggtttttcaggtccctgcttgagcgtgcactcccag

SEQ ID NO: 36532 - DNA, 231 bp, Mus musculus
  source 1..231: mol_type = other DNA
acatggccatgaccattcctatggctctgcttgtcatgatcatccgggaaccgggctggctggtgatttcagttcccaggagaatcaagtgggctttactttctacaggcaggtaagtaccttgcaccggtcacaggagcccttgggtactcgctcacaggctgacttttaaagggagcttcctttgtacattctgtgtccaaaagaaaatggggaaagagccaggggcct

SEQ ID NO: 36533 - DNA, 64 bp, Mus musculus
  source 1..64: mol_type = other DNA
cacttttgtgaactttgtagagaggtttacaaaaaaaaccttagaaatctggaaggcttgtatg

SEQ ID NO: 36534 - DNA, 455 bp, Mus musculus
  source 1..455: mol_type = other DNA
tataagacgtcaggtactgaactgttttctcctggttaagagtttgcaatgtgaaagcattttgacctcatgaagcttaaaattacagttaagcataaagatctgtgtaaattctgagtctgacctggactggtgttaactcttgatcctccagtctcaacagcattctgagtgttgggattatatttttcgaggcttcagcctgcggtaacttctgctatttgtttataaaagaaagaagctcagccctttaatgagcctaaggcgggagtcgggggccgggcggattaggtaagtttcccccgaggcgcgcccccaggcaggccaggagtccacttcgagcctcgggaccgaggggcggggcgcgctcggcggccacgcgcgcgggcggggaagggggcgtgtcggcgggcgcgcgcggacggcgagggggcgtgtccggcgggcgggcgggc

SEQ ID NO: 36535 - DNA, 748 bp, Mus musculus
  source 1..748: mol_type = other DNA
ttaatgagcctaaggcgggagtcgggggccgggcggattaggtaagtttcccccgaggcgcgcccccaggcaggccaggagtccacttcgagcctcgggaccgaggggcggggcgcgctcggcggccacgcgcgcgggcggggaagggggcgtgtcggcgggcgcgcgcggacggcgagggggcgtgtccggcgggcgggcgggcggcgacggcgcgggccgggtgcgcggcgcagcgtcctgtgctggaatgtgcggctcccgcgagctcgcggcgcagcagcagaagaccgaggagcgccgccgaggccgcgggccccagacccgggcggccgggaccgcagcgacggcagaaccagggccggcggtctgatcccgctccgcgatcgcaccccgggatctcgagggcctcgacgcgcggcgggcaggcgcggagcggcgcgaggcgctgtccagggcttggctcgggcggcgcggcggccgggcgggggcgggatcgcgagtcacgggctgggccgggggctggtgcggagcggcgtgggcatcggcccccagcggagcacggggaggcccttccgcacggcgctgagatccggggccacggaggccggagcgccgctgctggtgaccgcggtcctgcgcctcgggcccaacgcccccggccccgccggcgtcccaggctcgccgccccctcccccccagtcgtagcagggccggaaggcggccgccccgcttgactcagcccggg

SEQ ID NO: 36536 - DNA, 465 bp, Mus musculus
  source 1..465: mol_type = other DNA
caggccctggctgtgccgtttaataataataataataataataataataataatagctattcaataagtcgactgaaatgataaatgaaatcaatcaacatcaaacaactaaatgttagttaataagctgctaaatcgtaggaaccaggctgccgggagcccgcgcgccacggacgggatgcggcggctggcgctgatccctgctgcaggtcccccgccgtcccgcctaaggggctatagcgtgaagcgtgtctccgacgttcccagaatcctcggcgtctcagcgagggggcggggtgtgaggcttgcgcctgcgcagacgactggcatgactagctagccataagcactggagaaccactctcgagtcgagagtgcgagaatcggccgcactgttggacagttccctctcgtctagtcggggaggaacttctcggacgcgagcgcgcgtgcgcgcgcgaggcc

SEQ ID NO: 36537 - DNA, 725 bp, Mus musculus
  source 1..725: mol_type = other DNA
cgcgccgggccgccttccgcctgggcagcgtcgcggaacttctcctccggcaggtagcccggcaggccgggatgctggcagtgcagctcggctccgcagcccgagcagtagatgccgctgggcggcaccgaggcgtctggaaactccgggacaggcagcgtccggaagcccgcccgcagcttctgctgaagccgctcctcccgctgctgtccttctcctgctgcagctgctgcaactcccgcagctcctgcaactcccgcacttgttcctccggggtccgctccgggacgtactccgggaacagaaagcgttcctccgtgtccgggccttctgcatagtcctcggtcgccgtggagctcgggggaacccgacggcccaaggaggcggatggggacctcacacttcccctccaagccaccgtgctgggccgtagcacgcagcggccggcgcggggccccgccggagcccgcagagcagcccgcaagccaggcgcgcgggcagcatgtggacagcgcgaggagggcggggcctcgcgcgcgcacgcgcgctcgcgtccgagaagttcctccccgactagacgagagggaactgtccaacagtgcggccgattctcgcactctcgactcgagagtggttctccagtgcttatggctagctagtcatgccagtcgtctgcgcaggcgcaagcctcacaccccgccccctcgctgagacgccgaggattc

SEQ ID NO: 36538 - DNA, 351 bp, Mus musculus
  source 1..351: mol_type = other DNA
tttaaatactaacccaggccagtggtttgggaaaatgcttttaaaaaaaaatggcttagcagtttcacatgaaccataacttttaaaaagaattttaaacggtagtctgtcaagagtaaccacaaatttaatgaagtaaacagtgcattttcataaagtcctagttgtttaaaaaaaaaaagtttaaaaaaaaacgggaggctcgttccctccagtgctgcctctccagggcagcgaggatgcccacgacggcgacggcgggaggccggatcccgggcgggcgaagcggggcgggcagcgggctgactctccgccccggggagggctcccacggagcaccgggcggggcag

SEQ ID NO: 36539 - DNA, 688 bp, Mus musculus
  source 1..688: mol_type = other DNA
ttgtgggaagccccacctccaagattctgcggagcggctaggtggagcccgcgcccgcggagccctcgcggactccagatccgggttttgccggccgcccctttcccggccttggagcccccctccctggtcctgggagctctctcgccccgtcaccccgccagaggctcactcgggcctcggctgcgttggccgctgcgctcacgctgcctgtctgcgggcgcgaccgccccctccgcccgctcggcccgcagcgctcgctccagttcccaggagcggggatgcagatggcacggccgggccaggagggcgacgccgccaccgctgccgccgccgccgctgctggcatctcgcggactgcgcgctgcctccgctcccgcagctgctactgctgctgctgccgccgccaccgcctggtgtgcgcgcgcgggctgcacggtgtgctggggcaggagctcgcccctgtgtgtgcgcgcgaggggaagagcgtggagggcgccccgagcctcagtggctccgcggtgacggcatcggctcagaccccgggccgggcgatgaagctcccgcatgcccgaagctacccggcctggccggcgagctgataggcgaccaccggagctcggggctcgccccccgcggcaggcacgcaaccctcggcgacccggcgcccgctctgcccgcgcgtcca

SEQ ID NO: 36540 - DNA, 357 bp, Mus musculus
  source 1..357: mol_type = other DNA
cctcagcagctgcttttcttgcggcggcggcggcggcggcggctgcaggaggagggaacccgcttgggtccaccggctgcagcgagagacacagcctgactccgaagttgtgcaactgtgtccgcttttgcccccctggggcgtgtgaagcgaggaaacgtaaaggaagactagcattggctttcccggcttcccctttctccatggctgtgtagaagaagaaaggaaaagagacactttttgttgtttctttgacctggtcgggcgcaggcggcggcatccgatgggctggcaaccgagggggtgcggggttcacgtacactcaccctcatgcgcacactcatctgatcgtgatgc

SEQ ID NO: 36541 - DNA, 333 bp, Mus musculus
  source 1..333: mol_type = other DNA
accggctgcagcgagagacacagcctgactccgaagttgtgcaactgtgtccgcttttgcccccctggggcgtgtgaagcgaggaaacgtaaaggaagactagcattggctttcccggcttcccctttctccatggctgtgtagaagaagaaaggaaaagagacactttttgttgtttctttgacctggtcgggcgcaggcggcggcatccgatgggctggcaaccgagggggtgcggggttcacgtacactcaccctcatgcgcacactcatctgatcgtgatgcccgggtggggcagaaagcagccaagggggcgccttttctccgctagt

SEQ ID NO: 36542 - DNA, 696 bp, Mus musculus
  source 1..696: mol_type = other DNA
tttctctaaaaatacatttcaaatcaaatgcaatgttcctgcagttacataaatatataactttgatataaatagaactgtgttcaaaggcatgaataaattataaactttcatttgttgtttcttagaagattaagtatcttaaaatattaaaggtactttcagtttcattggcatatgatcattatatatatatacatatatatatatacacatatacatatatatgttaatatattatttgatttggtctacatgaattgaacatatgagaaagactcaatgtcaattaggacaaattatccttaagtctctgttttccttctacaatgggggtttaatacacatacaagtaaaaattacactgcatagaatctatagatgacatttattgagttcttgacattttatatttatcaataatactagatacaatgcttactaagatccctttatctagtggatgttatggaagatcgattatatatcttgccttgggctactatatataaatgtataaatgctaagcctgaggatacagcaatagtccagcacttatctagtatgtgctaagctctagggattccctaacagttaaacttttcaagagatcctgatatacttttgaaatggctagcacttttaaaaatattgtcagaattaagaattctcaaatctattatgatgttaaagtga

SEQ ID NO: 36543 - DNA, 668 bp, Mus musculus
  source 1..668: mol_type = other DNA
ctgagttttttgttcaaacaataattcagggtaaacacagaattttctctatctatctatctatctatctatctatctatctatctatctatctatctatgcacacacacatatgtgtgtgtatatatatatggagagagtgagagaaatagacctacataggtatatataattatatatacatatatatatacatatatatctgtgtttctttatatatcttataattagatatatatagagatagatagatagatagatagatccatataccttatacatatgagtatatatgtgtttatatatatatatatatatatatatatattatatgctatataatgtttacatttttaaagagtatttttcaaatgtattccagacatggttacaatatatgctgttctaattctgtcactaaatgaaactcatcctatagctgactttatgtgtatcttatgactttaactatagactcaatttaactgtcttatataatattttgcatgattcaccctatatggtgtcaccctgctggaggagataataaaagcactctgttcttttctgctttggaatttcagataagagtactcataagtatgtactactctgcagcagttctcaatagtgttatatatagaaatcatcccagcctgctaaatata

SEQ ID NO: 36544 - DNA, 379 bp, Mus musculus
  source 1..379: mol_type = other DNA
tctttttgaaacaatgaacgagtacagaaaaacggagatgcccttcagctgcgttttcctggttatttgttattctttcagtgtaatgaaccacgggcaattaaaataattaaaaatgttaaagctctgacattattatacccatgttaatttcattggagttaactcattacgtaatttcaatactaaagtattctatcactgaaataaatgaattaagtcttcatgtagtagattctctgagatctcttacttctcaagaaagcagcagagcctgtgaatgtgctgttagcaggcatgccagctcagggaccttcctccttcagggacctctggtcctcgcatttctcgtttaagcgagtcacacttacaggaggct

SEQ ID NO: 36545 - DNA, 488 bp, Mus musculus
  source 1..488: mol_type = other DNA
cctggtttgatgaactagatttaatttaattaatttatttatttgtgcatttacttatttatttattgcttactttttaaaatggtaaaaagacaaaattaagcagatgtttaattaacataaatatttctctctgaagggacataaagttccacatgtgcactgtaacatgtgcacacttgtaaatgtcaaaacatcaaaaatattcttttctgtatttttctgtaaaggtatgatgacataaatctttgtgagtctgagaccagcctggtctacacagtattttcaataaacactattggatatatagccaataggatcaatacaaaaatattcaatgaagaatttttttaatggatacagtttatttaagtcacatatcttcgaaatattcatcattaggagatggtaatctgctgtttattttgttaccatcaacctaagcacatgaagtttacacagcagacgccttttaaaagttggtctgt

SEQ ID NO: 36546 - DNA, 352 bp, Mus musculus
  source 1..352: mol_type = other DNA
ctttaaaagtgcagcaagcgcctgtatgtatgtatgtatgtatgtatgtatgtatttatgacaaaatacacatcggtgtattttccttgtttgcattaccaatcataagacagaagcagtcactttctcttaaaaacattatgttcgttctactgatatgcatatataatttatgcctttgcttcataaataatttttaaatacttgaaaaaagaatagcattactattttcagagatacctgcgtagtgtatgtaatcctttttaagtattacctattaatccgtagtagaactgctgggatgtattatacattaaggagcacaggtggtgctcaacacctgcttaaaacg

SEQ ID NO: 36547 - DNA, 498 bp, Mus musculus
  source 1..498: mol_type = other DNA
gtgaccaccaaccctaaaatcatttttgtgatttcaagacaattttgaagtaaaacctgttatactttacagaacgctgccctatgtctataatcaaacacggatttttaaaattgggctagtgtttcgtcaaacacatcaccagttagaaagattcttaatagctggagttcgaggccagcctggtctacagagtgagctccaggacagccagggaacaacaaagattcttaattgtactgtgtgtacacaattgttttctaaaaatggtaaaatgagactggtaatatgagttactggctgtaaatgaaagtgccaaattttacagctctttttagtcacttgactacagagatcagtaatagatgttcaaaacaatttaaatggaatctcaacagcatctggtagctgtcgagccccggagcgccccgttgccccgcaccggaagtcaggtgtcccaggggctgactggaaaccctgtggtgacgtcgccgcccg

SEQ ID NO: 36548 - DNA, 615 bp, Mus musculus
  source 1..615: mol_type = other DNA
gcaaagtaattggtaatctgataacaacaaactgtgacttactaaattccaatggaagtcataccaatatttgtatggctaaatactgattctaagtagcgttatataacacaataggattataaattataaattagcatattatatcatcaattcagttccaggatttttttcctttcaatttggtatgataataacaagtaaaatatttacccaattataaaatcaaggcaataacaaaaataattttactataatttcagcatggatagtctgatcataaacttaaatctagaataattggtattagaacagctgcttaaaacagttaaagtactagctataactattcagcaaaatgcatttgaaaagcaattgttttgagaagtatggtcttcaaacaacagattttaaattggatcgggatttttaaattacttttctgtactgtctagtcacaacagtttttagaaaacctattcattaaggctaattggatgatattatgagtcactttcgacatcagaattagactccaagactcttttagattataaaccgaaaaacaagtttaccttgatctttcacgttaagtccagagtatcttcgtttcca

SEQ ID NO: 36549 - DNA, 403 bp, Mus musculus
  source 1..403: mol_type = other DNA
gatatctctgattatcattacctaaacatgttttgaggaggagaggagcacatgcatcatgaggcagagcctcttttaaaacaaccatccctgcatttggaaggattgcaagttcagagcttgcaactctgcctcactatatgaaatagtaaattcagttttttaaacatagttgaacattattgctagctaaagtcatatatcttttaattaaaactcaacaccctgtagatttcagagtatcaaacattctttaaagagcactagaattacaagagccattttaaattgactatttccagtttactaatgttttaaaaattaattaataaatgtttggaaagcactttgaagatgaaagttgtgtaagtgctaagtattatcattaggccattatcataaa

SEQ ID NO: 36550 - DNA, 243 bp, Mus musculus
  source 1..243: mol_type = other DNA
aaggtacacaatcagttagtgaaaattcaagtagtggaattcaagttttagtacccaatctgattgtattccatttctgagttaagatgctttttcaggagacaatctctctctctctccttttatgacagagaaaaatcatattcagagagagtgtctgtcagtgcaaatgaagtttatgataataagcagaagtgccacatccttctgaataaaaagagtcatgtttattcactacaataa

SEQ ID NO: 36551 - DNA, 432 bp, Mus musculus
  source 1..432: mol_type = other DNA
aaactcaagtttgtcaaaagttacctttcaccgaattcttattttaggttttttccagtctgataaatgccaaatgtaggtcattcttaaagtctcatttgaaatgcatttatttgcctgtattttaatagtaggcacttaaaatcaatgattagtgtattgattattataatactttatctttatgataaattagcactatacactgataggttcactatatcctgaaacttgaagataaaaatgcttttcaaccagaattgcacgattattgctaagctgttcacatgctacaattagtgtaaccacttacagtaagttaccttacctggaaccactttcttctttaacaaaagtagtcgatacaaaaagaaagcacaaactatttcttttattgtcaaacttgtttcattttcttccaggagtagatct

SEQ ID NO: 36552 - DNA, 305 bp, Mus musculus
  source 1..305: mol_type = other DNA
tcaaacaactgaagattgatttttaaaaatgaagaatgaataacctatggttaatgagttaatcaaggtcacttcctgagacccttacaatgactctcaaactaaatctcaggtgtttcgtttttatctctctttagaataaacaagagagccctaaggaaatcttgcatcaaatatttcctgaaaacgctgtctcttcctgaaccaggaaatgcttatttcctgtaacaaagactttatcaagtgataccggttccaacttgttaaacaagtttcttttaaatctttaagagttcttaacttta

SEQ ID NO: 36553 - DNA, 503 bp, Mus musculus
  source 1..503: mol_type = other DNA
atagcttaagattatcttcattgataattatcaacactttaaagccaaggtctacttataattttgtccctttgaattagatgcaggatcaaatactgaagatgtatctaacactttaatttatgtcaagcaaataaccactcaggtttttagatggactgaattattcacaaagcaaagaaatttattgctcattgctatacacagatgtctaaaagcaaaagtatggggatggctccattcctattcatgcatggacagcactaattgaacttagtgagttgtttttcattgtataaatgtatttaattcttacaattaaagaaaatgatagacatatttccagaaatattgatactccatctaattacataagcacacataaaacgagtccagtgtttcctatctatattttgaaagttgtaaaacctgagcaaagagccataaagatgacgtgacttggcttccaggcaagagcccttttgattgatccagttttggat

SEQ ID NO: 36554 - DNA, 583 bp, Mus musculus
  source 1..583: mol_type = other DNA
ctaatttttttaaaaaatgaaagtgtccacagcagttacatcattattctttaaatctgttattaatgtatacattcactactaagggtatatcactatttctggaaacactatgaaaccccttgtaaaatactaactttatgagaacatatagaaatgtgttcttcaagacatcacaaggtagttgtattacaaatacaaaaatggctccctgagctctgtttttataagaacttagtgtgtcactcaaaaacctaatatgtctttgtttggtaaaagatctagttagttcattccattttctgtacaaagaaccatcaaagcaaagtactttgtttttctaaacctaagttaagcacatttcaaatgacttaggctctcataagtgtgtttatcctaaaagacacaacttaacagttaagtaacttgtcagatacgtgttagtttctccggggagagtctctgtgctgagaggactgagtcagagcactgattcactttaataccattgtttgtattctagatttcaaattcaaagacaagctttgttcacacctgttaaacaagtttttttttttttaaa

SEQ ID NO: 36555 - DNA, 283 bp, Mus musculus
  source 1..283: mol_type = other DNA
tcctttctgttaaaattttataactgagtagagaggttataaaaccatgagagcacagaggtgaataactaatctgctttatgtggggattaaagaaagcagctttcagacgatgtctcaaatttctgctaatatagtttaaaaggttcatttaacttaattaaaccacagtttcttcagaagagccaggaggctgagaggcataactcttagtcttgcttttttatggatttaaatacctgaacatccaaaaatttcatcctgttaatactttaaaagtagc

SEQ ID NO: 36556 - DNA, 423 bp, Mus musculus
  source 1..423: mol_type = other DNA
aatctgtatgccaggatggcctcgaagggattaaagatgatattcttaacccctggtcctagaacaatatttaaaaagaagtagtagacactactataacatagccgggcagtggtggtttatgcctttatctgagttcgaggccagcctggtctacagagtgagttccaggacagccggatgtctgcatccttgagctgtaggaagcacagcagagaagcctaagtttgcgcgcggggcgggacgacgtgccgaagtcacgccctcccccggttccccgcactgtgacgttccgcgagaggcacaggattgtttcgcgcaggaagcaggctccctctgtggtggccgaaccccaacaggaaggcaggtcgaagcgcgcggcccgccggacggactgacggacggactcgtgcgcctgcggcc

SEQ ID NO: 36557 - DNA, 450 bp, Mus musculus
  source 1..450: mol_type = other DNA
gaatataaaggagccagtcaccttcatagctaagctttccaggaatactgggtgtccccagagatcaaacatttcttctcctagcagaaagtagtcaaagaggaaaacacaaatgtctccttatctcttcacttttgctaggctgactagttacaagtaagcattccatctagattataatatgctctaaacgtaagtgcagtgtgtttaattctgagattacactatagacctctgagccatatacttaaaatcactaagtagtatggtaactggtcagtgttgccaatattcatatgacaaaacactgacctatggtatttataaaaatgtgactggacagtttgcctttacttcagattctttatcaaagaagctccattgggagaaagagagatcttacttttcactgttctccaaatacagtatacattcaagatcactgtgtaa

SEQ ID NO: 36558 - DNA, 473 bp, Mus musculus
  source 1..473: mol_type = other DNA
tgaaaaatgttcaacatccttaatcatcaggggttgcaagcttgtacaaccactctggaaaagtactactgtgcaatacctctcctgggcatatatccagaagattttccaactggtaataaggaacatgctccactatattcatagcagccttattaataataatgtggtacatttacacaatggagtactactcagctattaaaaacaatgaatttatgaaatttaggtaaatggatttaacatgatatgtactcactggtgagtgaatattaacccagaaggaataccaaagtgttgatacttcgttccacctttgaatgggaaaataatattgaaaattgaagacaaacttcgtgaaccttgagctcatgttccatgtgtgtatttatgttacaccatcagactcatctagtctgatgtggttagaagttatatgttaacttcttgattgacagaacttacataaaagc

SEQ ID NO: 36559 - DNA, 404 bp, Mus musculus
  source 1..404: mol_type = other DNA
gatattttctcaagattttgtgctcaatttctgcacaatgtggaaacagtcttgaacgtcatcctttataagggttgccttggccatggtgtctacttcttggtcctagtgagttgttgtttccttagggacattcacagatgtgacttaatattttatccgacattcttacaaaataatatccatgatatactgataagttcggtaactagtacatctggatttcacaggttgagaataaaatgcagactcaccttacactaatcagtgttctttctattcaaaactcctgtaaacaggtttacacaggttacttctttacaaaacgtgattttaaacacttccaaataaatctgaaataattaatatttgcttttacttttcttcttcttagataagaggac

SEQ ID NO: 36560 - DNA, 343 bp, Mus musculus
  source 1..343: mol_type = other DNA
tccatgagatgaagtctacttgatcactgtgaatatttttgcattgatattaataaggaaaattggttggaagttttctttaggggggtatttatatcctccttgaaggactcgattatgttcatgagataggatgtgatggcagaactgggttctagcatctcctgggagacctgtgactctgactgtaacaggtatgtggaatctgttgccataggtgtagcagatctcctgggaggccttcagactgtggggacttcacagtgttgccctggatacaggagatctcctgggaggccttcagaatattttaacttcttggcaaatgcttcttagataaaag

SEQ ID NO: 36561 - DNA, 619 bp, Mus musculus
  source 1..619: mol_type = other DNA
tagaaatgattactgataaaataatgtcaattataatagcaatcaagattatatactgaacccaatctaagggatttaatgcacttagattattttttaaatcgctggccaatttatcaatgttctattaattgcactaaaatatgtggaatatataatatgtgaaataactgtgtttttccacacaaatatattgaaataacatagagaactgtagctagctttcaaatatgtctctaaaaatgtctagaaccagccttttatatgaagtctgttatttctaatattggattgattattagaacagtccatgactgagtttgaatttcacagtaaaagaaagcgaagagtcatcatgaacttcaactatataaattaatgtgctttcaatgccatataggccatattatgatgtcactagttttgtgagacattttagaatattctaatatcttagtaccattaataattgaacaagagatctttatttcttggctaattgaaaacatgccatcataagagacatggatcactctcatgtaaaaagggaataattaaaatcgctctttgcttttttgtctcttttagtttaacctctgggctgaagcttcttggataa

SEQ ID NO: 36562 - DNA, 695 bp, Mus musculus
  source 1..695: mol_type = other DNA
tgcagtcttttagatgaagtttcagaatgaacacaatgattactaataaaataatgtcaattataatagcatgcaagattatatacttaacccaatctaagggatttaatacaaatagattattttttaaatctctggctaatttctcaatgttctatttatccaaaggacttctgttaatatctgaaatttctatctttaattgctgtataatatgtgaaatatctgtattgttgcattataagttaatggcatgacacatatatattgaaatgttgttaacacatagaaatgtagctaactttcaaatatgtctctaaaactgtctagaaccagccttttaaatgaagtctgttatttctaatattggattgattattagaacagtccatgatttagtcagaataattggtcacattaaaggatcatcatgacattcaactatgtaaattaataagctttcaaggccaccatattatgatgtcactagttttgtgagacatcttagaatattctaatatcccattaataattgaacatgacatcattatttcttggctatttgaaaacatgccatcattgtaaacagggaataattgaaatcattcttcgattcttttcccctggtcttttaattatcagctctgggaaatgcaagttatagtttaacctctgggctgaagcttcttggataa

SEQ ID NO: 36563 - DNA, 509 bp, Mus musculus
  source 1..509: mol_type = other DNA
gtacatttacacaatggattactactcagctattaaaaacaatgtatctttgaaattcttaggcctggaggatatcatactgagtgaggtaacccaatcacaaaagaagtcactttatatgtactcactgataagtggatattagccttgaaacttaaaatacccaagatacaattaagaaggaagaccaacatgtggatacttcattcttccttagaatagggatgcatatgccagcaagattttgctgaaggatgtcagtgcctggcaaatacagaagtgctcagagtcatctattggatgcaacacagggcccccatggagccttgggccccatagcatttgaaatgtaaatgaaaaaaatatctagtaaaaattgaaaataaaaaagaatatccagctattcataaggaaatggttgtaatctatataatattagtctatggtgttttattggatagttgtaagtttaaaagttaatagttaatttctttcttatctaaattatt

SEQ ID NO: 36564 - DNA, 540 bp, Mus musculus
  source 1..540: mol_type = other DNA
cccattgggggccctgtgatagctgactgtgagctgtgtttgctaggcccagcatagtctcacaagagacagctataattctaagaagggacaaagtgtccacacctttccacttatcagtgagtacatattttgtgattgggttacctcaatgtctagaaccagccttttaaatgaagactgttatttctaatattggattgattattagaacagtccatgattgaatcagaataattggtcacattaaaggaaagggaagaatcatcatgacatttaactatgtaaattaatatgttttcaaggtcatatagttttatgagacattttagaatattttaatatctacgtaccattaataattgaacatgacatcattatttcttggctatttgaaaacatgccatcataagagacatgaatcactctcatgtaaacagggattaattgaaatcattcttcaattattttcccatcaccatagttctggtcatttaattatcagcgttatagtttaacctctgggctgaagcttcttgg

SEQ ID NO: 36565 - DNA, 487 bp, Mus musculus
  source 1..487: mol_type = other DNA
gaggtttgttggtaatcataccttgaatcccaagttctttcaaatatctaatataaaatatttgtaaatggatacctatttatcagagtaaatattcacaaatgacttttggatgtgagtatggacatgattgaaaactgtggtgtcaattttaacaacctttgttccatggttcataaactgatgatttatttcagcatgagaaatgaagctctaaaggtgatcaaagctaaattatgtcttcatacctgatgtactagacatatctcctataactcttattaataaaattattttaccatcataattccaggatgaaatttcagaatacaaagacgattgttctttgcttttaagttagtgctaattatagaatcacacaattctagacttgaggaaggagaaactaatctttcttaacaatttgttcatgagaaaataatgaggttttatatagatgttctttactgtgatctcgatatacagc

SEQ ID NO: 36566 - DNA, 647 bp, Mus musculus
  source 1..647: mol_type = other DNA
acagatcttccatgcaaaaggtagggattaaagaaattgatttttttctcatgctcttgaatttactcttgttgaacagtagtgtgtactagcagttcaacagtgagttgaactcatcccatgacttggcaacatcattgtgcaatccatgcacagctgaacttgaagaaatcatgaaagaacgactctcagagacaaagttgtttcccattaaatctggatgaaatttactgccagatttgcataaaagctaaaacagtgaatgatgacagttttagctgcacgtgttattaaatatcacatatttagaaaactgcatgcaaaccatgttaaatgtgtcaccttttctaaatcaaaatatgtgaataattaataatctttttagagataggaaagatcactcactatcatcattataaagtttgagaaaattaattggttcatacagtagggattcttcataactataaaaactgtgatgtgatgttacatgaatttgagaatattaatattctattattcttaataataatttgaagattgctaatcactgtcatttttcaaaatgtacttatagtcattgtaaatagttataaggtgtaagaagatttatttaatctttttaccttcaagatcaatatttaaat

SEQ ID NO: 36567 - DNA, 606 bp, Mus musculus
  source 1..606: mol_type = other DNA
acttttaagtaaaaaaaaaaaaagcaatatattttcttgacactgaatccactttcgtcaattacatatctatgaactacattggtagagattaattaaagtgacttagaatcatctttcttaaattttaaggcattgcttattacagagaatttcaggatctcattaaaatgtagatcctaagcctaaattgtgattttctaataagatctcagaagagacgaccagaacttacttctgatatgtcagtttatgttataaatataaaacagtactagaagctaaattaaaaattaagactttatgggtaacttaatcaaattaaaaagaaatcaaaatactagctgaagcctacagttgcatgtgtgggcatgcacaggttttcagtgtaaaactcagaatgacaataaactaactctaaagttacctccacttacactaaaatatcagctaaagtgctaatattttagtgtaaatgtttttttctagaatatatctgtctaaaatgatttaatttactgaggcataatcttaaaagcttattttgaaaacctttgttatgttttcatagataaagccaaagttcactttgtattatatagtctt

SEQ ID NO: 36568 - DNA, 737 bp, Mus musculus
  source 1..737: mol_type = other DNA
tttttccttgggatatatatatatatatatatatatatatcctggacatatatcttttatattttccatactgactatattaatttagacagactacaagtatttaaatgtattttcctctatatcctctattttatttcataacaatattttcctaacggaaatctaatgtagttggacgaaacttgattttttttcttacatataaaatcaattgtcaaaccagtgtgattgaaacattttgtcacaatgactgtcttactttaaatttacataaactaactttcacaaatgctatctcattttttttataatttagctaccattttaataaattgctttctgacaaatattctagaaatataagaatattctaatcatgtactcgttttcttgtttctaccacagtggtttattaaaacatgtaatctgttcttcaaagaacattagcattactaagaacataacattagaaatgaaagaaacttgagtgatcatttttaatatttactttttgacaaataatataaatcagatccatgcaaaagatttatgtactaggaatataacactgtctaagagaataattgatatttattttgatttctatgggacaaaaaaaaacatctttaggtttatcaggagactatagtccactgatcagttaataattgactaagagtagctttataattatcaccctggggagtttatactcaattgttcacattcttaag

SEQ ID NO: 36569 - DNA, 281 bp, Mus musculus
  source 1..281: mol_type = other DNA
agcactattgcattgcaccagcaggggttcctttatagccacggctgtgacgattataatctaattatcctcttaattcaataatttctattacttgggtatatgtgtatttatgtgtataaatatatatattcccaatataacccttcaatctatatagtgctacttatatgtacattttcagagatgattctttggcacagaacaatcacagtttgaaataaacatccttgtcattatttatcagtaaatgagaggaatttaatgaatgatataatgga

SEQ ID NO: 36570 - DNA, 795 bp, Mus musculus
  source 1..795: mol_type = other DNA
atctgattctcagataggaagaccttagaatgtcttttgatatgtacttaaaaatagactatgagtattatctttgttttaaatttacttaaaatatttaagatgatttttgaaaataaaaagcagagggaccatcacaatagtaattttaaatagtctctaagtgaagaaaatttccttcagcatataaaacttcaacactgaattctaagagtagattagagagagagaggactttaactctcctactcttttttaaatggactatcagacgtatgatttatggaaataaaatttaattataattctctagtcctttaattaaaattttccaagataaagtgccactaatatttgcaggaaaatttacatttaaagtacatataatataaactactccataaattaagttaccaaaaagtcattgaagacaaatgacatttagaaaagatacagatttttttctttaaatggtcagatgaattttcctcaaggatttcatgtagtaaaatggattttttttcaaaagatataatggagttctgtacatttaacataaagacatgttctaacaatagctgtgaatcttcatagttttgaattttgtatttcctataatttgccataattacatgaatcactcctttgttaaagactttactcagaatttcccaggagaggtattgggcagaaattaatttcctatttgtaacaattcttagaatttatgtaaaacctttgtcagaaacaaaacccacaaaatttgcatttcatgctcagtgagtttaaatagtc

SEQ ID NO: 36571 - DNA, 395 bp, Mus musculus
  source 1..395: mol_type = other DNA
aaaaaaagacaagataatgattataatgtatttagtggttgttacaatgtgcattaaaaaataaaagtctgtaattactattattaaaaagattaatgtttgttaagaaataaatttctatgcctagtaaaaatacctttactggtgtttgtaaaaccctgaatcctattttagctaaaaaataggtaaagattcatagttttatcttttatacaaacattatagatatgtaaaatgcattcctctgcatactgaatattagtttaatgtatttaatctggtgcatatttccatagttccttaaccttaatgtaccctagaatttcttgggaaagacaatagaaagaaaccagaattgaagggactttttgagtatcttacaaaccacaaaatta

SEQ ID NO: 36572 - DNA, 475 bp, Mus musculus
  source 1..475: mol_type = other DNA
gagagaattctaaggaagggaattcttaataaaacatgaactttcacattgttctcaagtgaaagtatgactgcatcaatatagtatcaagaaatgagtgtattgtttgagagaatttaagaaaaaaaaaagagtacttcttgcttctgcagaggacccttgtttgttttgtttgttttgttaaacaagacttaaacaagactcacagttacttgtaactctagctccattaaattcaaatcacgtttctggactttgaaggttcctgcatgcacagggtacatatacatgcactccttcacaatctaataatgattagggaattaataatcaaactgtttaaggactccttagaatctgtggaacaaagaccagaaggacaatttctaattatagtgctttcttagaattacaatgacttttaggtatttgaaaccacagaattagaatatgatgataaaacatggtttaaata

SEQ ID NO: 36573 - DNA, 696 bp, Mus musculus
  source 1..696: mol_type = other DNA
acacacatataaatatacatataccagagggaaagtggctttatataatgaatattttgaatcctagaaagtacaaataattaactgttacctctgtttttataagaatatatttaataaaatgttgacggatgagataagaagatctatcttcttaaaacctattggtggcttttcatattgttaaaaatgcagttttgtttattgtaaatgatatacagatttctacacaaaattaccagcactgttaaaatgctagagcttaaatattaactcttcagctagccaaaagccttaggtttctaaaattatacttttgccaataattatagatgcatggaagttagcattttatccagacggttaaaatttccatcatctgggaaaaagtctactatagttgtaacagtactcagaaataatatattagcaatttaaatttattgtaaagctataaaatatctccaataaatgtttacaatatgaaaaaatttcagacttaacatatttcagaatatgcaatttaggaaccataaagaatataaatgtctatgaacattttgagatatagagacaataacgttgatgtcacagtcatgacatccttatttcttgttatcatgttctaaatcaagcaattctaataatcatgacttctaagaatacaagtccgtctgaagttattttaaaccatag

SEQ ID NO: 36574 - DNA, 373 bp, Mus musculus
  source 1..373: mol_type = other DNA
gtttataaatcaaagtattggtaccaaagttcagggacatattttattttactttaacttattttaattttatttttcactgggccatcgagcctccataggaccaaggggcaggtagctggagccatgggtaacattgcaacatttctttttgggagatcaaagtcattacttcaaacatataattattttctacttccactttcttaaacttaattgttttgattaatacatctggttgagaattgtctaagccatcatgaaattgtgatgattttgatgtgcatggttggcaccataaattagtacaaaggacatgtcttttgaaaagtcagagcagtaataagctctaagaactcttatttgtcctctt

SEQ ID NO: 36575 - DNA, 267 bp, Mus musculus
  source 1..267: mol_type = other DNA
gaaagggaatatatttctaatgagcattagaacaaaatgcatttacttatacttgttttaaaaaatggtataactaggcctccatcctgtaaaaaaaaaattgttatgtgccacatagtaattctgttgatttttgacacacttaatttttttaaacaagccacataattccagtcaaagatctgcagaaacttgcgctgttttatgtttctcatcatttgaaaactgtgacatttattaaaagagtaatttctgcagcagcagcag

SEQ ID NO: 36576 - DNA, 709 bp, Mus musculus
  source 1..709: mol_type = other DNA
acggaatacataaaaattatacaatgctgacattatttctgctctgcattctggctgctctgcagggattccagtaaatacctctgatcacaaagcaaagtcattgttaatatcatttaggcaaaatacatgtttggcttcattttactaaaatttttacagcattgggctaaatcagaatgatctgactctaaaatagaacaatgattcctaactcagttacttaatattgggcatccaaaatgggacactttaggggttcattaaaacagcatgtgttcaatgtttgaacaattgaggaatacaagaaaatgtttcatgcatgaatttaacttacaaaacgcacacataattaagactgctgatttttatttttaaaataagtagttgtacatttggaagaacaatgaccaacatggaccatactaaatataaagtcccttgaagacatagttcttcaagtaaaaacacttaaaatgtgaaaaataattgtggctattgggttttaattttattttagcaataactttagtttcaactagatgaaatgatagaggttaagaatgcaattagtacatttgtatacattttcctatatttttagaaagcacaggacattcattctttggtgaccgttgcctttctgtcatcatcctattgggtgaaaagtaggagggaaatgagatctgactaccggtactaataccct

SEQ ID NO: 36577 - DNA, 407 bp, Mus musculus
  source 1..407: mol_type = other DNA
agtgagttcaaaaacagtgataaatttttctggtgacctccttttcagttgagggggggactccagcctccagctccatcatcaggagcatctgaggtggcagaggaaggattcagtgctttcatctggaaatccagaggcatcagcactgtcctctagtgtgccagagaactcagtagtgggtacgacttctttttctcctggtggttaagaagatatcttcttttgccgtgttactggaaaaatctattaaagaaacagtacaagatgaggtatttccaattttcactggaatgaaattttcagaagatcaatttggcatccctgggcaagggagtactgcccagaatagtgactgaagcattggtcattatggggattgttacatcaatcacccaggtaatgac

SEQ ID NO: 36578 - DNA, 424 bp, Mus musculus
  source 1..424: mol_type = other DNA
caatttttaattttgaaacaaagtctctctaagtttctcctctagcatctaggattataggtccactactaatgttattttggtaattttagacccaaaacaagagaatatacaaagtattttacttaactgcttgtataagcacagatgaaataaaactaatagattaaagaagaattttaatctttaggaaaatgtttgataaaagctcaaattttcttcattttgtaaaaacagattattttcatttcttattgaaacaaaaacttatttgctaatactatatttatccctaacatgatttatctatcacttttactagtttagaacttgtgatgacactgggactgtagtagtcacactgtggaagcttcaggattggccacagtatttactattgactccatggtaggaactggtgtgg

SEQ ID NO: 36579 - DNA, 611 bp, Mus musculus
  source 1..611: mol_type = other DNA
ctaaatcttaaagagaatctacaattattgcctgctacaataacatttgaaaatccttctgaaataaatatcttctagagcagctatgccttgtgaatttaaatacatgacagaaacttcttgccacaaaagtcttctgaggttgaaattaaacctaaaatactggatacagtgtgtcctaagttaactttaccaatccactaagtttattattgttgttaatattattattgataatattttcctactttaaaaataatatttctctctcagaagagaagaacaattatcttatttttattcaccatcaaaagggtgtttaaattttagtcatttaagcaccacaaatcagggtcacttacttatgaaatagttgattccgaaatgttgagagccttcaaccatccggagtgttgattattgacactaaaccagggtaaatcctaggttttctaaaaataaaattcttagtatggatttttattttatagtcagaactccataattttttcttctaatattaattctaggagtcattacctgggtgattgatgtaacaatccccataatgaccaatgcttcagtcactattctgggcagtactcccttgc

SEQ ID NO: 36580 - DNA, 524 bp, Mus musculus
  source 1..524: mol_type = other DNA
tgggtataggcccaggagtgctatacctgggtcctcaggtattactgtgttcaattttctgaggaccagacaaactgatttccatatcttctaagaaatatttcaaattcctagtagaccacattaaatggtaaattttatttttcagaattataatcatctcattttcatacttcattagctgttgtaacatgtattccaatgtatacaaataacacctcctcagtctgtgtagtataactggattgcttatccaattcttccctgaatggggttgcaaaacctttcaaacaattatttttaaaattacataaactcaacattttctttcttaaaataaaaaaaagtgcaccccaggtccccctgtattccacttagtgactgagtatattcagaaataaacacatgcaggagcacactgccaaattggcaatgatgcttcgtaaagcatcagccaaagttgctttatctttggacttctgtttctttattgccaataaaatgatataacatatataagagct

SEQ ID NO: 36581 - DNA, 560 bp, Mus musculus
  source 1..560: mol_type = other DNA
aagactttaaagtactcagtcctaagtgtggtatcttaagaaaacatagtcttctgtatagcccagtggactccttgctctgagacaggggtgcacatgggtcactaccagaaagctatttgcaattaatacatgattggtattttgtgtgtgagccacacttcagggcaggccccatccctaaaagtagtttgacaacataaaactaaattaatggtatttttgtctcatttaaatatcttgagtttttgctttaaaaagagagagaaacaacataaagttgagtgtgtagaaaggtatatattacttctcacataacatttattttaagatagcatatgaaataccatgagattaagctagaacaatgagaataaacaattcttctctttttttcttaaaataaagaatgtgtctctcagtatttatctgtcactgtacagagtttagtgactgagtatatacgctgccaaattggcaaggatgcttcctgtccataaaggatcagatgaagttgcttttctttattgccaatgaaattacattgcaatatatataag

SEQ ID NO: 36582 - DNA, 304 bp, Mus musculus
  source 1..304: mol_type = other DNA
agaagagtctaggatatccatgtagggcagaggtactctgtctatatccacaccgctcttatctgcattaatctggcttgacactgatgcctggtaaggttccagtagaatattctaaattattttctctacaaacatgcatcaaagattttccataagagtacaaaatcttcaacatctggtctacattttcatattccataacaaaccctagaggtggtagaagatttcttttactacaataaactatctgcagataaacattttcacaaaacagataatggcttgttttctaagagcctgc

SEQ ID NO: 36583 - DNA, 475 bp, Mus musculus
  source 1..475: mol_type = other DNA
atgtttattgcctctcaaaagtccagacactttggctatagttacacaaaacatagttgtcctgtttccaagacagaaaattctaggatgttggagatgggagttctctctctcttttacatttgaaaataattaagtgaaaaagattgagagtcggtctgtcttattagagtaaaacgtaacattagctaaggatctattaatttcaaaatcagcttattaaataactgagagtggtaagaataagcatatggatgcttaaatatgataatttgttaaagactagctataatatattcttaaaaacacaaaaggccttgattacttctgtttgacaaaggtcaaacatttgatttgagtctaatatagagagctcatatttaaacaacaaccatgtgcgtctttccagtgtgcagttcaaacctgaagctgtgatgactgcagctcacctgctctggggttattttaagaaagc

SEQ ID NO: 36584 - DNA, 582 bp, Mus musculus
  source 1..582: mol_type = other DNA
caatcagcaaaaaatgatttttctatttattttaaacataaaattgtgtaaaatgctatgatctctaaatgtaaatttaagttggattaggcaacttatgcattggatctattcatctttttcagataataaaaatagcaagtgtttacagaacctaaaataaattttctatgcttaaaaattaaaactgtcactagctacagaaaaacatgtaatccccatcttatctatttcagtgactcaaatgggtgtgcatactttctttaagtaaagttatacctctaggaatggaatataaaattaaggttaattaacaatgtcttttattgatttttttccaaataaaacaactcatactgtttatgtcagatataatacataaatctagccataatatatcacaaataaaaatttaacttgtaacacttgggctgtttataaaaggtgttttctcaaaatcttctggaatgggacttgagaatgaaatattataaatatcccccacataataatgatgtgtagctacatgtttttagtaaacattatcaatacttactaggaatcagagagtaatttaagaag

SEQ ID NO: 36585 - DNA, 485 bp, Mus musculus
  source 1..485: mol_type = other DNA
ttctatttgattccataggagtctgcgactcaaagtggaagccaaggcaggaatttcaaagccagcttagcctgggcttcaagctcgattaaaacaaaaaactgggaattttcttttttttgggggtatgaaataaaatttgaagtagctggtttaacaaccggtgggaagactattgtctcctctagtttgcgcctctctctccggtgacccgcgaagttggcggttacacacagcacctggccagcagggtccagccgggtagcagaggaccaggccaggctcactctgggccccgtgatccggagggatcggcgctccggagcccagcggaaggtgcgcggaggacgagcaggacgctgccccctaggggcgccgagccgcggcggggggcggcgagcgaggcggggcggaggccggaggcggtgctgggcaggccgcgccgtcggggcggggcggtcctcagctggccgggccccggcggg

SEQ ID NO: 36586 - DNA, 339 bp, Mus musculus
  source 1..339: mol_type = other DNA
ggtgcttgatcaatgttgaagaacacaacaatgaataatcattaaatgttgcaacgcggctgacagcctcacagttttccagaacgtctagaaaagcgaagctattccagtagaaggagcagagactcgccgcgcggggcccggaaacgcggcgcctacggcgagtcccggctagcgtggcccagtgggcgccctgccgacgcgtgggaacgtagatgccccgcgccctctgtcggccgcgggctgtctcgcggcgtccctggcgggattccggcttcacgccggaagtcagactggtttttaaaaagacacgtaggcgcgcgcgctgcgcggagagca

SEQ ID NO: 36587 - DNA, 698 bp, Mus musculus
  source 1..698: mol_type = other DNA
tcgccgggcctcggtgacccgcagacctcagccccttaccggcgggaaagccccgccccgagggcggagcctgggcggggccgctcgctcacctccgcctccgagcctcgtctcagccccgggtgcgcgcggcgcatgtgcccggtgccccctcccccgagcggccacctccaggccccgcgccgcctccggagccgatggccgggacgcgctgggtgctaggcgcgttgctccggggctgcggctgcaactgcagcagctgccggcggaccggcgccgcctgcctgcctttctactccgccgccggcaccttcccgtcgggcgtctctggccgccgccgcctgctgctactcctcggggccgccgcggccgccgcttcgcagacgcggggcctgcagctcgggcctgcggccgccgggaggctggcgggtcccatccctgcccgtccctccgccgccgcggccgccgccgcgtcctactcggccctgcgcgccccgctgtttccgcgatcgctggcagccgccgcgggcccggcgcggggttacagtcaggtacgtggcgccgcgcgcgggaccctcggcggccgcgcgcccgcgtcggtctgtccgcgagcgccccgcgtgcgcgcccggggatccgcggcacgcaccgcacccccgcctcacgggaacaagggacgctctcacggccccggctct

SEQ ID NO: 36588 - DNA, 319 bp, Mus musculus
  source 1..319: mol_type = other DNA
tgaggtatttaatttctttactggctgaatcatctcaggagccatcaaaccagcgtccctgcctcagggaataagcgttacaagcagaaaaactttttttttttttttttaagagccagcaggcctctgtatccatgagacccaggcgtcctggaacggaggtccacttccccgctgggctccgaaccccccaggtcacgtgctcgggcaagctctcagctggactgtgcgggcgccagagctcgctctcgcgagacttcggcgcgggagcgcggggctgcgaggaggacgcggcgggcggtgcttcctcggccgctct

SEQ ID NO: 36589 - DNA, 512 bp, Mus musculus
  source 1..512: mol_type = other DNA
cagggccaggggatccgatgcccttgtctgtatattaatacattaaactaataataaaaaagtccgtattgttttaagatgaataccataggatgactgccattacatagttaacttaaaaaaaaaagttttctttacttctggaagttgaacaagaattgaatttcaaaaactttgaaatatgttaagattttccacgatagagagccctatattggtctcctcacccccacgaggaggttggggtgcatgtatttatttgcaaatctctacaccttcacttgtgactatattgtctaaggaaggctttattttatataatatatgataaatattatatacatatctcacatatactataatcgccgggcctcggtgacccgcagacctcagccccttaccggcgggaaagccccgccccgagggcggagcctgggcggggccgctcgctcacctccgcctccgagcctcgtctcagccccgggtgcgcgcggcgcatgtgcccggtgccc

SEQ ID NO: 36590 - DNA, 435 bp, Mus musculus
  source 1..435: mol_type = other DNA
aagcatctctgatgctggctacaagagatactgacctataggatatcactaggtatcattttattgttcagttattgtagcagaacagtatgtcagatatgtgttacatctcacatattttaggtcaaatagttacacgctaaaaaaaaaataagttcctttgtttttgtagataatctttttaccaggtctataagtacatctctatgtataaacatgtgtatatgactttaaacattaattacatgttaggccatggacatgcaatgttaagtcatagccatgctgcagaaacatacctagtgttaggtaactttataaacagcacggtgtagcatgcaaattaaaggtctcacttctggtcccagactttaaaactatcctgtatggtggaactagttcttacttcttcccggaaaaatgagctcattgcgc

SEQ ID NO: 36591 - DNA, 391 bp, Mus musculus
  source 1..391: mol_type = other DNA
ttttaggtcgttacacgctaaaaaaaaaataagttcctttgtttttgtagataatctttttaccaggtctataagtacatctctatgtataaacatgtgtatatgactttaaacattaattacatgttaggccatggacatgcaatgttaagtcatagccatgctgcagaaacatacctagtgttaggtaactttataaacagcacggtgtagcatgcaaattaaaggtctcacttctggtcccagactttaaaactatcctgtatggtggaactagttcttacttcttcccggaaaaatgagctcattgcgcgctcgcgcacggtcagtcgccctgcgctcctgggacgcccggcccgcccggaggaaccacgccgcgcgccaaagtcaa

SEQ ID NO: 36592 - DNA, 274 bp, Mus musculus
  source 1..274: mol_type = other DNA
aaggccagtgcttgaagcacttctggcagacctcatattgcacagagcagctgtccccagagaaagttctttgttaccagaagcaattgagcagtccaggatttctttctgtttccactataaatagagttcatgggattctgtcttctgaggtcttatttagcatatgaaattgcagagtagatcctgcgcgcacacagcgcgcagagggaccggctggctgcaagctaggctcccactgtgcattagcctaacgccggtgtttaaagagcta

SEQ ID NO: 36593 - DNA, 693 bp, Mus musculus
  source 1..693: mol_type = other DNA
aattagtttcatcagcatagtaaatatgaaagatcattttgcaaatgtaagggtgtttccttaattcagacagacattctttgtcaaaaaagatgacggcaggcaacttcaggttcttcccatgtggggggacggcaaggcgagactgcggggtcgggggccagatgccccctccagccccgggagggcgcagcgtgctgagcccccggcgagggcggcgcagccagaggcccctcccctcctccgaagctcgggcggctgacgcggagcggcggccgggagccgagggggccgggcgggcgcgagcgagggcagggcagggggccggccgtggccactcgccgctttaaatatggatcgcgggctcgcgctcgccgcacagcttcggccgcctagcccatccccgagcccggcctcggctgcagcgtcggttcccggcagccacacagagagccgggcgcacacggcgggaggcagagtagagcggagccgccccgccgccgccgtcccctccccgaggccagcacctctgctccgcgtcgccgatccctccccgcggggccgaccctcccgcggccaccctcgccccccacccggcgccaaagttgcgaccgctgccccgcgcgctctgcgaccggccgcgccaacttcccagcccacgccgcccgggtccccgcgctcccccgcctccca

SEQ ID NO: 36594 - DNA, 478 bp, Mus musculus
  source 1..478: mol_type = other DNA
taaatctatattattcagaaataaaactgtggttcctgaacctgaggacccaatgtcagtgtaagatcaatatctgacggaagactctcttttctaagatagagataaaaggtccctgtgaattttttagttatgctattataaaatatgtcaaacacatgtgtggtgggtactcacatgctcatgtgcaatcaagagctattctaaacatatactcaatagtgcaaaggcatgatgtcaccacaattacctaatgacattaaattcatggagttagagaattgcaataaattaactggcttcttttactcataacttaaaatatctaatctgtgatattttaaaataatgcttatttgtgttagatttaaagatagacatatcttttcctccatatagaatagggaagtgtacccctactggtacattaaggcagtggttgatgactgggcagagattaataattgatgagtttcta

SEQ ID NO: 36595 - DNA, 579 bp, Mus musculus
  source 1..579: mol_type = other DNA
aagtttcgaaaatcccacctcaatgtgagcctcattatcttgggtgagggtggtcctccaggataggagaactccctcctccaggccaccctggtctaccccagggaggtaggtctgggattccagcaactcccaggtcgctgtcttccccgctttcccgggcccatacaagcctgggaggggacgagtggggaaaatcccccacgtccttgggtccttgaggaggtgatttcatccagcccaggtctggtgagcggaccctccccctccctcctccagtcgggctgggaggcgcgcctgggaccctccccgcccctcgtcccatcacggagaccaaggggatgcggggtccaggcggcgctttcgcagcccctgggacggtgcgagttctgaccctacgccggggggcgcgggccccgggtgacgtgggcgcgcggcgggaggggccgtccggaggagggagggggtgacacggtcgcctttttagcgcccggcgggtcgcgggcagagagcagacgcccggggcccgcaagcaaccggagcgggcgagcggcccactcctccctcctcctaggcggt

SEQ ID NO: 36596 - DNA, 385 bp, Mus musculus
  source 1..385: mol_type = other DNA
tttcagaaaatacgctatctgacagctttggtaggtgttcaatgacagtgtccacagtttggctttaccaaacatgggagaggtttctaaaaactcaattccatttattttctgttgacaggaacacgaatgtgaaaaacacacagttgttaaaagccctgtgcattccatttgatggaattcattttgtaaaatgaaaaatagtatttttccaggctggcctcggcatttctgcattctgtttataaaggaatacagaatgctttaggtcttattaccacaatttccttgagtggaaactgaaactcaacagcaaggaagagagcctcaagcggctcattgccgcgtggcgcgggtcaggcgtggcctcgggttcgcgcatgcg

SEQ ID NO: 36597 - DNA, 476 bp, Mus musculus
  source 1..476: mol_type = other DNA
attccactaattttaggtagaattaaagttttaattagctgtaactcaaacaagtatcagtacagatatttatggatatgtggaaactataccatattgttccctcaataaagggcattataaattttgtgaacttcttattggcaagtatgtcatgagcatatattctgcaatgtcactgtgttaaaaagtcaaatgcaatacaaactgttctgtgtcagacagttgcaattttagttacatgatagctacctgtcagttttccagaaaaattttggcttttgaactttaaaatttttaaaagacttatctgtctctgtgagatatttaaggtgctgaatgagtgttcagagttagtaactttttaaaaggaaagcacattgaatatataaatgtttaatttgacagaagttctctgtaatacaatttgtcctgaatgtaagaagctgtcttccatttccaggggagctcatatt

SEQ ID NO: 36598 - DNA, 650 bp, Mus musculus
  source 1..650: mol_type = other DNA
attgtgtgagttaatagacacaaagacatttcagtggcatatagtaaacccactgtacttaactagtgtaagttactgtcacatagttggcttattatgagggcaaaataacatgtttctgttgttttttaaatcacaagacgaaactcatgtgtcacagtaaaggtgtctcttatagccagatgctttacaatatttatattaatagggaagctacattgttgtgattaatgaagttaaaggcattaccagaaaaaagaatatacactgcagtatttagtagatgttaattttgtactaacaggattttgcaaacagatgagtttataggaaagcagtttactatttaaaaagtctgcattaagataattcttacactctttatagttaggtatatggtatactatatagtctatttgcttgaaattcctaacttagcatgttaatctcagtgtaagactttacaaaggataaattgctgtgtaacccttaaaaataaaaacacatacatattcttgtaggaaaattgggattttataatttgcaatggtaaaatgtgagctttttacctatgaaaatgatttgacagaagtttgtggcgaacagctacgctgctttaggcatggaatagaacattccatttcctgttc

SEQ ID NO: 36599 - DNA, 563 bp, Mus musculus
  source 1..563: mol_type = other DNA
agtgtacaaaggtgtacaaaatagtcagattaggaagcctagggactcaaactcggagggaaacagttttcccaggaggtccggggcgaggccccacctcccggatctgaggggccaggcctcgcgctcgcccagcttcccccgcggctcgcccccgagcccggtccctgcgcccacgcacgcacgctcgatcgctcgctcgctcgcgggggagcccactccccggccctggagtctgcacttgggagaggcaggcagggctccgcgctcgcgcggccgccgcggcgccggctgatggcgtcacccgcgcttccgcctgcggctgcgttctaatacgaaagacaagccacccaggcgctcgttcgcccgcccgcttgctcgctcgctcgttcattcgctcgcccgcccgcccgcccgcggtccctgcttgcggtccccgggctccccagaggaagccactccaggcgcactcccccggcggctccttccggacgcctgctcggctttcccgggcacggcgttcgcggcccttagtatcgcgagacgaggtgagagctggcgga

SEQ ID NO: 36600 - DNA, 396 bp, Mus musculus
  source 1..396: mol_type = other DNA
aagacatagatttctttcattgtataaccagatataaagaagaatgcttctagtccctgtatatttagactgactcataagtgagataactggtctgctactaattaacgatggcaaagaccatcatcactgtcattggagtgcctgttaaagaggttcatgttagatgaaatagacactgtgtgctttatggaagattctaactttaaaaagactgtacataaaagcatatttgggatgaacaacctatgcaattcagttcttagcttttaaatgtggcatgcttccatgccaaattaagctcttatgtaaaatttgctgttttacataactttaatgaatggacaaagtgtcaaacaactttttggcaaagatggtgatctacagttattggtt

SEQ ID NO: 36601 - DNA, 585 bp, Mus musculus
  source 1..585: mol_type = other DNA
taaaagaaatgtttaaagaatgaatttaaaaaaataaatgtctggatctagacacacagactctgacacgccaacgtctgagttctaggggaagttttaaaagttttccatcaactctaatgtgtagagaaatggaaactatcatagactctacggcatgttgctgttagcatcatcatcttagggcttgagaggatgttgcagctgacccatgcacctgtgacattattctttggcacatataagttttctatgttaaaccagatgcgatacactaaataaaataaaatatacttaataataactggataatcaagaaatatatccactaatgaatagcctgaactactgaaacaatttgttcagtgcctagcatattgcattttattatttctttcaaaaagaatgtatttggagttacatagtaagtcgagatgaatgaattattcttcaggggaaataatctatttgaacagtttagatggtgaagaacatttgcagcatttgcaagatttttttccacttggcaaattgcctaacttcaacgtaaggaaatagagttactagttaacaggcatcccttaa

SEQ ID NO: 36602 - DNA, 453 bp, Mus musculus
  source 1..453: mol_type = other DNA
ttcaagggattggttcaattggcattaatattttaagattatcaaccgtcactaaaaacttcttttctaaaagctttgggtatatgagcacttattttttctacatatttccagaattctacagacttagaaaacttattttaattttctttgattacaagtgaaagtactattttgcatgtgtgtaaacctgcacatacgtgtattggaagccagaggacaacttctagctccaggctggcctgagagtcacagggaactgcctggctgtcacagctttgtctcaggccccagaaacttaacttaatgtgatttttttttcctcagtgaaacacagcataatttttcccctagttaataattacctagaaatttgaaaaaaaaaagcctatgtatttcagaaatagattaactaagttactttttaacaaatgttaggtcaaagaatactat

SEQ ID NO: 36603 - DNA, 296 bp, Mus musculus
  source 1..296: mol_type = other DNA
agaagcagagctgtaaacactgcaggtcctgttctttaacgtggccaagctagtacaagtgagtcagatcacatgagccctgatgttgcaagctgcctggaaggttctggcacacccacttaacttttgcagagagcagggtacctgctggccgcaaggacagacactgaggcactgggcgtggctcaggttgctggggctgcgaaactctgcctggagcagcactgtggggccaggcctgcctcggctcggagcaggtgagtgatcaggtgagtgacaaggacgccttgtcaccc

SEQ ID NO: 36604 - DNA, 463 bp, Mus musculus
  source 1..463: mol_type = other DNA
gggcttccagtaagcagcttttattttgaaggccattcatgcagctggtttaagtggaagtcaaaacactttcatagtttcttggctttcaaagctgcacacaaggagagggcaaggtttctttctttctttcaagtccgggattacatttcctgaataaaaacagtcttcgttttaaaaacacacatttcaaatgtatttttgtttatgagccaaaagacgacggacgtggggttccctagacctgggaaccctggacctcttaaagacctgtggaaggttttctaaagtcaaaactccttcctttggctccagtcttcctacaaggaaaagaagagctctgtcctgccttaactagccctgacctaggagagggaaaggtcctctaaaggagtctgacccagagcagcagccttctgttcccggggtcttcaagctccagtttcctgcctgaaggaagaga

SEQ ID NO: 36605 - DNA, 498 bp, Mus musculus
  source 1..498: mol_type = other DNA
tgggaagcttgtgaataatgttaaaaattctttccatttccctcgtacagttaatgtgtgtctccataaatatatacatataaatgcatctacaatagaaatgcttttacttggcaatggtagctacagatggctaccatgcatatttaattttcatatgcctagagtgtatgaatatttcattaaaaataaaagagacaacaaataagttgatcttgatatttttgtacactcatacagtagaaacaagtaatttcttacataaagaaatttttatttacatatttggataaaatcaaaagaaggtaatttgaatccttcatattaagtgactcaatatttttggtgggagtagagaagctcctcctcaaagaccacagttggtcacacagaatgcagtgatctgacctaggtctgacctctctatgcatctgtatgaatcagagccagagaactggtagctaactctgcaggatttttaacctgtctggttgaggg

SEQ ID NO: 36606 - DNA, 370 bp, Mus musculus
  source 1..370: mol_type = other DNA
gtttgcagtagccattgtagtctatgctgagtattcagaaatgtatgtaattatcaccatatacggcataaattaataaagagatctccaactgttccagaaaactcttttatctagtctttaccaggatagagctgagtagagaaaaaagattttaccaaaggaatgcattcactactgacagcagaccctgcttcctgcagtagcttggactgcagtcagaagagcctccagaatttcatgcaagaggctcgggagaacattaactttcatctttttagtggcagaaaataaatttcttcgtggtgtgtgttcttctcagaaagtgatatcaatgacagctggcctgggtttccggactgggcaggca

SEQ ID NO: 36607 - DNA, 341 bp, Mus musculus
  source 1..341: mol_type = other DNA
cacctcacccttgaccaaggttcttgtttggtggtgttctctgagcagcagtcacaatcactgaggttatggccttgacatgaaaaggcagttactaatagcttttgtgattttatttttctttcatggaaggaattatggcatagaggcaggatctctctctctctctctctctctctctctgtgtgtgtgtgtgtgtgtgtgtgtgtttgtgtgaaaatgtcaaaatacaacaaatcaaacaaattattaggtgtctaagtttctagctttgaaagacagggacctggagctgcggggggaatttccccagcccgggctcgggctcttccaaaaggggt

SEQ ID NO: 36608 - DNA, 430 bp, Mus musculus
  source 1..430: mol_type = other DNA
gattcataacagtagcaacattacagttgtaaggtagcactgaaaatatttctaaaatacctggaacatttctgtcccttgtaataccagaaaagggacaaccttattcttaaaagtcacaacattgctgccattttagttgctgtgtgtgctaaaacaaggaacagtttattttagataattaagatcagttatctgcttaaatctcatagtcttttgctacttaattaatcttaaaacccaaggagctataacatgatttcaccacagtaaaattctattaagtacaagagccaaaagcaaatatttgctctaggaaagtatgttagttcccttctttgcccaaagcagggttttgttaaaattatgttcgacaacaacaagggcccggcaagcatgccacttttccttcttcagtggggagagtagc

SEQ ID NO: 36609 - DNA, 403 bp, Mus musculus
  source 1..403: mol_type = other DNA
atagctagttctaggtaaccctgagtagtaattaataataataataataataataataataataataataatattcaaagactcagttttacaatacagaatgaaaatagttgtacaagtagactaatagttatataaaggcagggtagggatgcttcaggaaccacaccgggagttcggactttcgggaagttcccaagcgatgtctttttaaagaatgcgttaatctgccatacaccaagtggaatcctaggtggcgtggcgcccacgtgcacataacgcgtgtgacccatgggactttggggcaaaaagcaaaaatcccagagtcggttgcagggaaacaccctgtactccgggaatttccctggcccggagctctggagtttcgagcataaaaggggct

SEQ ID NO: 36610 - DNA, 509 bp, Mus musculus
  source 1..509: mol_type = other DNA
attgaaatctggcatctaaatatttcacagatacaggtacaggcgctacctcctctaggtgtcagcactgacctgtccccaggagagcccttgcctcctgcagctggagacctgatgtggtgctcaccagcacactggaagagcggaagttccagaatttcacagaggaatgagattacaacactttgtcctaggttaaacatgaattaagctttgggtagaaggaatgtgatttactcgtgctcagtacaccgcaggcggtgtacttacgcagacgtaaataaatcttcatctagtactatctatgagtatgtaactcagtcctaatgactaaatccactgatgacatagctcagtaaccactgtcctctagcaggtggtcacttcagcgcagacatcagctcacgcgcgcgtgtccccaacccactcagcttaggggcggggctctgtgcttcctgatgaggggaccctgagctcagggaatttccctggtccccgggctttggagc

SEQ ID NO: 36611 - DNA, 475 bp, Mus musculus
  source 1..475: mol_type = other DNA
ggaggggacccgattcccgcccacccctgagcaagcaggtttcaggctgtatatttggggtacaagttcacaacaagtatttcccccacagcagaaatttaaattttttttatacactatgataaagtgttacataaaaagtctcgatgccaagattttctgttttctttctgtgattaaatgccttctaccagacagattttttcacagaacaagctctctaacatcttaaggttccacaaactctaggatcttctggaagtgtcaaggatgctgaagactgatagaaatcccaaggacatcttttctttttcaatgcatcttaaggtcacgagaccagggactagagctgggcctggggcacaagggggccttgctgcctgcaagaacggccgaggacctcccgtggcgacagcgtgcacgggttggagccaagtcgcccgccaccccgcggccaccagcggtgccgcctctg

SEQ ID NO: 36612 - DNA, 269 bp, Mus musculus
  source 1..269: mol_type = other DNA
ttcccgggcctcgagaggccaatttgtctgacaaactagtgcgaggtttgcaaaattagagctctggagccagtgacatgcttcaagtatgttcccaggagattccggcctgagttggcaactcacctcctcggggcttgagtccgaagacaagcattcctgaaaccctcctctcaggtgttcctgagagggaggatgacatctggccagtcctccgctggccaccactcctccccccggggggtggcattaggaaacccaaaggtcgc

SEQ ID NO: 36613 - DNA, 640 bp, Mus musculus
  source 1..640: mol_type = other DNA
attcatattcaaagttatttagggcagttaaaatttacaagtaacccctacagtttaaacaaaaaggcataggcataattacatatttgggcttttgtaatctcattttaatcattactgggccaacagtaaaaataaaaccttgagtttgtatgctagctgctcattagatttagccaaactagaggctacctcaatgaaaaatttgtaatggctattaccaccatacataggttcaatattattaatatattgattctctgcattagcagttcatctgatttctttataaggcattaaatgccagaatgacataaaggttaatgttatagtattagaagtaattttatttaattaataaactttatcacacatccaactaattaacaaaaataaaaatgaaataagaaacatgtttttttaaaccaaaattgtgttcttatttataaccatatgaacaaagtatttttaaaatatgcttaggacctttttcgagactttcacagaccctaccagattatcttgtctcacagcagcagggcattttttaattttaagaacgtgtttgatcacatctctagataacctaggtatcctaaaggtgcgagtgcccgcaggcttcatgctgctgccaggagca

SEQ ID NO: 36614 - DNA, 138 bp, Mus musculus
  source 1..138: mol_type = other DNA
ggctggaaatgagggcctgggcagatttcagtgacaaactaatttgaatcaaatctacataatgtgtgtttgagttaattcccgcctccacccagggctggtccgtgacgtcacgggcggtggctccagcggagcagc

SEQ ID NO: 36615 - DNA, 412 bp, Mus musculus
  source 1..412: mol_type = other DNA
aacccttttataataatggataaataaaatagaaatgaagttcttttatttatctatttactcagatgatttgttactaagtttcgggccaggctgaccctgcatgtgccaccacatccagctgatacatgaaatttcaaaaggacgttttggcaagctaaagctaattaataactgactagggcactgaaaactgaagtattaactttaagaattctatagacaacaatgactcttgatcagaattcgctccttaggccagaaggagacttctagactgagggcttcatgggccacatccttgttttgtcccacagggggaaagaaatggggagtgggagagctggccccgtggccctctgagcggtgggagcagcgtgcaggctaccagcaccaagcaggataaatagga

SEQ ID NO: 36616 - DNA, 599 bp, Mus musculus
  source 1..599: mol_type = other DNA
ctttataaggcctgggcaagcacttaaacttaaagttacttcctacccagaatacttgcatacgtatgtgaatgtacattgtccaacacatagcctattgccatttctcagaaattattgttatctgttattattgtttattagcactaattattattacataaaacttattttattattattattacattgttttcataggcctgatgtacaaacaattcttacaaactatatgaacatgacacattccttaatttctaatgcctttgatttcttacctgggaaatagtaaggagcatagtaactaatcagacggctggttcagttatctggggatcatatatatcacctgatagtggtatttcttctggctaggataatgtacacagaaggctgtttgcagaaatgaagggaaaaggtcttcatcccatacttggaagacctcgaggtcgcctctctccaggacagtgcaaagctccctgagctgtggagctcccgctgtccagcagaggccgctctgggccgggactcctgggacctgtgcgccaggagagagaaggccagggggtggccctgtcctcgcaggaggggccctgggc

SEQ ID NO: 36617 - DNA, 440 bp, Mus musculus
  source 1..440: mol_type = other DNA
tggtttaaagtagagactctctggtgagttccttctgcctctgcttcacaaatagctggaagtatgcatctcctggagctacaggcctttaccacagacttgtatattttatatgcaagctctttaaaaagtagcttgctccaaattacagggaggcgacttctgaagactgaagccaaggccttcagcattataaactcaattctaaggctgagttataaccccagctcaaatctcaggctttctcaaatattaaaactgcttcttaaaaaaaaaaatcaggtaagtcttaactgtgtgagagtcatttttaaaaactctagatgactagttctcctggacaggtctgggcatattcctagacaaaagtacagaaattatatttgcatcatacgcacttgacagaaatgccaaggccctttcaaccgcaaatgacggat

SEQ ID NO: 36618 - DNA, 442 bp, Mus musculus
  source 1..442: mol_type = other DNA
atccgtcatttgcggttgaaagggccttggcatttctgtcaagtgcgtatgatgcaaatataatttctgtacttttgtctaggaatatgcccagacctgtccaggagaactagtcatctagagtttttaaaaatgactctcacacagttaagacttacctgatttttttttttaagaagcagttttaatatttgagaaagcctgagatttgagctggggttataactcagccttagaattgagtttataatgctgaaggccttggcttcagtcttcagaagtcgcctccctgtaatttggagcaagctactttttaaagagcttgcatataaaatatacaagtctgtggtaaaggcctgtagctccaggagatgcatacttccagctatttgtgaagcagaggcagaaggaactcaccagagagtctctactttaaaccata

SEQ ID NO: 36619 - DNA, 532 bp, Mus musculus
  source 1..532: mol_type = other DNA
gggaggcgacttctgaagactgaagccaaggccttcagcattataaactcaattctaaggctgagttataaccccagctcaaatctcaggctttctcaaatattaaaactgcttcttaaaaaaaaaaatcaggtaagtcttaactgtgtgagagtcatttttaaaaactctagatgactagttctcctggacaggtctgggcatattcctagacaaaagtacagaaattatatttgcatcatacgcacttgacagaaatgccaaggccctttcaaccgcaaatgacggatctttacaaacaagaacttggcttgcagctcgcctgtatcctgacaagcagctcggtctgaagcttctgcccaatcgaggaggtaccctctaaagtcgtcaccttgaggagacaagctctgtcatagtgctcgcagccccgcggcccctgcgccaggttgcggacgccatcttcccgcgccgagcagagtcggtcggacacccgctcctcctcggagcagcggccaccagagtcaggaagggg

SEQ ID NO: 36620 - DNA, 265 bp, Mus musculus
  source 1..265: mol_type = other DNA
gcacttgaaacttgcacattataaagggaccattgtcagttcaaatttaacaaggttattttaaaaagactgggaacaaaagcttgtaactgcagactctggtagaatcatttttagtaaaaagttaaaagtatctggcaaagtcttacacatgaaatgtcagtccttttagcaactcctaacacaactgataaaaagtcttagatcacacaggactgtccttccagtgtggaagttgctcagccgccggcactcggacctgcgc

SEQ ID NO: 36621 - DNA, 363 bp, Mus musculus
  source 1..363: mol_type = other DNA
cctcttccctcatgatttgctccaggatctaataggctcatgcatttgaatgcttgaggccaaaaagtggctctcgaccccgtgggttatgacccctttaggggataaaagaccctttcatgggggtcgaatatcagatatcctgcatatcagatatttccattaggtcacaatagtggcaaaattatcatagtgtttttgtcatagcaatagaaaagaaaccatggcttccttcagtccagagtgaaggagctggcattaccagaagcttcaggttgacgaagactgtctgcccaccacaggttgtggttgcaaattgcctgactcaggctgctgccaactcactcactctcctttaaagca

SEQ ID NO: 36622 - DNA, 540 bp, Mus musculus
  source 1..540: mol_type = other DNA
attataaaacaattgctcttacaccttactatgcaagatgttatcaaggatactttcctggatcgagctattaaaaaaaaaaacatatttagttgagtacaaattgtgtggctataggtgaatacaagtaaaactatttggccttacaatctcagtcccttaataaggagggataaagcatttccctcttcaagctgaaggcaagctttaagctccagcttgcgctttcctgtcaggtctgtcaacagatctcttccggtccaccgcccggaaccgaaaggaagcgaggaatcgcggctgggcggaacctccccgggtggggcccgcgccccgcagcgccccgccgcgccgcgggcgggcaagctgggaaatcagtcccagcgaaccgtcaccttggctctcctcgtggccactggggcaacctgcggtcccctgagagcagaggtctcctggcgccggcagaatgaggcctcagggaggctccgccgtaggcggggcgggaccaggcgggtgagagccgccccttgcagctagggtggc

SEQ ID NO: 36623 - DNA, 463 bp, Mus musculus
  source 1..463: mol_type = other DNA
ctccagttccagggggtcttgacgccctcttttacctctgtgggcaccaagcacgctcacagtgcacatcataaatatttttctatttaaacctcatggggtttgttacaatctagagtaaagcgatgggaattatctaggttcgggaactcgattattataaaacaattgctcttacaccttactatgcaagatgttatcaaggatactttcctggatcgagctattaaaaaaaaaaacatatttagttgagtacaaattgtgtggctataggtgaatacaagtaaaactatttggccttacaatctcagtcccttaataaggagggataaagcatttccctcttcaagctgaaggcaagctttaagctccagcttgcgctttcctgtcaggtctgtcaacagatctcttccggtccaccgcccggaaccgaaaggaagcgaggaatcgcggctgggcggaa

SEQ ID NO: 36624 - DNA, 433 bp, Mus musculus
  source 1..433: mol_type = other DNA
tcaatagtatccttccattgaatcataaactagaaaacacctaaatcattttcctggtttttgcattataaagtatgaaaaagtgctttaaattttaatgatcaaagatgtagtggtctaactgagaccactgagtcacatgtgctagtttaagcctgcttgagcaccctcatgattcatggctgagtgacaagttcctcaacttaaggggtggctcattaggatcccctctgagagctgtgtcagagagctttctgaaacaccaccacctttaaactgtattgttttttgtttcaccacttcagtgtagtataaaatccaaaatgagacttcttgtttgtttgtttaccctggctgaccaggctggccccaaactcagagatctgcctgcctaggcatatgccatgtgccaaattcagatttctcagctttt

SEQ ID NO: 36625 - DNA, 393 bp, Mus musculus
  source 1..393: mol_type = other DNA
ctgagactttggaaatatgacattctgcttgctaaaaccattgaaaacgtagaaattaagaattaattttaaaaaggggggcattatgctaccaaaatgacacaatggaacaatttatttccaacctcttattagagagtggaatgaggggtctctagcaccccctttaccacaaaggaaaatttcactttcgacctagtctaatcagagcctcgggagccgactgggcagggctgcgaccacgtgggtgaccgcggccagcagcagcgtggcctgtggggccgggcaggtgggcgtggcctgcggcccggggctccctcctctccgagccgccacgtaacgccacgtccccgcgcatgcgcaccgcggctggtgtccgcggctgtttccggg

SEQ ID NO: 36626 - DNA, 405 bp, Mus musculus
  source 1..405: mol_type = other DNA
aaaagtatttaatcctgcattttgcttgattgaaattgaaaacattgctattagtggcaaagtaacatttggtctacaaaggcttttttttccccatgaatcaaggttcatgaagcagtgtataactaagtcccagtggcatagatttataaaaaactagctgtttgacattgatgagaaagacttttaaacctccatttcctaaaacaggctaattaactcactgtgcagagttcaaaactgcattttaatgctcccaagagaaaggcagcttccttgtgacgtcaaatcagcgggctctcgccccgactttaggccggttccggttccctggctttccggacgcccgagcgagcgagcgagcgagcgcggcgccgttctgcgcgtgctccgcagtgggacgcg

SEQ ID NO: 36627 - DNA, 507 bp, Mus musculus
  source 1..507: mol_type = other DNA
ccaccaaagagcagtcgggtgttcttacccacaattatcttatacttgttattcaaaaatgtttccaagcatggccattcttaagtttgtatacagcatagattgtctgatgttctgaataaagttaactattgcatgagttagtccacctcatttgatcccgactctagaatcaagacaaaggaagtgactatcctttcaagtctacagagaatggaaggagggatgggacccccccaacacctgaggcaacatgaccatgctgaggttggtgtacatattttatggttgaaatattttacatggtaaaaaaatattttacatatttttggttgaaattctcaaagtaatgcattatagtaattttctagaaacaattattcgtgtgtcatgaataaccacaaagttgtgttaacaggaatgaggtggggaatccatctcatcatatgtaaatagggtcatcagagctcacacacacacacacacacacatatatatatatatgtt

SEQ ID NO: 36628 - DNA, 372 bp, Mus musculus
  source 1..372: mol_type = other DNA
tgctacaaagcagccctgtatcctaacatctggtgttttataaaaaggtgagccaggcacacctggctgttgccaggtaactgtatccatataatattgctgcgttttaaaaagaaagcggaattacaaaattttacatatagtttattatttatatttcctactggatgtaggctgtccctgggaaagacatgatctctcaagcaaacagaaggagcctccctgtgggctgcaggaagcacccttttgtggaacagctccagcatctggcgccctgcagctggtgctcaggctcatcaggctggcttggggaacacgcctcctaatccacaagaagcggggtgggggtggggggtcctccacccccaacga

SEQ ID NO: 36629 - DNA, 431 bp, Mus musculus
  source 1..431: mol_type = other DNA
tattctctaagcaatggatttttttcttctacctttagtacagcctaaaagaaaatgattctcatttctgacaagggtgtgctgtgagcacaggcacctgctgagggcacacatttctcaggagctggagttaactatagatggttgagagccaccgtgtgttgcaaactgatctcaggtttctctcaaattcctatgtaactgaggatgaccttctctgagtatgcgggtctccagacagagtaagcctcgggcttgcttacagttgtatgctgtcatacctgagtcccatattaatcctcatttatttgggccaccataagaatgcatgatcaaatatattgtataaaaattgttttcagtggaaaagaatgttggtgacaaccagtagcggttgtccaccgggtagctcggtcgggcaagcggcgtgt

SEQ ID NO: 36630 - DNA, 279 bp, Mus musculus
  source 1..279: mol_type = other DNA
actgctcttgacttgggtgagctgaatgtgcagtttagctccatcccagcaagaggccactggggtggactagccctggggtccttcagggatggcgccacccacaaagggatgggcccactcccatcgagaggcgcctctctgacggctctagcttgtgttgacacaccggcgctggttgaaacagagtctgaacttttgactgagaaacaatgcttacgagctgcgaagcaggctcctgaccgggtggagcgcaggccccgccttcagtgccagcac

SEQ ID NO: 36631 - DNA, 453 bp, Mus musculus
  source 1..453: mol_type = other DNA
ctaaggtactattatctagtcgtgacatatcaaaggactatatatatatatatatatatatatatatatatatatatatagcaccaatacgtacattcatcctgtcccagaaggcaaattgggcattctctgaggaagcttgatatcacttctcttgctgtcatgctaacttgttttaattccaacagctacaagaatttggaccctttcacaactactctattttaaaaaaaaaaatctttgctgttgaatagcttctttaaagtccttagaaaatgctcgtgaacatgtgctttctgtagcttatgcaactaatctagcaattacactcaacaaattaaacttgtgaggaaacatgtcccacgtgggaagtacatcattgtacaacattaatatagtcattgtataatctattataaactccccgtttatgtgaaatggaagtagatccct

SEQ ID NO: 36632 - DNA, 270 bp, Mus musculus
  source 1..270: mol_type = other DNA
atgtggattttgctctctagaaatttctatctttcccaagcagcaaccaggtcccaggtatctgctgctttttttttaaagtttattccaagtattttataataaagcatatgaagtaaaaagtaaaaaccatggttagaacctgacttagatatcagttctgtgttttatttatgagacatttccagacttattctgcaaggcactgcatctgatttctcaagctttggaaagtgcaagcaatgccctcggtttacaggggacttccct

SEQ ID NO: 36633 - DNA, 408 bp, Mus musculus
  source 1..408: mol_type = other DNA
atttgtcaaaagataatatgcaatgtagtctgccatacctgactgtagtgtttttttaagatttatttatttatttatttattatatgtaagtacactgtagcgtcttcagacactccacttcggaagagcagtcgggtgtttctactatctgacacagtgagatgcctgattactaactgtcaaatttatatttgtaaaatcatttcttggaggcacctataagaaaacttccaggaggctaagtgtccgtaaagctctttgcctcgagactgtgtccaagccgttaggcctgtcatgcagacttcacagtaagaaacctgctgttagtgttccagccgctgctgacctacaggaaaaaaaaaaaaaagaaaaatgatcacttttaaaatatattttttctttcagc

SEQ ID NO: 36634 - DNA, 405 bp, Mus musculus
  source 1..405: mol_type = other DNA
aagaccaagcacgaatgtctgaataggagcttgcttgttgccttgggtagagcatatatatatatatatatatatatatatatatatgtgtgtgtgtgtgtgtgttttcaattgtctgaattctattcaataaaacatcaagctttggcggtaatgacagcctgtgctgggtctagtccttgataggacgtatacaagcatacaactcagtgcaactaagagatgcctttttttaaaaaagaagggaaaagtggaaggtcacctggtatgtataatatatgccttatccatatatgtgtgggaccatcttcctgagttggtgggactctgcccagaatccctacacaatcactaggaaaagccacctgctgagcagctgctgagtgctttcaccttccagtggcg

SEQ ID NO: 36635 - DNA, 333 bp, Mus musculus
  source 1..333: mol_type = other DNA
actttagctgtcttcagacacaagagcagtcagtgctcttaacctctgagccatctctccagcccagggggccaggggtggggggtgtgccctcttgccaaatgactctagctggcatcaaggcgattgggtctggggacacacacatagtagactgccaaaccagcttcagtactgtgctcagcttgtttgtgtgtggcgcagtacctgaaccgcagtcagctggttgagtggtgataaccatcactgttgacagtgtttaacaagtcatctaatagaggacagtccagcatatgaggctcagttggcagggcagaagttgactaatgagcc

SEQ ID NO: 36636 - DNA, 378 bp, Mus musculus
  source 1..378: mol_type = other DNA
ataaacattattaagtgaattaagccagtcacagaaggaaaaaaattcatttatgattcctaggtttaattaaacacataaatcatatgacatggaaaatgaagtaaataggaatatatattcaaaatacaacataaacttgtatcaagatgtcctaatgtaacacagtgccatgtacaataaatatttttaaaaacagaacttctctgtgaacagttttcctccgggaaggaccgctcctcagaggtaagggcagtactcacttctctaaagtggcttcagagagctttgtggtgacgccccacaccacgtgtcctgcctgctccgcttagaccgggaaggaggcggaactatggtacggaccgcctgacggttccc

SEQ ID NO: 36637 - DNA, 404 bp, Mus musculus
  source 1..404: mol_type = other DNA
ctgttactttatcaggacacagagcgcttcagtctgcggaggcaaacgcttagttacattgtacttaaatcttccaaggaactcgggagatcctctggagtaagggaaaccgcgcgtccagccggggttccccatgcttggcccaccgtgggccctcagcagagatctccctggatgaccgcgccgcctgcagggagaggatgcaggcgcaaccccgccgaatcgcaggggccgctgcagggcacatgactgaaggcctccgcccggcccctcgcgcagtcgccagccgtcccatcaccgccgccgcggcttgctggcgagccccaccagcccgcgtcatccctgcacctccctggctgcagcagccggagaaaacgaaagccaggcggccccggcactcgcga

SEQ ID NO: 36638 - DNA, 321 bp, Mus musculus
  source 1..321: mol_type = other DNA
ttagtgactgatgagcctctcagctgttctggtctacatctgagatatgtcagaatctgttactttatcaggacacagagcgcttcagtctgcggaggcaaacgcttagttacattgtacttaaatcttccaaggaactcgggagatcctctggagtaagggaaaccgcgcgtccagccggggttccccatgcttggcccaccgtgggccctcagcagagatctccctggatgaccgcgccgcctgcagggagaggatgcaggcgcaaccccgccgaatcgcaggggccgctgcagggcacatgactgaaggcctccgccc

SEQ ID NO: 36639 - DNA, 359 bp, Mus musculus
  source 1..359: mol_type = other DNA
taccgtaaggataagggacaagctccctgagactgtaagcaagcctccattgaagcttacctctctctctctcttataagtttaagaagaagagaatgggcttgggggaatcacacacacacacccccatacattgggatggctatgcataccaaggcacacatattgtaagagcagtagtattacaggcttgtactgccagcctggcctttcttcttaaacttaaaaataattacattttaatttatttttagtgtgtatacaagttgtagaattttagctgctgagctaattcagtagtccgcgtgtcactcagagcacaaactgtcctgcaggtgctccctgatgcagactaaagt

SEQ ID NO: 36640 - DNA, 308 bp, Mus musculus
  source 1..308: mol_type = other DNA
aaagactccaggtaaaacacccggctctttaccctgagtagtgtgcacatcagcacagcagtgtggtccttccttcacaggatttctgttgtgtgaggaccaatttaagttcatacacaaaacactttgactatatgatgctttgataaagcagctctccccactggaaacgggagagaatttcgaggctagtctagaacctttttttaaaaaaaagagtgtaggggattggagcttcccctaagcggcctcagagctccgggcgcccatctcctggctcggagctggcggcggccgtgctggcggcc

SEQ ID NO: 36641 - DNA, 240 bp, Mus musculus
  source 1..240: mol_type = other DNA
ataaaagtgtttgatatttatagtcaatttatacactgtatatgtgttgtactacttaaccttgatagttaactgatctatacacttctgtacatccaccctaggctacgtagggagtctctacaaacgctatgtatagtcgttataacgcctgcccctctctctgagcgctggtaacagagaggatctgtagtccgggggcgtggtcttacaggctgcctgccccgccccctcacgggc

SEQ ID NO: 36642 - DNA, 333 bp, Mus musculus
  source 1..333: mol_type = other DNA
agaaataatctgaaatcaatctccattctttttcaaggaagttcatgaattgtctgtgaaatttcaatgtcccctacagtaaaggattgccatttcaagggcgtacaatggttagggtgtccgggacagccctgcccacagtgggatgcgaacggtgactgtaaaaagatctttctgtaagaaagtctcgcttgcaaggcggcgccgttggagcagggttgcccgcgggcacggtagaaaccggctctcttgggccagtgagcggacgtccctgacatcagggggcctgctcctgtcagccaggccagcaggcgattggctggtacttagcta

SEQ ID NO: 36643 - DNA, 436 bp, Mus musculus
  source 1..436: mol_type = other DNA
attaggtctacagatgtattgctagagatataaaaataaagccaattttaaactgtacttgttatgataagtttctgaggaaaatcttagcttccattgaaaaaggcttaggggtggggcagcagctggaccccatcacagacaacctgaatgtgtctggttgaagggaaaaaaaaaaaaaaaagatggttattttccttgtaatgtgagctttttaaaaagctgtgaactttttaccaactgagagagcgcctaagcgccctgtgtcttccagccttctagcgctgagcgctggccaatcgcggacggccaatcgcggacgcttcggggattacctggtggcggcgcgccgcgagcgcgggcccttgcgcggccccggcccggaggcgtggcggtgctgcaccagcgggacggagccgcgcgccggggactcgcg

SEQ ID NO: 36644 - DNA, 318 bp, Mus musculus
  source 1..318: mol_type = other DNA
ctccagcaccgcagtgccatgatgataatacaatagttcttggcaaagaccaaggcctgtcaaccatgtgtcttggccacagttttgggcagtgccagggctcatggcctgagcagaaagcaacaggcaatgctcgttagaccttgctagcatgccgtgaatagtcaagtcttggaaattagatacagtgtatcaaaagggcctcctacccatatgctgaccttaggctgtgctgttcaaaagaacaacttccccagcggtattaacagagcttgtgttggctgctgcagacactagtgtaataatccatatataggc

SEQ ID NO: 36645 - DNA, 494 bp, Mus musculus
  source 1..494: mol_type = other DNA
tgcattctcaaagcaaagactttcttctcttcacaaatcttagactaatcaaataccttagctaaggagataattcctctggattttggcttcctaggaaatgattctcagtatcttgttatcgacaaactaaaagagatttggtcggatcccgccggattctgcaattgtgccgcggggagagagggacctagtcgacctccctctgtggcgggcactctgagggacagccagtcgcctacctgcctgacatctcccaggcctcggggtagctgcgcgcccgggagagctgttcccctccggctcacccgcgactgtgaccagcctgactcaccccggacgggtggcgggggttgtggaggcgggctgagcccttcccccagagcccaggaggaggcgtagccacccgggaactttcgctgcggggactcgctgcgacaggccagcgtcgttcaggggcggcccaggagccgccccctgccaccagggttgcg

SEQ ID NO: 36646 - DNA, 397 bp, Mus musculus
  source 1..397: mol_type = other DNA
ccaacgcacgcctccgggccctgggtcatccggtctgctccagtgtgacacggtgggcgagcactcaagtttttttaattaattaattaatttccctgtccccagttttctggaaaagcggtccccagcagctggtttagtctcctttctgatggaaggcccagcagaccggggggcgagagggctcctccgggtggggcgtgcagccccaggtgccggctccgcgcagcgcgtggcagctcggggttgggacctccgcgcctaggcacgcgggggagtgtcgggcagtgtcccggcacaggacgctttcatcttatcagctgaccaggatcacggttcacctgctgcgttgctcggctggggctggggatctctctgcacccccgtcccggggcag

SEQ ID NO: 36647 - DNA, 591 bp, Mus musculus
  source 1..591: mol_type = other DNA
acacggaagtcacagacacgcgcggccgaaatcagtccgcgagggcggggctaggcggccggcgctttgagcggacgcgccagcgggaggcgtttccctcgggcaggggcagagccggcctcaccccgcgcctctccccggcccccgccgccctatggcgagagggcgccccctcctcacccgggcaccagcggcggcggtcggaggagcgggaccggcggcggcggcctcgggcccagggtcatcatggaactagttcgctgagtgacccctcggccgcagccgtgcgtcccgcccgagtacccgcgcccgccggcccggttacggcccggccctggtcccgcgcgccccgctgccgcgcgccgaggatcatgaggtggtaacgggcccccggatgaccccgcgtcaccactgtgaggcctacagctctgccggggaggaggtgagggcgggggcgcggcgcggtcgccgtgcgcgccgctggagtgggagctcgcgggggcgcgcgccgctcccccgaggaccggtcccctcggcgaacctttcctgggcacctcggggaccccctcgccgtctctggcagcgctgcgt

SEQ ID NO: 36648 - DNA, 390 bp, Mus musculus
  source 1..390: mol_type = other DNA
aaaatgaatgttgactaggtatcttttcataagtagaaccattgtaagatttgcaaaatttaccaactggagtaaaaagtactcaagtaaataaaacacatttagttcacattcgttaaggacctagttagtgataaacaggaccctgaaatactagactacataattttgcgtaacaaagaatgtgatcttttaggttgggcgcaggcgctcacccagaaacccttggcgcatgcgcagcacactctcgaacaggcggcgggggttcttccgcgcgcccgaggaaaaagagtccgcgcacctttccttctctttgtgcacacaaaatgcaacacggaagtcacagacacgcgcggccgaaatcagtccgcgagggcggggctaggcggc

SEQ ID NO: 36649 - DNA, 620 bp, Mus musculus
  source 1..620: mol_type = other DNA
gcctggaactggcaccccagtcggtgacgggctgtggctacacgcagcgctgccagagacggcgagggggtccccgaggtgcccaggaaaggttcgccgaggggaccggtcctcgggggagcggcgcgcgcccccgcgagctcccactccagcggcgcgcacggcgaccgcgccgcgcccccgccctcacctcctccccggcagagctgtaggcctcacagtggtgacgcggggtcatccgggggcccgttaccacctcatgatcctcggcgcgcggcagcggggcgcgcgggaccagggccgggccgtaaccgggccggcgggcgcgggtactcgggcgggacgcacggctgcggccgaggggtcactcagcgaactagttccatgatgaccctgggcccgaggccgccgccgccggtcccgctcctccgaccgccgccgctggtgcccgggtgaggagggggcgccctctcgccatagggcggcgggggccggggagaggcgcggggtgaggccggctctgcccctgcccgagggaaacgcctcccgctggcgcgtccgctcaaagcgccggccgcctagccccgccctcgcggactgatttcggccgcgcgtgtctg

SEQ ID NO: 36650 - DNA, 375 bp, Mus musculus
  source 1..375: mol_type = other DNA
attgaaaggtccctcctttgaactttttattatggaaaaaaaatttcaaggctgtgtaaccaactagttgaatttagctttttttctttcctgagtcagatcgattaaaaaaaaattatctcggtaagcatcttcttgactgtttattgcaaaataacgctgttacagaccagaggcgacagcctcgggcctcgcctagactgccggcttttctttccggttccattctgaaatgaggctggaatccagattccactccctatggctccgcaagaactgaggctcggagcagggactctttttctcagatccactgggcgagcgagcgaggatccctccgcgcgcagtcacgcgccccgccccttgggggcgtcg

SEQ ID NO: 36651 - DNA, 565 bp, Mus musculus
  source 1..565: mol_type = other DNA
ttccggttccattctgaaatgaggctggaatccagattccactccctatggctccgcaagaactgaggctcggagcagggactctttttctcagatccactgggcgagcgagcgaggatccctccgcgcgcagtcacgcgccccgccccttgggggcgtcgctcagctccggaggctgcggcggagccgggaggtgcagggcgggcgctgagccccgcagccggggctgtgaggccgggcggcggcgctgaggaggctggtccctgagctcggagacgggtccggacgcccccgccgcgccggtccgtgacgccggggccgacacggtgagtgggcctcccgggtcccccagccgcagctgagggactgacagggggttgacagccccggggcttcgcaccgttactgagcccaagtattaggctactgctcgctgcagcatcccccaagctactgggccgccctgtctcgagttgcggggccgtcaaagctgcagaagctgcgggggtagcttggaggtgggctccgcgacgggctcccggggcggggctccgaagccgcctcc

SEQ ID NO: 36652 - DNA, 537 bp, Mus musculus
  source 1..537: mol_type = other DNA
gcgccccgccccttgggggcgtcctcagctccggaggctgcggcggagccgggaggtgcagggcgggcgctgagccccgcagccggggctgtgaggccgggcggcggcgctgaggaggctggtccctgagctcggagacgggtccggacgcccccgccgcgccggtccgtgacgccggggccgacacggtgagtgggcctcccgggtcccccagccgcagctgagggactgacagggggttgacagccccggggcttcgcaccgttactgagcccaagtattaggctactgctcgctgcagcatcccccaagctactgggccgccctgtctcgagttgcggggccgtcaaagctgcagaagctgcgggggtagcttggaggtgggctccgcgacgggctcccggggcggggctccgaagccgcctccctagggcctagagtctagttagaagatgcggacagtagacagagctgatcagaactagccctggccagtctttaggggaggattcccctgaggctggcggacgtgaccga

SEQ ID NO: 36653 - DNA, 403 bp, Mus musculus
  source 1..403: mol_type = other DNA
cttgcctgagcagccaagggtgaactttgaatgctgggtagctccctaccgctgctgctgcagtttactgacagaacatccacttcagcccttgagctccagtaccttgtatacctttgaattatggtatgtctctgatcaataacagattaaacccttaaatccaaccagatgtgtttattcataacagtaatcctagcaataggaaggattctgaggcagaagaatttctagaattagacttctaaaacaatgaaaaaacaaataaaaaaacttgatgttatatggttaattaacaagtggaatgttcatatttatccatctgatttaaccgatgaaatgattagatctttgatctggaatttgaagggtggagattaaaccaggaaatccaattccagtt

SEQ ID NO: 36654 - DNA, 428 bp, Mus musculus
  source 1..428: mol_type = other DNA
gctcagtcagcttgatgatcttatatgtgaaggagtgtctgacaaatgtataaatatttactcaccgaccctcccttgcaggtgccagggacataatgaaatgatgatcctggtcctgtatttgaacatatggaagaacttggcagtcctttcactatgaaaagtgatcaaagccacgatcactgtggcttaacgtaagcatttttggtatcaattgggtaatggccagtgaccaaaacactcctaaagagtaccttagtggcctggcaggggttcagagggagactgtctccctagccggtttgatctctagcactaaaacagacagtccttgagagttttaatctgcatttttaagaagtgtttggttaaccaaggaagattcataaattttgcaagacgaatttcttcttctgatttgactgaca

SEQ ID NO: 36655 - DNA, 202 bp, Mus musculus
  source 1..202: mol_type = other DNA
gtgagcctttggaaatggccaattactggaggagtttattcttatgaattaattcctgaccatactgctccttaggtctgatcagcacagctgacctcctggcccgctggggacacttcagctttctcaagactttagtcagagaaccaagaaggaatgaataattaattacagagttacgagggcactgaagccaggtcgt

SEQ ID NO: 36656 - DNA, 684 bp, Mus musculus
  source 1..684: mol_type = other DNA
agcgagccaggcgcttggccgtcccgcgcgcacgcgcaactcccgaagcgcggcgcgccggggccccgcccccttcccctcaccccacccctcggcgccggggagtgactgactcccgccagcccctagagcgaaggcatcgaaagctcgcgtctctctctctctctcggccccggcctcggcagcgacccggctcggcatcgacccccgcggcggcggcagcctcagcgccaggaggccaaggccaagggcgggctccgcgaggctttcgcagcggcgtctccggcgaccgcgggccctctcctacgcgccccggtcgccccggtcctgcgcggcgcggcccgcgtcccccctccccgcccccccgccctccgccgcctcggtggttcctcaggcggcccggcccggcccgcccgccccgcgtcccctccggccggtgcctctccccccggcgggctgcctgctcagccccgccgccaccgccgccgccgcctcccccgccgccgcagccccagcagcagccgccccgccgccgccgccgtcgccgccgtccggaccctggcgcgctgaatgcaggtgaggagggggcgcgggcctcgactcccggccctgcgcgctcgccttccggggcccggcctcccgccgccgccgcggcccctcggggtgagcgggcgggcgtggggc

SEQ ID NO: 36657 - DNA, 165 bp, Mus musculus
  source 1..165: mol_type = other DNA
gtttcagtttatgcgtcctctctaggacttgatcagtccttaaaggcatagcccacaatggtctgggagtcgagctgacacaaaactggccattttaggctcaaaacacaaacactgcctctaggtaagtaagccatacttagtataggtacctgtgagcagaga

SEQ ID NO: 36658 - DNA, 202 bp, Mus musculus
  source 1..202: mol_type = other DNA
agcaaggaattcaagtactactggcatgctttagaacattcagcaatatctgtcacagctctgccaagacagagaatcttttctgtctggccttcgaaacccagtctctggaccagctatttttatttagtcctctaaaaatagctatcactagtactggctggtcagctctgcttcaggctctgtgttcagcagcagtggg

SEQ ID NO: 36659 - DNA, 240 bp, Mus musculus
  source 1..240: mol_type = other DNA
tggccgccggccgctcctaagggatctgctctctttagggagtcttaccccttaaattaggacaccatcaatggattgatctattgttgactcagctctgaacacagttatcctgtatccactgtatagtctggagaggccagcctggtctacagacagccagggatacacagagaaaccctgtctcaggtccatctttggccctgaactgccactgaagttagggaagtggcccttttc

SEQ ID NO: 36660 - DNA, 608 bp, Mus musculus
  source 1..608: mol_type = other DNA
gtttccacggcgattaatgatatttaaaaatcttaatatctttttctgaacacaatcgcacgattgtacgagcttttaaagctctcccaagtaattcttaaaccgcagcctgggcttcgcaagtcgccccgtgggaacctgcgagcttcgcgctgctcctccgcccacgctccggggagccctggaaaaccgctctcgggatagagtctaaaactggctgagactcgaagccggcagcttccgagagtgggtcacgctgctggcggcatttaaggactccagaggatgtgcccgttcctcctccacgtgacacgggccggaaccgtcacttccggcggcggggacagcgcgcttgcgcgcggggctcggcgcccggctctgcaagcggttggcaccggcgccgcgccccccaacagccgcaaggggcgggcggcatcggtgtgagccgggccgggccgagctgcggtctccagggcacgcaggccgccgggcctagcgccacgcccccctcggccggcccctccctcttcccgggcagctcgcgccccgcgcgccaggctccgccccggccccgccccggccccgccctccccgctggctctgcgggc

SEQ ID NO: 36661 - DNA, 470 bp, Mus musculus
  source 1..470: mol_type = other DNA
atgagtctctgataaactgtccaacaataaaatatttatggtcttttaatatatatatttacattttcatggtcttcccctgaactcaaagataattaccagatgactctcactcagtagtgactcaccttgaagaatcacatttcttacctcttataaacgtactttaaagataagtttcaagtttaaccttgccatcataaaataattcctcagttcacacagctgtatcagtgtatataggtagatatttatatgaattactatgatattcctaaatacgaccttaacttgttaataaatataatatataaaaaatcctaatgaatccacaccaaggtcccttctgtgtgtatcgtaagtcttcttgttattcaaaatacagtaaatatcacttctaatggaaagactaggggcggccccaggcgggtcctgctgccgcgcttcggcgcgctgacgtcagaccaggc

SEQ ID NO: 36662 - DNA, 238 bp, Mus musculus
  source 1..238: mol_type = other DNA
acaaactaaaaggctaaaactgagtccaagagtctctcttccatttccagagaggctctgccagtgcctcatagcattccattggacagattgaaaagataatttctacaagttctctgacctgcacatgtaccactgcacacacatgcaggtatgcaatgagtcccatacgaactgaggcctgagagggctgggacagcagacttccggaagcgcccttcgccaccggtctctgctc

SEQ ID NO: 36663 - DNA, 588 bp, Mus musculus
  source 1..588: mol_type = other DNA
cacatcctattttctataaaaagaaacacttgttggatttcaacaagaaatcttccttttagcaagaatgcggcaagatggaatccaagtcctctgagctgtcctggacatcagtgctgtcactgcttcttgggcaggcaggcctccccagcatcaggaagtgtgccgccctggctcggagcccagaaccacatcagctcatcagcatctgaccacctcactgacctggaagttgagggtgggccgccctgttgctcttcctgacgtgcagggacacgtacttggcgccgaagttctcgatcatcgcccgtgaggcctggtccatgagcttctgggccaggccgaggcgccgggtgatgtgcccgtggggaacatcatcggggtcctcctccatcttggccaggacatagcccacgatcttgccgtcctcatcctcggcgatgtaggagcatggtagaagtagtacttcatctggtagttctccggcaggcagagcaggttgcagtgctgcatgttcatcaggtcatcctggcgtcgttgccttggcaatggacctcagcgggccaggccgagcagagaccggtggcg

SEQ ID NO: 36664 - DNA, 549 bp, Mus musculus
  source 1..549: mol_type = other DNA
aacaggccgggccaggcagcacgaaccctcaagtgtgcttgtgtggctcgtcgggcttcctcccggcgccccgccctcgggctcgcacgagcagaccggtcagcgcccccaccccccaggcctgaggtgcccggcggcctgccgctcccccgggtgcttagcatcccgggctgcagaggctcgccccgcgcggcgcggcgccaggttggggcagggagcggcgatcgtggggtccgcgggtgcctgtcccgcagctcaccaccgcagctagacgccagcctttctgctcccgggtgggcgccggagactcagcgggaggtgtcgctgcgctgcagcaactctccggaatccggagtgggagaactggactctgtccactgggatttgcccagagttccggcggcagctgtggcggctgcggagagtggcagctgttgggtggctctgagcttggagagggcatcccagccccgctcagcctctgacccccgggcgagtccccggtgactccgcgtctctgctctgtgaagcccggagcccagaaccccg

SEQ ID NO: 36665 - DNA, 360 bp, Mus musculus
  source 1..360: mol_type = other DNA
agatatttttaaatccccaaattgaacttctaggaatgaaaacaactgcagattttattacatgcccaatgtgtaaggtttgaaaccttaagggagtaaacaatgaaaatataaccagaatttccctaactttatggaagctgtaaatgttggagtaactactccatgattttgctttttttctttttttggttttacaaaggaaaaggtgggaaaggcccaaaagagttagttttcagtattaagacaaaatacttttcaaatgttcaaacattggaaaaattcatgttccatatatctgctctcaatattaaatgataaagctgtgggactggcagctgcgcctgcgcactccacccc

SEQ ID NO: 36666 - DNA, 350 bp, Mus musculus
  source 1..350: mol_type = other DNA
cacaatatcctcagaactatgcacagtagaaggcttcacgtggaccaggagtatatagactgctcaaattggaaaaaatatatatgatcagtacacgtactctcagaattaaaaagaggaagtcccctttcttaacaggccgggccaggcagcacgaaccctcaagtgtgcttgtgtggctcgtcgggcttcctcccggcgccccgccctcgggctcgcacgagcagaccggtcagcgcccccaccccccaggcctgaggtgcccggcggcctgccgctcccccgggtgcttagcatcccgggctgcagaggctcgccccgcgcggcgcggcgccaggttggggcaggga

SEQ ID NO: 36667 - DNA, 285 bp, Mus musculus
  source 1..285: mol_type = other DNA
ctcccgagacagcctcactcctgtgagttagaatcctggccgccattatgggacccccttgggtgaaaagctttaacacctgagtccaatgacccttgttctgggacctaaaaacagccgaagtccctttaggtgtctggcccccatcccattggatgggagatggctagccgagttcccaccaaacaatggccaaagggaaaagaccacttcgggaaggagcttagatcgcgggcagtccagaaaaaccaggcttgtggcgccggatgtgcagcaaacaaaaag

SEQ ID NO: 36668 - DNA, 500 bp, Mus musculus
  source 1..500: mol_type = other DNA
gtcattaatcattcattagggtggagttgaagagagctgttggctaactcctccactcaagtgtgtatgttcgagggcgttcacctgttccaacacagacatgttttcctgaagaaaaagctggacacctagtggagaaataaacgcacaccttagttctttaataaatcaataacagcgagctgccaatcagtttttggttcccttcggaaagtggttcccaggctccagatggcaggggccagcaacctggaatgcggggacgggaacccatgcccacgttgccgtccgtccgtgccccttgcgtggagagcagcgcgcgcggagccgattccggagccgctggctcgggcagggggtccgctgggttgcatgacccgtgcacggtcgcagccagcgtcccgggggcagcttctgagggcgagacacctcctccgcccccgggaccgcggcgctccctccccgtaccggccgtgagtacacaaagcggcgggtgaggg

SEQ ID NO: 36669 - DNA, 593 bp, Mus musculus
  source 1..593: mol_type = other DNA
gcttttggaccagacagtacagagacctctgtttctatagctttctagataattatacaatataaattgttggtagcctgtttttaaaataaagctataacttattgtgcaacttggggtcttaaatagaccagattcattgcagaatctgatttgatttctacaaatgctgagatgattgtaaagttggcataacagcaagcatctgtgctacaagtctgctctaatgagaaatgtttcagattcaattttatactatagtattttaaagaaatgagtaaatagaaacacaagtcaatatcagcttctcaatgggatatatcataaggaggcaagatttttcaagtaattttcaacttattgaaatttaaataacaaaaagtaaagacataacttgcctttaagttgtaatttatacaactgatcacgtgactatttcccctagatttccgggatactctggactttgctaaggccctgcagggctgaccgctcccaggggttagccgcccagggatccggctggggcagggccagcgcagcgccctctgccccgcccccgcaaccggcgcgcgtccggcccgcccacaccg

SEQ ID NO: 36670 - DNA, 350 bp, Mus musculus
  source 1..350: mol_type = other DNA
cgttccattcttaagtatgtagagatcctagagtatggatttgtttgaaggttctttgaaaacaatgcacaatgcctacggcccatgatttgtgatataggcctggatcccgcaaggccagccctggctacacagtgaaatcctgtctggacacaggggatgacaagtacctaggatatgttatttgcagtaaacagtgctggctagcatagttatattcttttgtttatctcctccgaagaagatgagggcccttccatatatggaatcagcggaatataagggaaaagaaactgctacttgcctctgcctttttgctaggaggaatgtagccactgattttttaaaaa

SEQ ID NO: 36671 - DNA, 345 bp, Mus musculus
  source 1..345: mol_type = other DNA
aagaaggttggggactagcctagacccaaattataaaaatagggcacctggccgctatatcacaaaattctataggctggtgactaagcctcagcaaaaagttgagctctagtgaggactcccttttagaacctaattaactttataaaatacatataaatctgtaattagtacagtccatggactagatagagccacgtctctggactttatttcttgtattaaaaaagatgactcaagttatcttcactgtagcccacgggatacacaggatgctgtggtaatctctcagcgtccctggaagcttgtctcagaactcagtgatctcaaacaagacaactctgt

SEQ ID NO: 36672 - DNA, 557 bp, Mus musculus
  source 1..557: mol_type = other DNA
aacatctggaaaatgctgctgctgctgttgctgctgctgctgccactgctgcatcagaggaccctggaggggcctggcatccagtactagggactgcctcccagaccctgcaagttcatttcccacagcttctcttaaatctcactgaagacacttgagggagaatcttctgaaagccccggctttatcttctggaatttccatgtgaatcacagctacacagagtgcggctctatggaagcccaagtttctttgttaatttaaatgaaaaagggagagggagggaggggaaacccctcccacccaccaagttcctggacctcagcttgaacagtattccaggattgtactgcagacatccccctttgagttggctgctggctagcaaactccttcttacccattaagttatttaatataataatgaagcgcaacaagattgtcactgtcggactgcccatcctgcaggaagggtcactgtaggattgctcatcctgcgggaagcagccccatccccataaatgtaaatgctatgactttaagggtcttggggggag

SEQ ID NO: 36673 - DNA, 476 bp, Mus musculus
  source 1..476: mol_type = other DNA
tacaacggaagcttacaaagcctgcttttcatactcagactccaaatctggagagtacttttctaaaatagttatcaggtattcaatggctgattcaattaagtagctgacagccagtaagcttctgggaccagccggttgcggccaccagtgtgcccccacactcagcaagtgcttcgtggttcctctcacgaaagtcggacagtaaccttcagctcataattatgataagcgcgccggagtgggccctgcccaggctgcggagacccgctgcgccagcaagccagcctctgcagcgtgggtgggtacggccgcagcgtcacgggagtccctacccgcggaaccctggcaagtccccgagcgcccgctgcagggcggcgtgggcggagagctgcgccacgattggccagcgcaggatgggcgtggcctgcggcgggcgggggcgtggcctgcggcaggaggcgggcatttcccca

SEQ ID NO: 36674 - DNA, 462 bp, Mus musculus
  source 1..462: mol_type = other DNA
agtagcaacttctggaaagttaggataaatcgccacaatgatgctaaaatgaagcaccatgatgttatactatagtctatgccttatgttccaaacatcaaagagaaacgtcgtgacgttgtgcacaatacatagtctgtattttatgaacatcatataaaatgcttactaaatcaaaccttcaccttagagaggaagctgtccaccaaataattgagtgagagaatagaattaattaattaattatgtcaaatatcttagttgcaaacactgacactgatttaaatgtactatctcagatgctggctgtattttatttggagtcacaccctaggactcttgaaaatccatcctagcgagttgcaaagcttcatagctatccccacataggtaggctctgcctacccaattgtgacatatttgggtcacaatgttaaccattattattagcgtatcagtggg

SEQ ID NO: 36675 - DNA, 580 bp, Mus musculus
  source 1..580: mol_type = other DNA
gaaattccattttcttctaagtcttgcaggaagcttcaaagtctaactcctgagtaggaattccaataggtttcttagcgattaattttaaaatcgtgaatcacacgcctaacgtcgtaaagatgattcatgacatttatatatcctgtttaatacaaggactgtaagcagcctcgaccatcaaagccgcctttggacagcgccgcggcggagcctcaatgtcacccggcgcagggacggcggagcactgcacaggcgcggcccgctgccccacgcaggtcccggggcccacagccgtggctccctgagggcagcctccacgaagtctccgctggggatggaccaggtcggccgcgcctgccaaccaaagccgaggagcggccggtgactccaggaatccgcggacaagggacgggggcgggggaggcctctctagccgcgccctcgaaccagcgctcgcgcgcgctctttaaaggcccgcgccgcgcgaccgcggggcgtgagagccgcggggcctgcgcggggggcggggcgcgcaaagggcgcgctccggagccacgtgaccgggacgcgccgttct

SEQ ID NO: 36676 - DNA, 393 bp, Mus musculus
  source 1..393: mol_type = other DNA
ccctgcctttctgaacctctgacattggcacagttagatgctgaagtatccccgcacttattgtccagttcttggaccgcacaacaggcccagccttgcccatcctgggccgtcctggctgggaggcaggccaaggagagagcgatcgccctctcctcctctatcccacccagtgtcaggggctcacgtgtggcaggagcagggttcttaatcctgggtttggaaccacctcctttcctactggaagggtggggctggcacgtgccacctgcattggcttaggcacttgaggcgtcgcctctgggctgtcgctgctctgagctccccgccgcccttgccccagcgccgccgcaggtcgtgcgccgttggccctcccgacaccccctcggcggg

SEQ ID NO: 36677 - DNA, 696 bp, Mus musculus
  source 1..696: mol_type = other DNA
agctgccggggagcccgtggccgccaatgggaggccgcacatgggagagccggggcgggacctccatcgccgcgctccggatgaggagcgaggtcgcgccgcggggagagtcagccgtgcgggaccgggaatcgcgagcggcgccgtggcagggccacagtccctcttgccttgagagccccctagtgcagagctgctgctgctgctgcagcggcggccactccggcaaaagggcggcgtgcaccccgcgccgcttgctgaagctgcagcgcgcccgtccgcccgctcgctcgcccgccctcccggcgcacgcgtgttttgtcctcgcgccggctgcaaccagccgagcagaaagcctgtgcgcgatgaccgcctccgtcctggcggggacggcttttccgccgtcgcctcggggcggtgtcggctcaggggccgtggctgcagtctctctgcagcccgggtccgaggctggctgaggccgcggcggagggcggggcctgctcgaggggcactcacgtcccgggcgcgccactcaagggactcccgtctgcacgagccccgggcctcccgcgcaggctccagcaggctgcggagggctggtgcccgcgctcgggctccaggctccaggcttgggtaccgacgggttcgcggctcgccggcggccaataggcacgcgcccggagccccgcccctccg

SEQ ID NO: 36678 - DNA, 404 bp, Mus musculus
  source 1..404: mol_type = other DNA
tcctttgatgatgaacagcagcatggaagttccttgcttctcggtcatgatgtttgtgcaggaatatgtctgaagacagctacagtgtacttacatataataaataaatctttaaaaaaaaaaaaaaaaaaagaaaccctgactaagacactgcgttttgccttactcttcttatgaagaatatgctaaaactttattgtacaaaaaatattttctcagacaagatgtttggctttcgattccattcctgccatggaattccagaacagcagtgttttattcataatgaacatcttctgttagtgaggccctccagcctacctacttccgggaggttggggggcagcactgagggcaagggagccagccccaggcctgccttcttcggacgtgtacgtgcacac

SEQ ID NO: 36679 - DNA, 271 bp, Mus musculus
  source 1..271: mol_type = other DNA
tggagagtctgaaaaaaacaaagttaactctcttggttctatactagaattaacttttgaattaacttaattgaataaatcaaagtcccattccttaatatatggttggtggattgatccaggcgaccctaccaggttgagtagtgtcttaacaggggaaatgagcaagtttggctgtatcagcaggcggaggatcccggatcccgtaggaggcgattggaccgtccgcccgcagccgcagccccgggtgacggtgagggaaccggggacg

SEQ ID NO: 36680 - DNA, 424 bp, Mus musculus
  source 1..424: mol_type = other DNA
gcgcagggcttcagctaggctagtctgcagcgtttgcaaaagcaattcttttttccttaaggatcaaagtaacagccataaaaaaaaaaaaaaaaaaaaagaaacctggattgttataactgttttctcttctgcactataattgtagtctgcagaacagtagaagaaagcctacaaaaggttttttccatgtatatgcagatgatcatgtataggccacaggaatttatcatatcttgcttctggaggctggagacacgagcatctatagatctgaaggtcatattccagatgtactccaagatgctgagttcagctgagaactcagagggaaagaatccaccttgaggtggaaacttaagggtaatatgacttgggccaattggcagactcacatggagttttactaagtcagactcacgtg

SEQ ID NO: 36681 - DNA, 426 bp, Mus musculus
  source 1..426: mol_type = other DNA
ttcaagaaaggctagcagttactggtttatatctttatctctatctatctatctatctatctatctatctatctatctacctacctacctacctacctacctacctacctacctacctacctatctatctatctatagaaatattaagaatatgaacttaattcgtaagcctctatagagtataagcctttgggtgtggccagcagctgctgacgcctcacaggagtgtacgtggcgtcctcgcggtcaccgctctccttccccgacggagacgcccagaggcgcctcctcacgccgcgcgccggccagactagcctaccggagtggctgctcccggaagtgctgtcccgcggggtgggaggagcgagccgctgctcccggaagtgccggctggccgggtgggcgtggcgagttgccgcacccgga

SEQ ID NO: 36682 - DNA, 511 bp, Mus musculus
  source 1..511: mol_type = other DNA
cagttactggtttatatctttatctctatctatctatctatctatctatctatctatctatctacctacctacctacctacctacctacctacctacctacctacctatctatctatctatagaaatattaagaatatgaacttaattcgtaagcctctatagagtataagcctttgggtgtggccagcagctgctgacgcctcacaggagtgtacgtggcgtcctcgcggtcaccgctctccttccccgacggagacgcccagaggcgcctcctcacgccgcgcgccggccagactagcctaccggagtggctgctcccggaagtgctgtcccgcggggtgggaggagcgagccgctgctcccggaagtgccggctggccgggtgggcgtggcgagttgccgcacccggaagtgccggcccgcaggcggggctgcggctgccacgttggagcggagcgggtggccctgggccgcggaggaggggcggcggcggcggatccggggagaggc

SEQ ID NO: 36683 - DNA, 260 bp, Mus musculus
  source 1..260: mol_type = other DNA
caagaaaatcacgtgtgaatttattgttattcaacaaaccaaaaaggttctccttgggaggtctggcgacgctagccatgtgccgccgccccacctttgcagtcccatagcagtgcctgggctcggcggctgcgatcgcccacacagccggaggacaggtcgactagcagtccccaaggctgcggtcccctggactcccgcgagagctcgataccatgctagcagccaatcggagaggcctggcgcctttaagggcctcc

SEQ ID NO: 36684 - DNA, 428 bp, Mus musculus
  source 1..428: mol_type = other DNA
gaattataatattcagcacagttgttgagtgttatataatgcatcactggataccacagttcttatattcactaatgtaactgatgtactagtcattttagtcgttgtaaagacttgggtaaggcctttttaaaatttaatatatattttttatttcttggatttataaatatcccaggaaatgagatgtaggtgtgttgcaagacaaattatcaaaaactccctttcaaggtaactctgcgtgctctctcaggagcttttaggagccccttgcattgagaaaggatgcggacggccccaggagcagtcacgtggaaccccagagcgctcccccagccctgcgcaaagacgcgactcgggttgccggggcgcgcggaaggggcggggctcgggccgccggcgggggcggggcggcgcgcgggcggggc

SEQ ID NO: 36685 - DNA, 319 bp, Mus musculus
  source 1..319: mol_type = other DNA
cttatatagtaaagacagattaggttcctttacaaactaggttctttcttgtttatgactaaacctttgtttgtcagtctgcactgcctgttccaggaatagaagtcatgtctttgcttcaagaagtggtttataaccaacactaaaaaagcttgctttgactatagtgaattggaagtaactctttacataggtcgtttaagtgatgccttaaagtcagtcccggaacttagggcctttactgaagttgcacaaagtacacctgcgtctctcgggagaccgctctggcccacagagacgctgctctatggcattcttc

SEQ ID NO: 36686 - DNA, 243 bp, Mus musculus
  source 1..243: mol_type = other DNA
tgatgctcaagcttaggtgctgagtttgacccccagtgtctgcacacatgtctcccagcactatagaggggccctgtatcaagggactgaggaggcaaggcactgtttgctctgactggaaggacttgccagcccctgccacgagtcaggttctgcaaccctaccttgtcccaggccaatggtttgtaatagcacgcgatttatagatcaacaagctgaaccagtggagcacagcaggtaggg

SEQ ID NO: 36687 - DNA, 228 bp, Mus musculus
  source 1..228: mol_type = other DNA
gctcacagctgtgcagcactaacataaagtgttcagtctgttacagaggtaggtcaataatagagctctcagtccctaatgccggtctctgagagtttgagacagagagacactcaaggacagtctgagcgggcctggaactccaggtccccaagtgccttctggtttcttaggttggttagcccttggatgtaaggaggaaaaccctattggcttttggtgcctgga

SEQ ID NO: 36688 - DNA, 339 bp, Mus musculus
  source 1..339: mol_type = other DNA
cagctgcctggaagctcaggaaagcttcctacaggctgccattgtgtagcatggttcaagcttctttcatggtcttgtttgctatcattatataccagtgtaaaatgtcagcggttggccaagcctcagagcaactcttaggcaggctctcccaaatactgttttcataatactgctttaaaaacagatcctagctcgttgggcaggctcaagtgaccagtgtcttaaggcagaagggagtcggggtagggtctggctgaaccctcaaccgggggtctagtcctggcgctggtcccacccctgcgcggctcccgggcgctccctccaggcctccgagga

SEQ ID NO: 36689 - DNA, 358 bp, Mus musculus
  source 1..358: mol_type = other DNA
gcaaaggccagcgcgccccccaccaccacctggttatgaagttgttcttgaaaacttaggttcaaagaatttcccttaagtatatagatatagatagatatacttaaattcatatatatgtatatatatgagtatatgtatatatgaatatacatatataaaaatttacataatttgatttggctttttgttagaaggtgaacattccatagtttttctttttatggtagaactattccatacaaataaacaaacaccttttgagttcatttcagcggtgaacagcacctgctgctctccttccaggagcgcgcgcgccaccactgcgcatgcctgcccgcggcccgtcgccctggat

SEQ ID NO: 36690 - DNA, 277 bp, Mus musculus
  source 1..277: mol_type = other DNA
acaacacaattgttttcattcgctgcatatctaaccaagatttacgtttttaaagatgctagataatcaatatcaaacattcttttcaatgattagttagcaacctgttagattctttggataaaggacatatatacttcctctcatttctacagttacggattgaaattcaaatatgtacagaaacaacagaatggtactgtcatcttaggaaactagtctaaaaaccagagcggccatggttctgacgcaaaggttccggcgcgaacgcgtcccg

SEQ ID NO: 36691 - DNA, 568 bp, Mus musculus
  source 1..568: mol_type = other DNA
gggaggtgataattatttattgagtcacaactttagtctctctctacataatatggctagtttaataacgtaactagcaattaatgggtcatcaataaaaatgttttatcagtaaacgagccatttggaaggctagcatctacctagaagtgtgcacctgggaagaaggcggtttcacctcccgcgcagccgtgcccggggcgggacacgcggttgccaccgcagcccctgggatgacaggaccgggcgagtcaacggggatgcggggactcagcagggctgtcctgggcgtgctccgggctcccgtccggcggcggctcccggctgcagcttcgtcctccgtgtcctcggcaggctggagctcggccggggtcggggaggcacgccgcggcggacagacacccgccggcggatgcggggacagccgtcctccatgacaacggcccagagtccctgcgacagccgccctgggtgcagcccggagccggtggcgccgttccgcagccccgggtcacgtgacttccggcccgggaagcgcgggacgcgttcgcgccggaacctttgcgtc

SEQ ID NO: 36692 - DNA, 500 bp, Mus musculus
  source 1..500: mol_type = other DNA
gaatatatattaatacatacacattctataatacatatgtattatacatatgtttttctttttagccctggctgtcctggaactcactgtagaccaggctggccttgaactcagaaatccgcctgcggagaactcctgtttgagacatgcaatactaatgcaattcaggagcatgccactttgccaagtttcaattatttaaaaaccatcggctttttaaattgtgtatgacacgtgtgaaatacatgtcaatccatatcaaatgatccaacacaatatgttcgtgcttatcattgaactttcacaatgttataaacatacatagtctttaaactagactcagttcataacttttattgatcttccataaggtattaaaatattgctaagcgattcttatttttacaaccattagtagccttaaactatgcataaacagtgttgctagaggacaccgcgctccctacaacccgcccggtgcgcaggctcaagcccacgct

SEQ ID NO: 36693 - DNA, 337 bp, Mus musculus
  source 1..337: mol_type = other DNA
actggaatctcctccagggaggggagtgacaaacagcctctagggtgtcctgtccttttaaagcaaggtctataaaggatctagtcgcagattcccgagcgtaagtgctggaattccagtcttgagagagagaaagcgggcgagctttctttccctgactgcagcagagagagccacgagccacggtgcgcgactgcctcacgcccttcccaggaggtcgtgttgcaggctcaaagatcttccgcagcgatcggggacgtcagcggtccgtcggggcggagggcggcggctctctaggcagcagcgcccgggagacgcggtcatgccccggagctgg

SEQ ID NO: 36694 - DNA, 453 bp, Mus musculus
  source 1..453: mol_type = other DNA
actggaatctcctccagggaggggagtgacaaacagcctctagggtgtcctgtccttttaaagcaaggtctataaaggatctagtcgcagattcccgagcgtaagtgctggaattccagtcttgagagagagaaagcgggcgagctttctttccctgactgcagcagagagagccacgagccacggtgcgcgactgcctcacgcccttcccaggaggtcgtgttgcaggctcaaagatcttccgcagcgatcggggacgtcagcggtccgtcggggcggagggcggcggctctctaggcagcagcgcccgggagacgcggtcatgccccggagctgggagcccggcgcccgaaagccactggctacccgcatagcccgcagcccacgccgaggtgcagggaacctgcggggatcctcgctgccggagggcctcggtgagtcaccgcggggtgc

SEQ ID NO: 36695 - DNA, 557 bp, Mus musculus
  source 1..557: mol_type = other DNA
aaggacaacatattacttatttttagtaatgacctgataaattgttgatttattacaataactttaaggacctaacaggattagactagagttaaaccagatcaggtaccccgcagcggcgccctagggtcctatggtagaaactctctgagagactcaaaaccccgacctgggtcagagccaacgggtctgtcctgcccagcaagtttctgcttggggacgcctgcgacgctccgccacgctgcggcgtgtcaagcagggccgagtcccgaggagtcagttgaactccgcctgacatccctgcgccaaggaggacttcccggcggcgcccaggctcgcccccgcgttccttccgtgcccccacctgcccagggagccggggcagggcccgagcattgacgtcatcgcccggggcggggcctcgggcaccgcagtgcagcgcggaggggcgagcggggcggggcctgcggcgcgtgaccgcgctgcgggagctcggcggcgggaaggtggggcgggccgggtggcgcggtcgcgaggcgcgagggagggccgtgctg

SEQ ID NO: 36696 - DNA, 180 bp, Mus musculus
  source 1..180: mol_type = other DNA
tatttataagctatagtctagtggttgaaaaataatataactttcattgttttaatcatgaagaatttcagtttcacaccattcttttcatgacaacttcaatttatttgtcttggtacagtggccactagctatgtaacaatgtcagggtaagatcaaccctgagttaatcagtgaccc

SEQ ID NO: 36697 - DNA, 543 bp, Mus musculus
  source 1..543: mol_type = other DNA
aatcggtacaactggatccaattcaaaaaaggaaacagcaagtccaaattacttcggctttttttttttttttttcttttttagaggaaatcctaaaactgctgagatgcagtgttgggaaaacaagctcgtgtttcagctgttcaactcaaggagtttgtccgcttgctgttgcaaacattgtgtaagaatgacctttccagcaggacaaccctggagactggaaactcctgggtcctgatccgcaccggaggaggtgtccagctggagtaaaatgaacgcaggctcgcgtgttttcatcgctggtgacagcatccagcacaggggcgcgcagcggtgctttctcagcagggtcccccgagaagccctgcgccagaggacccgggagcccggaggcgagggcagggggcgcggggcgcggggcgcggactgggctgcgcgcctgtccagggtgccggcaagcaggagccgcggcgggaggggccggccgcgcggctgcagtttctgcggccggcctggtaatcccgagccgtccgtcagcgg

SEQ ID NO: 36698 - DNA, 582 bp, Mus musculus
  source 1..582: mol_type = other DNA
aacaagaagtggttgtatttctaagctaaacttagagctaggattctggccatactaaaaccaaagtgttaatcatgactgttctcatggttcggattttacaccctggccagactagaatttggaaataaccgctgtattttctgcttgtcaacatcaggatcatgagagtttgtaattgaaaagacacagtcttagtttatatatagatagcacgggattaagcctggggttataatatactcactgaacatctcaaacgtttggggtatagatgtgtgtcatggctaaattcgaggaggctaacctactttgtctaagttaggaagtcatgagtttagtatgtaaaactatgaatgttttctagtaaatggtaactttcctgttaatattattagttatgataatcgcataataataataataataataataataataataataataataatagaaatgttatgtgggtccagatgtgacatgggaatgatgtttaaacatgaactgcgtaatttgatagtaaacaaatcttatcacgtgctcggtgcgcacatcatggggtgctattttgtaaggaaa

SEQ ID NO: 36699 - DNA, 433 bp, Mus musculus
  source 1..433: mol_type = other DNA
ggccacatggcttctgcgaacttaatttcattcattaaagggctgaggtgtctcctgccagaaaaatcaattttggcctgggatggagcagactcatccctaccccatccagcttgtatgctcgtcagcctgagcatgtgcctggacatccaaaagcatgtcaagacggtttattacactcatctaaatacgtttttaggaataaagcttaagctcatgccctcatgctgcatttgggctgaagcagccaactgcagagggcccaggcagtggtgtctgatggggcgcccgcccagcattgctctggaggtgaggctggcgtgcagggcggggctcccgccaccccaccagtgctgcttgggtcctctgaagccgccagctgccaactgaaacccgaaacccggctgcgtctgcgggctggccccactcagtt

SEQ ID NO: 36700 - DNA, 449 bp, Mus musculus
  source 1..449: mol_type = other DNA
taatggcacataccaataattccagaagttggaagtaaaataataaactcaaggatatccttctatgttacatgtaaacacacaataaaatgttcttactctatagtgtaagagagaaaaggtagtcaccctggattgtgttttttcatgttgaactcacaagccattgtatggtctgtagaaacacaggttttatttctatcttacaaataagaagctgagtctgaagattcaactcattagcttagttagtgacaacatcaaggatacaatacacattgtttttatatactatgtatattctgttttctaaaaatcatcactttggttataatttcttcggattgtaaagtaaaacttgatgcacaggtgatcttcagtgtctgagacagaggcaaatggatgtagccactgtgagcagatgtaaaagtaatcagaaaacatttatg

SEQ ID NO: 36701 - DNA, 301 bp, Mus musculus
  source 1..301: mol_type = other DNA
tgtagcatacaggcacacgttacagaaaaaatgcctggatgacgcctgccagggttaatgaaaaggcatggtaggaatttttatgagaaattttaaattgattctgtcagaaaagcctacatcataaagatttactatgagttagtatggaacaaaagaaatatttttttctctcttaaaagtattatttgatctttgttacctacaaaatctagttaattagtgtaactacacggatgcctgcctgcttgaagcatgcccctgagagactcccttcaaaggcaaggtgtctggagtttag

SEQ ID NO: 36702 - DNA, 491 bp, Mus musculus
  source 1..491: mol_type = other DNA
tagcacctgcttagtctgaccagcaggcactggaggctgcagcagccacagctgtgactaggcagcagcagccttgccagctcccgcccagctctcattgagaaaagggaaccggagcaggaagagctccctgcaaagccgcctcgggagcagccaaggagactccgagaatgggcaccagactcgtcttacgtggcggctccgcgggggtcctttgcaaggaatctggagaaggtgccaaggattccttcgcctttctcgtgcagaagtactcccgaggggcccttcagctaagacagttctcctgcctcgagaaggtagtcacagcttgctagctgcaattcttttcctgtgacatttttggaatgtctgcagaaacttaaaaaaggcaaaagaaaaaggagagtaatttgttttgtttcttaccacggacttggatgatcaaaaccccggagttctaggaatcagcacttggaggcaggttttaagga

SEQ ID NO: 36703 - DNA, 496 bp, Mus musculus
  source 1..496: mol_type = other DNA
tgtatgtgttactgaatgtattagtaaccttatatttccttgcaaataattgaacttagaatgttttagtttgcagggttttaccgtaaaacttttaacgctggggttgccaagttcacaaaaaatcttgtttctcacgaaaacgcgagtatttgagtaccttctgggggagctggcagggcgacgttccctctctctccacctgggtcgcccggagagaatctgggagaggagggggaggggccggcagcttcgcgtctgtcaccatccccaagtctgcacagtggagagtgcacacagcagaaccctgccctggcgccctcgaccccagcgcggggccacggttgtcatggcaaccggggcgcaggtctccccagagactcggtcccaaggagtgcagggtcccggacctgcggtcctgtccgcgcgcgggcggggttgactgccgatgcgtcgggccgaggaggagctgcgcgccgtgaggagctgggccggg

SEQ ID NO: 36704 - DNA, 491 bp, Mus musculus
  source 1..491: mol_type = other DNA
atctaattgtgtagcttgaaaaaagactaggattactttcaaaatatgtattgaaatgatgctatatgtgaaataaggtgaaaattgttttggtaaacattttaatagtgaaagtactctagggatcattccatctatatctatatcatccatatctatatcatctatatctatacaacatatatacatgatttaaaatttcatatagcaaagtcagaaaatttgcttaaaaattagatatgtagtaaattcaatttgtattagtttcccatggaattttctgaaaccagaaaaagaataccacagtacccttaatttattaactcaaatgcactataaataccggtctagccagtttgctttagcggatattttgtacagagagatgcacctctgccttccttcgctgtttgtaaaaagctgaggtattggtgcttgaaagggaggaagcctgcttctcattttgccagaaaacgaggtagctgtagcca

SEQ ID NO: 36705 - DNA, 578 bp, Mus musculus
  source 1..578: mol_type = other DNA
tttgctttcaaagagaaaatataccagagacaattgtcagagttttaggattattgaggttgtagcttcaaaatattttctacatttttttatataattgatatagctggatggacatttttgttatgtctcaaacagaataaatacctagttttaactatcaaactataaagatgaacctaaatttagtattgcagctaagctagtttttagtctaaataacaatgtaatgaaaaattgaatttctttgacagtttcaatggaaatgatctgggttttagatatactaaagatttctaaaaatatatctgtatataatcttgaacttaataattacatgcattacaattttctttctatacagaatagaaacagttttgtttttcagctaaacatatctatttataagatcagaatataccagggctttttacttagaaacactttagaggttaagagcatattttaggcattatattatcctaaatcattccgtaggtaaactccgtaaatgtaatatatgtaagcatcagcggctgagctgttctctaaagattctgcgcctacatgatagattc

SEQ ID NO: 36706 - DNA, 210 bp, Mus musculus
  source 1..210: mol_type = other DNA
gccttgttctcactcagcacactgcagctgatagttttgacagaactcaagactgtctaattattggctttagacacaacaatttaaagtctcctgaactgatcctcagcctctgatgctgtcaggccggccagggaggcgcggccttgtttaccaagtcccttgggaataacttgatcagattagcatgtggttagccaatagcaactg

SEQ ID NO: 36707 - DNA, 361 bp, Mus musculus
  source 1..361: mol_type = other DNA
tctatacattctagtttcttgtaggcacagaagtaccttctacagatagttgggcggatggtactttcctgtagctccagcctatgctgcaaggaagcaagctctaggccagtctggactgtttcaacaaatggaggagtctgtttcatagcgttgatactaaactcacaatgattctcaggcctagtctttagtgctttatgctagcaaaaccctcccgcatagtgccacggtttgcttgggacgcgtgggacaatgactgtcacccactggggcgaagtgactcctctgcgccccgcgcgcacacaaagccctttattgaggcaccgggtgacgcagggtaggcgccgggtgagcgcct

SEQ ID NO: 36708 - DNA, 387 bp, Mus musculus
  source 1..387: mol_type = other DNA
tagacactggatagtttatctaagtaagtgacttttgtaatttaagacaggtagccaaaataataataataataataataaggcgtggcctatgctttccgggaagaaagtgagtggagaactctactacaaggtcccctaagcacccatacttaagtcacttggttgatattgagcaccgtacttatttatcaccattaaaggacatggaatccgtttcaatttcgtttctggtgccctgcagtggcctggggcagggtcacgcacgcggtcggcgtggccactgtcgcgtacccgcgtctccgcaggaggaccgcggtgtccctgtctttggcaccgagggcgtggcctgagcctccgggcgttccgggcggccgatgcccgaag

SEQ ID NO: 36709 - DNA, 260 bp, Mus musculus
  source 1..260: mol_type = other DNA
aatggggtcttaccaggaagtcctggtgggcaaccatacctctgaccaaaattacattccatataaatactcggaagtttatagaagagtagatttctagccctggctgtcctgctctgtagaccaggctggccttgaactcagtgcggacacacaagatttgattctcatgatttccacagtggctgcaccaatctagccactctgactgagttaacgtgacatctcaaaaaagttttaactttcaggatggtgagcat

SEQ ID NO: 36710 - DNA, 554 bp, Mus musculus
  source 1..554: mol_type = other DNA
gtcccgggtcgaacccggagcgcattccagcagcaggctggtcctccgggatgccccaggcaaagccttcttttaatttattaggggacttccctgaatggctgtccgaagagggaagtcgtaaacacttgtttctcattgcaagccccgcagcagcggccagaagcagcgaaggcagtgatccgatgctcccggaccctgaggtcccagcccgagcgcggggatctctggggcagcggcggcggcggaggtgcgcgctgcccttaaaaggaggcgggccgtaccaccgcggcgcctgcgggggggtcccggcgagctcgggcacctcgaggggagcccagcgccgcgcacatcgcccccgaagtgcgggcgaactgggagccgggaccccgcagcgggcggtgcggacgcaccccttggtctctggtgacccgacagtgccccggggcggcgggcatcgccgctccctgggctccagggaggtgcggctcgcccggctgcccccggtgcccggatgtccgtcaggctcggcgcgagccgaggctccggggggc

SEQ ID NO: 36711 - DNA, 206 bp, Mus musculus
  source 1..206: mol_type = other DNA
actgtgccacatgccatttgtcttaaacatgccacgcacacacatgcacacatgtatgagcaggccccccgtgctcctccagcagctggaggtctgccatggcccggaccagggttatcagtgattcctcaaaccttgtttcaaaagtgttttgtctttattataaaagttattgatttcggtgggaattgatttacatcagaatc

SEQ ID NO: 36712 - DNA, 675 bp, Mus musculus
  source 1..675: mol_type = other DNA
aacacttgtttctcattgcaagccccgcagcagcggccagaagcagcgaaggcagtgatccgatgctcccggaccctgaggtcccagcccgagcgcggggatctctggggcagcggcggcggcggaggtgcgcgctgcccttaaaaggaggcgggccgtaccaccgcggcgcctgcgggggggtcccggcgagctcgggcacctcgaggggagcccagcgccgcgcacatcgcccccgaagtgcgggcgaactgggagccgggaccccgcagcgggcggtgcggacgcaccccttggtctctggtgacccgacagtgccccggggcggcgggcatcgccgctccctgggctccagggaggtgcggctcgcccggctgcccccggtgcccggatgtccgtcaggctcggcgcgagccgaggctccggggggcggaggcggtgctgaggcagagctgaggacgcggctgccgagagcgcagagtctgcggggcagtatcgccgacggctgcggccgacgctgagagcggcgcgggcgagagagcctgcggggcgagcgcgccagccgagccatggcagcccattccaggtgaggcttgcgcagggggcgtctgggacccgggagtggccgcggagcccggggcaagggcggcgcagccagcggctggttaaagattc

SEQ ID NO: 36713 - DNA, 402 bp, Mus musculus
  source 1..402: mol_type = other DNA
tccctctaaggacaggtccttggctatgaatatttaactttaagatttattattattattattattattattattattattattattattatttttgcctgaaaacagaaatttctcggcagagttcaggggacttcggatcctcattttcgaggagccctgcagaagtggccctaaggcaacggttcccacccgcttcctgcaccaaatgctttgaagattctggaagcttcagaatgcaaaaaaagagttcagggaactatcctaatatatgcctactagcaattgtgtttaacactcggtatttagttcaactgttttgtatacattttgcagagcatctgataggaatagctataattagagtgcggcgcgcagcacgctcgtgcctcaccagccccg

SEQ ID NO: 36714 - DNA, 267 bp, Mus musculus
  source 1..267: mol_type = other DNA
tgttgtctcctccacctcaggggtttcagaggaagatctacatgtatatgtgtcatgtatatgtatctatgcatgtaggcttgcatggcaagcactttgactgctaagccattaaagtttctttaatataatgtaacatgaatgcacacatgtgcttgcttgtgttcgtgcatgcacacacacacacacacacacactttgagaggtgaagtttcatgtcgaaacatcccactgggttcttgtgttagagactgcagtcaaagtctg

SEQ ID NO: 36715 - DNA, 122 bp, Mus musculus
  source 1..122: mol_type = other DNA
tgtccattcttcctgtggacaatggttcaattcccagtgtatgggtcaattcaaattaaaatgcgatgtagggtggctccacattccctcctgaagcccggccccgcggaaggaatggtttc

SEQ ID NO: 36716 - DNA, 386 bp, Mus musculus
  source 1..386: mol_type = other DNA
ctttaagagccaacgccatacgggagtgcaagccgcgatgcacgcctggcttcgaaagtgggaaaccgaggccggctttccttttggaccacggacagcaccgtgaagggggctctggggagcccaggctgcgttctcacgtgactggcctgatcacgtgaccggcgggttcgaaaagcaagttacttggcttctggaaaccaaaccaaggtgtttaccctccttccgctcagcctcagggttctgggtctccgcgtcctgccgcgccgcggcactccagttcgcctgcgcagacggagaggcctggcacatgcggcgtggccgtaaagcgcggtcgcgcgtcgggtacgtcgtggggctgctggcgccgccggccagcggcgctg

SEQ ID NO: 36717 - DNA, 275 bp, Mus musculus
  source 1..275: mol_type = other DNA
tatctgtagcctcattttataaataagaaagcagaatccaagctgcctgtccttaaatcctgtacagttaacattactctgtactatctttaaaatggcagccaggcctactgctgctcctctaggtaaataaataaataaataaataaataaataaataaatatttacatgccttgatagatgaagacctcttcttgccatcataggctctaggacggttaaagcagccggaacggttctctgttaacgttcagactgcggtctcagagttgtt

SEQ ID NO: 36718 - DNA, 772 bp, Mus musculus
  source 1..772: mol_type = other DNA
gtataaaagtacaattatataattataatgacatacttatatattaattatttatatttaatatgaatatattatacataatatattatatactaatatataatataaatatacattatatactatatattatataattataaaagcaccatatggtattccaataactctcgaatccattttattctgcttttataatgtttataatgtagtttttctattgaaatcgaagctatcaatacaaatatcttcagtcgtttttatattttatgagaccaataagtcacttgttctttaactaaaactagatagttaggttcaacttgactagccaaaatctatttattttaccaaataggaaattaattctaagcttcagaccacatttaccaaagtttcttaattagaatccatctttagaagctaagttttagaaactacactttataattataccaacatgtcactaagacctaaattttgtttcactctcaggcaactttgtaaaaatgcttcaaaaataaggaaaactgattttaatattgtcaaggatgccgtatgaacatttacttttaaaaattatgcgaaaatcattttcatttttcaaatgaaaatcctaagaacggagatgttcaaatgctagcttttaataatcagttggctatgataaagaattgctctgatcccagccaaggagatgaagccatcttcttagtaatcagtctttactgtgagtcacattgcccatgaccatgtatagtgatacagctta

SEQ ID NO: 36719 - DNA, 463 bp, Mus musculus
  source 1..463: mol_type = other DNA
tgtgtgtacttcacttaacaaaacaaatattatatcatgttacttgagtatgctcctgaacaagtgccaaaattcctctaattcagttctgatttcaaaaattactaaaatgtgctaagtagtttttgttgttgttgttgttaaaaataaaagttaccgaaggaggcactttaacatttcctgttcacatgggatcgtgagaattaacaacttaggaaaatgtaaacttttatttataatgctcacaagcctgcatggatgcaaaagatatatatttagaaagcaaaataaagctttaggaagatcttcaatttaatggaaactcgtctagtcatttgagaaccacaagagctttttagagaacccacttctgccagctgggtcccggtgacacctgtgatgtcagtcaccccgagcctgaggctcattggctctgaggagctgcagcagagtttaaattctg

SEQ ID NO: 36720 - DNA, 451 bp, Mus musculus
  source 1..451: mol_type = other DNA
catatgtgtttgacatctttcagtagtgtgacatagtactttttcctttctggaagcacatgttttcctattctgtactctatagtttacacatatagtggagcaatgtgtgtgtgtgcactctgtacttacgcatagataccttaggaacagctatttttaaatttagtttgtattaaattaatagattataaagaaaaacccaaaacctttatgtcagtgtttagattaaatcagaaaggtttcctgaagttactgtttataaattcttttaaagatcccttaggcagttaaatagccagtcgtatttactagagaaacctagagttttcttagattgccgagtggctcttttcagatatatcacactgattatctatcttttggaaccaagttattacagcctcataggcacactgacttgagaaaattatcaaactgaatttaaatt

SEQ ID NO: 36721 - DNA, 465 bp, Mus musculus
  source 1..465: mol_type = other DNA
tatataaaaatacaaaggcagtttcctttgcaaacttaggaaatgttcagtttgccaatgcatgcagtaagtttattttccagtaattattcaataaccatgaactgctctctggcagtgctagtaattattctctactcataggaaaaaaattacataagttagcaaagcttaggtaatctgactggtttaataatatcagttcctctgaaatatgtttcagggagaaatataaaggaatcaatattaaactatctctttgtgtgaaagccagctttcctttctttcaacacagtgaaaacctgtatcattgtgaaagcttaaatgcttaagtcttttgctatttattttatttgaaatgcagtatattattatatatattcagaactctaaacctttcatgtttattcaactgaggctgaatcttgaaaatgtgttgcacagcctgacgttgtgctggccaca

SEQ ID NO: 36722 - DNA, 376 bp, Mus musculus
  source 1..376: mol_type = other DNA
tacaagacaatgatccaccttccaagatggcatcttctagacaggtggaatgcaaaaggctcaaagtcttttcctttagcctttctaacactcatgaagagtctcatctgatgactcagtgagaagttcatctgtaagtctgaataagattcagatacaattaaggttgtacattctctaaataaaacaacaaaactacttttcacttataaatttgttggtttacaaatatttcctacttacacgtactagttaatagttctaaaaatcagttctaattattttgcaacataatgtccaaactgagatatttatattttttttccaccacaaaacatttttagattaaaattaccactcacaaactttaaatttc

SEQ ID NO: 36723 - DNA, 293 bp, Mus musculus
  source 1..293: mol_type = other DNA
cagaaggactgaaaggcagtctggctcctgcagcttccccacccagccaaactgcttgctggccattatagtttagtgcaagtgtcaaaactgagttgttacgagccgaggctagcctcaaattcatggtcagacagcagttttctagatttaagtaagtctgagagaatcaaattgtgtatcgtttttctactaattcagtaactataaacaaagatgaaaagggtagttaatgacatcgttcatcatcttccttttttttttttttaaccacaaaaccagaggaggattct

SEQ ID NO: 36724 - DNA, 305 bp, Mus musculus
  source 1..305: mol_type = other DNA
atcatttgcatcttggccaggaatttaacttttaaaagagatgggaaaaccatggaaaatcgaatttggagtaggctttgcctgacccaactgctgtcttaagttggctgtgccagctgttccaaaatccaacccttggatgcctctattcacctttgcaaacccagggggagtcgagctggctgaccaagcaagctaccccgtaggagtgggcaccgatggggaccctggctctacttggatccctggacgcgcctaagtccagtccaggcgaggccagggcccgggaggcgggccgagggggc

SEQ ID NO: 36725 - DNA, 600 bp, Mus musculus
  source 1..600: mol_type = other DNA
aataattgcttggaaagtgaccaagccacttatacagtatctaggatcctgatcatggtaaaaattttttttaatgtgcatctctatctacagcttactattgaatcaaaaaaaccttattaagtcatgtgtttgagatacatatatgcatatttgcacatctcatttgatttatgtaacataatggtcagatatatactcctgaacaatttattgattttatacatacagggtcaaaatatgagttcaattcttaatgtatttaaaacctgatgcctttttaaattaaaaagaattttaatctaaaaataaagaagtttaactttcacctcaaagcttcttttcatactggatagaatgtgcaataactataaaatatttccaagtttctgtataatgcatacatacatccttctgataaaaagttttataaatagctttaaggtgcagctgtctacagtggggagataaacagacttttcggaaagctctcagaattgtttgtatttagcattcacattcaaatgaaaggcgcagtgatgaccccccgccccccgccagcaaccgaagtgcggccgcgcgtgcgcagaggactcgctg

SEQ ID NO: 36726 - DNA, 482 bp, Mus musculus
  source 1..482: mol_type = other DNA
cctggcagatctttcaaaatctgctgttgtaatactaaatcctttccctagtcattaaagaatctacatagtttaccagattcaatgcatatacatttatttacaaaaaaaaaatcttcttgagaggattgatatctttattacttgaagtatgtcttgccatataactagtttagttacttaaggtccttagaattatggtttttcatctaatagattaatctattgagaaaggtaaagagaccacaggatgtagtgtcaagtcttagtttggggagatcactgatatcatgtccatcttataatgcaaaatgcattaagatacagttcaattattgttttaataacaaacaaaactcaaagcaaatatttacctctgtgtgcatgcttcccatcatgatgaaaccttggaaggttatatagattatttcatggaaacagtgtcatctaaaaatttatatttctaaattacaccagggtat

SEQ ID NO: 36727 - DNA, 484 bp, Mus musculus
  source 1..484: mol_type = other DNA
tgtgaacagttaccatgtcaaagataactcttacaaggacaacatttaaatttccattagcatcaaagctggtgcatggcaggagcctaggctggcatggtgctggcttcaaggtatctaggacaaggatcttaaagccctgttattcatggaacagaaaaacttcatgtcattctcatataatattaacagaagccctgaaatacatttattgtcaactgagactcaaaaagaatagatttgaggttgcgggctttaaaatttactcttcacgaagctaaaatattgtaaacacaatatggctacataatttaaaatcatatcacacagatatgtgcaagggccctgattcagtgtggctcttctgggactctcagctatgcctggatgttccttcccctgaagcccagcaccagccaggctgcagaaaagaaaaaaagagtctagatatttattccccggtggactgacagattcactgtaa

SEQ ID NO: 36728 - DNA, 399 bp, Mus musculus
  source 1..399: mol_type = other DNA
gtggccacatctataaaaacgtcttgagtactgaaatttgatagagttcgatgtttaggcctggcacacaagggattacaatcgtaaacactgaattatttcttaattggtctcttcagttataaaaagaagctataaatcaaattatattaaaagcatgggcacttaacaaaacatatcctatatatcatctcctgtttattttatcccatttgttaaacaaaacaaaacaaaattcaccacagaaactgttactttcgctttgtcttcagagtccaatgtgagcctgaattagggcaaaaagtttgcccaggtttccggatctggctgaacccctaggtgagccctcaccccttggccccgcacctgtcccaaagggggccccagccccagggctcc

SEQ ID NO: 36729 - DNA, 291 bp, Mus musculus
  source 1..291: mol_type = other DNA
aagcttccaccaagtgagtttttctttaattacttctttaaaaacagttttcagaacaactgttgtgttttctgaaaaagaaaaagagccacacaattgtatagtatagaatagagtttattttgtcgctgttgtcaggaaactgtgggaagttatggttcctgttttagaaaacacgtttaaaacattaaagctcttcaatttcccctgagagaagcacacgtgcaatccgtcttggccaagttaacaatgccttggcttagtgtgtgtgtggtcagcgcacataaaaga

SEQ ID NO: 36730 - DNA, 410 bp, Mus musculus
  source 1..410: mol_type = other DNA
gaggcagagaatgactttactctctttctcctatgatgacccaaccacaaatggctcccatttgtcttgtggaaacgtgagtggcacgctgcctaccagccaaaggtttgattccttaattcttattcccaattataacaatggacagcatgccctgaacatgggatcctgggactcagtcccctggctcaataagatccatcaggatagaaagtctttgaatacttaagactttaaaaatctctgataatttttaataacttgaacctcagaggaaccagtacttttatacatgtaggcaaaattctcataatcataaaatgaaataagtaaatcttaagaatcatttatttagaaataaataagtcttaaaaagaactctaaaagggactttgtatccttttataaaa

SEQ ID NO: 36731 - DNA, 328 bp, Mus musculus
  source 1..328: mol_type = other DNA
cagaaaataaagctttcatttttaagcttccatctcagaagtgagttttctttaattacttctttaaaatcagtttttagatcaactgttgtgttttctgaaaaagaaaaagaaagggcacatgctgaggaatcctgtcctcctgaagtaccagccacacaattgtatagtatagaatagagtttattttagagtccacctggctgttgccaggtaactgtggggcagagtccagaagaaatggcaacagtgatggttcctgttttagaaaacacaggtttaaaacattaaagctctttagtaacaatgcctgtgtggtcagctcaca

SEQ ID NO: 36732 - DNA, 313 bp, Mus musculus
  source 1..313: mol_type = other DNA
ctcagaaaataaagctttcatttttaagcttccatctcagaagtgagttttcttctttaattacttctttgaaaacagtttttagatggactgttgtgttttctgaaaaagaaaaaagaagagggctcctgctgaggcatcagccacacaattgtatagtatagaatagagtttattttgttttagaaaacacaggtttaaaacattaaagctcttcaaatttcccctgagagaagcacacgtgcaatcctcccctttccacagtggaagcctggccaagttaacaatgccttggtgtgtggtcagcgcacat

SEQ ID NO: 36733 - DNA, 313 bp, Mus musculus
  source 1..313: mol_type = other DNA
ataaagctttcatttttaaggtcccatctctactattcttaaattacttctttgaaaaaacagtttttagattgactgctgtgttttttgaataaaaaaaaagaagtcaagttgtatagtatagaatagagtgtatgacccacctggctgttgccaggtaactgtggggcagcccggttcctgttttagaaaacactggttcaaacattaaagctctttgatcaggaagcaccagggatttcccctgagagaagcacacttgcaatctgtccacagtggaggcctgctgtcttagccagtgtgtgctcacata

SEQ ID NO: 36734 - DNA, 231 bp, Mus musculus
  source 1..231: mol_type = other DNA
acacaattgtatagtatagaatacagtttatttacctggctgttgccaggtaattgtggggcagcccagctttagaaaacacatgtttaaaacattaaacatgtttgatcagactgggaatttcccctgagaaacacttgcaatactgtggaggcctgctagacaggaacctctttccagtcttggccaagttaacatggcctattgtgtgtgtggtcagcttacataaaa

SEQ ID NO: 36735 - DNA, 295 bp, Mus musculus
  source 1..295: mol_type = other DNA
gccagaaagattttgctgaaggaatcctgttatagcagtctcatatgaggctatgccatcatctataagctcgtatctctagctgcatatgtagccccagtacccctgccaggaatgccagggtctgaaatgtatataaagaaaatatttaataaaaaaacctggttgttgccaggtaactgtggggcaaccactttgacagttcctattttagaaaacacatgtttaaaacactaattgggaatttgtaatactcatgaagttaacatgtgtgtgttcagctcacataaaaggg

SEQ ID NO: 36736 - DNA, 651 bp, Mus musculus
  source 1..651: mol_type = other DNA
attgaatccactattaaatagcccagagttctgaatttggattaaatttttgcttaacttgcaaggcacactgttactcttcaaatacagggccattaacaggagaagaatgtggatgtgaccatcctcaatgaaacccagaagctgcttagtttgtcactcgacttaaagagcgttaaagggacactgcaggctctgcgcggcacaccccacccttcctggtagagtaagttctcaggggtgcacacgtgagactggggaacggccataaggcccggctcctgggtttctggaatgcagccccagctcctggcgaggcgtgtggctgccatgcaccgcggatgccaggctgggcgagtgcatccgggcggccgcatggcgttggctccgggaggtggccagcaggagggtgagtcaccggcccccgcggttcgtcccaaggccgggtggactctcgggccgggtggcggagcgatccgggtaagggcggctcggaggcggcgctgcgcgtccccggctcccgcctgcgcagcctgcgcagcccgcgcgctccgctcctcctccgcgcgcgaacttagtcagcggttcgcgccgccgcgcgcccattggccggccgcgcgcgccgcgtcacaatggagcggctccggggcg

SEQ ID NO: 36737 - DNA, 269 bp, Mus musculus
  source 1..269: mol_type = other DNA
gaccttcctgctgaggaagggtttgtgaatgttagagcctgcactctcattttcttggtgttaccagggcaacccaaataatttcaaggccttctcaccaggttagctgtgcagcctagtgtgcactgagtgctgggatcaagaggctcaggtcatcctcagctacgtagctagaggccaaaaaacaaaatcacttaagtttatatggcaagaaacttttagaaatagatctgaatctgagtctattccaattctaagcctcaactcaa

SEQ ID NO: 36738 - DNA, 527 bp, Mus musculus
  source 1..527: mol_type = other DNA
tgctagtttgtgcttttaaactataattgggcctcagatcaatggctgggagagaatccctccccgctatggaacggccccatcttgcagggtccagtaacgagggactcctgccagaccctctgggagttcccaggagggctatttttagcagcagccgctctgcttcaacttagcccagggaggagctgcggtgtaaggaccgatcttccctgctgtgccaaccaggtaggcagctctgagcagcggaatcatccagccgcggagaggcttgatttcccggtggggaacccggggcccgcccagcgcgggcccgcctgccctggacgcctggtggtctcggcagaggaggaagttcccgggcatcgctgcctgcgtcacagcggggctggcaccgcggcggcggctcggcagccgacggcgaccccggggctgggcgctgggcggcgctggctgccgcgggccaggcggcgcgcggggcggcgctggaggcggctccgcttgcaggcggggaggcggagctgggg

SEQ ID NO: 36739 - DNA, 322 bp, Mus musculus
  source 1..322: mol_type = other DNA
aaaaacattttgtttgttttgattgaactaaaataattgggaaactttttttagaacaacttcccaattagcagagaaatctgtttgcgcagacattaagtcgcccagcccggttgcttcaagggaacagacagcctggcacggccacccagcccctcgggtcagccggaccgaccccctaggcaggcgcggcggggtgcgcgggcccagagcaggcaatcacatggaggcccgggcccgccccattggctgcgacccggccagtcgcggcgctcgcaggctgcggttggtcccagagctgcggcgcctgcacgggcctgga

SEQ ID NO: 36740 - DNA, 734 bp, Mus musculus
  source 1..734: mol_type = other DNA
ggctgcgacccggccagtcgcggcgctcgcaggctgcggttggtcccagagctgcggcgcctgcacgggcctggagtgctgctgctcccgtcgccgccgctgccgccgcccggggtgccccggctcctccgccgcgcttagaggtggcagccgcgggcggggccgcggactcagggtccagggcgccgcgcgcctccggggcgcgtcccggtgcagccgccgcccgccgcaggtgatgccgccgcctcccgcctccgcctaagctcccgcacgcgcggcccgggctgcccgcgaaggtgggtgcgcgtcggtccaccctggccgggagggcgcaggtggagcggccccggggcgcgcagacgtccggcctctcggcgccgcgggggagcacggctgctcccggggctgcgatcgggaactccggagggcttcgggaccctggggcggggagtgcgaccaagcccccccaccccgtgctgggagggccctgcgcgggccgggtgccggctgccgcgctcccgcctcggcctccgtgcgcgcgaacgcaggggcggagattgcggcctggttggcccggagccggcgagaccgcctccgtcccgctccgggtgggccactcggggtgctcgcgggttggggcggggaagggaggggagccctgcgccccgccctccgcgcccggggggagggcactggggccgcaggtgcaccctgcgcgccgcgggccatctccg

SEQ ID NO: 36741 - DNA, 293 bp, Mus musculus
  source 1..293: mol_type = other DNA
tcagaatttagctttttaaaatatatatagaataatcatagtttgttgtttctgttctgtttagaaacaagagcaacttaattaaactaacaggttgatgccacctgtttacttttttacaaattaaaaaaagaatatttatttacatgtttgtagagaactgacttcagccggttgtcctctggtgcgttttctgtgattcataatcatgtggaagaaaagttcagctaggcacaagacaagtaatttcctatcctgaagctccctgctgcgtggatctgctgggatgtggc

SEQ ID NO: 36742 - DNA, 332 bp, Mus musculus
  source 1..332: mol_type = other DNA
ccagatttggggaagaattgatgtctggcttcctatctaggtaaccaattttgctctgtgaggacagagagaaaattatttaaaactgtggttcaagtccacaagagtcttcccatagtgttcctgagcagtttctgcaagagaaaggcactccctcctggacccggttgctcttgccaggctccaacatggccggccaaccggcccgcgatccccagggtcaggacccaggagcctgacaactgcctcgctcccaccaccccgcgtcggccaatcggaggcggtgctgcgacgactggcaggcccgcccgaccccgcccccagcctcgctg

SEQ ID NO: 36743 - DNA, 370 bp, Mus musculus
  source 1..370: mol_type = other DNA
aaacgaagatgaaacaacaaccatagtttggtccaggctgagagtgatccttatgcccagtctgtgcttacacagtacagaagcccccactgctccggggctgtgagtgtctgagagaagtcagtgcagagccctcactgctctttccagtttccagaggaagcatcactagggataaccttgttggttctgattgcagaaaacacaccttataaatatatgataaccatcctgtaatagagagtgtgacaatttacttcacgccggtggagcttgagcagccaggggccggtcctggggcgtgcggggcgtggtcgtcccgagggcggggccaccatgagggcggggcctggcagcgacggcgcacgcg

SEQ ID NO: 36744 - DNA, 443 bp, Mus musculus
  source 1..443: mol_type = other DNA
gattactgcttaactactaaaaaacgttttaaagtttttcatgagaaaaagttcgctcaccttcaacaggttaggaacttgttgacggagatttagaagaccctctggggaatctattgattacctaaggcatgttccttagtgcagaatctgcccttatatgttgctggttctttcaacagctggaaaagggaacaggtttggtcgccaccatatttggagcgtgcctactttggggcgggaacctcctccggagtggttaggtcaccgctgggggaggtgggagagcagcggtgcagcgttgctgccgccccccgtgggtctgattggcacgggagctccggcggcccgagagcacgggcgcgcctcgctggcttcccccggcggccggcggccaggcagaggcgggaaagccgcgcgcctgcgccgtgggaaccggagcg

SEQ ID NO: 36745 - DNA, 374 bp, Mus musculus
  source 1..374: mol_type = other DNA
tctttgccactttaggttgtaatgaagaccgtttttcaggaaagatactcccattcttgacaaataaatgtaattatggtgtattcctgtgaatgttaataatacatgattactgcttaactactaaaaaacgttttaaagtttttcatgagaaaaagttcgctcaccttcaacaggttaggaacttgttgacggagatttagaagaccctctggggaatctattgattacctaaggcatgttccttagtgcagaatctgcccttatatgttgctggttctttcaacagctggaaaagggaacaggtttggtcgccaccatatttggagcgtgcctactttggggcgggaacctcctccggagtggttaggtca

SEQ ID NO: 36746 - DNA, 603 bp, Mus musculus
  source 1..603: mol_type = other DNA
aaaaaaagcactttgtatgtgtttttttaaatatatacacgctaattaacaattgcttcaaatacagcagagatctgcttgaagtttttaaacatacactttttctaatcgtactgttaaacaacgaaacacaatgtcaatggaaataaataattgatatttggtatcaaatatttacatcagatgtattttgtagctcaacagtgacctaatgggtgccattttaaattactgcggcctagctaatgcctggcagtagaatttatttaatgattagcggtgcgcccatcagccgggcttggggggcgttcgaagggtcggtaaatcggcgctcgactcagcccccctccccccggcaggtggctgtggcctgggcgggacgcgcgcgcctcgcgtgggcgcgtggggggctcggtgagctggaccaccgggccgggcagccgggcgccctcagcgggcgagcgagcgagcgagcgggcgtctcccacacattcccgtcagggagcgcggcctgaggcctgaggcgcaccgtgcggtgcgggggtcggaggtgcggcggggaaggcgcgcatgcgcgtcgcctcagcctcccgcccggagcgc

SEQ ID NO: 36747 - DNA, 434 bp, Mus musculus
  source 1..434: mol_type = other DNA
ttcactgtgttaactaatctaatgaatggtaataatactaactccttagaaattcttttactatgtatgtatttacacacatacacacacctgtataccgtagcatgaaaatcacagttatgatattccataaaaattattgattgaatatctattgatggggtagggaatttcctggcccagtcccttactgaggccctggcagagcgtagttgccaggccaggagtccgatgcataatccagtggttagtgggttactataagatcctcaagaaccagtggttaaactttttgtttttcgttgagaaaagtaaaaccggacgcccctggggctcgctaactcagcaaaggaccaccgagcccccacgcctcttgcgcaggcgccgagggcttcggaatgcgcatgagcaattagcagcgcgggaagaatcgc

SEQ ID NO: 36748 - DNA, 351 bp, Mus musculus
  source 1..351: mol_type = other DNA
tcttctgaccttgggcaattcaccttttaatagagtagctgcattcaactctaaagcacattcatgcaggcaggaccctgtgtgctcagcagctggagaatttaattcagcagctgtctgagattttttttaaaggaatttttatatcaacaaccaggaatccaataaaactatcttctcctaaggccctggtagtttgaaggatcggccggggatgcccagctgtccttctctgcccgaagggaagcacaggctgggctcatccatcagctaggcggccgagcccccgaggcccgcggtgccctctgcgcgcccgaccccgcccgcgcgtgtgcgcggccgagttagggc

SEQ ID NO: 36749 - DNA, 296 bp, Mus musculus
  source 1..296: mol_type = other DNA
tgaagccctggctgtcctggaactcagaaatacagtttaccgaaacaatacattaagtatctattatcgatttgagactagagaagcaaacctcttggaccaaggagatggctcatgggttaaaggtgccggccgcacctatgaccagagtggctatccttgggatccacatggttggaaaccttgtttggaaaacaaaacacaggaaagtccttggcctggagtacaggtccttcaagcccatccctgtgcttgcaggcccacgccctcctagggagtggcggcacggagcgaat

SEQ ID NO: 36750 - DNA, 604 bp, Mus musculus
  source 1..604: mol_type = other DNA
ctgctgaactgtaggcatgcagacaattttcttatgaataaagaagtgtgatgatcaaattagcaccattatttttctctaagtacaaattcctcctgggaaataactacttttttaattaaaagtagtacttatggcactagtgggtgagattaaataatactgaacaatatgtggattttattttgacatgcacatcaagacagtctactctcctggctgagatgatttgcatctccaggtgggatgaagctgagcagagggagatatcacattgctcagacacatatcatttctgtgatgctttttttaaaccctggtggaccacaggtgctactgcaatacaatgttatagtcaaatattactttcttaagaagcatctaaatgctttttaaatttaaaaattaaaggatgtaattaaagaacaaggcacagaagggatcagtgctgctctagtcagggctgtccactgtcttgggatagcctctctggcaaaagagggcaagtcacagcacctttgtgacatttcctgcattacagacagttctcatagtgaaggagaacgtggagtgtcctcagaattctcattaggcacaataaaag

SEQ ID NO: 36751 - DNA, 410 bp, Mus musculus
  source 1..410: mol_type = other DNA
tctcatttctaggtgaaataggaaaaaaaaaacgttcacacagaaacattttatgtagatacacttatcagttccggaggtgaggcacctgtaactttggtaactttgaactcagttaagaaacagttaatatctgtaagagattgtgttagggatgcccacctgaagaaatacggcttctgggaccggggcgctgggacctgttcagagcccggagcttcgacaggacctgttcatgtcgctcggctctagcgacgtggcacgggaggacagcccgggcctcgccctgcgcggtccccgaggcccgggcgcgcggcgtgtgcggggcgagcgggcgggcgcgggagggacgccgcagctcggctcccgcaggcgcccatggccccgccgcgcccgccccgcctgctgcc

SEQ ID NO: 36752 - DNA, 323 bp, Mus musculus
  source 1..323: mol_type = other DNA
ggtcagaaactgccctgccatcagagctgtcctgccacctggcctgaagcaagggcgatgaaggttatcgtagaataaaacactctttgtgtttacatactatttgagtcctaggtatcattccttatcatggacccttatccccatctttcataaagagggcagcgagtgcgcctgcgcagcagcgcccggtcacgtggctacgggctttgagtcctaggcgcgcggtgcctggtccgcagcatttagggaccggctgcaaactaggtgggggcgggaattttccttccggggcggattcggctgcgcgctgttgggctcgg

SEQ ID NO: 36753 - DNA, 755 bp, Mus musculus
  source 1..755: mol_type = other DNA
tactgatgcagcaaaactcattaacatatgtaatattggaaatgtttaagattttcagttgtacatgcagttttaaatgtcacacaggtcattgaaattaacagctttttatatatatttggaatatttactaataaaatttttatcagttatgtttgccttcaaattagcatttaataaaggtttagaatttggcaatttggctccttaattctaagcatagcttgggacttagcaatattatacaatgcaactttggtatttttctctgataattacagtaaattgtatgtataaggtgtatattttagtgtctttaataattaatgtttttatggcattagtaatttctttttttcaaaataaatcttattttttaaattacattgagtaagaaaaataaaaatgtaaatatcatttatttttaaatgcagttaatcagtgacaataagataatcatgaattattggcattttttattctacaagaatgataaaatgtttcattagatttattattattacatagagtatttgaccttgcaatgtcatagttgatatgaaaaggtttaggaaggtgttcataaaaaccccattgatgttttaacatgtagtttgttcactataaaaccctgttaatgagtaagcctgcataaatagcatgtactcagtgatcttagaaatgtaactgatgacatcattgatgcaccagctgctgatttgttgctggaacacaggtgcaggatccaagctgtg

SEQ ID NO: 36754 - DNA, 310 bp, Mus musculus
  source 1..310: mol_type = other DNA
ttattaattttattttctttaaagtgatttgaaaacattaaatttcaccttagaatttgagagtactttatttaggatcccaaggggagtcaccacactctgtaaaatcttcagtctcttcaaggcaatgctgcaaatcattgaaggcctcacgagtccccgtgtacccttgcttgtgacaccagtggtcctgaagtgtcccagataccttgcagaccgagcattgctgctctgaaatctgtgatttcaaatccaaatgaaaactgaaccaagtatgagttgtatatcctgtgtgttcctgaagggacaa

SEQ ID NO: 36755 - DNA, 535 bp, Mus musculus
  source 1..535: mol_type = other DNA
caaggtgtgactgtaacagtctctttctttaacacattgttcaacaggaacacaaaagactgtagttaattttaatactaggtacatgaaatgccaaccttctgaaatggttaccttttgcaaaaaataatctttcagagtatgtcagaaggtttttccttttgttcaggaatatatttgataaagttagactattctgcagttagaatattatttttaaattgtgtgtgtgtgtgtgtgtgtgagagagagagagagacagagacagagttataggtgcctcagccaccagacacaggccctgggaattgaagtcgaaattgaaaaatgtgttaagcttcgtttagatctattacagtctatatattttacatacagagccattatagagaatctaagttcacaatttggataaacagcagtgtcacttggatttttgttgtctacaaagatctacctgcctctgctgcaactgaaggcaagagtctgggtctgcggctgcgcaaaagccaaagtccagcatgcactgcggcaa

SEQ ID NO: 36756 - DNA, 462 bp, Mus musculus
  source 1..462: mol_type = other DNA
agcccttgtgagcgagggtctctctctctctcttttctgcctttgcctcccaaaagtatactttcctgattttttgatatttacaagtcaaaaaagaagaagcaatatatttaaaggtgttttcggagaagtacttacacatctttttattactaattttgatgctgtaatgaactaatacaaaaaaacccagttaattgtgtgataccatgtaaattatgtttcataaaccgtttcattctgaattattagacaacaaacacaatgtaaagttttataggttaactgctattactgaacgttactgctaatgaagcatttttaaaagcccctgatataatgcctaaagaaagtaatttttaaagaatggaaaagcctttgtttaggaatgaaaaatctaatcattaagtaatttttttaaatgtcccattgacaaaagtgagagcgaaggtccttgccccg

SEQ ID NO: 36757 - DNA, 634 bp, Mus musculus
  source 1..634: mol_type = other DNA
tatatttaaaggtgttttcggagaagtacttacacatctttttattactaattttgatgctgtaatgaactaatacaaaaaaacccagttaattgtgtgataccatgtaaattatgtttcataaaccgtttcattctgaattattagacaacaaacacaatgtaaagttttataggttaactgctattactgaacgttactgctaatgaagcatttttaaaagcccctgatataatgcctaaagaaagtaatttttaaagaatggaaaagcctttgtttaggaatgaaaaatctaatcattaagtaatttttttaaatgtcccattgacaaaagtgagagcgaaggtccttgccccgcaggcgcgaaaaaatcacaccctaccgcgcctggctgaggcgaagggaggccatttctccctgctcctgcagggcagggtgtccaggctccagcacctccagaggccgagcaggagagccgcgtgcggcgcaggtcctgttcggcgagcccgatccgcccgacccagcaggtagcgcaggccgcactcctggccccgcccccggaccggaccctccccctccgccgctcgccccgccccgccctgggcccgccccctccgccgctcgccccgccctc

SEQ ID NO: 36758 - DNA, 515 bp, Mus musculus
  source 1..515: mol_type = other DNA
cgtggttctaccttttaggtacctacaattgaagagagaaaagtcaagtgcctgcataagcaaattcaattgtttctgtaaattaattacattttacattttcaggatgcgctttaatcaagtgcttttaaaacactctctaaactgggttcctttagaataaacattgctcagtagtctgagacctcagagacgaccaccacctgccttggcctcctcccccgaaggcactacagcctgcgttgggaagctcgctctccccggcgcagcctcagaaagaggcccgcgcgtgcgtggtactcaaaccaaggtctcagggtcccagcctgggacggtggctcttggaagcccgggtacttgggcctagaagagggggtcgggacagcacatctacctcctcacgcttcgcccggaaccgggctgggggcgggcccagggagggcggggcgagcggcggagggggcgggcccagggcggggcggggcgagcggcggagggggagggtccggtccggg

SEQ ID NO: 36759 - DNA, 366 bp, Mus musculus
  source 1..366: mol_type = other DNA
atatagtcatcaaatgatcgtgagaagctcactcactggccctggaaggtagtgagtctcatggccctcactcgcctgctagccagtgcgctggcaggacagcccagcagctggctttagtgttctttctttagccaagaaagacaaaaccacctccgggtgtactgccccagggctgttttgagagcatttctaagagcctctaaggaaggtgtatatccacatctccgcagcaccggctgctccaccagagctggcgcaaagtcaacagctgagacacgcgacgcatctggccgggcgtgaagcggggcgggtccccagcttccactcaaggccggcgcagctgctgcagcgccccgccccttg

SEQ ID NO: 36760 - DNA, 320 bp, Mus musculus
  source 1..320: mol_type = other DNA
aagcccaaagacccggggcgtgcgccggcctgtgccccagtctttgccgccgcaccctaggcctccctagggtcgcccccggagcgggccaggagctgggacgcagtctcagccccgcctcctgcagggctcaggttcggtcatgctcagggaccctggcctcctggccaggccttctggccaccccgcatttttggtgagcagatcagaaaataattctttctgggacttagtttctgaagcaaggcggccacaccaggacacctggaggttttggctccaagccccttccgggtccacgcatccctggcgtggccaga

SEQ ID NO: 36761 - DNA, 300 bp, Mus musculus
  source 1..300: mol_type = other DNA
gcctgggttctgggacgaagcccaaagacccggggcgtgcgccggcctgtgccccagtctttgccgccgcaccctaggcctccctagggtcgcccccggagcgggccaggagctgggacgcagtctcagccccgcctcctgcagggctcaggttcggtcatgctcagggaccctggcctcctggccaggccttctggccaccccgcatttttggtgagcagatcagaaaataattctttctgggacttagtttctgaagcaaggcggccacaccaggacacctggaggttttggctccaa

SEQ ID NO: 36762 - DNA, 466 bp, Mus musculus
  source 1..466: mol_type = other DNA
tgggtctgcgcgtggcgtcctcgcccaggccacaaacctaccaacctcgtgctgcagctggcgtccagggggcggggcggcacgctcctggcacagcggcccgccaggcttcccctggtcatctgacaaggcgctcagaaggaggcctccagaagcccgctgccgccaccgcttgggtggctccagaacccagcagccgatgctctgcagcaggtggggacccgcctgcgccctcgggacgtccccacagccccgcctgagcgggaggggggtcagggcgcgggcaccgagctctgagagtggagctgccccatcccccagtgggacagcgggccacgagcctcctttgcgcaaggggtcaggaggtgacaggaagggggtatccttgccaactccttgggcacccgggctatctatagagtccccgggatgtctgagaaatagtattcttggctcctggagactt

SEQ ID NO: 36763 - DNA, 316 bp, Mus musculus
  source 1..316: mol_type = other DNA
cacgccagggatgcgtggacccggaaggggcttggagccaaaacctccaggtgtcctggtgtggccgccttgcttcagaaactaagtcccagaaagaattattttctgatctgctcaccaaaaatgcggggtggccagaaggcctggccaggaggccagggtccctgagcatgaccgaacctgagccctgcaggaggcggggctgagactgcgtcccagctcctggcccgctccgggggcgaccctagggaggcctagggtgcggcggcaaagactggggcacaggccggcgcacgccccgggtctttgggcttcg

SEQ ID NO: 36764 - DNA, 571 bp, Mus musculus
  source 1..571: mol_type = other DNA
aatacaaaactaacaattgtggttttacagtggtttttccttttttacttgtttcctaaagtaaaaaagagagtgtaaaatatgaatatggagagctcccttttatttctgtaagctttccaaaatgtgtttaaaaatatgaattacttagtgaaaggttattttcagcaacctttgtaaaaagaagagatatatagctgctttctcaagtgtcttgtatattctagaaaattttagaatgctcatctcagaagttctaattacaaaaattaaaattctcttaaaaaattaaaaaatacactctggaggcagaggcaggcggatttctgagttcgaggccagcctggtctacaaagtgaactccaggacagccaggctataaaaaaaaaaaaaaaaaaaaaaacttccttttgtctgagatttgaaacattgtggaatacttgacacatcaagtctcttcccagtgaactgcagtcgtcagaggtttgttcaaagtgagccaaagctaagatttggtaacctagtgacagctgccctcaagacatcatagcacaacctattatgagttcgt

SEQ ID NO: 36765 - DNA, 283 bp, Mus musculus
  source 1..283: mol_type = other DNA
gtgtggtccagactggcttaattcttgagtttacatttaactttattaaaaacaacaaaaatccaaataaaaatttgaacttgaagagcttggcatatattccatggagactccgctcctgatatctggtaactgatttacagagaatcattttcatttacatggtttcattgcagctatttctttaaaaaaaaaagtatatgtggcaaaatgtgaagaaatagtttagtgcaatttcagagatttgtttgaagaaagttaataattgataaagttgaaataa

SEQ ID NO: 36766 - DNA, 603 bp, Mus musculus
  source 1..603: mol_type = other DNA
gtttttccttttttacttgtttcctaaagtaaaaaagagagtgtaaaatatgaatatggagagctcccttttatttctgtaagctttccaaaatgtgtttaaaaatatgaattacttagtgaaaggttattttcagcaacctttgtaaaaagaagagatatatagctgctttctcaagtgtcttgtatattctagaaaattttagaatgctcatctcagaagttctaattacaaaaattaaaattctcttaaaaaattaaaaaatacactctggaggcagaggcaggcggatttctgagttcgaggccagcctggtctacaaagtgaactccaggacagccaggctataaaaaaaaaaaaaaaaaaaaaaacttccttttgtctgagatttgaaacattgtggaatacttgacacatcaagtctcttcccagtgaactgcagtcgtcagaggtttgttcaaagtgagccaaagctaagatttggtaacctagtgacagctgccctcaagacatcatagcacaacctattatgagttcgtgcgcaagctgcgtcggtgagccctgggcagagggtccggcggagggatccgcagatactgcggc

SEQ ID NO: 36767 - DNA, 590 bp, Mus musculus
  source 1..590: mol_type = other DNA
tgcttgcttctgtcactcaagtgcagggatcaaaggaatgaattgcctcagactattttgaaaatttcaaagctctaatcttgttgaaaaatagtcttttctagaagtgcttgtcttacaaatctaaatgtaaaagccagtggtatcatattagtaaacaattttatccttttggtcactttcaagtatataacaaaaatgatttatattgcctttattattttttttttttgttattcctttgacaggacccaaatgaataggctgtttttgtcccaaactaagtaatttccttctaagaatttcttggttggtgttggctccgaaaaaacccacggtttattctagagagtgctccgggcagccctcgcaaagctgcgcgtcgctgtgcgcgccccaggcctgcgcggatgctcgcccggggggctccgagggggcgcctgactggccaggggcggctcgagaggaggggcggaggaccgagagggatctccccgcctccgttcctttcggcttcgccagcgcggccggggccctaacctgctcgaacccattatgccgtagaggccggccggggctctttaaggccc

SEQ ID NO: 36768 - DNA, 150 bp, Mus musculus
  source 1..150: mol_type = other DNA
tcattatggatggtgtgagccaccagagtagtcagtgctcttaaagaattttaaaatagatttaggtgatatttgtctgaggttaaagtccaagctgacagaatcaaattagagtatgcctggatattcaaaaggctttgctttgcatcg

SEQ ID NO: 36769 - DNA, 353 bp, Mus musculus
  source 1..353: mol_type = other DNA
ccaggctggcttccaattcactaggtagcctaggctagccttactgaggcccagtcctaaaaagaaacttcttgagaagagtctcttctaactcaaacttgaggctctgaggctgagcttcccggcgaattccgaattcagcataggcaaattcatgtatttaacttaatttttaccccctcctgcttagaaaaataattatataagtgtgtgtttttaaaaatttctgagttcgagaccagcctggtctacagagtgaatcccatcctccatgctcgttgagaggaggaagatgacattcatcctcctaccggcagggggcgatagcccgcgcatcttgaggcctacagcca

SEQ ID NO: 36770 - DNA, 578 bp, Mus musculus
  source 1..578: mol_type = other DNA
ggacctgcatctccctgcattgaagtcactaattaactgagctgctctgctatatcctagaagatccggcatttatttatttaattatgtatttaacgtgtgaatcatgatttgcaaacaatttgcattaaatttctgagcgggaaggagtcccttcctcccctagatagcggtggtcgcgtctccggagagcctcctttccctggagaggccgtgcaatccgctcgcacaggtccagagcgcggacggcgggactccgcgcgtgaagccgcaagcctcacagtgaagtgggcgctccacggagcccacgttttgcgcacccccgtgctgtccgcgcctcccctttaagcacggaggcgcaggcggatgcggcggacgcgaggctcgactcccctttatggcggagccccgcgcccgcgccttgacgaccgccgcggctggcggtgggggtggggttctgcgcgcggagccggcctccgctacccgccgccctcgccgcagcgcggccccggggagcgcgcgccgggggcgggccgtgggcgggccggcggggcaggggcggggaggccggcgggcgg

SEQ ID NO: 36771 - DNA, 460 bp, Mus musculus
  source 1..460: mol_type = other DNA
agaccaggctggccttgaatcataagaggtatttcttcagagagaaaattcagtactgcctctgtgacataatctgtgataaaaagtatatgactctgaaaatattttcacaaaatagaaacgtattacagttgcattcaaatataagtcaaagatataagcatgcattccatttaatataaaagcctgcgtgttccttcaatcaactgcttggataaggtaaaagaaaagtattttttccagttaataatttcctttcttcagaaaggaaatcaccccatcaatgagcaatatcctatttctgagggcattaaaaaacgatctctctttttaaaagagaagcgctgcgctcactattgttggtccgggacgcagggcgcggtgttcctccgcgctcgccgcgcaggccccgcccctctgcggctctggagagctgccattcggccccggagtagctccg

SEQ ID NO: 36772 - DNA, 455 bp, Mus musculus
  source 1..455: mol_type = other DNA
tgctgatcagtactgtagcattcacgtaagaattttctagccaattggatacgtctggtatttatttcctacgtttacctgtagtatgtgtacgtagaaaggcttatctatattacactctataaaatcctgtgacaggttatacagtattttatttcaagaaagaagtagagcaaagtctggcagcctcctttccgatctcgggaaagcccttttccagccaggcgagcctcctctgcgctcggaagcctgggacactctcgcactccgaggcgccgagttcgaaccgccgcggcagccgttgggacccgcctcccgggccccgaccccgcccaccacgcggggctctgcgaacgggagcggggcgcagggcatgccgtggtcacctcggactacatttcccgtcgttacccccgccaacgttgattggcgtgaggggacgctggccccgccct

SEQ ID NO: 36773 - DNA, 510 bp, Mus musculus
  source 1..510: mol_type = other DNA
aacgccattgacgtcaccagtgctggcctctttccgaccagaggaaagggactggccaaacttgtgagttccaggctcccaggagccccgcttaagtacgcctgcgccaagcaggccagtttcccaggagaccctcctcggagtgcggcccggcccaaggaaggctagccctagaaacactccttccggccggccggcagcgtgaaggtagccggccgccccgcgcagcaacgctgcgggcagagcggacaggagcagcacggggaatggcagccacatcctgccgcccatccctgtcgatctctgcctggacgctgaaatccctctggaaggtggaagcactgccttccactgggccgggcgagggcggggccagcgtcccctcacgccaatcaacgttggcgggggtaacgacgggaaatgtagtccgaggtgaccacggcatgccctgcgccccgctcccgttcgcagagccccgcgtggtgggcggggtcggggcccgggaggcgg

SEQ ID NO: 36774 - DNA, 346 bp, Mus musculus
  source 1..346: mol_type = other DNA
aaccactaaaatttaatatctgaagctataaaacagaagaaacttcaccaaaactgatgctttcatgaactagatgaaaatttagcttacaaatcaaatataaaggttgctatccaagatattaaggaattcattcttggcttcctagaaaaggacagctttccaaagagccccagacccgagtctgtcagagtcgtcctgtctggctcaaggcgcaggggactctcggtggcaccggaagcgaggctcccgaatggatcagccggggaggcagggactcccgggagaatcaccccggggccggtccgcggggaacgtcgtcagggagcgaccgcgggcactcgcc

SEQ ID NO: 36775 - DNA, 403 bp, Mus musculus
  source 1..403: mol_type = other DNA
ttgacaatgatagtctcctggaaaccattttcaaaagttacaactttccactattaattaatgtgtatcttaaaaaaaaaaaaaagtgatttctgtgatctagttattagtaatcacgactctcataagataaaccttttttttttcttgtcttcctttcaaaagcaagtctcacaaatgagaacagggagctctgatctgaatgcgaccagggctcccctgccacgtggccctccgcgggcccttctgcccgcagagcaagcgagctccagggcccgacggaggagacgccgggtcgccgtgcgtgggggagcggcaggcggaagctgcgggctgccaagccccgcggctcccgcccgtccgggagggggtaggggcggggcgtttccggtggcgcaaagcg

SEQ ID NO: 36776 - DNA, 701 bp, Mus musculus
  source 1..701: mol_type = other DNA
ttcaccggtcccgagggcccggcagccgcccgcgtttctccaggagagggctccggagcgccagctggagatgcggggaccctgagtcccgggccgggcccggcccctgacccggcgaggggcgcctcccggggcccgcagcacagcagggcggcgccgagcagagaggctccggcggccgcccctagccggaacggctccccgcgcagctcggagcccagtgagaagcacttgaggccgacggcggcggcgctgagcgcgcaggcgagcagcaggcaggaggaaagcgcggcgcaggccccgcggacgctccacttcatcctccgcgccggagccggcccgcacccggcgcgcccgccgccgcccgccgccgcccccgccgcctgcgcctcctcccggcgccgcgcggccggaccgccggcctcgtcctcccgggctcgcgccgctgtcactggagcccgcatcctccgcctcccgccgccgccgcgaccccgcaccgggaatcaagccggcgcggaaaaccgcaaggtgcgcgcgccccctccccagaccgcggcgccgatccccggacgcgcggccccccctccccgcggccccgcgcggcccccaggacgcccctccggacctcccctaggagagggggccctcgctaagtctccgccttcctgccgctgtccagagctcggactgcggacctgggc

SEQ ID NO: 36777 - DNA, 274 bp, Mus musculus
  source 1..274: mol_type = other DNA
caagtttctaaattcgagaaagtaaaacacttccacttggctcacacaacactctgtgtaattccactgtgtcatatgaactttatacgctgctcagcctgagcccctcctgccattgatagccaaatggctgcagagggctgtttactccagacctgtgctctccaccaccttcccagggtacctgagccaaggaagaccagggactcgtttcatcagaaatgacattccttcgtctcttgctgacaacagggtttgcagaatccatgtgtac

SEQ ID NO: 36778 - DNA, 366 bp, Mus musculus
  source 1..366: mol_type = other DNA
cattcagtgggtggcttgctactttataactgtaatcttgctactgttatgggtcataatgtaaatacttttggagataagtgtttgccaaaggctagagaggtacccactctggggacatggactgcagtatgaggcctgaaaaggagggactcaggatctgttcatttggatgaacattacctgtaaagcccaatggacaatgccggaaattgcaggaaagccctggaaggttgctgacctctcaggaaggaacccaccgcacccaatgggccgctggagtcggccaggtgtgccgccggtgctgaagtaccacagccccgtgggaacgctcggtccggcagcgctttcactgcggcgcatgcg

SEQ ID NO: 36779 - DNA, 246 bp, Mus musculus
  source 1..246: mol_type = other DNA
ggactttacctacaaatggggaaacaataagcttgttcagacccgtatgattgacaggtggtaccatccaatattgaacacactagtctgaatagggctacagtggcaagtgtcagatgactcttgtcaactgctttaggccagagtcaggcgacatcctctaggaggatcaacttcaacaatttggaggacctttaaggaaatgcagactttgctgaaaagttacctctaaaagggaatttttcc

SEQ ID NO: 36780 - DNA, 262 bp, Mus musculus
  source 1..262: mol_type = other DNA
gagacagggtttctctgtgtagccctggctgtcctttgtagaccaggctggccttgggattaaaggcgataacccctttcagggcattccttaaacaaacaaacaagaacagactttcttttctcagtttatgccatgcacagtggacacgtcctgaacaacccggcggagtttctccaggtcaattgctgcctgcacgcgcctgcgctctctggcgcctttcagaggccccgcctctctcgtttgcgaggtgggagctgag

SEQ ID NO: 36781 - DNA, 383 bp, Mus musculus
  source 1..383: mol_type = other DNA
ctcttctactttgaatctgctaggtcaaaggaacataatccttaagaatgacagcttaggtgtccccacatgctctgacttctgcgataactgcagggataccaggccaaccttgtggccactgggctctgcagtgcagctgccgcagagttgaaatcccgctagaggcggggctgtggctgtctcccaggagcccccgcccatcccaccaaagccacatttggcggctctgcacaccggagaaggagggtctccggggcccctaatgcagctgtcgcgcgcgccaggccaggatctgggaaccgggggcgcggctgccccccctacctccgccgagccccgccctcctcgtcatgcgggacgcgggcgggggcgcctctgag

SEQ ID NO: 36782 - DNA, 351 bp, Mus musculus
  source 1..351: mol_type = other DNA
ctttcttgggcttaaggatccatttttcagtccaaagaccaaaacataagtgtctgtggctcataggctggctgcttgtctgcaagatacattagggacacttagggtgggctccaggcctcgctttaccttgaggcgtcaggcgcgagcggcgggctctggggcggtccgcagcgcgcgcccaacgtcccgcgacgctctagccacctaggctggacctgggccagcggtcctaggagcttgaggtccgtaggatcgcaccctctgcgcctgcgcctgctgctgctgctggctctgcagaaacacgcgcccttccgcctgctgcgtcagggcggggccgcagcgtcggga

SEQ ID NO: 36783 - DNA, 372 bp, Mus musculus
  source 1..372: mol_type = other DNA
tttcccgcagaccctgcccggagagatgactccctgcggccctctgaccccggtgaccgtcgcagcgaccctcctgggctgctcctgcctcccgcggcctggcgacgccttacgcctcaccctcggccaggacccgccgcacccgcagacgcagctcgcccagcagcagcgacatggcgtcggccgctccgcggcagcgggagccaggctccagctccgcactgccgggttagcagctgcgggcgaacaacccggccatcttccgcccgcgccgtgacgtaaatcagagagcgagttgcgtcccgacgctgcggccccgccctgacgcagcaggcggaagggcgcgtgtttctgcagagccagcagcagcag

SEQ ID NO: 36784 - DNA, 283 bp, Mus musculus
  source 1..283: mol_type = other DNA
cagagacagctgtgagtttcaggctagactggtctatacagcaaaggacaacatattgagactctgcctacatccaaccaggtagtatctagttgctgtctatggacaccaaactttggctttcctgaggacctcaggaactatgaacactcaagtgtgcacaattcaaatcttaaagatttgcactagatttcggaacgtctcatccgtccagaatgagagcagtcccatttcggaaaagctctggcggaactcgccagcacggggcggcgcgtgactgggg

SEQ ID NO: 36785 - DNA, 497 bp, Mus musculus
  source 1..497: mol_type = other DNA
agtaagtctcagagacaaaaaacattctagacctagtttagattgtactagaaacttccaggacttgttaagaagactttttgtagaagaccctagatctatttctagtacaaaacatctgtaactccagttccaggaaatccagatcaatcatactgataaaataaaataaatatatatttttttaaaagacagagcctctctacatagcctcagttactagataggggcccttgagggctgctgacaatagaggcagaatgactcctaggtccaaagtcataggcattgtctggacaacacaaagctatggttagatggccttcccttgcatgcaggtacaaagacctgggaacacagtgggagaaagttttgccatggtgtgtgtgtgtgtgtgtgcgcgcgcgcgcgcgcgcgtagaattaggatacgaccagaggccccgcctttggcaggacggcaccgcccctcaggaggccctctccagtctggccccg

SEQ ID NO: 36786 - DNA, 383 bp, Mus musculus
  source 1..383: mol_type = other DNA
ctccatgatggtggacagacagaagcggctgcacctggagcacccacccctctgtaaaggggagtttagctcaccggattagcagctcaggtaacacagctatcttttgggtaaataatttaacagtgagcccagcggagtattctccacagatcagcctcagaggtgcctgccaaccagctctctgtctgttaagccagagtgattggaggagaacctagattgccatttctcctagacacttggggtgagcctcagagtgttcaatgacccttatgtatcattgtttttataagctagaatgcctgctagacaaccaccctaccagggaagctgctatccacagagagtgtttgattaatattacaaacaagcactttgga

SEQ ID NO: 36787 - DNA, 330 bp, Mus musculus
  source 1..330: mol_type = other DNA
caagactgtaggaccctctcagccttcctaaggtcctaggtacaactagatgctcaagtcagggcttcgttggactccagcactggagcccttcctcctgtttaaagccgggagtagagacagtgcagtaacggccagctctgggggccaggggcctagctggtgcagataccgagtgggctccgcggccatcagctggtcttcaggctagcgggaccgcgcgttcccagagcccaggggcgggggcgcggcgaggcagggccgactgggcgcgctccggggagccgccagcctgaagggccggaagttgtgcggggcggagctcagggc

SEQ ID NO: 36788 - DNA, 311 bp, Mus musculus
  source 1..311: mol_type = other DNA
gtacatttacactcagcaattaaaaacaatgaattcatgaaattcttggtatcatcctgagtgaggtaacagaaggaagacctaagtgtggatacttcatttctccttcatatgtcagcaagattttgctgcaaggaccctgatatatctcatgtgaggctaggccagtgcctggcaaacacagatggcctagtcggccatcgttgggaagagaggccccttggtcttgcaaactttatatgccccaatacaggggtcactatttgaaatgtgaacacacacagtgttcactcactgataagtgaatgtta

SEQ ID NO: 36789 - DNA, 412 bp, Mus musculus
  source 1..412: mol_type = other DNA
atacacattataatttctgaacatcagttgttgttagtcagatggcatcttatttcattaatgcttactgagtgcatatatgtatttgtatatacaaatacattttaaaatataaactgttgaaaccatgtaaaattgcatgtatttatgtattccttaaaggagatttacagtctcttgtaagtgtgtaggctagaagctttgcaagctttctttcatggtctacctatgctctttctagaatatttataggatgagggaatattttctaagaggatacattgaattgtttcctccaatctttaaaaacaagatcaaaaagaagtcttcattatggaaataccccaaaatctaagtggtttcttcaccaaatgtcaattctcacaaaaatcaattttagaaaacttcagtg

SEQ ID NO: 36790 - DNA, 492 bp, Mus musculus
  source 1..492: mol_type = other DNA
atgtctttaagggatttattaacttcctcttttaagttgtaagatagtatgtaagcatgggttgctttttaaatatttcatgcaacagacaggttgagtgttgaatctgtgtaattccaggcattactgtatgtaatgggatcacacatacaatgttacatgtgagactgtccttccctagactagaccatggaagatataatgtcccatgattcaccttaaagtctaaacgacatgagacagttatgaccttctcaactcttgttttactatggaagttctaatgaaatccattattatgattgccaattgtgttcttacatctgagaaattatggcatctaagcatgaacttcacaacatgtttacagaaatgttttgatcaaaggttttcagacctcagatgtggtgtacttaagtggattttagccttaaaacagacacatgtaaatgtgtgtgtgatgtttgtctgcacaagaaacagatttcacaa

SEQ ID NO: 36791 - DNA, 574 bp, Mus musculus
  source 1..574: mol_type = other DNA
cacacacattaaataaataaatctttaaaaaaagttttttttaaaacttatctagtgttacaaattcttatggtgataaacagtcataattaataaattccacattaatattttcttgtgaataatttttatatagaactgaccaggattcttgttgatttcatcagtagcaaaaaacaataccagaaagaactcatatcttcttgcaggtattctaaataatggagatgtttgaaatataaaatttcaattgcagtgaagtttgtaatataatagatgttagatttctgtctaactgtattggaataagcctcataaattagagaactttagagttgaatacaatttaagaatttgtagatgaaaatcgataaagattgttttatctctgaatactaaccttgaactagatttcagtcctattgaagagactattataaaataatcttcagttgtaatattacttaaagcacatatgatgcacataatgcattctccttaaattttttttatctaaatgccttttactcttatctatgtttcctctgtagaggaactttctcaagaagaggtt

SEQ ID NO: 36792 - DNA, 453 bp, Mus musculus
  source 1..453: mol_type = other DNA
agccctggctgtcctggaactcactttgtagaccaggctgagtagggtaaccttatattaatcattaattaagtacatgtgaatgaaaccattttccaccaaactttagtaattggtgtaacaatgcacagtgctgccctgtttgtaagttcaaatttgtatattacttaaaatctttgtatgattaagtacgacttttgttaagacaaagaaaaagatatgttcactattatctaatatttacataccatttaagtttacacctcccttctgtttttggataaaagacacacaatttttattatttacaagtaagcctgggacaggccgcgaggggcgtggtcggggcgcacgcggagtccacccccccccccccgccccccccccgcttccccctatccgggtgattgatgggaagaggaagccggggtcggtgagtcgccgcccgtggcc

SEQ ID NO: 36793 - DNA, 287 bp, Mus musculus
  source 1..287: mol_type = other DNA
acaaggtggggtctgtcaaccttgccctgtaacagccagctctgccaggacagagacatctgtctttgttgagtaggttttccctttataaacgcaaaccttattattaaactttgagccttaaatcagcctctgatcctgggtctgaatcccaaagaaaacagaactattgtttgcccatgacacaatttaattgttagtaatgaatgtgcaagctccctaccttgattcaaggaggagcctccctggggctgcaattggaaatccctgcaggtctggacttgcag

SEQ ID NO: 36794 - DNA, 410 bp, Mus musculus
  source 1..410: mol_type = other DNA
ccattctgacttgtacaagatagattctcaaagtagtcaagaattctctatatatcttgtatattaggcctctataaatctactttctactactggcaaagaggagtaatagagtatacaggataagtattgccctgtaatttcttaatttttttattatagtcttgtacttcatttttaaaagacttatacatctgtcgattttattcatcataatctaatcatagtgttgtttttctggaaaatgatagaccacctatttttgttttctgaaaatttactatgagtttcttgaattttttaaaagcttaagttgtcaacctacagtcatcttagggagcctcacttgaggttatcttacgcgctcgtgaccggccaggaaagacgcaacaagccagaatcttcttttt

SEQ ID NO: 36795 - DNA, 214 bp, Mus musculus
  source 1..214: mol_type = other DNA
tacttatctgtgggatatgttacaggcagtgtgacttactattcgctaagctttagtaaatcctttaactccaatggatacaacagaatttgtagaatctaggactctctgagtttctgggtcccgcgagtggctaggacctcaggggacaccgcacatggccgctttcccctctgactggcaggtccgcgtagaggctctgattggcgactcg

SEQ ID NO: 36796 - DNA, 331 bp, Mus musculus
  source 1..331: mol_type = other DNA
aggggaccttgggaacccagggaggtctgcttataatgcagcttcagccaatgggggcagcaggggcacgccttctatttcagtttatgatttaattttctgtgtaaacttttgatgaactttttaacaagtgatcatgtatgctgaagtaagcctattaatttctataaactattgttacccaaaatctctccctaccttgattccaggtgatcacagggttactgcctccctggggctgcgccagaaatacaaatccctgtagatcctgcactgtgtacatcgagtcgccaatcagagcctctacgcggacctgccagtcagaggggaa

SEQ ID NO: 36797 - DNA, 172 bp, Mus musculus
  source 1..172: mol_type = other DNA
agtctgagagagcttcaggcaagtagtttcctgtggcccaagtaagtttcaacagaaacatgaatatttgtaatttcttataactaagcataaaagctaacacattttataacttatttgaattctattttaacattcagtgctagattatttcaatagtcttcataaaagt

SEQ ID NO: 36798 - DNA, 423 bp, Mus musculus
  source 1..423: mol_type = other DNA
cccacccctaatgcagggactaggtaggcaccgaaggtatgcatgcatgtgtcctgactatgcgtgacatagcggccacgcccctgcaggggacagagtcttttgggggagggagctcgggccacagactcgctagtgggacagcgtgaacacccgcggggtgccgggaccgcaggtcagtgactcatgggcccaggagtcacccgggggtgggtcggtccaggggtcacccagggttccctgggggggagtgcgggtccctagcacagctcagcaggcccatccccacccgccgcagctgcagctcccatgggagaccaggcagactggatgtcgcagctgtgccctcagctgtgggatgtccccctgcaccacctgtccatcccaggtgagtacggggccaacctcacgttctccggatgc

SEQ ID NO: 36799 - DNA, 344 bp, Mus musculus
  source 1..344: mol_type = other DNA
tcctggatgcagacagtagtgctgaaatgacatcaagagatatttaaaagttaatgaattcttcctttaaattatcctggcctctgtaagcatgcacacagtgcacaagcatataataaacaaatacattttaaaataaaaaagagttttaagaaataaaagactcagtggttaagagcactgtctgctcttccacatggtggctcacaaccatttgtaatggtgtagaagaagtagtagtagtagtagtagtagtagtagtaaaatggcccttgctgatgacatcgtcttgtccggaagtgaagcccatccttcagtcccaggcagcccagtggatctctggg

SEQ ID NO: 36800 - DNA, 491 bp, Mus musculus
  source 1..491: mol_type = other DNA
ttcaaaaaatgtgacccacatactgcttgtttcttcagaataaacgctgctacttttatatcctttcaaaagtatttgagtaaatctttgtagacataggcaaagacgcatttccacatatatttacaaatgtgtctgtgtatgtgttttctttttacaaaacaaacaaacaaacaaacaaacaaacaaacagatgtttaatacttttttgaagctgttcaccagcaaagacattactccgagctgctcaagaaccactgtgtgtaccaacatgcttgtagcataccagagacgagttacctgtttaagctttcacattttgtaatctgacggtgaaaatagcaccttatctcggaattacaagtgaggttttaagggtgcttttgcaggaaggtaagtgcgcctgcctgccagcatcaaagatggcaacaagggccgtcgctctcggtgggcacggccgccagccaatcacagggcctcccgtggatcag

SEQ ID NO: 36801 - DNA, 392 bp, Mus musculus
  source 1..392: mol_type = other DNA
ggaccttttacaaacagggcctctttttctataaactctctggtcactgactccactgaccatggtcgctctcagggcagaccgcattccgtgggtgcagaagcagtctctgcatttactgacaacccagctgcgtgaccgcggctgacccaaagtctgcgacgcctctctgggcgcggccagggttgccccggttccggcccaaccctgcggctccggtaggacgtggctgggcggggcgcaacagggtaccagtctcgggcaaccccccggacggtccgcgaggtcttcgttccggaagagaggctgccctcagcggccagtagccacttgatatccttcagaaagtggacttaaaattttgggtatgacgatccacgtggccacgcccc

SEQ ID NO: 36802 - DNA, 254 bp, Mus musculus
  source 1..254: mol_type = other DNA
caaactttacagcatgtaaattatatctttgtaaagctttaaatgtatacttagcattttcgcagtggcaatagtttaatcgtggctggcggcggggaagccacgccccgggggcgtggccacgtggatcgtcatacccaaaattttaagtccactttctgaaggatatcaagtggctactggccgctgagggcagcctctcttccggaacgaagacctcgcggaccgtccggggggttgcccgagactggtac

SEQ ID NO: 36803 - DNA, 323 bp, Mus musculus
  source 1..323: mol_type = other DNA
aaattagctttctaaagaattggtcttctaaagaccactcagagtacatggctcatgatctgtgggcagaaattaatgtgacatgcttgtaatcacatttctgcgagctctgtaggcattctgcctgtattccagagaaaatcaggaggcacttcgggatgacacacagtctgggtgacccaggagcccgctcgcgctctccagcagcgacaactcggggcggcgcacctgaagagcgagccgcgccaggcagcgcgccgagtccgactcaggaccccgaccaagctgcccgcgccactgccgggctgcgctcgcgttaatca

SEQ ID NO: 36804 - DNA, 511 bp, Mus musculus
  source 1..511: mol_type = other DNA
gagggtttttgtaaaaaaaatttaatttatttttatcaatagtagttgctaagacttttagggagcaagaccgccttagccatggaaggccaaggttctgagaatgtctaatattaccaaatgcctgctgctgttcattgttgctcaaagatgcagctgcgccgcttggtagttaaagcccaagcctggagctgtaagtccgtgggcctgccagtctagtccctaggccttgggtacaatggccctggaagagcaggagtatgcatacacttaaagattacaaatgaaaacataaaaacttcaaattgaagtgccaaacttgaggtttttcaattcatatacctgcaggcagatttctgagttcgaggccagcctggtctacagagtgagttccaggacagccagggctacactgagggcatctgcgcctgctaccctgcgaccaccggcaggtggcgccctgggccgcggggcgggacttccaccagccggaagcggaagtctgctcctg

SEQ ID NO: 36805 - DNA, 591 bp, Mus musculus
  source 1..591: mol_type = other DNA
ctgatacagagtcttattctgccacagtgactctagaatctcttgctgacttgtctgatgagaatagatgttcacccctagtcaaagggcgaagacgggagcccgccctgtcctccgcgccgcgcgccgggcccgctggacaccgcgcccgcccaagcttgctccggccgcggctaccgccagcgccttggcagcaggacaccggctctcaccggctgccttcgccatccgcgcccggctcggggtgcctccgtttcctcaggaccattgcgacgctccaaagctccctcaggctccggggagaatttggcgcgctctccacgtgctctcgcgaggctacggcttcggccaatgagaaggcgcggcctcagatggacctagccggggcccgcccccatcgccccgccccgccccgccccgcccctcggctctccaatcctccggcgagcgcagagggtgggtccactagctggccgcgcgcgtggcgggacggccgggctcgctgagggcggaggaagggcagaaaatgtcaggccgtccccgccctgtgccctgtgtcccgggccgggtgcccgactgcctagctgttgg

SEQ ID NO: 36806 - DNA, 546 bp, Mus musculus
  source 1..546: mol_type = other DNA
actcaatgagtgctttttttttttaagatttatttattattatatgtaaatacactgtagctgtcttcagacactccagaagactgatacagagtcttattctgccacagtgactctagaatctcttgctgacttgtctgatgagaatagatgttcacccctagtcaaagggcgaagacgggagcccgccctgtcctccgcgccgcgcgccgggcccgctggacaccgcgcccgcccaagcttgctccggccgcggctaccgccagcgccttggcagcaggacaccggctctcaccggctgccttcgccatccgcgcccggctcggggtgcctccgtttcctcaggaccattgcgacgctccaaagctccctcaggctccggggagaatttggcgcgctctccacgtgctctcgcgaggctacggcttcggccaatgagaaggcgcggcctcagatggacctagccggggcccgcccccatcgccccgccccgccccgccccgcccctcggctctccaatcctccggcgagcgcagagggtgggtc

SEQ ID NO: 36807 - DNA, 620 bp, Mus musculus
  source 1..620: mol_type = other DNA
tgcttgttaaggaagaactctgccttcctcttaataaacagcctcatggtgtggtcaccccaaccataaaactgttgtgaatcataacgtaaatatctgatatacaggatatctgatacgtgaccccctgtacaaaggtcgttcaacctttaaggggttcccgacgtacaggctgagatccactgctgctcgggcaatatctgagctgctgcaggagagtctcccagtaggcgcccacctgctgactgctttggcgagcgctcgcttgggaagcgacccgagctcggattccacccgcagcctggacgccgcaggtgccatcgcggtccggatgtctaagtcgccccgggcgcccacccaacagctaggcagtcgggcacccggcccgggacacagggcacagggcggggacggcctgacattttctgcccttcctccgccctcagcgagcccggccgtcccgccacgcgcgcggccagctagtggacccaccctctgcgctcgccggaggattggagagccgaggggcggggcggggcggggcggggcgatgggggcgggccccggctaggtccatctgaggccgcgccttctcattggccgaagccgtagcctcgcga

SEQ ID NO: 36808 - DNA, 303 bp, Mus musculus
  source 1..303: mol_type = other DNA
atgagtcatagtagccagtatcatctgtcagagatatggggaacagtgtatactatagagtggttcctttgtaccaggaacacaggccataaaagtgacctcagggtcatagctctgactaagcacagaattggttccaggaaccttccgtgtctagaaaacgcagcttgttctgacagtgagaccctgtctcaaaaaaaaccactgtaaatatagctccaatattagatttctatgggtacacataaattttgaaaaattaaaaatgaatcttaataaggacaaaagcctattatgtgtctc

SEQ ID NO: 36809 - DNA, 111 bp, Mus musculus
  source 1..111: mol_type = other DNA
agacagacagacaggacgtcttactcgtgcatgcctttaatcccagcgcttgggaaactggttaacctagtctatacagcaagttggattatataaaccctgtcttgaaaa

SEQ ID NO: 36810 - DNA, 371 bp, Mus musculus
  source 1..371: mol_type = other DNA
gtgtctccattgctggctactacactgtggtatacctatggtagacaactcagatataaagcattaaccaccttctgtttataggaaggttctataaagtgctgttgcataaacctttttcaggcagtgattactgcctggatgaatcatattctgtttgggcccaaaggctccaatgtaaataaaatgaaatcttgaggatttaatcggaactccagttctggtagaggagtgtttaacaacacacactcatatacattaaggtaaataaataaacatgtctttaaaaaaaaggaggccagcctggtctacagagtgagctccagaatatccttcctgcctcacaggtaccaagggtgggattagtgata

SEQ ID NO: 36811 - DNA, 399 bp, Mus musculus
  source 1..399: mol_type = other DNA
tttgttacaaaatattccctaaaattatgcgatttaatcaaacagttcaaatatgcaatttagctgtactattagcaaggtatcgtatttcaaataaaaacctttttgagagttgtccaatgaaggggactgcacaacgtacagcagcatgtactacactcattgggttgttcactaaatgcattttatttccataaaagacagcttaaaatcatctcgctgagacatattaagatgtttcctgatcagttaccaaacctggggtgcctgccgtcagagtgtggagcttctcttgggctcctcccggggctctccgggctggccagttgtgatccaccaactgcacccaggctggcttcagtaagactcggggagcgaggccacacccccagcctgcgt

SEQ ID NO: 36812 - DNA, 176 bp, Mus musculus
  source 1..176: mol_type = other DNA
ctaatagtacagctaaattgcatatttgaactgtttgattaaatcgcataattttagggaatattttgtaacaaaagccaccaaggaccttcatggatctgcctgaggctgagcatgcttataccatgtccacggaatctctacattctgtgcagagggcggggaaggctgacgtc

SEQ ID NO: 36813 - DNA, 350 bp, Mus musculus
  source 1..350: mol_type = other DNA
ttcctttgtaaggagaggacctttatttggtaaataagaaatttgtaaagattcatttgtaaagatgaatggtggcgaatttcaagggcacaaatggaattgctagaattgcatggagcaggcaggcatactcagcttccttgtactcaggtcagctcccctggccagggctcacggagtagccctggcgccacagcccttttcaaagcaaaaaagtgtttcccactggggtaccaccgggtccacccaccctgcgcgggcagatctgcgcctcggggctggattagttgggcctgcccgtgccccgcccacacagcgccccgcctgccggcgccaccagcccgctcgac

SEQ ID NO: 36814 - DNA, 446 bp, Mus musculus
  source 1..446: mol_type = other DNA
aagagaatgttctctgaggacagctggcaccatcttgtcaccatgaatgagccctgactcatgcagacaccatgctttaaacaaacttcaaagttatttttttttattttatgtgcacacatgttttgcctgtatgcatgtaatgtgtactaatgcatacctatcagttgcaagtcaccatgcaggtactgggacctgaatccaggatctctacaccagaaagcagaatcctggcttcttgactgtgccctctgtcctactggccaggggagagtgacgagggcagtaccatctgaactgtggatggcctttccccaaagccatggaatggttaaggccacctgccggtgaccttctgaaggagacggggacatgtggacagtttcctgaagtcacctttgtagaactgagacccaggatatgctctggggcccaacctgagaagc

SEQ ID NO: 36815 - DNA, 322 bp, Mus musculus
  source 1..322: mol_type = other DNA
cacttttcactcagtgcccaatgccagctccagggcatcccaactggggaagttgctgaggaaacgactagtgtactgtaggtgcatagacccatcacctcctacgggaagggcggaaggggaggcttgtaggcgagcactaattgcctagtaggcgtggtcaacaagcgacctgcacaggtgagccggagcaaagggaaagcttcccccctttcgggggcggggcttaacgtgaaagggcgagggcccgctcagcgcagacagggtggggcggagtcgacgggtcagcctcccccagctgcgcccgcttcctctggcactc

SEQ ID NO: 36816 - DNA, 442 bp, Mus musculus
  source 1..442: mol_type = other DNA
tatgcaaacacatgggcacatacacagtgaacgcataaacgtgcatgcttatacatgatatatgtgtgcgcacacacacgagatacatgcatgcacatttattcattccacaaatatttgctaagtaccagctacgtgtcagaaaccatttcaggcactagctcacagtctgtgtgattcaggctcacagcccaggctgtgtgagcgtgcacctgaactctgaggatctaggtggtggtctgggttttgtcccctaaaataagcccaggcgcggagggcggtctgaagctcggagtggtgccgcgccctgggcctcgctccacgtgggcctatcctggccaggggtggcgcgcgggtggggcggcgggcggggcagcgggcgccgcgtgcatgctgatgagcgcaggccgcgtcactgcgcaccggcgccgtggtttcgggg

SEQ ID NO: 36817 - DNA, 246 bp, Mus musculus
  source 1..246: mol_type = other DNA
cagggctggcgtggactaatgttagcccagccaatgaagctctgcccttgagcagagcaaagcagatggaaccctgtgtctgtctgtgctctgcactagcccaggcggacaccgtggggggtgcccctatgccagatgtgggcacaggcttgctctgagcttttgcctctgtatccctagggcactgggcctcttggagccaacagaaacagataaaggagaggatggcgtgcctttccatatcct

SEQ ID NO: 36818 - DNA, 432 bp, Mus musculus
  source 1..432: mol_type = other DNA
accaagaaatgttgctcccccagcacccggcctggagccgggggtctctggacatcctcctgagggttcgcacccgggtcctctgcgccggcactgagctcctccggagccgactagggggatctaggagcctccgagttcggagtcgccgagccgctcacccgacgccgccgtcggggccgccgtcgccgcttgcctgctgctgccggagctccggctcccgctgctgtcgctcacgggctctgttctgcagccgctcgagcagcactcgagcccggctgcccgcccgtccgtatccccctgccccgcggcctctgggcccgcgtaccgcgctatgtggaacagcgccatagctgccccacgccgcggttcctctccggcgctctttgatgacgtacgccgccccgcgacctagaggctcgggtgacgtca

SEQ ID NO: 36819 - DNA, 497 bp, Mus musculus
  source 1..497: mol_type = other DNA
atcttcacagctgtaaactatgggtctccctgtgtgtgtgtgtgtgtgagagagagagagagagagagaaacggctacgtatacggattcacgcagtcccagatcgcatggtctatgacaaggccctgccctccaggtcacccacctgccagggccgtgtcttcgctcggcagcgagcccacgaacagctccctcgggctcctcggactgaacacggggaggccccgacaaggtgacgctcggccccgtcgcgactcccactgacctggccgcccccaggtccgcccctgcggctcacctgaagcacagccgttggccacgactcgtcagcactgcctccaggaggcggccgagctcttgcctggagctcgccgaagctgggtgccgctccatgccgccgccgccgatgctgctcccggttcctggaaaccgaagcgccgagcggagtcgcgcccgtgacgtcacccgagcctctaggtcgcggggcggcgtacgtc

SEQ ID NO: 36820 - DNA, 653 bp, Mus musculus
  source 1..653: mol_type = other DNA
agaggatgcgatcaggtccgctcgagcgagtcgccaggtggctcggggtccgcccccaactgacgaggccacgccccttccagtccggaacttccccgaggcctgaggctccgccttgtacccatgaggccacgccccagcccgcgtcctgtccgaagcggtcccgcctcgtacggatgaggcctttcggaggcggccctggcctgcttaagaagccgcttcggtcctgcctccgccgtcagcagcgcctcagcttcaggcgaccccgcgcggctgcgagcggccctacaggataggtaccgttagtccctcgccgcgcgccgtagcaccggcgctgctacttcctgtgcccgtggacccggatgtgccgagcggctgcggcgcgctcgagcctcccggctgtcctgacgcggcggagcgtgctgctgctggcgtcgcggcgggcccaggccgcggcggcgctttgtcgtgggcgggcggggccgaggggccgggcggcgctgagaggggaccggtcggtggctcggcgcgtggtccggcctcagcaaggcccttctctggtcagcgctctcgagtgcgccgggcaggcgcgcggccgtttccgagcgctcgggaaggcggggctcttaacgcccgcggcaccgttggtccgc

SEQ ID NO: 36821 - DNA, 458 bp, Mus musculus
  source 1..458: mol_type = other DNA
tatagtgtttttaaaattataataggccagcctggtctgcagagtgagttccaggacagctagggctgcacaacaacaaaaaatatatatataaaatctttttcaaactagaggatgcgatcaggtccgctcgagcgagtcgccaggtggctcggggtccgcccccaactgacgaggccacgccccttccagtccggaacttccccgaggcctgaggctccgccttgtacccatgaggccacgccccagcccgcgtcctgtccgaagcggtcccgcctcgtacggatgaggcctttcggaggcggccctggcctgcttaagaagccgcttcggtcctgcctccgccgtcagcagcgcctcagcttcaggcgaccccgcgcggctgcgagcggccctacaggataggtaccgttagtccctcgccgcgcgccgtagcaccggcgctgctacttcctgtg

SEQ ID NO: 36822 - DNA, 437 bp, Mus musculus
  source 1..437: mol_type = other DNA
cccaaccataactgtaattttgctactgctataagttgtaatggaaataaatatctgacatgccggatatcttatatgtgacccataggctgagatccactgaattacaagtatagtgtttttaaaattataataggccagcctggtctgcagagtgagttccaggacagctagggctgcacaacaacaaaaaatatatatataaaatctttttcaaactagaggatgcgatcaggtccgctcgagcgagtcgccaggtggctcggggtccgcccccaactgacgaggccacgccccttccagtccggaacttccccgaggcctgaggctccgccttgtacccatgaggccacgccccagcccgcgtcctgtccgaagcggtcccgcctcgtacggatgaggcctttcggaggcggccctggcctgcttaagaagcc

SEQ ID NO: 36823 - DNA, 682 bp, Mus musculus
  source 1..682: mol_type = other DNA
cggagacagcggctcggcggctgatggtacacctccgagccccggcccggggagctctgccagatccccggcgtccttgctctacgtcgcgaaaggaagccccgcgcgccgcggaccaacggtgccgcgggcgttaagagccccgccttcccgagcgctcggaaacggccgcgcgcctgcccggcgcactcgagagcgctgaccagagaagggccttgctgaggccggaccacgcgccgagccaccgaccggtcccctctcagcgccgcccggcccctcggccccgcccgcccacgacaaagcgccgccgcggcctgggcccgccgcgacgccagcagcagcacgctccgccgcgtcaggacagccgggaggctcgagcgcgccgcagccgctcggcacatccgggtccacgggcacaggaagtagcagcgccggtgctacggcgcgcggcgagggactaacggtacctatcctgtagggccgctcgcagccgcgcggggtcgcctgaagctgaggcgctgctgacggcggaggcaggaccgaagcggcttcttaagcaggccagggccgcctccgaaaggcctcatccgtacgaggcgggaccgcttcggacaggacgcgggctggggcgtggcctcatgggtacaaggcggagcctcaggcctcggggaagttccggact

SEQ ID NO: 36824 - DNA, 489 bp, Mus musculus
  source 1..489: mol_type = other DNA
tcccaatgccagggttggtgccatgggccaggcaagggcctgctcagtagcactgagtcggtgctgggatgcaggcttggatcctggtgggaagccccacccactgggtccaccccgctaggccgccttcgtgcacgtggtcggcgccgggcgggatcctccctcctcgagcgcgccggctgcgcgatctctaaggggtcacaggtcagcctaggatctggggcgccgcagggtcagagcccggaggggatcgctgaggtccggggtcggtgcccgccaccccgcagcgcatgggcttcccccgcctgtgggccgcactgctgagaaactggggacggtggacggcgcgcccaggcccgcgcgtgcccgggtaaagacttccgcgacctctgtactgagacctctgtactgagaacccaagactgtcctgagccccgccagagcactgacctcagtcactcttgtcattgatgaaccaggctggttggt

SEQ ID NO: 36825 - DNA, 246 bp, Mus musculus
  source 1..246: mol_type = other DNA
tttggcaagaagtcagatgtggtgactcacatttgtccgtggtacacacctttaatcccagcatctggttttatgtcattaaacacaacagcgtccggaaattggagcagcttctggaaaacctcccaatgccagggttggtgccatgggccaggcaagggcctgctcagtagcactgagtcggtgctgggatgcaggcttggatcctggtgggaagccccacccactgggtccaccccgctaggc

SEQ ID NO: 36826 - DNA, 268 bp, Mus musculus
  source 1..268: mol_type = other DNA
acagaaacatcttttacattttcctctgacccacctgcctcagaggcaggcagatctctgagtctgaagccagccagttctagctacacatacatgtttaatatgaatgtttcacgtgtttatatacacatacacggtgcatataaactcctgtaacacacatatacatatgaataaaattatagggctgggcccatcaagaggcaggccccgcccatcgtcccgcctccacgcagtgcggctgcgccggcacctcgggctccgaggc

SEQ ID NO: 36827 - DNA, 189 bp, Mus musculus
  source 1..189: mol_type = other DNA
aagctgagaatggcttggttgtctcctatccattcatgctgagtatgcagacgtaccctcttcagttcctgcagagcctagcagcgaagatcggcatttataatgttcgttatgaaaactaatgtgcccagacctgtttcagctcacaaggaaccgccagtggagactcgacgtcttggtttcccgcgg

SEQ ID NO: 36828 - DNA, 242 bp, Mus musculus
  source 1..242: mol_type = other DNA
gttgatgtttaaaaacaaggtaggtactacttatacctatggcctacgaatcagtctcggcaaattgcctaagatggcagccccggctcgggttacgaagcccgagctgctttcccgtcacgacgccagagcgcggcagtgtgagagttccagcactgcggtgcaatgctcttccccgcggcggcattgctgcccaaatccgcatccccacattgggccgcgggaaaccaagacgtcgagtc

SEQ ID NO: 36829 - DNA, 391 bp, Mus musculus
  source 1..391: mol_type = other DNA
agacctttcccggactctgttacatgatcaggaatgttcaggactcagttacatgaacccagcactgcaggcggatttctgagttcgaggccagcctggtctacagactaggacagccacaaaacaaaagaaaaaatcatcaggaatattcttttttgtttactaggttaagttctcatcactgtgtatgataaaagaccaaggaggccagcgttcgccgaactctggcgccttcacgggccgggccccgcgtggtgccctccgggtggtccgcagtgcggcggggggccgcgcagagccgggaacagcggctccgggagggctcaggccgggaacgcacttgcgcggtgcgagctgtctcggcgggcgcgcgggcgcgtgcgcggtgagg

SEQ ID NO: 36830 - DNA, 585 bp, Mus musculus
  source 1..585: mol_type = other DNA
aaggaatctagacagctaacttaacgtctttttttttttttgcttcttttaagaatctgaaattaaaccatgaaattgcacagggacaccggctgcaccacggtttcctgtgatgtccaccccgcaccgcaggtgggtctgtcgggctcgaacttgcgggcgacccttcgcccggcattcccggctcccccgagagccccggccgcaccgccgaccctggcgctgactgcggagggcggcggcgccgcacagggccttgggggctccaggaaggagccaactgcgacccgggagcgccctcctcgcggagcccaccctcacagccgccgccgccagccgccaccgccgggcctcgcagcaagcgtagccccgcctcccaatcgtccgagccccgggagcgcctgcgcgtccgcgcccttccgccgccggccattgcgtcagcgcgcctgggggagctgactccgcccagtccacgccccgctcacggagcacgaggcctccactgcggctgcgtggccccttggcgcgctggtgagccttggagcgcgcctgcgtactctcggcgagcagtggggcagcaagcgc

SEQ ID NO: 36831 - DNA, 488 bp, Mus musculus
  source 1..488: mol_type = other DNA
ccaagttactaagttagcagtacttagtcactgtttcaaaattgttttatcaaagttgttaggtcaactttagtaaaatttaactttcattcttcctgcacgtagaattcgtctagaattagtctacccaactggtaagaacactgggggttcttgcagaggacccaggtttggttcccacagttacacgtgaacctctttaacaccggtcttaaacctgaggtcgtcctcggctcccacacctgtgcgaactcaacgtcgtttagggtcccgactgcgcgcttgctgccccactgctcgccgagagtacgcaggcgcgctccaaggctcaccagcgcgccaaggggccacgcagccgcagtggaggcctcgtgctccgtgagcggggcgtggactgggcggagtcagctcccccaggcgcgctgacgcaatggccggcggcggaagggcgcggacgcgcaggcgctcccggggctcggacgattggg

SEQ ID NO: 36832 - DNA, 707 bp, Mus musculus
  source 1..707: mol_type = other DNA
tgcttctcccggcgccggcgagaggcagacgcggagcggaatcccggacctcgcagcgcctcgcccgccccgcgcgccctgctcgcccgcgcggcccattcccgggtccgaggggacccgtggagtgcggaggcgggaaccacagcttcggaaccgccggccccacgcctcccctcccgcgcgcggcccgagactcccgcgaactcgcgcggcgaccggcgatcgagcccgagccgcggagccgcggagccgcgcgtctcccgcagcctgcgttcccgctccggcgcccgcgtctcagcaccggcgatgaggagcggagcagcccgtcttccgagccgctgaggctttcgccgccgatcgcccgcggccgaccggaggtgcgggagccggtgcggcccgggagcggggactcggggcaggggaaggaccaaggggctccgctacggccccagccgccgcgccgcggactccagaggcgaccgtgccatcgacccggggcatgggccccccgacaaggctccaggaggcgccgcggcctcgcaagacgtgagaggctcctagccagcgcccgcgcgctgggccgggcggcagtgagcgctgcgccccgcggtgcagaacgtcccggagcgccggaacctcggctgaggcgagtacctggccggaggcgcgcggcggagcaggctgtcatgccctattgatccccttgg

SEQ ID NO: 36833 - DNA, 461 bp, Mus musculus
  source 1..461: mol_type = other DNA
gcgtacatgtatgtatgtatgtatgtatgtatgtatgtatatgacatgcttgcaagagacaaacggcagctgtaacttgtcagatgtcagctctgccaccaggctagcccagcccagtgtgttttcacacacaggtggtgtcagtctgagaggagcatcttttcagaccacttccctgctgccgagaggtcccggcccaacagtggtctggaccacacatagctgtggagtgaagctcccgtgtctcccttaggcagcagctgcagagtaaccccgcatgtgggttgcagcggctgcttagccaagaaggtgccgccagcatcaggctgcaaagttcccgtgaacccagggctgtggtgcaactgtcagctaggcccaagcccccagccccggagaccccggagccaggctgcatctcggggaaatgaggcccggtggcccctgaccccagcctgaggccc

SEQ ID NO: 36834 - DNA, 438 bp, Mus musculus
  source 1..438: mol_type = other DNA
gtagcagtatagtagctagctggtacaacgaattgctgttcctctgccaggcaaagagaatcactctaccacaaaaggatgcatttttagagtctaaccttagaccatagctgtctatactaagatgttgactaaccataatctctcacagccagagccaaggcccgtccttctcgagtaggaaccagagagaagtgttgaatatgttcttggctacttctgcttacaaactgaatcagttatcagctagttagactgcagtcgggaggcgccgcccgcatacggatggggcgcatgcacatgagggaaaataaaaaaataaatcttattttttttttttttttaagaagaagaagaagaagaaaaaaaaaggctccaggcagctggtaaagaagccagaagctggtcgctggtttggttcacaaagccaaggcctgg

SEQ ID NO: 36835 - DNA, 378 bp, Mus musculus
  source 1..378: mol_type = other DNA
cctgccctcacagtggggtgcatctccagggaagggactagagaggtgccctctctctagaacttactgccagggatgataaatcccaggatgtagaacatgctaaaaatattaatctacaagtgaaaatcattttaattggatttcgcccttgggcaggggccggctttcaatcagactcgtccagtcagcaaatgatatctgattacagatgactcttgcagcactgtgtattaatgagcgatctgatgtcccgtgtggggcctctccacggggacctggagctaagggataaatcccgtgtcccataagctataagggataaatcccgtgtcccatgcatgggcttccagcacggcagccagggacacagagcag

SEQ ID NO: 36836 - DNA, 391 bp, Mus musculus
  source 1..391: mol_type = other DNA
ggccccggccacatctggtcaagggcgtgcaggggttcctcaactggaagaggcactggtaccaaggtttttagcgactctttagcatccctgtaccacgccccggccctgagagccaagcacggataccgggtcttaggcgccaggtccgcgatcgcgcctccgaccgtcgcgcgcctctccactggccagcgttgctatggcagcgccgcaggggggggatgctgaggctgaggctcgcagtagcccctttgtgaggcgcgggagagatgtgcaccccacatctccccaccccacccccacgcccgaggccgggtgcggcaactccgcccgccagccgctcctgcattaaaatttcattgggaggactcccccagttctgttaagagct

SEQ ID NO: 36837 - DNA, 297 bp, Mus musculus
  source 1..297: mol_type = other DNA
catactaaataagtgttttaatttatttaaaaaaaaaaagaaatgaaagaagagcactgactggtctttggcttggggccccggccacatctggtcaagggcgtgcaggggttcctcaactggaagaggcactggtaccaaggtttttagcgactctttagcatccctgtaccacgccccggccctgagagccaagcacggataccgggtcttaggcgccaggtccgcgatcgcgcctccgaccgtcgcgcgcctctccactggccagcgttgctatggcagcgccgcagggggggg

SEQ ID NO: 36838 - DNA, 421 bp, Mus musculus
  source 1..421: mol_type = other DNA
gcatgcatgtatgtatgtatgtatgtatgtatgtatgcatgtatgtatgtgcctgtatgtatgttgtgcacatgtgcatgtgtgattcaccacactcggcactgcagtccactgtgagctgggctggagacaatggcacccagatcccccgtcctgggatacccagacccacttgattctgacactgtccaagtcagctctctctgtaggaccgtgccaacatgaccctgcagtggtgactgccttgagcccaaggctcagactagggggcaacctgcctgaggcacgcaacccgagttggtccccacgcatgcctgccctagcattggggaagcaaggccagcctgggtcttgcgagatcttgtctcacaaaaaataaaaaagcctttgatgccaccttgctcacccacctggccctgga

SEQ ID NO: 36839 - DNA, 409 bp, Mus musculus
  source 1..409: mol_type = other DNA
agactatcaggaacctgccagggtccaggtcctgggtgaaatgctggcccttggcccggtcgcccagagtctccgtgttcctgaccctgggcagcatcccctgctgtcagacagtgggagcgacccaagccttgaatgctaagcggcaagcctcagtcagggccaaggctggatagccagagccttcctgcttgccatggtcagccttcctcatccaagaaatgggtgcagcagaccgggcctgtggactgaaaaaaacatgttcaataagcagcctgactgaggccggtgtctaggctggcagccagcaaggccctgggcctgtctccagccagtctgtgttccaggccaacaatagaaaatgctagcctgggcagtaatggggcagagccggccatgggccccatcc

SEQ ID NO: 36840 - DNA, 421 bp, Mus musculus
  source 1..421: mol_type = other DNA
ttgtgttagttgtaactagtataaaaatgaatttcatttagttttgtacaacgtccctcagattttattttcaatatttattttttttaaaaacacaccacaactcgtgcgcgcgcgcgcgcgctgtaaacagaggctaggctagcctgacggacagccatcccgctcagcgtctgaacgccagccaagggagccagagcagcaagctctaacggcaggggctccgcccccggggaggagatggcggtcttggccacaccccttgcgtcatggcgcgcgtgtgggcagggcctatctgggtcccgcccccaaccctcctggagtgtcgcggctctaagcactaggcgacaggggcgtgatcacgagtggctccgccccttgcgtcacgacacgcggccccgcccctcgcggcgcctccctg

SEQ ID NO: 36841 - DNA, 413 bp, Mus musculus
  source 1..413: mol_type = other DNA
gggatgcagacacaggctactggctgtggagactgcaccggtccacccttccggtccacccgtgagacaactgttctgacatcccaggaaggaagagatgttgctattttcctagtagcaaggggacccctcagaggcagggatcagggcatgcactgctttgggaagcatgctagcaattctgcatgcacagccctggatgcccaccactctcacctcctgagaagagtttatccaaagcccttgtttgagctactgtatacattgtttccactttttcaaagagtatcctcaagtgatgatctggcttctgtctgtcctatcatgcagacagacagaaggacacccaccatcaagatgatgttgggtccctagtcctggacaggagtcctgtgtctgggccttggccagga

SEQ ID NO: 36842 - DNA, 457 bp, Mus musculus
  source 1..457: mol_type = other DNA
attaggacaacaggcctgtgtcactgagcctggctgctattggaaacttacagttccaaactgaattcctgaggctccgggcaggtgtcttgggactgaccccagtgttacattcaggactggccccaggagtcacacattcctcggatgtctgtggaacattcaggtctggcctaagccggtatgaaacagcagaggccagccgcagcccgcctatgtctcagcaggtgaactgcaggttctgggatgcgtgagtctgaaccaccggctgcagggacaaaactctgaggctggcagtgtgtcagccaccaaaactggaatacgtggggcctccagttgtacgctgtgtctgccctgagggcacattgcagctccctaggaagaggctgctaccagatccaaaagcagcaagagcctcttgttctggggttctaaagaatgagagtcaggtcctgct

SEQ ID NO: 36843 - DNA, 292 bp, Mus musculus
  source 1..292: mol_type = other DNA
agtttcactatgtatagatttgtaagatgtgtaaaaagatgacatatggacagtcagggctacacagagaaaccctgtctttctttctttctccaggctggccatggggtcgcgaggacattttaatctctcagtgtcagtgcctggcgacggctcgccctggaacgagacggccactcagcctcagttccggcgcgaggcgggatcaccggcccttccgggttgcagacacgccccctccggcgtgaagtcgctgccggggcaacagcgcgccacttccgcctctgagttt

SEQ ID NO: 36844 - DNA, 486 bp, Mus musculus
  source 1..486: mol_type = other DNA
gtttctctgtatagctagactcaggctgtctctgagcccagcgcactggaaatagacagattgctgagttccagaaagcaggaccctctcttaaaagcgagtaaactctcttagggggcacacagggcgagcacactgtgcagggcactcggaggacctaacagcgcccgatgaggtctgtaagggacctaaagaggccatgacaccctaagagacagtgcgggtgcgcgcggggacggagggaagtccctcgctggtcaggagccccgaaccctgcggcccgatcgcgtggatcaggctcgcccgcccgcccgcccaccgggaccccgggctctgtctggccgcccgcgggaaaacccccgatacctgcgcccgcccggcagccccgcgatcacgcgcggacccacctcccgccggtgggggcttggcgatgacgtgaggtgtgacgcagcctgtgacgtcggcggcacggcggccgctctggcg

SEQ ID NO: 36845 - DNA, 405 bp, Mus musculus
  source 1..405: mol_type = other DNA
ctatgtgccctgtaagaaggtacagagtgcccaggattccagtgagcctgtgaaatacaccattgatgcaaatgttgacatctgtgtttgctgccaatgtggtgtgtggcccacagcctagcctaagctatagtagctgatgatttatagggtaaaggttcttgccaccaagcctcacattcagaggtcttactgccgcagccgcagcgaatactcggcctcccgcaggcggcgtagcaccgcttcgccgtccgcctccggctcggcccggggcccctcgcccggccgcggtcgccttcccgccgcgcgcttcctcctccgcggagccaccgcgctccagggctcgagagccgccgccgccatgctctgacgtcagcagagtgcgccagagcggccgccgtgccg

SEQ ID NO: 36846 - DNA, 345 bp, Mus musculus
  source 1..345: mol_type = other DNA
cctgtggttctccaggccctgctgaccacagcctgcctgttcacaggagaaaggtgaacttctcctcattcctcaggcctgtagggtcccagtatctgcaggcctatgctagcacctcctctgcacccacagcagacctacagctgggctgaactgacacccaagctccggagcagggctagcattgtggcacacaggacatcaactatgctcctggccaggaagcattgacacttcctgtgccacaaggcaagaaccctctccccggggaggggcttcctcaactgcccttcctggcagggagagccagccagtgtagccgagagcctggagcctccaggccct

SEQ ID NO: 36847 - DNA, 263 bp, Mus musculus
  source 1..263: mol_type = other DNA
tcccatggatctcctggattgaagcattgaaaaaaaccctctccccggggaggggcttcctcaactatccttcctggcagggaaagccagccagtgtacactgtaactgtgctgtgtggaggtcacgagtgcacccggatgctgtccgccacaggttccaagcctctggcagggtttctctgtatagccctggaactctgtagaccaggctgtcgatccctgaaatcctcttcctgggtcctagcaggccaaagaattagact

SEQ ID NO: 36848 - DNA, 283 bp, Mus musculus
  source 1..283: mol_type = other DNA
tccattcggctctggaagcctggcggatctgcagagcgctacagaggatcctgtggtcctgtgcattggtccaacaatgtcctcctaggtcactgggactccgggcgctcttccgcctcgtctgaccgtcccaccgggaccgggggcctaagggccaggctgcccccggaacggccctcggccgcctccgctcgccgcccgcggcgtcgcccgcgcccggtgcagctcggccagagccacggcgagctgcgcgtccgccaggagccgctgccctgattccggc

SEQ ID NO: 36849 - DNA, 296 bp, Mus musculus
  source 1..296: mol_type = other DNA
catctgctccctgcttgagcggagtggcaagactcagcagaacaaggagagctgtctcccttggtgtgaggtatcttccagttggcccttggccaatgcctggtccattcggctctggaagcctggcggatctgcagagcgctacagaggatcctgtggtcctgtgcattggtccaacaatgtcctcctaggtcactgggactccgggcgctcttccgcctcgtctgaccgtcccaccgggaccgggggcctaagggccaggctgcccccggaacggccctcggccgcctccgctc

SEQ ID NO: 36850 - DNA, 533 bp, Mus musculus
  source 1..533: mol_type = other DNA
catatatggtctatctatttataaagactttgacatgtttattttcctgagatttaaatgaataaataaataaaactctaaaagtgaagcagagaactttgcttcttattaatgaggattctatgtaattactgggtgatctcgggtcaagagttcattacctattcatagccatcgataacaacagcgccctgcagtgcccgagtcctgggatctcttaggagaggtctcagatcctggtctcccacttgggatcccaggacattccctccaggagggaaggacatagctggtaccatctcccccacgccggctgcctgtgtagctgctacataaactacaaagccagggcagccatgggcatcctgccctgtggtcactcagccctcaggagctgcaatgcaatgccagcttgcttcctgttcctggagagccagcctgcttttgcagacaaaagggcttgaagccttcacgccttcatgtcacacagcccaaagtgaccactccctgggaaggtgcaggccacaaggagg

SEQ ID NO: 36851 - DNA, 294 bp, Mus musculus
  source 1..294: mol_type = other DNA
aatttctgggccttgggctggggtctctgcaaggaccccactgtgggggcgggctttgaagctccgcccagtgcggaggagtctttcttcccgctgtggtcagatcaagaatgcctgcctggacgcggccatgctcccgtcttgatgataatgggactctaatctccgtcttgatgataatcttttttaagagttgccttgatcatggtgcctcttcctgtccatgccctgggtcaggtgaggtacgacagggttctccccaagaactctgacagcatagagtatctatggcaa

SEQ ID NO: 36852 - DNA, 279 bp, Mus musculus
  source 1..279: mol_type = other DNA
attaaatgtttaagagttggccctatgttgtgttccacccttcaggggtccaaacggttttccaatgcttcggacaagcctgttaagctaaaaccagttttaaattgcccttgtgtgtgtgtgtgtgtgagagagagagagagagtgggagactgttgtctgccttagcttaagcttattcacacagattcccagtgtgcttcagtgactgccacccagcctggctttgtccactggccagacctggggcccagctgctgctatctcagtagctggggg

SEQ ID NO: 36853 - DNA, 343 bp, Mus musculus
  source 1..343: mol_type = other DNA
gttcacaataggccctgcaagcttatgatgtctgcagatttctgcagggttgggaattccctactgccgggtcccctgggacagcgctgctccagggcaggtggagacaccccctgctgtagctctgacctctatttggcaatcattcgaaagagcagacctcttgaagcgtcctctccaggacagtgtgctattggagacctcctggagtgtccactcagtactgggcacaggagcgcgtggccgcggacggttgggggcgcgccgggctggggcgcggagccgcggaaggggcggtgcgtcggggtccgcgtcggggtcgcgcgtcgggcgcgccgtggcc

SEQ ID NO: 36854 - DNA, 301 bp, Mus musculus
  source 1..301: mol_type = other DNA
cttctaagaaagatcaaagtatccacactagggtttcctttgatgtaatgaaataccttggccaaagagcctgaacccaggaccaccagccctgggatggcttgagactaccttctatcaagttgacatcacagagaaggcctctgcctactgtgccccaggcctggtgactgcacccgtgaacctggcatggccccgtcctggcatggggacggctgatgcttgcaaagtgggcatccccttgcccagcctttgtgtggagacacaatgtccagctcccctggggaaggtataaatacca

SEQ ID NO: 36855 - DNA, 180 bp, Mus musculus
  source 1..180: mol_type = other DNA
cttgatttgaatcccggctcccactgacacacaggcttgaggccagccctgtgagcctgtgcccggccttacatgcgcgcgtatacaccccaggtcacaggtctccctgggccacatgggcgctgtggaggaggagcaggtcctgcccctcctgggccagccccccgggatgctgacaca

SEQ ID NO: 36856 - DNA, 277 bp, Mus musculus
  source 1..277: mol_type = other DNA
tgtcagactggtcgtccaggacagccagggctatacagagaaactttgtgtagggtaaagcgggggcaccagcctcttcttctctgtgtgcacccaggctcctcacacactgaaactcaattcagtttgtagctctgaccgtaagaactcagtgatttgcctgatgtaggctgacttgaggatcccggacacaccattaggagcccggacaggatcgggtggacaggatgctatctcagcatcccgtaatgtgctgggccaacagaacatgcccatg

SEQ ID NO: 36857 - DNA, 498 bp, Mus musculus
  source 1..498: mol_type = other DNA
ccatcagaccagctggggatgctgggttggacaggcctggaccacagccatgtgctcagtcctggctggcatcgtggtctgtgtggtgctgctgagctccacttcccctgagctagaaatatatactaagtcagtacttggagcgactgtgttgcacttcaaatgaaatattctattaaatccccccattttatagctggggatattagagtcctcattttatatacacagaacggggtgagaccgttctgacttctgcccacggctgcacagtggccgcgtgccttgtttatcttccaggtacaaaaaagccagggtcaagcaactggaccatttgtccagtgattgaaataagcccagcctgtgctcagacaggcctcgcatagttctgaacgtccctgggcagcaaggagctcttccttcctgaattggtcactgtgactggtcagtgatgattggctagcctgggtcaggtgatcatctcagagtgaggtcacc

SEQ ID NO: 36858 - DNA, 265 bp, Mus musculus
  source 1..265: mol_type = other DNA
ttttcccttcttgctcagaaagaaaactcagcaagaccaaccctgggactgagagatcctggctgaaccctggttcccagtatagcttctaacagcagcagctacccctgtcttgtctatgatgagaattacacatcaaatatctcgcttgatcatcagctcccactgaggcctcgtttctaaatacgcgtggatggacacacgggatgtggagtaggcaacttggcaaggcctgtcgcgtgtcaggttctgacgtctacatccc

SEQ ID NO: 36859 - DNA, 217 bp, Mus musculus
  source 1..217: mol_type = other DNA
ttgaaccccattccatttatacaacacttgtactgacacctgaggtggttctctgacttcacacggtgacacacgagttcatacatgtgggcacaggtgtccatgcacacagccagacctacattaaataaaataaaataaaaatatttacgcctagatttttccattccccttcagggaccctcagtggacaacaaaactgtcctttgttggacct

SEQ ID NO: 36860 - DNA, 412 bp, Mus musculus
  source 1..412: mol_type = other DNA
actgacacctgaggtggttctctgacttcacacggtgacacacgagttcatacatgtgggcacaggtgtccatgcacacagccagacctacattaaataaaataaaataaaaatatttacgcctagatttttccattccccttcagggaccctcagtggacaacaaaactgtcctttgttggacctgccgggcgggctcctggccaagtctccaagcagcggcagccagcccgcaccacgctcaagccaggcgccggcccttcaccccgtctcggtgcatttcgccgcagcccaggagcggggctcagcacactgcacagcccggatcccaggcctgcggcgggcgcggcgggaggccgggacgcaaggcgcgggcggtcgggccgggctgcggggaggcggcgggcgcggg

SEQ ID NO: 36861 - DNA, 190 bp, Mus musculus
  source 1..190: mol_type = other DNA
tgaatgcacattaaagttcttttttgctattactttttaagtacctcctggagtccttagcaccacagaaggtggcatacagcttggccacctgttagagatagagaagaggccagcgagctctctccgtgagctctagagttctttagccacactctgggtgaggaacaaaatgtgaggaagcgttgaa

SEQ ID NO: 36862 - DNA, 506 bp, Mus musculus
  source 1..506: mol_type = other DNA
cagcttggtcttagctgtgagcccgagccggctgcctgggcacagattctggtccacggcctcttccagccccgttgcagcaggcatggtgatgcatgacactctcaaccaaagcacttgctatggatcaatctagcctggttgggctccagctctgccatctcctagctgggtagcatagggtaagaaacttaacctttctgtgccccaatttccttaccaaaagggtaacactgtgattgtgtactgagtgcccagtaccctttcttggctacttcaacaaaggcaggacagcgtgatacctctgtcagtgggccatagggcttgctagctgcgggtggttccccagcagcctggtttcaaggctccatttgcggctccagttgtgcgcccagacaaggggcgggtgggccgttaccacccaggagcccagcctggctggcaggcgaagcctcctctgggggagtggcggggggcccactccacacagctggcgcccccgccct

SEQ ID NO: 36863 - DNA, 233 bp, Mus musculus
  source 1..233: mol_type = other DNA
ggtcatggtgtcttatcaccatgatagaaaagtaaggaacacatcatggcccatggacgtaatatatcattcagattggattcagactatgatgtgtctatagaaagcacacacaaatacacattacacacacatatatgtatgtatgtgtatatatgatttatttactctgtagaccaggctggcctcaaactcagggatgtttcagcgggcccatgccaaggcttcccttc

SEQ ID NO: 36864 - DNA, 335 bp, Mus musculus
  source 1..335: mol_type = other DNA
gactgaggtgacctgcgacctgcacactgctgtgggcagctctcccgagaattaaaacatatgtttgagatcataacgtattcatggtctttttttaaaaaacatttatttatttactttatgtatgtgagtaaaagatttatttattattatacataagtacattcactgtagctgtcttcagacacaccagaagaggtcatcagatctcattagggggtctttttaattattatatactcctaaatacacaaacacagcctgctctgtctgtacaataagcccttaaaagagtctcaatgactgttaatgagtggcacgggttttctagaaaa

SEQ ID NO: 36865 - DNA, 348 bp, Mus musculus
  source 1..348: mol_type = other DNA
ccatggagcaaatgcatattaagtgtactctaggtgctcgttaaccttgtttattccgaatcaatacttattgtaatgtattatcattgactataaaaatccacatcccatgagatggtgcatccgatcgcggaggaactgcaatcttgtccgcacttgagggtcggttgccgggaaacaaccacgcaccgcgacagctgtccacggttgtagccggacgcaggctggaggcggatagcatcagcggtggattctccacagcggccgtccgcgacgctcccgctggtggccgagcggagttttgatcaggcagacgccgcggacagcccgatgctcgccgggcttcgg

SEQ ID NO: 36866 - DNA, 404 bp, Mus musculus
  source 1..404: mol_type = other DNA
ccaggtttgcaaactgatctctgtgcacgtgcgcgcacacgaacttttttttttttttttaattaatgaatctgtgggccgtctgactccagagtgtgcccagtaacctctcaaagcaggccctgggagcttccttgtgggttgagatgggagccctgccctctgcaccaaagtgacccgggttgaatactaagccagctcgggctacacagtaagtcccgaccaacctgggctacaccgtgaattaattcctagccaggcctgcggcacacggcgcgcctttcccggggggatgctctagctagctctagaacccggccaatccgccgcggcaagggcggccgtccgtccaatggcgaggcgacgggtggtgggggcggggcctgcgaccgcggctgcgggga

SEQ ID NO: 36867 - DNA, 325 bp, Mus musculus
  source 1..325: mol_type = other DNA
cctgcgtccggctacaaccgtggacagctgtcgcggtgcgtggttgtttcccggcaaccgaccctcaagtgcggacaagattgcagttcctccgcgatcggatgcaccatctcatgggatgtggatttttatagtcaatgataatacattacaataagtattgattcggaataaacaaggttaacgagcacctagagtacacttaatatgcatttgctccatggctgcgcctggccacgccccttccgagggcgcggtcagagggggcgtagccgggccgagacgccagcgcaagcgccgagctgcggtgacgtcgaacgggcgc

SEQ ID NO: 36868 - DNA, 446 bp, Mus musculus
  source 1..446: mol_type = other DNA
gtgaatgaatgagtgagtggatgagtgagtgaatgaatgaatgagtgtgagtgagtgagtggaatgaatgaatgagtgagtgaagtgagtgaatgaatgaatgagtgagtgaatgagtgagtggatgaaatgaatgagtggatgagtgagtgaatgaatgaatgagtgagtgaatgactggatgaatgagtgcctactagggcttagtgaggtctcagagttcaggatgtcagtacctcagggagtaccctgacggaggaagggcccgggcagtgcctgatctcagcatcttcctgacctcatccttcagggagtgtgggggatgggcagctcagagttctgtgtcagtctgtctgagcctgcccaggggaccgtgggactgtgggtggcccggcatagtcccgccccacactgtcctccagcccagggccgaggcgggcaggcac

SEQ ID NO: 36869 - DNA, 368 bp, Mus musculus
  source 1..368: mol_type = other DNA
gctgtcctggaactcactctgagatcaggctggcctcaaacttagaagcccaggcttgcacaagaatgcatgtgactcacacacaagcacatgtacaaacacacgtgtacatgcatgcacacacgtacacaaatgtgcatatacacatgtatacacacatgcacacatgagcatgcacatgtacaaatgcatgcacatacacacatgagcatacacatgtacaaatgcatgcacatacacacatacatacacacatgtgcacacaagcacacacgtgtgcacacaccagcatgggtgatttgcatgaggtctcatgtagaggtcccctcaactttcaagattgttatgcgcgtcacgtgaccagcctg

SEQ ID NO: 36870 - DNA, 310 bp, Mus musculus
  source 1..310: mol_type = other DNA
agtgtgtacatctataaagttgtacatagactcttcatataagggggacaccttatggaatactcgctggctggctggtccccagtcagtcttgtgtctgttccacacagtgggtgctttaaaaaaaaaaacacgccaactcctcctggaccaccttgtgttttcttaggttttcttaagacggtaatcccgtttcctgtaaaaacaaaaccagaataagactcagagtcagtgtgttgtctagtctattgggaaacagagcccatggggctcggctcaggcgtgtctcgaacacggcagcctccttcct

SEQ ID NO: 36871 - DNA, 431 bp, Mus musculus
  source 1..431: mol_type = other DNA
ctggcccagatctctgtgttcaccttacactcaagattaggaaacttggtccctgggtcacttcattgtggtccagcccaagggttgccaccctgccctgggatgatcatagtccccgggtcttcaggaaatccgacaagccctgctcacggactcggtgggcagttagatgcgcccatcctcatagagaggctctgcagggccgtgggtactaagaacgcccgctctggttctaaagaccagcccgtgggcgtggccacccggccattcaagtgccccggaaagcgggcgtgggctccgagtctccttgcacctccccgcgccaccacagggggcgctctaaggagagccgtcggcggcgctggttgggcgcggccccggcgcgggggcggggcccgcgcgcgcgaaggcctgggcagcggcggccgcgc

SEQ ID NO: 36872 - DNA, 386 bp, Mus musculus
  source 1..386: mol_type = other DNA
tttaaaaagaaagacaatccttatttgaggatggagactgtgattagcaaggcttgggtaccgccccgggcaagcttctggccggcccacaagtactactcctggtgcaggcgttggaatccaggaccttgagtaggccggcgggacaccctgctactgggctctgcaagtttccttgaaagaataaacgagtgagtcttttacaaacctacgctgcccgcgagtctagcggcggaggaggggcccaggccgggcggctgcagccagcgcgggggcgcgcgcgagtggacgtgaccgcgcggcggggcccgccccaggccggtcactggcgcatgcgcatcactgcccgagcgctgcgggcccggcggactccggagccggggaag

SEQ ID NO: 36873 - DNA, 559 bp, Mus musculus
  source 1..559: mol_type = other DNA
cacacacttggctaactctgatgtgatggttgtgaagaacaccacataccttaaaggggtttggccaaagtgctcagaactgctctcttctgattgctcagacacagagcttcactctcatgaacctgagtccatcagagtcaccaggaactttgcaagggttgcaaagtctgagagactgttctacctcagaggcactgtgcctgcctagcctgcttcaccatcctcctatgcagcggatgttgcagaagtagatgtgttgtggtcacaccatctcctggttggagcttggcagtagaaggacctgggatcctgctccttccttctgtctctgggatactgaagcagagagccactcccagaacagcagtgagctagctggctggccgggaaggccctgtcctgtgcctttggcccacggtggcccaggaaacggtcctcccctctgctggggtgcgggagaggctcatctccagctggcttctccctccccccaggcctgtccacaggggcttgggatcagccagagaagtcaggctgctcactagagcgaggacac

SEQ ID NO: 36874 - DNA, 539 bp, Mus musculus
  source 1..539: mol_type = other DNA
agtgctcagaactgctctcttctgattgctcagacacagagcttcactctcatgaacctgagtccatcagagtcaccaggaactttgcaagggttgcaaagtctgagagactgttctacctcagaggcactgtgcctgcctagcctgcttcaccatcctcctatgcagcggatgttgcagaagtagatgtgttgtggtcacaccatctcctggttggagcttggcagtagaaggacctgggatcctgctccttccttctgtctctgggatactgaagcagagagccactcccagaacagcagtgagctagctggctggccgggaaggccctgtcctgtgcctttggcccacggtggcccaggaaacggtcctcccctctgctggggtgcgggagaggctcatctccagctggcttctccctccccccaggcctgtccacaggggcttgggatcagccagagaagtcaggctgctcactagagcgaggacacataaggttccttggccagactgagtcctacttctggaggaacacagtg

SEQ ID NO: 36875 - DNA, 264 bp, Mus musculus
  source 1..264: mol_type = other DNA
gtcctgctgccgacacctggcaccagtggtaagtgaagacagaaacaacatggtgtcttacccagagcctggcgtactcacggaatcattgaccaaagttttttttaaattatgctaagcactgagctgcatctaataaataaacagtctttatcagtctactgggactattaatgtctcataaccggtatcccaatttaacagccacatggtgtgtgggcgcacgtgacagtcggaggcgcaggctgcctcctctgattgctt

SEQ ID NO: 36876 - DNA, 303 bp, Mus musculus
  source 1..303: mol_type = other DNA
ggcttctctggggatccaacccaggcagcctaggcatgatggatggcacatgcctctggcacttgagatgcatttgagaaaattcaaggagctcactggctgagtaactgagttaccctcagctctgtgataacaatcttttcaaactgttctgccattctggtggcacctaataggtgtacatttccagaaatctatactccgttctagagctttctggacggtcggggtgtcccgcagacaccccaatcagaggaccgtgggctcctgggagcagcagggctcgccccgccccctccaccg

SEQ ID NO: 36877 - DNA, 420 bp, Mus musculus
  source 1..420: mol_type = other DNA
tttttttcttctgtgccaccaggagcaagaaatgactgtcacaggtctttccataccatggaaggagaaaaacggtacaaatgtcctctatgtttatacatagtatataaataaaatggctgtacttctgaggccagcctgggcggttaagagcactgactgctcttccagtctgaagagagcaatagtgtactcatataaataaaataaaataaagattttaaaacacggttatatctaaaagcagtgtgcttacagactctaatccatcacattttgtcaggagtgcagattcatacacactaggctcgtagaccccagtggtccacaggcctaaccttgctgagccatcaggtgaaggcagcatcctgcggtgcgcagggagaccggcagggggcgctgtgcccggaagtcccgcgt

SEQ ID NO: 36878 - DNA, 647 bp, Mus musculus
  source 1..647: mol_type = other DNA
tgaattcacaaacatttgtgtgtataaacctaatagaaacagatttctaagacactgcattttaatttattgcatttgtgcacttgtgtatgcatgtgtatatatgtgtgcacatgtgcatgcaagtgtatgtgcatgtgtttgcatgtatttcacgcgtgtatatgttgctgtgtgcatgtgaatgcatgcatgtatgtgtatacgtgtatgggtatatatactgtgcatatgtgtgcgtatgtgtagtgtgcatgtgtatatatatacgtgtgtgtgtgcgtgtgcatgtgtgcacatatgcatgtgtgtgtattgtgaagtgtgcatctatgtataaatgtgcatgcgtgtgtgcaggtgtatgtgtgtgcatatacgagtgtaagtgcaggcatatgcatgtgtatgtgtgcatgtgtttgtgcgcgcgcgcgtgtgtgtgtgttgcgcaccacagcacacatacacattttaaaaaatcaaagctagagccatctatttttaaattttccagtttggaggcggagcaaatgcgaaggatagcttccgaagtggtccccgggccccgggaaacctccctggctgcggttgctaggagcaaaggaaccggggaggggtcgtcccccccctccgccgaagcgggg

SEQ ID NO: 36879 - DNA, 243 bp, Mus musculus
  source 1..243: mol_type = other DNA
cccagactagcccctaacagcttgtgtagccaagccagatgctgggctcacagggtgtgtcaccactctgtgacacacggcggtttaaattacacttgcagtggcgagccagggctatacagagaaactctgtccccaaggccttcaatcttgtaagcagcaggctccccctacctcctaagccccacccacccgggggcggggcctcagcccctcccacacatgcgcgctgcagcctccccg

SEQ ID NO: 36880 - DNA, 656 bp, Mus musculus
  source 1..656: mol_type = other DNA
aaggccttcaatcttgtaagcagcaggctccccctacctcctaagccccacccacccgggggcggggcctcagcccctcccacacatgcgcgctgcagcctccccgcccccaacgggagcccgcgcaggtggcagcgcgcctaccgtgagcacggctgcaggagtcccggaggtccgtgctcggcgcaggcatccgcccacagggaagcggaccacgcgcagcccggagccggtcccagggagcggagtggcggccgagatcggcggcgatgcctagcgcgggacgcgggggtacggcggggtcccgggcaggagcgccacgcacgccgcttgctcgggggttcaacacagccgcgcgctgtcggccgccgccacgccgaggcactagccaatagggatggggcacggtcgccgtcagtgtgcagcgtgcccgccctgctcctcgcgtggtggcgcgcggggcagcaccaggcagcgcgagactgcggtgctgcgggtcccgggcaggagagccgcgcaccccgttccagactgggacggccgccatgccgatctaccaatggggacggagctcggccgcctcagagtcaatcggtgtgcagcgtgcccaccctgcccttgtatagtccaatcagaagcggcaaggggctttgccg

SEQ ID NO: 36881 - DNA, 637 bp, Mus musculus
  source 1..637: mol_type = other DNA
aggtcataaccacctgggggcatggcacggagtgctgagtacccggcacccagcgctggaagcctgagttctgcctgaacttaagggttcccgggtcacagtgagggacacccagcgtgggacacagccggggttggctgggcaggggcaggctggatgtagctgcccggtgggcatcaggatccctgggccccatacgaagccgaggaggccagggacatcccaggtggagaggccccccgcagcctttgaccactggagcgagctgcagagtcctgtcccgggcagcccgtgctacgcgccacctttcccgcggcgagagcggggaggagcccagagcaacgcgggagccagagcgggtcacggtccccaacggccttcggcgttcagggcgcagccgcactcccctctgcgctcctggaccttgtcgcggcccccggcgtagcgcgggctcaactttctcggagccacaggtggcccgggcgcatctgtgcgtgcgcctctcgctctgtttgcaaagttggaaaaggggtgtctctccctcggtgaccgccccaccccagggccgggagccgcggggcgcacgaggctgacttgctggggcccgcccgcgccctgtaactgacccttagggaaa

SEQ ID NO: 36882 - DNA, 259 bp, Mus musculus
  source 1..259: mol_type = other DNA
ccagacacaggccgagtcatctgtcttcagtttgggatgacatcctgggactcccgaggtgtggtcacctagggccgccacttgaggccagactctgtggtcagggtaccctgttaccagtcatgcgtcggtctcgccccgaagctccccgacggcggccaccgccctcaccatgaaaagtcggaggacgccggagtctccaatgcagggggcggaggcggggccggggcgggcacttccggcgtccgtccacacccca

SEQ ID NO: 36883 - DNA, 390 bp, Mus musculus
  source 1..390: mol_type = other DNA
gctagctaggcttaagtcataaaacaatctaattactctatttacagagcagttggctggcaaggccagtcgcctcggctcgaggccccgcactcggggtccgggccgcagcgaccgccgccttagcccgatccccccgaggtccgccagccccggggcagcggccgaagcccggccgccatcttgccccgggtgttgtgctccgaacacctcttgggaagtccgggaaacaacagttccgcactgcttctttgcccatggaggaggtgaggactcctttcctcttgtcatcttctttagcagacggaaaggagaagttccccccatctagggctggggtgtggacggacgccggaagtgcccgccccggccccgcctccgccccctgca

SEQ ID NO: 36884 - DNA, 298 bp, Mus musculus
  source 1..298: mol_type = other DNA
gccacttgaggccagactctgtggtcagggtaccctgttaccagtcatgcgtcggtctcgccccgaagctccccgacggcggccaccgccctcaccatgaaaagtcggaggacgccggagtctccaatgcagggggcggaggcggggccggggcgggcacttccggcgtccgtccacaccccagccctagatggggggaacttctcctttccgtctgctaaagaagatgacaagaggaaaggagtcctcacctcctccatgggcaaagaagcagtgcggaactgttgtttcccggact

SEQ ID NO: 36885 - DNA, 497 bp, Mus musculus
  source 1..497: mol_type = other DNA
ttttcaactagcagtgcataacttaaaattaaaatgtgaattcacaaaattatttcaaactggcctctgacgccatgacgagcccagtgacgtcaggccacatagagcacgtcatcggtgtgttgagttactctccaggcctgaaactcacctgtccccgtcttccccgccctgagggccacggctctggaaacggggacacagcagtctgcaggcgctgagacgcccgcgcaggccgaggcgactccaagactgacccggctaggcacccgtccaggcccggggatgactccgccccgcagccggccgcgccacgcctggggcactcgcaccagggcggggcactccccagctcttgggcgacccaatagaccgggagctgcggcccgggtttcagctcacttgggcgctggccggggcaggtgagaacgggatgggcggcgtgaggaccgggtcccggacaccccgggccgggcgccgcggttctctgccttcgt

SEQ ID NO: 36886 - DNA, 468 bp, Mus musculus
  source 1..468: mol_type = other DNA
cagcagcaaggcctgtctgtctggcaaagtggcctcttgactatacttcagctccagagtttattaccactgctgttgccagtagaaactgacatgagctcaggcatggactgcttgcctactctgagaacttctgtgcatgcatttttacgttgttataaataatgcaaaatagcccagtctacgggaccctagtctaggggaaactgtccgatctgaggtcgccgagcgctcagatcgaggacacgaaggcagagaaccgcggcgcccggcccggggtgtccgggacccggtcctcacgccgcccatcccgttctcacctgccccggccagcgcccaagtgagctgaaacccgggccgcagctcccggtctattgggtcgcccaagagctggggagtgccccgccctggtgcgagtgccccaggcgtggcgcggccggctgcggggcggagtcatccccgggcctg

SEQ ID NO: 36887 - DNA, 407 bp, Mus musculus
  source 1..407: mol_type = other DNA
ccgttcagccccaacttcaggtgtgaaaggcctgagcttcaggcttcctgtcggggaggtaagggggcatcgcgcacaccccctcacggctgccagacagctgccagctcactcccaaggcagtggcttgcggaggcccaactgtaagtgggcccagctcacctcaggctcagttaaaagaggttacacacagcttaattagtgagttagctattaagatttaagtggtgacctgtgcccctagcatcttccggctgccgggcaagcgggttcccgggctgggcaggcgacggcctgggcgcagcaccgagccaggtggcggcgcgcaggccggggaggaccctggggtgggcgggcgcgggtgggcgggaccccgcggggcggcgcggccgaagcgcagcaggagg

SEQ ID NO: 36888 - DNA, 395 bp, Mus musculus
  source 1..395: mol_type = other DNA
gggtaaattaaaatcatttaacaagatttagtatatgcttcctcacctgtactcagtgtgggcggagggagtgttccctaaacacactgagctctgtgtttcaggacgcagcagctaggctgcattgtggctgaggtgagccgcgaggaccctggattggaaacaaggccccgtcagggtttgagctgtaaacccggccagagcatcccaacctgggcgcggctcaccaggtgcaagacgcccgcgcttccgctaagccccgcctccagaccaatggcgcggcggctgcgggggcggcgggcttcggggcgcggcggtgggcgcccattggcagagcccctgaggggcggggccgagtgctccatggctccggcctgcgggcggcgctcggcgct

SEQ ID NO: 36889 - DNA, 282 bp, Mus musculus
  source 1..282: mol_type = other DNA
tctccagacgggagcggttgttcccccaggaggagaaaaaccgcccagttgaaaatgaccgttttgtctgaattcccaactcggctatccttaagctagccattcagattcaggattgtgggacacaaggaagaactttcagatgagaacgatggttgtcctacataaagtagtacctaaaagctctaatggaggacatggacaccgggagattatatgtataaaatttctatcacggaagcgtgccctttccggtcacatgacctgcagggctccgcaggc

SEQ ID NO: 36890 - DNA, 382 bp, Mus musculus
  source 1..382: mol_type = other DNA
actattttagtattatttagtaaagtaaaatactattttaatattgtacattattttagggcttgagagcaacctttggagtttgaggccagcctggtctacaaagtgagttccaggacagccagggctatacagagaaaccctacaaaaaactttgtacccactaccaattttttttaaagatttatttatttattatatgtaagtgtagctgtcttccactccagaagatggagtcagacatgtggttgctgggatttgaactccagaccttcacaaagccaccgtcagaagagcagtcgggtgctcaccaatgcgccaccgccaggtggcgccagagaacctttttcctggagagcggcgggtgtcgcgcgggaggaag

SEQ ID NO: 36891 - DNA, 369 bp, Mus musculus
  source 1..369: mol_type = other DNA
tctacaggtgctggataggcggctcggttactgcttataagtctttaatcccactggagagatggctcagcttttcaggctggagagatctgactgctctttgaaggacctgagttcaaatcccagcaaccacatggtggctcaccatctgacgccgtcagtgtgcttatatataataataaataaagcatttaagaaaatattgtttaaaataacttacagttttcaaaaatgagattaccattgactatttaatacgaaaatgtatgaatgtatgaatgtgtaaagccttccacggggaagcccgacgcgagcgcttgccacaccgtggcaactgcgcgggcttacggcggaaggggcgtcccctcg

SEQ ID NO: 36892 - DNA, 375 bp, Mus musculus
  source 1..375: mol_type = other DNA
acacggaggttcacaattatctgtaactcccgttccagaggacataaactaaaccttaaaaatgattgtataggctaggcatgttagtgcatgcctttaatccgcaaccacatggtggctcaccatctgacgccgtcagtgtgcttatatataataataaataaagcatttaagaaaatattgtttaaaataacttacagttttcaaaaatgagattagcattgactaatacgaaaatgtatgaatgtatgaatgtgtaaggccttccacggggaagcccgacgcgagcgcttgccacagctttgccccacccgccctgtttccgtggcaactgcgcgagcggagtgggcttaaggcggaagcggcgtccccgcg

SEQ ID NO: 36893 - DNA, 489 bp, Mus musculus
  source 1..489: mol_type = other DNA
agtctgaggagattctcccaatgggtaaggactcttccccagcaccagggcgggtggagtataaagcttagcccgatggccttgcgccttgcgcaaggcaagtaggcgcaccgagcccggtctacggtaagcgctctatggatcccggggctcaggaggagaacggatcccgactccgcgccgcgcactccagctgctcgtagtcgttgttccagaccaggaggtgcagcgggaagcggctgctggtgtcgcgggccgaggacatggcgaggaggccgccacccgggcctgaccgcccgcctgccaccagcctggacccgacggggtctcgggggcccgcccgaccggccggagagcgagggggcgcagcgggcgacaagggcctccgagtccggagcgggcggcgcggcaggcctggggtcgcgggccgggctggggaccggctcggggacccgctcggccgcgcccaccccgcgccccgcgcgctcg

SEQ ID NO: 36894 - DNA, 204 bp, Mus musculus
  source 1..204: mol_type = other DNA
ggtcaatgacctgcatccatggcgctcgctcccacactgagtagcaagcctcaggcccagcgagcctcctctgggggcgcagccaggactgtgctggagagtcatcgccatcacttcacagaggcgctctgcccctggctgtgcagggcagagcggatttctgagttccaggccagcctggtctacacagagagttctaggaca

SEQ ID NO: 36895 - DNA, 395 bp, Mus musculus
  source 1..395: mol_type = other DNA
aggagccagtgacttggttcggtggctaacatgatgctgtcattttttgttttgttttgttttttaaccacacacaaaaattggcctctagcccttgtggccagtgggacacaggttctacatccatctcctcagccccttagcagcgaggagacatgtggctggggcagatggatccatgctccactgctcttcaagactggatgtgccagagcactgtgtgctctctggggagggcaaccgcgtttcagtgaccacagcagttgcctatgcgcaatggtatttccaccatcaagggaacatctttattttacacatttaacttcttttaataaacttgctggctagctctggggtccagcttttggtgatgaatggtcaccatggcgatgggc

SEQ ID NO: 36896 - DNA, 304 bp, Mus musculus
  source 1..304: mol_type = other DNA
tcacatatctggctctctccaggaggcttctaattgaggccggcaggcacctgcctggtcgcccccgaggcagtgggggaagggtatctgggaggctcccctggatactgtagtgccgcaagaggctctgctcacagaccaggaggcggccggcaagaggcctctggcacagtagcagcacaggagctcctcccaggagctgcttcttcacagtgctcctctagctctggccagttacctgggcagttggtcagaatgtcctgggttccaagccagttgggcgacaccaaggtggtcacctgac

SEQ ID NO: 36897 - DNA, 287 bp, Mus musculus
  source 1..287: mol_type = other DNA
ttccttcttctgagaagagagaatctcaactgagaaaattctaagttcgaggccagcctggtctacagtggcctttaggcaagcctgtgaggcatttgagtgattgatgggggagggtcccgcccccttcccccccccccccccccccctccattctgggtcatgccaaccctgggggggcagtccttgacttccctgcatggtaggcaatctcgcaggccagcctgccctaaccaagacaggatatatagatgtgttgtggcaaaagttgccttttaggcatgaaa

SEQ ID NO: 36898 - DNA, 292 bp, Mus musculus
  source 1..292: mol_type = other DNA
caggccagcctgccctaaccaagacaggatatatagatgtgttgtggcaaaagttgccttttaggcatgaaatcacatctttactgcggtaggcatcagagaaatgtcacctcgatgggccctgcagctggagagtctgaccctgaggcatttgccactgccagatcaccaggcagatgagattatgtggccacaacatcctgtgctcacaacagagccggtggggagactgcatccaactcctgttcccttctgccttgaagaaggtaaactggatctccctgaggaggca

SEQ ID NO: 36899 - DNA, 396 bp, Mus musculus
  source 1..396: mol_type = other DNA
acatggtggctcatggtgtgtctgaagacagctacagtattcattcatatacataaaataaatcttaaaaaaaattggtgtacacctttaatcccagcacttggcaaggccagcctggtctacaaagtcaggaagagaaactctgcacacacaaaagctctcaagtgctagtctacaggtgtttaatttgtttgtcagaccctcaaaagccctgaagtaaaaaaggtggctagttgccttcccgatttcattaaatcgcacatgaattcatttttccttaaaaaattaaaaataaaaacaaaactaatcctgcttctgtcatcttcttgtttcaatggtggtctgggaactacaattcccatgatgctctgacaggtgggtcatgtgagagggaag

SEQ ID NO: 36900 - DNA, 256 bp, Mus musculus
  source 1..256: mol_type = other DNA
agaccaggctggccacccaaaatacataaatataattttctcatataaatatatgtaaatataaagtaaataaaatataaataaaaatttaaatcttttaaatgaaatatactaacttttatataaatataataataattctttgaaataaaataaagaaaaagctttgaccctgttaaggcggtccagaccggccaaccaatctccaaggaggggacccccccatagagccattgggtgccagaggtcatagccc

SEQ ID NO: 36901 - DNA, 319 bp, Mus musculus
  source 1..319: mol_type = other DNA
cctgcagggagcacctgagctgccccccaccgtgagggctgctgatcaagaggtcccacctagccaggtcccctagccccacctggggccccaagacaggtctcagggggcctgactgctcctctgccccttgcccaaggcccagggaggcttctggacacttccagaaatgccggggcctctggagtattcttgtgagactatattatggggatttaggcacagcgcgatatggggaattgggggtggtagtactccccacagcccccaagcagagccttttgctatttataaatttataaaacaaaagaaataatgg

SEQ ID NO: 36902 - DNA, 360 bp, Mus musculus
  source 1..360: mol_type = other DNA
caaaagtaatacttgagaaatggtagagcccttgccttgagtatacaaggccctgggtttgacccttccagcacgaaaatcaggagttcaaggtcagcctgaactacatcgtaagatacatatgtgtgcgtgcacagacacagagagatatcacacaatgataggatgcaatacattataacccagtatcagaagtctgaagtgctaagacaacagggctgccctggagaaccggcccagtggcccagagcctgtgccaggctgaaagcatcctggagagtgggacccagcgccgcacccagaggcctcctggctcctgctgcctctattgcaaggagttcagtgcgcacggataaatat

SEQ ID NO: 36903 - DNA, 771 bp, Mus musculus
  source 1..771: mol_type = other DNA
ttaataatatgcatgtaagctggcgctgacgcctagctggcacccaacaaggacccgctgcatggggaccgcgcagcgcgggaacccgaatgcagcgctctgtccgcattttgacagttgactggcagctgaggacccagggacagccgacggtggaaggttgacagctgagtggcagtcaaccgccgcgcaccggggaggaccactgcgcgcccaaggggcctagcgcgcggcggccgctgcagctaaccgtagccccgagccgacctgggctgagcgctccgcgcatgggcagcgcgcgcgagggggcggggcgccggggtcacgtgagcgtgttttgggcacgtgaccagcggcccgggctcgcccccgcccgctcgctcgctccctcctccctcggcgggcgggtgtgcttcgagcggcctcgcctcaccgcctagcgcccccctcagccgttgctgccgccgctgccgccgccgccgccggccatgtcccccggccgccgccgccgccgcccgagcgcggcgctcccgcggcccggcgcgcactgagcgcgggcccgagccaccgtttcggggcccttgttctccgcgccgccgccgccgccgccatgttgggtttggagccgcagcggagccgccgccgccgccgcggctgacgaggccgagcgcggagcccggggcccgcgcccgctccggggcccagggagcggggcccgtcggagtctgtcggagcccgactgcctgcgagtgaaggagcgagccgccgggg

SEQ ID NO: 36904 - DNA, 382 bp, Mus musculus
  source 1..382: mol_type = other DNA
aggacaacccttggagttaatgggcagtacccctactcccagcagggctctgccccgaagactgagggctggagggaatcttcctgcccagcatccccatattttattattttatgtacatacactgtagctgtcttcatacactcgtcactgcctgccttgtgtggccgactcctcacgccctctttaaactttcattttgaagatactgcaaactccgtaatacagggagaacctgcaattctgcctcatgacttcctgggtgaggcccggaccctaggtcgtgagcctgtctcaggcctgcccctgcggcccggtgggcgtggcccgggctcggcgccggccccgcccctgcagccgtgtgggcgtggcccaggccctg

SEQ ID NO: 36905 - DNA, 437 bp, Mus musculus
  source 1..437: mol_type = other DNA
gtgcacacctttaatcccaacactcttaaagccttgaatgattctactagatatgtttcagaaacagcctgattcatgtacagtggtgtacatgcacagacacatgcatatgtacacataagtaattaaaaatgacaatcttctaggagctccatggtaatcccttcactttgtacagactgtacttgaaaactgatctcaggatcctaacacattgcagaaattttgccaaggattcttgtttaaatgtcagctcacggagccagagctcctgaagctcatgggactgctcttccagaggacccacatggtggctcacaaccatctgtaacaggatctgatgccctcttctggtgtgtcagaagacagctatagtgtatcatacataatgcacgcgcgcgcacacacaaacatttaacttggtttgacttaaaatt

SEQ ID NO: 36906 - DNA, 372 bp, Mus musculus
  source 1..372: mol_type = other DNA
tactaagcaccttggtacaagtttcttgagcaccaggaaatcttgtgtcgccacgaaatcagtttgcagggaggcgatgacacttgcccaagcttcccagatggcaagctgcagagctgggattcaggcacttccgggacaggtagctgcagccagatgccacctggctcctacgaggcatggatatcacagagtgcctgcatcctccaaagttgttctctctggaaagtgcaccctccttgggggaggttccgcagcgcccccttggccaccagaggcgcccggaagcgggactccccgagcgctgggcggggcgaggggcggggcgcggcggcacctgggccgcgggagagccgggggtgggctctcggg

SEQ ID NO: 36907 - DNA, 430 bp, Mus musculus
  source 1..430: mol_type = other DNA
ataatgaattgagttaagagcactgctcttccagagcatggtggctcacaaccatctgtaacaggatctgatgccctcttgtgtctgaagacagctacagtttactaaataaatctttttttttttttttgctgaatgcctggcaaataggatgctcacagtcttctataagatggaaaacagggtcccccagttagcatttgaaatgtatataaagaaaatatctaataatttaaaaaaaaaaaaaaaaaagcatgtgttttaaatatccagagtgactggagtgtgaagattctcaggtcagcaccctcgcaccttccaggaggcggctcctccacaggccccgcccccaggagcccgggcctcgccccccaggagctcaggccccgccctgggcgccagggtcccgcccccgctctccatagttacg

SEQ ID NO: 36908 - DNA, 444 bp, Mus musculus
  source 1..444: mol_type = other DNA
caggataagccccgcttggctgggatggaggaggaggaagcccctagctccaggcccgccagggaccgtcgccatggagacgcaggcaccctggagccccctaccacgaggggtgacggtggggaccgtatcctcgcgggactcgcgtgtcccgccacctgttcacatggcatccaagggagagacgggccccgatgctccacccggggcccagctctagagcggaagtgttggcgccagtcgactgtgggattccggggcggcctgggcgctgcacccgccacttccgcatggaaccgccccctgggcgcgcgctccttctcgtgccccgtggttgggccggagcctaggcgcggccactcccctccccggacgcaccagccaatggcgcggccgctctcggcggggtggctgaggcgctccggggtgggaggcggcgcccca

SEQ ID NO: 36909 - DNA, 419 bp, Mus musculus
  source 1..419: mol_type = other DNA
aaagctatagtgtacttagatataataataaattttaaaaaagaatatgcacttaacatgtgtacctttgctttgggctccaagctagcccagagcaggcggatttctgagttcaaggccagcctggtctacagagtgagttccaggacagcccgggaacaataataatttatcatttattaatcacaagaaaaacgcattaaaaaccttaaccctctgttcttcattttaaaacataatcctctattcttaacagaaaacagagtttgtcccagatcgtgcgacactctcggactttaagtgcagggctgaccttaaacgttcacaccagcgccggccggaggcgaacgcatgcgctcttacgcccgccgcgggaggcggagcgtggagattgacagggcacgctgcctgtccgagcc

SEQ ID NO: 36910 - DNA, 305 bp, Mus musculus
  source 1..305: mol_type = other DNA
tccactcatcggctagatggcatggagctctgtgtcacatgacacattgaaacgtgtctttatatatgaatgtggcatgcatacgtgtatgaaaaatcttacacgtatgcacaggtgtacatggagtttcttcacagaatggctaggtagactcaccatttgagctagtctggctagccagtggtgcaccggaattgcaggtccatcacactccacttggttttctaaaaaattttgtgccacacatcttttttttaaaaaaagaaaaaaatcccggtccctcccctaggacctatataaatagt

SEQ ID NO: 36911 - DNA, 373 bp, Mus musculus
  source 1..373: mol_type = other DNA
ttgaggtccccactgcctggcagacaggctcagtgtcatgttataaaattcggaatttaacccggtgttgtgatgggcggcacctggggcggcagctcccagccttctagaacctcagtggggcccccgtcacctccttccagactgctgggtggtccgggagccagccactcgacccggggctccgccttcagggtgtgtgggcctccgcacgcgtgccgcgcatcgcccgggcaaccgacgctgtgcgcggtgcattgtggtctgcaccgctagccaatcgggagaggctggcggtagcggatggccaatagcgacgcgggccgggggcggggccgcgggcgcagggcggggcctagggattaggcggcgg

SEQ ID NO: 36912 - DNA, 518 bp, Mus musculus
  source 1..518: mol_type = other DNA
tctcctcctagcccggctgccggcgcaggaattctacagcagggggaactgctcgcaactccctgatcttggaaaccgttgctagccccaagaggagggagtaggaactacgcggcgccgggtccgggtagcgcactccacacatggttacctgtgtggtgacggagggagaggggtcgggtgcgggccgcgctcgctgccctcccgaccggcgccccccttgaggacgacgcccccacccgcttccgaggggcagctcccgaggtccgcaccgcaggcccgaggtaggggggacggggaggacccgagcccggtctcaccgtggagcagaggccagccggctgctgcgagctcctagggaaggtgcgggcgccgctcaagcagcagcgctaccgaagccgtggccgccagccgccgccgcctaatccctaggccccgccctgcgcccgcggccccgcccccggcccgcgtcgctattggccatccgctaccgccagcctctcccgattggctagcgg

SEQ ID NO: 36913 - DNA, 534 bp, Mus musculus
  source 1..534: mol_type = other DNA
tttagtgtcacagcactgttcaagtgtgcactagaacctgcacaccattccattaaccaggcatgttatgagttcaagtacactctggactaggtaaactagttccagctttaaaaaatatatatattcacatgctcatcagtaaactacagttttaagatatctgacatctctgccacagacacacaagtgtatatactttactttagatgtatgtttgtatgtgtacatatatgtatacacacacatatgtatacacacacatatacatacatacacatatatgtatgtgtgtatatacatatacatatatacacatatatgtatgtgtgtatatacatatacatatatacacatatatgtgtatacatatatatatatttttttttcaaatcatgtaattttgatctttaacttacaacatgctccagcacattcagtcagggaaggaaaggctttcaggtttccaaatcctaaaccaggtctcctgtcggccgccgtcacccggctggtgacgcaacccgacgttctccc

SEQ ID NO: 36914 - DNA, 281 bp, Mus musculus
  source 1..281: mol_type = other DNA
tagtttagaatgcacaaataggcaaactctacagtgatgcttgtggtgatatgaaataatacatgagacctggcgccctccaggccaggggctaggctgccggtctacctgagaccgagggccaggatagcccagcgctgggcagtctgagggcttctgtggggtccgcgtccttctcctcagaaggacagccccaagttaggaggcgctcgggtcccacctccgggaagagaccccgccctctgcgcaagcgcacctcgcggcggcggctagcgccgcgt

SEQ ID NO: 36915 - DNA, 380 bp, Mus musculus
  source 1..380: mol_type = other DNA
actgctagtttttccatgtgtaaaatatagataatagaaaaaaataaaatgtgaaaggagtaatctgactcccggaagcctggctgtcctggaagaccaggctggccccgagctcagattggaatgaatcccaaataaatgagcatgtactctgtaccggtgtgagacagcctggcgggcaggctgctgcggcgaggccgggcgagactcacctgcacgcactgctggttgaagaggtcggtgcacgggtccccggagccgtcccctttgaggaactgcggttgaagcactggtcgtactccgctgttcatggcggtgatggcagctgcggtgacggcgacgcattctgatgtcgtcacgcgcgcgcgccgccctaccgt

SEQ ID NO: 36916 - DNA, 508 bp, Mus musculus
  source 1..508: mol_type = other DNA
atctgagcatcagatcaaaagatttaaactttgcaaagcatttcagtgacttcatgaaaccaatgcaatgtccgcgaaattttagccagattctgtcttaaaaaaaaaaaaaaagccataacttgttatttggatatctcgtaattagcatatgaactgacttgaggttatacatataaactaatttcctggttctccggggctccacaccgtcagtgtccacggcgtgcagctgatccgcaaaggcgatggctttctctagccggtccaccgcctcgcggctgccgaagttcaccagcgccagtcgctccagatgctcgattaccgcgggggacacgcgaccgctgccctgggggacgagacgtggagcctgggtccccagccccgccgcctggacctttccctgtggattcgctttggaagcaaagcttcggcccgcgtccagcggggcccgaacgcggcccgtctcggcccccgtagggacagacggtagggcggcgcgcgcgcg

SEQ ID NO: 36917 - DNA, 438 bp, Mus musculus
  source 1..438: mol_type = other DNA
caagttgacacaaaactaaccagtacagcgtgttttgttgtttttgtttttaacagggtctcactatgcagcctctggatagcctagaactctgtagaggaggctggcctgtcctcgcagatactagcattaaagatgcgaggctttatttgtaaagttctacagacaaaatttaacagatgtgtgtagtattcctcattaatacacggtttcatacattcattcattaaattgcataaagcacctgctacttgccatgaaagatttcgggatactgcggactgggctgtcgagggcctgggaaatcgcaacgtgacttgttctccgccttcagatcctgtccagggactcccgcggcccctagggatggggcacaggaacggggcgcatgcgcgctctcgctccagccgccccagggacggataaagtgcgcaggac

SEQ ID NO: 36918 - DNA, 490 bp, Mus musculus
  source 1..490: mol_type = other DNA
gcgggcaagtgtttggaatcagtttccccccactccagacagtccgaaaggagactgtcgtcaaggcagtctaaaggcaactcctcgctcggactgggagaggttttggggggcactgagctatctccaacccgaggagggttcccccatccgcaccgggaagcgcttcatcccgggagggcgttccccacggctgggcccccgcgccgctgtgggtgaggggtgcggccgcgccccaggcccgagcccgcaccaggaatcaggggagctcgctcaccccccggacacacaggaaccccgagggaagtggggaggggggtcccagcgccgccgcctccgcgggcgcccgggcgcgcgccgggctttatgcgcgcagggcggcggggggaggagccggcaggtcggcccccggcgggccctccccttggccgtccccgcccgcccgcccgagcggggtcgggggagggggcagcatggcctgtccgtccgg

SEQ ID NO: 36919 - DNA, 602 bp, Mus musculus
  source 1..602: mol_type = other DNA
ggagactgtcgtcaaggcagtctaaaggcaactcctcgctcggactgggagaggttttggggggcactgagctatctccaacccgaggagggttcccccatccgcaccgggaagcgcttcatcccgggagggcgttccccacggctgggcccccgcgccgctgtgggtgaggggtgcggccgcgccccaggcccgagcccgcaccaggaatcaggggagctcgctcaccccccggacacacaggaaccccgagggaagtggggaggggggtcccagcgccgccgcctccgcgggcgcccgggcgcgcgccgggctttatgcgcgcagggcggcggggggaggagccggcaggtcggcccccggcgggccctccccttggccgtccccgcccgcccgcccgagcggggtcgggggagggggcagcatggcctgtccgtccggcccccttcgccgcgctcctcatctgccccgcgccgagcgccgccgccgccgccgccgccgccgctccgctgcccgcgccgcccgcggctcccgatggagactgacgcgccccagcccggcctcgcctccccggactcgccgcacgacccctggtacggtcc

SEQ ID NO: 36920 - DNA, 342 bp, Mus musculus
  source 1..342: mol_type = other DNA
ttggctcacaaccacccataataagatctgatgttggtgtctgaagacagcaacagtggacttattataatataataaataaatctagtgtactcatatacataaaaataagtaaataaatatctaaaatcgggctgagatttaaagtaatttctacaacaggcagtctgttctttcagaatgccctcttctggactatacgtaaatgagtgcatttttaaaaatatatttttttttaaatctaaaaaaaaaaaaatttaaggcccagcctgtcccatgagttccagggcaacctgagactcagatctggaaaccatcctctggggccccatgtataaaaga

SEQ ID NO: 36921 - DNA, 321 bp, Mus musculus
  source 1..321: mol_type = other DNA
agcattgcttctcaccaggtggtggtggctgagaccagcctggtctacagagtgagttccaggaaagccagggctatacagagaaaccctgtctgacgcccttttatggccgtcaggagctcctcctgtatgcatgttaaaaaaaaaaaaaaaccagtctattttaaaaagcgcagggctgggctaacgcgctgacaccgagctatagctttgagtccgaggtctcactaagtcacccagactggccttgaactcgtgattgagtactagtgaaagagtttctttaagagagcgaattcctaaattaggagggaaacacgt

SEQ ID NO: 36922 - DNA, 518 bp, Mus musculus
  source 1..518: mol_type = other DNA
ggtcgcagccacccagcctggctggaggtacaaagagaccctgtttctccgcactcaggagggaggcaggcggatttctgaggccagcctggtctatagagtgaattccaggacagccagggctacacagagaaaccctgtggtggctcgctacagtgtacttacatgtaataaataaataaatctttaaaaaaaaaaaccatgaattgtttcaacattaattcaaatgaatactttaaaaaaaaaaccctgtttcacggatgactagcactgccatgcaagccgatttaatcctcctgggaggtgacctacagggacaggtggatgacaaatctgccaccgactctcttgagtgactagtctgccagaaggtcgggtcagcctatagacgccaccagcctgtccagccgccagggggcgccacgaccacgcccagctttcgccccctgcgggattgggcgtgctggggggggcgtggccagcgtgcacgcgggggcggggctatcctgtcgcgggcg

SEQ ID NO: 36923 - DNA, 464 bp, Mus musculus
  source 1..464: mol_type = other DNA
gccctggggccctggagcctctagggctgggttccttgccagttggcagggacagtcagcagagcagccttgcccccagcttgttgagggggtggctagcgctgagctggctgcatgccagcccccagcctctctacatgccttagctgtaacctggagcccggggaggagcttagagcacggaattctgctcctctccctggccttggaggacaggtgcaccccagggccacctcctgacttggcacctgattaccccagtcgccccgtggagtcaagagttgcaccggctgtcaggcaccctcacccctgagggaggagccgggcactgtccctgggaaattcccggtaaggccggctggcagacttggaatctaccacctccagattgcggtgccacctccgggccctcaatggcacggtcctggaccctttagatccccgagaagccctcggggacttag

SEQ ID NO: 36924 - DNA, 358 bp, Mus musculus
  source 1..358: mol_type = other DNA
ttaaaatttgaaatcaagaatcagggctctgaccgaagctggccagcaccattgttcaaggccagcctggtctacaaagtgagttccaggacatccagggctatacagagaaaccctgtctacgttttaggcgtttactcagagaaaacggcaatctttgacttctgagtttgaggccagcctggtctacaagttccaggacagcggtgacgctgcagggcggctccgacccagcagagggcagcaggtctgaaagcgcgcctcctgcggccgggtgctcggtctcagccaatagacgcgcatgtggacgacgtcgtcttcgggtttcgaggaccgcctggttctcctataaaaggca

SEQ ID NO: 36925 - DNA, 410 bp, Mus musculus
  source 1..410: mol_type = other DNA
ttgcaacctctaacccgatagtagtttggtgttaagtctgaaaagctgaggatttaaaaaaatactgtatcaaatgcaatgccctattgtcactatacatctatgtgtgtgtatatatatatttttttagccctggctgtcctggactttagaccaggctggccagtgctgggattaaaggcgtgcttgagttatagtaaaaattcaataattgtcctaagacatcgtcttgggcctgagactagtcatggggggtgtcggtgctggacccgggatccccccaaggatgccgcgctgtccgggggaggagatcccgcgcccaggggctgcagagcacgacctgcggccgccctcccgcccgggggcgccaggcctcgccttgccgcgtgggccctgctgtgacccggaag

SEQ ID NO: 36926 - DNA, 398 bp, Mus musculus
  source 1..398: mol_type = other DNA
gtgtgtgtgtgtgtgtgtgtgtgcacgcgcgcgcgcccacagaggccaagaaacagaaccctggcactggagtcctgtgtgggtcctggaagagcagctgccactcttcagtgccgagccactgctgtagccctggaaaagtctccacttagagtatttccacaatgcaagtagtaaccctttctccatacagtttggacttccagcctgctggcttcagtgcccactctggacaatatctgacagctttttgttgaaaaggggtggggaacagctccttgggttaaaaaggtggtttctcctccagtaaggagagagcccgctcccgaaaaggcttttactcccttcaaggggaggaggtccttggacgctcggctgccagcgccctgagctgtggc

SEQ ID NO: 36927 - DNA, 352 bp, Mus musculus
  source 1..352: mol_type = other DNA
aatgtgggtaccaccaattgttctgggactagcaattggcttcaacagactaagtatatgatatcttcagacacatcagaagagggcatcggatgccattacagaagccagtgctaaactctttttaaagactaggattcatgtatgatcctgcactgcagcactggcgccggtagctccgggctgctcgcggcgccatctgcgggcggaccctggtacttcctgaggctagagccaatgcctgtgggcatgacagaagcaatctgcagtgtctgcacgcttgcccattggacaggcttggtcctatccctgtggcctgcagccgcagtgggcggggccgggaccagcccag

SEQ ID NO: 36928 - DNA, 555 bp, Mus musculus
  source 1..555: mol_type = other DNA
aaaactaatgtcaactttgaattcatgttttaaacactagcaccgtctgcctagcatctgcgaagccatgggttcaggaagccaccctgggatactttggggcaatccctgcagacctgcagggaggatggcgatggcagcgacagctctcggggacgggcaggtgggcttccgctctccgcgctgcgttggcgagcagggtgcatacgccccacggatcccaatccggaaccgctacccgttccgccagggggtcgggcgtccgggatcgtggtgctcgggggacgacttcctccccagcgctgacctccaggcttcagccctgcggccggttaacggcccggggatccgcagcgacggcgctcgctcgctcgctcgctcgctagctcactcggacctcggccggcgagcgtagcgcactgcgcgtgcgcggagagggcgcggctggccggggctgcggctgcgcagaggcggttccagcccccgcgcctgcgcagtggcggggcggggcgggaaggagggaggcggcggcaccggcggcggctgctgaggagg

SEQ ID NO: 36929 - DNA, 455 bp, Mus musculus
  source 1..455: mol_type = other DNA
gtgcctgcacatgttaatcaccggggctcccacacagtggcgtcagagtggctgggaggagccgctgcttcaccttgtgtccagggagactggcctcagcagactgcgctgggaaacctaatgtgggtaccaccaattgttctgggactagcaattggcttcaacagactaagtatatgatatcttcagacacatcagaagagggcatcggatgccattacagaagccagtgctaaactctttttaaagactaggattcatgtatgatcctgcactgcagcactggcgccggtagctccgggctgctcgcggcgccatctgcgggcggaccctggtacttcctgaggctagagccaatgcctgtgggcatgacagaagcaatctgcagtgtctgcacgcttgcccattggacaggcttggtcctatccctgtggcctgcagccgcagtgggcggg

SEQ ID NO: 36930 - DNA, 272 bp, Mus musculus
  source 1..272: mol_type = other DNA
tcagaaagatttcagaatctccttcattgatcttaactttttaatgaggaaaatacctaataaaatattttttaaaaaagatttatttatttatttattatacctaagtacactgtacactctttctttgcactgggaaattgacaagtatagaactgtcacatacagaattcattatgggaaactgtgtgatgatactgtgtgactcatctccgtttcctcgaacagaagtttctggctgaatcagggcccggcacacggctgcctggctg

SEQ ID NO: 36931 - DNA, 287 bp, Mus musculus
  source 1..287: mol_type = other DNA
atggcttcttactaaagtaaaagtcctatgagcagatctaagtatacctaaagatctgggctgttccaacggctgcatgaagcatggactcactgagggtgcactgttttatatattttcggggattaaatccagggtagatttaaaactggtctgtaggcagtcttcattaatcaagattggcatgggagaggccagcccactgttcctaggtacagctgtgagtggtagtgcagtacaaagcactcccttgacctacaaagagcagctactcctgcgggttgctg

SEQ ID NO: 36932 - DNA, 395 bp, Mus musculus
  source 1..395: mol_type = other DNA
aagggaagatcccctggaagatcgcagagccattgccccagcacactatttcgagctcgctctctagaatgcgtttcacggttacataatttagaaaagctattcctagtagtcatagagtgcaggattgtggtgagacctcacgatcttgctgcggctcaaccccgtaaccccggcgcctacgttaggcgtgggcgatggctggcagttcgggcagagctccccgcaggagccgcgtcgcagggccctctttctattggtcgctagtcaaaggaagagacaatgtgattggcttttccatttcacttcctctgcctccgagatctgggcgggtcctggtggagacccccgctgtccatcagtagatgggcacggccgagacctgcccacgtcgt

SEQ ID NO: 36933 - DNA, 198 bp, Mus musculus
  source 1..198: mol_type = other DNA
atggcaacaaagatggggcagcagcaggcaccgccatgtcacagggcactgcatatgcatgtgaacgcccttcccggaggtggaaaaagaacacacgcttgctctcttgtgtttctgggctcagggatcccagtgggtttactgaggtcagctgagatgtcttgctttgtggcccatagaccaggagctcaagccctg

SEQ ID NO: 36934 - DNA, 301 bp, Mus musculus
  source 1..301: mol_type = other DNA
aggcggcagagacgatgtgattccaccccccctccccagctggcacagatacccctcaccggtgctgggtgctgtaaatcagtcatgagacatgcacgtcttccatctgacagccatgattttagacctgcccggcaccctggcactccagcgtccagggatggaaggctgctggagccaggagctgccttccctgggtgagttgcccaagcacttcgcccagagaggcaagcgtctccaaacgcctaaggagtaaggcgctttttccctccaattttgatgaaccagagaagaattcgtg

SEQ ID NO: 36935 - DNA, 274 bp, Mus musculus
  source 1..274: mol_type = other DNA
gagaacgtcaatttcccagaaatcttaggtctttaagttttctcaaacacctggaagattctccttagtctacagacagaattggccactaacagggtttctctgtatagccctggctgaggcgtgcgccacaatgccccgggtactctgcaagagcaagcgcttgctccaagccgcgccgctacgaagctcgatctggtggcagccccgaaccacccgcgaccgcttcgcgctgagcagcccttccttcgctgggcccggccggaagcggaag

SEQ ID NO: 36936 - DNA, 273 bp, Mus musculus
  source 1..273: mol_type = other DNA
ctagacagaactttaccttgtagacccctggggaacattcagaaaaggctcctgctgagacgctgtcccgagaagctgtaaagggcccctcacaatagatcttgtgggaaaggcatatttcagaccctcacaaaggcaaatgttctttgtgataaggaaggtcctgaagtgtaagcctagagaacagagcatgtctctctccctggggacagtgtctttttccagggacttctggttacatcagaggaaaagagcccgggcagggcccctggc

SEQ ID NO: 36937 - DNA, 273 bp, Mus musculus
  source 1..273: mol_type = other DNA
ggcttgctggctgccagtctggtccaggctccctgtcgatgacttctctggcctcctccgtagttaggagcactgactgctctacatggtagctcacaaccatctgtaatgagatctgatgccctcttctgggggtgtctgaagacagctacagtgtacttacataaaataaataaatctttaaaaaaaaaaaaaacaatgataataattgactcccttgttcttctgtatccttctggaacgttccaacctatggaggggaggcgtcaccgc

SEQ ID NO: 36938 - DNA, 280 bp, Mus musculus
  source 1..280: mol_type = other DNA
taaacaagttggtaacttaaagaattcattgtgtgcatacaggagtcactcattcaatgtaagttcctattctaagaaaccagaatcctgaaaacaggtaacatttattgagcacatagatttgctgatttttgctcgtaaccaaggagaagagatttcagtctcctgggaagtgaaagaagtgtatataaagtgttttaacagctggatagagagggaatctcattccttctaatttgcagcccattgagaggctccccgcctcttggcctaagtccct

SEQ ID NO: 36939 - DNA, 374 bp, Mus musculus
  source 1..374: mol_type = other DNA
gaagcccccctgatccccgggggcacctgttctcttcccatgaaaagatagccattgtcgttttctaaatatctaaagagatgctgaagttatctcacttcatcagctctcccagtgtgttcttttggaaagaatagaaactcgtcttctttgctttttataggattttttttaaaaaaataagggctatgtaacaactgtttgtataaacagaaagttccactaagtgtttctctagggaagatacagttccatcgcagcagcaacgtggggctcttgaagcccaagattgggcaagacccttaggtttcgctcaagggcatggtagatggcgccatagttacaagcagaaagtcttgtgatttcaggctatt

SEQ ID NO: 36940 - DNA, 367 bp, Mus musculus
  source 1..367: mol_type = other DNA
atatgggttaaattgctgcaggctggcacagagcaagtgatcaataaatattagtcagcggctcctctgtgagcccagagctgggagaacgcccgattcttgccagagtcagtacctgccggcaggcactcacaaagttaggtttcttacttcagaaatacacaaacagcacgctgtataacgcacgtatactaatactcgtaaatacatataaatgggcgtgtgcatgaaataggcacctggagcggggtttaatataaagcctgaggactcgggactgagcagagaaatttaaatagtggctccctggccagccaccagctccctggtctgcgcgccttggcgtccggttgccaggtaaccgagc

SEQ ID NO: 36941 - DNA, 242 bp, Mus musculus
  source 1..242: mol_type = other DNA
tgccccattccacaggtggaaaacaggcaactgcaggcagactcctccttggaggcccaggggctgtagatatagaggactccagttagatcagtttatccagacttaaactgccgttttttaaaatttcgttctcagaagtctgaggcctcttctgacaagacagaacagccaggcggagggttattaacctgagaggctggctggacccggacgccacggcccctcccagcctcagcggg

SEQ ID NO: 36942 - DNA, 166 bp, Mus musculus
  source 1..166: mol_type = other DNA
ctgagacaggctcccaggatggcagctgctgcatggtcaggctgcaggtgggaatcccagcccctcacagttctaagagctaggaatgacagtccctttccacgggcctccatcagaatagttttcccccagcatgcagcccacaagactgggcggctgcacttag

SEQ ID NO: 36943 - DNA, 350 bp, Mus musculus
  source 1..350: mol_type = other DNA
tctgaaatgtaaaacttttatatatatatatatatatatatatatatatatatatatatatatatatatattctgtggcttcaaaataacagggtgttgtccatattattattatcaattactcaaaaaaggaggagatttcattctctgattaagggacaggttcctttaaagacacctagtgcgctctaggtacggtctgcaggctgcaggctccttaggcgtccaagtctggcaagaggagccagcaaaggtagggacaggaattcttgcaattctttttctttctgtcaaggggagcgcacacgcatgcgcgcgcgcacccacccacgcacagtcacgggagcaga

SEQ ID NO: 36944 - DNA, 258 bp, Mus musculus
  source 1..258: mol_type = other DNA
gagattctgagtctctgcgaagcaggccggctgcgaggcacaaaagagatatcctttatagcgccgcaagcacagatgtgacgctgcgcccctctgcgggtgggggccggctcgacagatggcgaggagcccccagctccctcaatggaagatgctcccgcttctcagaggggtcagagtcgcaactctgtggccacggggccttagagacaagcgctggaggaaagtacagctcgcgcgaccagcctcccctaaccc

SEQ ID NO: 36945 - DNA, 576 bp, Mus musculus
  source 1..576: mol_type = other DNA
ggtgttctgaaacacgaattgcagaccaggctggccttgaactcagcctgcctatttaagccaatgtagttcctggagggaaatgccctatttactcaagtaaaaattagcaggttattaaattactgttttaggctaaaataccttaaaaattatgtttgttttttcttttttcttttcttgaaaggagaaagaatgacaactcttttgatcatttgtaaaaccggtagaacagcttacccagtaaatctactcataatggcaacaacttgcctttaccataatttttaataaactctgcttttgactccaggcgccgcctggtggccactgccagaagtgccaccttccgggtggcgcggctgcccctggatatgcctgactccagagactcccgcctccgccccttccgccgtggccgatcgcggattcttaagacagtgacgccgccgcggccgccgtgtcagaaaccgtggagccccggcgtctcaggacggcctgatcaggctgtcaccgagcagcccacgacccggaagtagccggctgcgcgaggcccccgttgcccagcgcgggcgc

SEQ ID NO: 36946 - DNA, 205 bp, Mus musculus
  source 1..205: mol_type = other DNA
gtaatcaaaactcacaaaatgtgtatttcttttttcactcttagcttctgagaaaagatctcaggctgggttcaaacttgaggttcctgagagctggaaaataatttacaagagcttccgcgtttgggactggatccatcgaccgctcggacttcccaggcaaggcgagccgagtgggggcggggcgcgctctgcgcagtcgggt

SEQ ID NO: 36947 - DNA, 256 bp, Mus musculus
  source 1..256: mol_type = other DNA
tgctggcttacagcccagatacataaaagaaataaatgaaccttttttttttttttttttttggtttttagagacagggtttctctgtatagccctggctttccttttgtagaccaggctggcctcgaactcagaaatccgcctgccttgctgggataaggcgtgcgctctcaatctccttcaggtgatcactagttgaggcacatgcacctgcaagggccaatgggcgcgcaggcaggctgctgggccccgatag

SEQ ID NO: 36948 - DNA, 415 bp, Mus musculus
  source 1..415: mol_type = other DNA
cccagggatcaaacttaagccatcgtattcagtggcaagtgccttttcccacggagccacctcttgggtccactggttgacagtaaacagtgctgccaaagatctgtcacctcacagccttgtggagttttagtcaccagaaatgtctgctaactaggaaactttcttaacataaacaagtgcagaaggaattttaaactgtgtgatttggtttttggttttgtttaaaaaaaaaaaaaaaaaacagcacagaaaatggtgagctttgttgtagtttagcttatgctattagaatcttctcctctaaccccaagccatgaggggtggggtgggggggatcctaaaccccacctgtccactgtcagctctggggcaaccagtcctgggggcccagtacgcaagtgctgggagagtg

SEQ ID NO: 36949 - DNA, 344 bp, Mus musculus
  source 1..344: mol_type = other DNA
ctgaagggtagagtattctattagctaccacactgtatgatctgggaaccccccaggagataaaagtcacactgtctgtaaaaggtcttgttagttgctacttgaaggcaccgtgactcttaggaggcagagttgtcattgaagcctcaatctgcccaaatttacaggcacaacatttggaaggttaacgatggaaggccatcatctgtgcagaacttgcagaactgctgctatgggaatttcgttggcatttaaagaacttttaaaacaacaacaagtgaccctggcgctcggaccgcccagctccggctcagcggcgtgacccgacctgcggttggtcccgg

SEQ ID NO: 36950 - DNA, 457 bp, Mus musculus
  source 1..457: mol_type = other DNA
actccctcgtgttttctaggaaaccttaccttaggacaatccagggctgggctcaggcgctataccccgactacatccttgttttgaacacgacaagggcagatcctcccgagggcccagctgtggcggtgtccaccaggacatgagcccggaaatgtggcgctccggggctctctcgtgtggtctcgacccaagttcattcgagaacccgagtctcgtgggctctgagcgatggcggcgctgtggcccgcccctgcaccggagcagggctgggacgtagccgggtgcccggcagcccgcgctcagtgcaaggccggggagtgcgtcccgcagcggcgggccagcgctcacggccgctacctcccaggccccgcgggactgagatcgtcgcacaaggccctcctcccggtcaaggtggaggggctgttgttttccgccagtcgggcgggctgggcgc

SEQ ID NO: 36951 - DNA, 255 bp, Mus musculus
  source 1..255: mol_type = other DNA
agccctggctgtcctggaacctctgtagaccaggctggctggaagctaagtcttcgacagtctggataagagggccatgctgaagcaggcttgtatctgaagccccttggccatttcagggaagatccatgctcctctgttaactgagcctgactcagcaaagtttgactgggctctggatttaaatttcataccagggtgcctgggatgaaaacccatccttggctaggatgctagtgggccagcctgggctaa

SEQ ID NO: 36952 - DNA, 127 bp, Mus musculus
  source 1..127: mol_type = other DNA
gctggggccgttgtcaaggcgctgggacatcatgacccgggcagcttccctgagcctcgagcgagcgagagagctccgcgtcccgcgcccgcagctctccgccccggccccggccccgcccccgccg

SEQ ID NO: 36953 - DNA, 354 bp, Mus musculus
  source 1..354: mol_type = other DNA
ccccgggggtggcggtcaccagcaatggcagccatcccattaaacaaacactgcagtggaccacctgtgctcagcagctaacctcatccttgctgggatagctagctaccccttaccttacttgctgatgaaagctacttaaataaggaaggttttacagtctactgcccatcatggtgaggacagatggtgcttgaattctccttttatacagtcaagaactataaaataatacactaactcagtctagagttgtctcctagatgactcaaggttttatcaagttgatagtcagggagcactcccccagttctagggagtactctcaaggctccccagagggtcctcagcagc

SEQ ID NO: 36954 - DNA, 497 bp, Mus musculus
  source 1..497: mol_type = other DNA
ggctaacctggaataaataaaattggtctgtaatcctcttactgtaggagaaaatgcatttgtgtgtataaaacacaaatgtttgtatgtatttatatgaatatatgtatgcatgtatgtgtatatatgtaactgtatttatgtgtatatatgattgaatgtgttctgtgtgtatatatatgtgtgtgatatacatgtatatgtgagtatatatgtatgcatgtatgtatgtatgtatgcgtattaactgtttatatgtatgtgaatggggatgtatgtatatgtatatttgtaactgtgtgcatacctgtatatgtacggttgcactcttgcccctgcactgacaggatcgggccctggtgaggcccgcggtggctctggcttcagcgcgcggtcaccctggacctcgtgcgaggaggctgagacagccgactcaggcggtaactccgctgcaggccggccggaggcgaagcctcgcgagggttggtttgcgcgcg

SEQ ID NO: 36955 - DNA, 540 bp, Mus musculus
  source 1..540: mol_type = other DNA
aggccccgtcttttattaatttataataggttggagcctagggtagaagaagagaattgagcacgctgggctgcacgtgaattaataaagcaaagtgaaatttgaatttcttacaggattcactctactccggtaccctaggtggctgccaaaggtgggtagctagatcaacagaaccctgtgagctgggcgcgcacctgctcccgggtccccgcgcacctgctgagccgcgctccggcctcgtctcgcgagatccgggctggcgtagtggcccccacccccacccaggcctccccgcccccgggccgggcctccccgccaccttggggaccagcccggcccccctcttcacccggcatcgtagcggctgcgctccgcacgcaagcccctcagtcccaagggaccccgcctccccggctggagggtggcccggcgggcaggtgcacgcgccgcctgccgccagcgggtcccaggcgcgcccagagtgcggggacccggggaccggctgcgcgcacggcgcctctcggcgctgcatccctc

SEQ ID NO: 36956 - DNA, 270 bp, Mus musculus
  source 1..270: mol_type = other DNA
aagccctgggtagactctgtctcaaattgcttttgagatcggatcttaatatagatagcgggtttctctgtgtagccctggctgtcctgaaactgtagaccaggctggcctcgaacttgctcctaaatgcggagatcaaaggttttaaaaatggcagcagccgctctcgcctctgcccagtcctccaagcggagtgggcgggaccccctggcgtgggcggggcgttcccagccactccccctgagggcgtggtacggcttcttaggctcc

SEQ ID NO: 36957 - DNA, 576 bp, Mus musculus
  source 1..576: mol_type = other DNA
gagatctgtctgggtagacctgaggcggagcctactcagcaggccccccgtgaactctgggcagctgcctccaggggcagactcagctccccggaggctcagagtgggtgtctgccgagacccctgggttggctagagtgggctcctgagaacgccagttccaaggatgcgcacccacggccgtgactggcgcatggcgggctcccagggcagccttgaggtattgaacaggattccatggtaaccatctcaccgcaacccagatggtgcagcaggactggccagtcaggcacctgcgatgcgcgctcctctgggcgcccacctaggtgcagggcgcgggggaggggggcacactcgcgtgccctcctctgtcccagcgccgaggctccgccgctggaccccgcagagtgggcggagggatgcgggtcgcgctgcccgcaagctcatcccgcggggctgcggcaggggcagaaccacgtcgtgtcctccccccacccccattcccgcccccgcggccgcgagggaagcgggcgagcgctaggaccgcgccgctccgcctcccgccgctataagagg

SEQ ID NO: 36958 - DNA, 315 bp, Mus musculus
  source 1..315: mol_type = other DNA
caagctcaataattatccttttggacaaacatttattcttgcaaaaactattccttgtgtttcacatagatttcccagcaagggtctgtgaattataaaaaaattttagctaatggttttttttttttatataaatgaacactttattatatgtaagtatactgtagctgtctttttaaaattttggttcctttctaaaaaggattcatgtcttctatcacaaaagttgctgattttatatcaacttcctgcagtaagacattttcttgccccacccattgcctggtctggtagtcttgctgtaagaaaacaggc

SEQ ID NO: 36959 - DNA, 480 bp, Mus musculus
  source 1..480: mol_type = other DNA
actatatggaccaggttgtatatggaccacaaatccagtggcttggacatggtgggcggtctctctagcaccctaaggagtcccaggagcctcctcactggtcggcaccctccccagaggacttcccaggctggagctcctttgggttaggtaacctcactgggcaccaaggcaaagttctctctagaaccacgttcggcgactcgcccaagttggagtccaacccatcccgggctcccaccccggggtgcgcttaagtcaggtcaccagaagggggtgcgaacgcgtgtcaggaatgtgtgcacccacccggaggctgacatcagggcaagtcggcttgaacggccgaattctcccggagctcacagtgcgcaccgagctgtatctccgagctggagcctcccgcagcccgggaagcgaaacagcggaccccgggccagcattcccggccctgccggcgtctcgagggcgggccggatg

SEQ ID NO: 36960 - DNA, 295 bp, Mus musculus
  source 1..295: mol_type = other DNA
agctagtagcttaaatggcgagaaaggcgtgcgccaccacgcctggcttcatggtggccacaaaaattcgaggccagcctggtctacagagtgagttccaggacagccagggctacacagagaaaccctgtcatccctgagacccacttggtggaaggcaagaactaaaacgcgaccttttgcaatatgtatatagcagccatttaaagcatggcttgcttggtacaaaggtggctgcccggaacctacaagacgcgctcccggaagtctccaggccgactacggacacttccgg

SEQ ID NO: 36961 - DNA, 245 bp, Mus musculus
  source 1..245: mol_type = other DNA
gcgagcacccagcgcttgcgcaggagccggcgccacagcagcgccgccaggttcagcattagggcgcaggcgcagagacgaccccacggcatgacccccgcagccaacgcgccggccacgtgatccgccaggggcggaccttctcggactagaggcaggcctccctgtgcgagggtcctagcgccgatcgcgttctcggtggcactgccggccggaagtcacgtggcgccctggccacgccaggg

SEQ ID NO: 36962 - DNA, 402 bp, Mus musculus
  source 1..402: mol_type = other DNA
attattacagccttctcggctgcagctagctaggaagccacaggcttttttgcaagattaaattagctaggaaaagatttataaagatccccaagtttcaagtaggctcgtattgactcctggagcccacaggatgctcctccctaggaggctgcacggtcccctacaggacgcttgggcgcgagcggcgtccccagaccggacggcgaagcgcctttgccgccaggctcgcggggtcacagggtagcagcgatccagcctagccaatccctggcgtggccagggcgccacgtgacttccggccggcagtgccaccgagaacgcgatcggcgctaggaccctcgcacagggaggcctgcctctagtccgagaaggtccgcccctggcggatcacgtggccgg

SEQ ID NO: 36963 - DNA, 261 bp, Mus musculus
  source 1..261: mol_type = other DNA
aggtttagcatggaatattgttacattgtgtcacacaatgtaatgataatatttggagcaagaccttgcagcatagccctgactggcttggaacttactgccctgcttctgcctccagagtgctggaacactaaatcattgaatcccaattgtatgcccaccccacaatcctagagacccaagagtctgggggggggtggagccgcctctaccctccctcacgtgtgtttgcgcagccttcaaacgacttttgaaatttca

SEQ ID NO: 36964 - DNA, 845 bp, Mus musculus
  source 1..845: mol_type = other DNA
ggagctcagcgctcgggaggcagtgagtcccgagccctggcttcccgatgcctgggttcgaatcccgcgaccccgggcaagcacctcgccctccgcccggtgcgctgcggcaggcaggccggcgggcggtcgcgcgcgaggtttcgaggaggagacactcctcggctcgctcggccaggccgggccggcccacgccgctcctcggggacccgagatgctcccccaggggggctcggaggccgctccggggaagccgcggccctcttcggcccgcgcccgacgcgcgcccgcgcccagggcggggcgtccacgcagccccggcgtcccacggccgcccgctcaccccgctccgagagggccgcgctcgctcggctcagcagcgcctcccgcgagccaccaccgccgccgccgccgccgccgccgcggcccctcccccgccccccgcgcggccggcgcccgtcacgtgacgcgccgcagccaatggcgggccgagccgcggtcggcggccgccattgctgtcagagcgagcgagcccggggaggggacggcgctcggctgccggggtcgcccgctggcttcgtccgcaccccccccttcgcgggctcgcgcagcggcggcggcggcggcggcggctcggggcggctgcggggctcgcgtgcctcccgcgccggcgcggccgagggcgagtcgcccgccggcttggagataaacaaggcggccgacgaggcggcgaggcggaggcggaggcggcggccctgcgcgacagaggcgggcggcgttgccggcccgcgccccccgccgccgccgtcgtcgccgtcgtcgccaccgccgccctcgggcctccc

SEQ ID NO: 36965 - DNA, 529 bp, Mus musculus
  source 1..529: mol_type = other DNA
agtaaatacattttttaaaaaaaaaaggagcgagccgagcgtagactgggccaggcgcgcaggcctatgtcggcgcgcgttcgggcccagaatcccaaggggcatttgggtctctgatcccctgcgctagtggctcgggaatccgaagcacccgggcgcaggagctagccgaaagagaggttcggcggccagctcggctagcccggggcccggggccgcgggcttgaactgtagcgctcggagcgcgcgagaggcgagcgcccctgcccggcgcctcggaagccgggcaagctgcctggctcccgccctcgctcctccccggatcccccggcttggatggctgaggctcagacgtaggctgagctgaggagccgcggcgagctctcaggctgctgcgaactctcttctggatcagccacctagaggcgactttggtgagcgcgcggcgccctggtggctccccgccctcccctctcaggccgtagtaccgcgcggcgcagcgacgtcccgcagcccacagcgctgccgg

SEQ ID NO: 36966 - DNA, 335 bp, Mus musculus
  source 1..335: mol_type = other DNA
cagccacctagaggcgactttggtgagcgcgcggcgccctggtggctccccgccctcccctctcaggccgtagtaccgcgcggcgcagcgacgtcccgcagcccacagcgctgccggaccgtccagagccgccgagcagacgcccggggaattcagatatttttaggaaagcgatttcgctcacgttttttactcgccacccagactctgcgcgcagcccggagccagagaggaggatcgcgaaccgaagccagcttcgcagttctagttttgaaagcgccgctggaaaggtgcctgtgaaagccagagtctagctcaactaccttgcgctttta

SEQ ID NO: 36967 - DNA, 384 bp, Mus musculus
  source 1..384: mol_type = other DNA
catgctggtccttggagtattttaattatctaataaatcgataaaaataattaaatgacaaaattaataactaaatcaattaatcataataaaaataattaatagaataatttaattaacaagtatgtatacaatgtattggccagactgtgactttcagttcccatctccccgtaggagtgctgtgagcgacttttaaaaacgtgtcttctgaggttaagagatgttacacaacttgatcaagggtagcaaggtacaaaaacaggtcctgttgtttttattctacttggcatagaatctagaagagacttgctgcattcgaaaaaacttctccggtgcaaccagcagatggcagcaaaggagcggctgccatgggcgcctgac

SEQ ID NO: 36968 - DNA, 273 bp, Mus musculus
  source 1..273: mol_type = other DNA
aggatgtagtttctaattagagtcccagaaaagactccctgtactctgaactgcagacttcaaggagtgctggcagctgaaacccccagccagccctcagtgactgattattttaataaaactgggcactgctctgtgtacactccagtgtgtgtcttgaggagggggcacacacaaccaagtcctagagagcttggagtcctggctctgcaagtctgtctgaggtcagcttggagacaggaggcccatgggtgtgtgcacacgcctaatgca

SEQ ID NO: 36969 - DNA, 165 bp, Mus musculus
  source 1..165: mol_type = other DNA
cctggctctgcaagtctgtctgaggtcagcttggagacaggaggcccatgggtgtgtgcacacgcctaatgcacacacacacacacacacagagagagagagagagaggcatctctctgaaaacagctggctgatgccgttctggagcccgacaacttaaaagta

SEQ ID NO: 36970 - DNA, 421 bp, Mus musculus
  source 1..421: mol_type = other DNA
gtgtgtctgaagacagctacagtgtacttacatataataataaataaatctttaaaaatatctatataaattatctgaaaaaaatggtttacaagcctctgtctcctgagcgctgggattaaaggcgagcgctagctgcatttttttttttcaataaaaaatgttctaagatcccactacgaagaaccaaggttccatcttgccaactggagttgtccactttaagtgggcaaattctttacacaataaataaacctttataattttatttttgtaacggctttaaaacaattttttttttcgatttagaggccccaagacctggcggagaaaacgcgagcgctcgggcctttcccccgtccccgtgtgggtgggactttccccggagagagtctcccgtgaggccacacccacttccgga

SEQ ID NO: 36971 - DNA, 321 bp, Mus musculus
  source 1..321: mol_type = other DNA
aggcaggcaggcagacacagacgtcctgcacacaaactgtgagtgctgagcaggcctgaccacactgacttaattttaacataaattaccacatcaactatttattgtctttaactgtgaacctaagcaaaatgttattttcctcaatccaaactaaaatccgatttgaaatctctcaaaattgtaaaatggatgaaaacagatcgttctcacctgcccaagggattggacccaaagccttgggtacacctctgtcagaaatgtgagcaaggcgacagctgctgttcagtgacgcagtgacatcagtgacatcatcgcctc

SEQ ID NO: 36972 - DNA, 447 bp, Mus musculus
  source 1..447: mol_type = other DNA
tttggctctaggagagggccagacttagagcatctcggggggcccgggagtgcctatgacgcccggctgtggccagcttccctcgctctatcgagcgacccgtgccgagtgagctaggcgggagggaggcacagaagtacccaagcttcccgccctcagtctcggagaagtgccgggtctcccagctcctacgctcagagcccgagcgagctccctgcctgggcaacttctacaggttgcgagggtggcgaacctggtgggaggtttctccctggctagtgccccccaaaattatttgtgatgggagagaaaaagaaccctggttttcgcatctagaaggtaaatacttacttagcaatactctagccaatttagatatgctataaatttaagaggttgctatggccacggcgcgcccattggccgcccggccccctacgtgccgca

SEQ ID NO: 36973 - DNA, 466 bp, Mus musculus
  source 1..466: mol_type = other DNA
tggatttaaagccagccttggatacaggagactctgtctttaaaaaaaaaaaaagtcttaaaaaactggcaggattgtttagattgtcatctgacttctgcaggtgtgccagagcacctgacaaataaatacaaaatatattattatgattattactgggtttttcaactgttctagaactcactctgtagaccaggctggcctcttgcctgactaaaaaccattttttaaaacattcttttaaagggaaagcgtggtggcacatgccttgggggacctcccagaacactcctgggttttcctggtggcactgactccctgactcccaccgtgcgtcattcccagggacaaacagtctttgctaatgccaaggtcaggacctggcaatcgccggagcctctccctggggttatcacgatctatggtgaccccacaatggatgtggggagccgaccaggtcaaatgc

SEQ ID NO: 36974 - DNA, 379 bp, Mus musculus
  source 1..379: mol_type = other DNA
tgttgataagaaacatcaatgatgaagatctgtgttcagtctacacaggaacagaggctgtggaggccaaggttctttcccagagccaggacttgacctttttttttaaaagatgtatttattattatatgtaagtacacttcttcagacactccagaagaccccatacgcccttttatatgaagaggatggcagggtggtctgacactaatttgggtttaggtggctgagcctaagcccaatactcaggctcaaacttgtagtcggtccagcatgccctcctccgtggccgcccagccccggcctggaccagggggcggagcttgcttgggtggggcctcattggctacccggaggctcagccctgagaataaagctc

SEQ ID NO: 36975 - DNA, 243 bp, Mus musculus
  source 1..243: mol_type = other DNA
gtggcatttgtcactggttgaccagaggcaaagttggccagcaacttgaccaaagatgttgatcctgcaatcactgcctctctttgtgtacattttgagacagattctcactcttttttaaataaaaattactttgagacgggatctcattactaggctagcctgtagctcgggctaacctgattaacacagggaatgtaacactcttaaatattaaaaatttcctttaaggcaggccccgcc

SEQ ID NO: 36976 - DNA, 266 bp, Mus musculus
  source 1..266: mol_type = other DNA
cagccccgctgggtcctaaggctaagctgaggttgcagggctataccactgcccatcttgatacaaatgtcagatccaggcatttcaggctctacaaccagactgcttgcaggcagcatttattaccgtcatactgaggggatgctgcctctgaaaggccagaactatgggccacgtgctttcaatatagcatctaccttcacaacccccaccctcggctgggaggctgtgtctttaaccctcgtggccaggctgctccgggccag

SEQ ID NO: 36977 - DNA, 486 bp, Mus musculus
  source 1..486: mol_type = other DNA
acaatgtatttacatataaataaataaacctttaaaaattactgtcctgtagcaaagattgtgttccttggtaatctcttacaagacacagaagccaaacagtagtctgtttcagtcctgtttaaggcctgaggcaggaggattggaaacttaatgcctccttcagactttttcagatcttgtcaataataataataataataataataataataataataataataataataataatacaggaatgggagccttgaggccagtaagcacaagggtgccgccctctcagctgggcttcccctgctgtgaaagtgagggcagcaggcattccgggaggcctctcttgccctcaggggcagcctctgagggtcagcatagcccctggagaacagaggcagtcaggccactgcaggtgagggccctggctcagggctaggtcccatccgtcttcctgggagaggcagcctcaacgtgtgtgacaggccc

SEQ ID NO: 36978 - DNA, 304 bp, Mus musculus
  source 1..304: mol_type = other DNA
ccagtactcaaaggcaaagactggtggatctctgtgagtctgaggctagctccttattttagtgcggccaattacttgaactaagttcactcgatgtgaacttcaccgtgcctactaggtgcacacagcctgcagcctggggcttagtttcttggcccacagttaagcaactcggcggcctcctgaaagatggccagccaatggaaagacgcaggatggggtggggaggaaaggggtgttgcttcctcgccccgccctccctttgggaggagggctgtgagggctgtggcctagggccgtgggc

SEQ ID NO: 36979 - DNA, 482 bp, Mus musculus
  source 1..482: mol_type = other DNA
tctctctctagcggagacccagcgagtcacccctggggtaaggtggaatcagatagctagctgccatcctgcgatctgtcccctgaggcagactgacccaggcaggagtccccggccagagggtcgctcgggggctctagctccccacgatccccatcgcgatccgggtcgcccgagagagcatgccggccacctcccagggccccgcctcgggcttctggagcactgccctcgggccaagccgtcccgggatcccgcactgtgcactgggtctgcacagccgcggagcctcagcagccgccaccgccgcctcaccgctgccacagcggcagctgcgccagccttcgcatccgccgcccacggccctaggccacagccctcacagccctcctcccaaagggagggcggggcgaggaagcaacacccctttcctccccaccccatcctgcgtctttccattggctggccatctttcaggaggc

SEQ ID NO: 36980 - DNA, 305 bp, Mus musculus
  source 1..305: mol_type = other DNA
gtttagtttaaaaccggcttctcagaagacccacgcgaagggaccgcaggccgagagcccgaacagggagccccctcgcgctcttcgcggccttgggaagccccagttcggcgtttccccacggcgccatggtgggacgcgacggcgggccaggtcccacacgtctgccagcagccatgcgggccgggctcttagacccggaagagggcggggcctaagggacgcgtcgactgcgcgggggcggagcctgtgagacgtttcacccgtagggcggggccgggcctgaggagcagggacgtaccagt

SEQ ID NO: 36981 - DNA, 244 bp, Mus musculus
  source 1..244: mol_type = other DNA
cctacagtgtattagggtggaagagggaaaggggctcccaagctactgtcgccccccattgctgaaaggcagccatgcctggtgcttgagcctccggccagaaagccccacccgcatcccttgctgggcaaccggtgcgacgccccacccctgcgcactggtacgtccctgctcctcaggcccggccccgccctacgggtgaaacgtctcacaggctccgcccccgcgcagtcgacgcgtccct

SEQ ID NO: 36982 - DNA, 343 bp, Mus musculus
  source 1..343: mol_type = other DNA
ccagtgccttgggttaaatgctgtactatacaacagagggcatcctgtctgacccacagtaattactctaactgcagtaggcacttgtatacatacacacacatatatacacagatgcacacatgtccacatgcagtaaataaatggaataaatgtgttgccagcttcagtctcccagtgacaggagagagctgtagcgcatgtgtgccaaactacccagctgagaagaggcatggctagacccagctttccttccccctgcccccgggaaagaaaatattggctgctgcctggcaacagaatgtgtactgttggctgcccaggcaaccacggcttgctcggc

SEQ ID NO: 36983 - DNA, 250 bp, Mus musculus
  source 1..250: mol_type = other DNA
cttccttaccctgaggacctcaggttcccactgaatggctttcttctaaaaacaaacaaaggccactctggtagggcaggtcctcagtctttagactgtctctaaatcagattcattcattcaagtacttattgagcgcctgttacaggccctagcatagatcggatctgatgcctcgtgggcccagccggggactcggtgactcgcgtgtcacagcggctgggcggccccgccccgaggccgcctccac

SEQ ID NO: 36984 - DNA, 353 bp, Mus musculus
  source 1..353: mol_type = other DNA
atgagacacgtgtcgtgtcagactgactcatctaagagagacttctggcaagtgtcgtttttaaatccatagaatccccatgaaaggctcaagccgtgcctggaactccgcccgggcggtgttatctcctccccctgcggccgcggcttcctcccccgcagtggcagccggtgacgtgggagcctccgctggcacactccctcgcatcagacccccagggagcgtgcgccgcctgccgcccagagagagtactgttccgggaccccggcctgccccatagcgcctggggggtccccggctgagtgcagtagcctggggtgccagcaggcgggcagctgcggggggcgggatcg

SEQ ID NO: 36985 - DNA, 427 bp, Mus musculus
  source 1..427: mol_type = other DNA
aactgatcagagtgctccgctaaacaagagtggagatgactttttttctctcctctcctctgtgtagccctggctgtcctggaattcactctgtagaccaggctgcccttgaactcagagatctgcctgcctagggttaaaggcatgcctccaggcagaggagactttctctaatgtcacctggccagtgagcagggcctgggaacagagtctgatcttctgtacctcagtttccccatctggaaagcaggaaatcggtctgcatgggcccagtgaggaccaggtctgagcccatgtagcactgcattgccagggtcctcgagggcctatgacccccagggacctggccccccgggacatctctggcacatcggacccatttgccccgggagtggaacacccctcagtgggtggagccagtcgccta

SEQ ID NO: 36986 - DNA, 351 bp, Mus musculus
  source 1..351: mol_type = other DNA
gggtgtgtctgaagacagctgcagtatactcataaagtaaataaataaatcttttattttaaaaaaataaaacataaagaaatcacatttgtcaaaaatgattcccagcattaaagtgcttacacatgcatgcacacaggacaaaagtttcaaaacactagttttgagaactgtgggtcccctgtattgcataaactgggcatgacgttcaagatcctctttggctacatagcaattactctgttgcttaccatattcatattgagctgtaaagaaggagagttttctatctgttttactgagctgcagagaaacttacaggtcagccagcgcctgctctggccaagctgg

SEQ ID NO: 36987 - DNA, 375 bp, Mus musculus
  source 1..375: mol_type = other DNA
cctcaggaagctgaggcagggtccctgagacaagaagtagtcactgtgcctttcctggtagggtccaaacatacaatgtgccatctaccttggaagaagatgctatacagatctcaatactaacccaaaataattgtgttgaattggtgaggtttctttttgtgtttaatttttaaatatttaaatatttattttttaacatgtgtcaccgaagactctacccttaaaatcaaattagcttagcatttagccagccagctttctgccctagctataggtagggcctctgtgtccctgaggctctagaggcgggtgtccttgggagtggccagctagctggaagcaaacacacaccagctgctgggaagtaactcc

SEQ ID NO: 36988 - DNA, 362 bp, Mus musculus
  source 1..362: mol_type = other DNA
acacgcatgtacacgcacacatgtgcacatgtacagacgtatgaatacatacacaacactcacatgcacacatacacatgtgtgaacacatatgcacatgcacgcgcacacaagtacagaagcacagaattagtccttgggcctcagattctaactctgacagtcatgctgtgcatttaatggaggctcattaatataaccccatttttacagatggaaaaaactgactggctctgaggtgctctgtggcagcctatcttgggtccccaaataggaggtcaggaagcctcaggggacctaggggacctgtgagcctggtccccaatgttcccaggctactcagggaacacacccactgtcac

SEQ ID NO: 36989 - DNA, 236 bp, Mus musculus
  source 1..236: mol_type = other DNA
ttatgagacagtctgaccatcctgccatgatgaatattcactcctgatcaccctcatgaaggtgaatcgtcctgtgagctcagcacttaggagatcccatattaaagaaggatgtgagacctttgtcctttatgctagaagctagccaggaccttgcagacggctcgttacaacccaccacagctgtgctggagctcctgcctgccggctgctgatctgcatagccccgcccttag

SEQ ID NO: 36990 - DNA, 382 bp, Mus musculus
  source 1..382: mol_type = other DNA
acttcatttctgcatcacagagtctgagagttaagtaccagtgtcatgacatagcaggcgagtcctggtctgtagcagtgcaaaggttgtattaccactgctcagtttccccgactctgaactgtcccacctcatctcggccagctcaggctgaggaaggctcaccttgacccctttagaggccctcattcggcggacggggccccggaaggatctgtccttcaggagagcacacagggcatctatgacttctctgaggtcagcacagaagctggtgtccggcttaggccgggatgctccgtgcagcagcaggtcctgtgtctcctaggctggctgaagcagaaatgggactttcagtttccatttcccgggaagggcgata

SEQ ID NO: 36991 - DNA, 389 bp, Mus musculus
  source 1..389: mol_type = other DNA
gctcgggtgtgcacatgtgagtatacacttgtttgtgtatttgtgtgcatatgtgcacaggcaagctcaggctgccatgtcagttctcagaattggaactggaagcacagcccgagctcttagccctctctctgccctctcccaaaggtgattttcaaccttgccagggccctgaaagacagctcatttggtacggcctgtacttcacccttggggattagaattgtctgtaatcctagacctgcaagtccagaggtaaaggaaaaagaggtgctgttcttggagatggaagccgagctcaggagccaccagccaccttctgtgtaacagccttttttccagaagaaatacattcttccctgggccggatctttatcgcccttcccggg

SEQ ID NO: 36992 - DNA, 441 bp, Mus musculus
  source 1..441: mol_type = other DNA
cctttattttttttaaaaaaagagatttatttatttatcttatatgagtatggcatcggatcccattacagatggttgtgagccaccatgtggttgcagggaattcctggaagatcagccagtgctaaactttttatcacaagatgtgggaactttttgagaatgtttaaaaaaaaatctgtgaggaaatttagcataaaatttgtaacaaaaggctgtttgttaaacttatatatattttaatttccacctatacactacatatatgatttgactcttatttagaaaagtaagtctactacatcatgctatattggaaaagtatctttttggaatgatcgacatgtgctgaaacggtgtcaggaatctgtaaaaagtctaggagactataagaccgaacaacagaaactatgtttatggtacctcctgccctggcttcca

SEQ ID NO: 36993 - DNA, 370 bp, Mus musculus
  source 1..370: mol_type = other DNA
cctcatctgtgttcctccaggacctgtgtcacccaaaggctgactttcacccttgcagtggccctgaaagacagctcaccttgggaaagtgccttaatcctagagctgcaggtccagaggtaaaggaaaaacaagtgaaggtgctgttcttaaagagaagcagttctgcctaaaacgttttcaggagctggaagccgagctcggagcccaaagcctgaaacatttttttttttttttttttttttccccagaagaaatccctaaaaagccaaatcagtttccttttgcattcttgggcctggcctatttacatagccctgcccttctcgggaaatggaaactgaaaatctacttcccatttcagccaggc

SEQ ID NO: 36994 - DNA, 426 bp, Mus musculus
  source 1..426: mol_type = other DNA
gtggtggcccatgagtgatcctccaggacctgtgtcacccaaaggctgactttcacacttgcagtggccctgaaagacagctcaccctgtacttcaaccttgggaatgttgggttaagtctgagctttctgttagaagtctgtaatgtaaatgaggaaaaaacgttttcaggagctggaagccacagccaccttctgcagacacattgcccgtagaacatgcttttttttttttttttccccagaagaaaccccaagaaagcttccttatgaaaagttctttcctaggtgggatcctaagaaagctcagacttcaaagaacgtcagaagctctgaagccattggctgccggggcctggcctatttacatagccctgcccttctcgggaaatggaaactgaaaatctacttcccatttcagctaggc

SEQ ID NO: 36995 - DNA, 314 bp, Mus musculus
  source 1..314: mol_type = other DNA
catcctgccatgatgaatattcactcctgctgggcagtcaccctcatgagcgtgtgtcactggttacagctggggagagaggcacacccctgtgacctcagcacttgggggtccaatggggcaggtgcagcatggaccagtcagctgtgacaaacccaccacagctgtgatgaagctggcgcctgccacctgctggatttcgttttgttttcagtaacgattcatgatcaagaaggaagaacaacagaaacttcaggatgcctccggcaggtgcagaggtctgatctgcatagccccgcccttcctagagaaag

SEQ ID NO: 36996 - DNA, 313 bp, Mus musculus
  source 1..313: mol_type = other DNA
gttcttgtagctggcagcagcagcacacactggggatccgggatgctggtgccatgggaacacattcccactgtatttatttcctgtgtgactatgtctgctctggaactcctaagatttccacttcgccaaaacatttgaagtttgcagatgatccccaggggtgcatggggctggcccaggctccctgaaacctgtcagatgtggttgtttaaacaaaccaccatccccttctgagttgcagacttcagcagcaatgtggatgatcctggaagccacagggagacgcacaggtacctgtgaagatcagctc

SEQ ID NO: 36997 - DNA, 352 bp, Mus musculus
  source 1..352: mol_type = other DNA
gcttacaactgcctgtaactccagttccaggaactgttgaaacattaaaaaatacaaagtaatatatatatatatacatatatatttctagccgggagaggcaggcagatttctgagtttgaggccagcctggtctacagagaccaaaaaaaaaaaaaaaaaaagtaatatatatttctttttgacagggttacagaccaggctggcgcgtacgccaccttgccgggcaaaaggagtaaatcataaaactaggtgttgggaatcgaactcgtgtccgtggcggcggcgcgcgatgacgtcacgcaggcgccggcggccaggggcgggggcgcgggcgagggcggagcgagcc

SEQ ID NO: 36998 - DNA, 384 bp, Mus musculus
  source 1..384: mol_type = other DNA
tcatttttcaaaggatagtagcttatttaaaaatgtaatgaacaaaaaagttttattttaaatcttatttattttttcctatttatagccttggctctcctagaactagctttgtagttcaggctggcctcaaactatgaaggggtgtgtttttaaagatttatttatttatttattatttatgtatttgtttatttatcttatgtatatgagtacactacactgtagctgtctcaatgggatcccattacagatggttatgagcaacacgcctttaatcccaacacttgggcggcaaaggcaggttcgaggccagcctggtctacagcatgaccagagaagaagaaaactctgtaaagtcctttcttccacgtcacctcccgt

SEQ ID NO: 36999 - DNA, 348 bp, Mus musculus
  source 1..348: mol_type = other DNA
tgatgagatgatggtgatgagatgattaatctcttgataccctgacttacagggggttctgaaacacctgttgtgggtgctgaacaccaaactggagaccccgcccctttgtatccatgaggtaggaggtgcccaggtccggcaaggagaccctggctggcacctcgaagggcagcgctgtggtccaatggacttccatcagggccccacggctggccaatgggcgtggccctcggcgacggtgggaagcggctgggcagctgggctccgggcggcggaggcggcgcggctgttcccgctgggcgacgcaggctcgcggcgggaggcggaggctcggcccgctccaac

SEQ ID NO: 37000 - DNA, 410 bp, Mus musculus
  source 1..410: mol_type = other DNA
ggaggaaagcattgcttttgtttacttttaatttttaatttttaagtgaggtcccttgggactgaaactcaggtcccttgggactgaagaatcatttctccagcctaacagcaattgttgatagatactttattttcatcagatgtattatataccagcctttagtattttataaattttatgtattttcaggtggcccaggctcttccaagtactggaacaagatcttagagaagacatctgaacctatctcatttaaaagataactctgggtcttctcccggagcccttccatagcatgggaagcaggggtgcccaagaggccatgcctctgagcgccttctgggttataaagcctcgccgggctgtggcagacggacaggagggaggagcctgtattgtccaccccg

SEQ ID NO: 37001 - DNA, 273 bp, Mus musculus
  source 1..273: mol_type = other DNA
ggatgcggtagcctcagcctgcatgatgagatgatggtgatgagatgattaatctcttgataccctgacttacagggggttctgaaacacctgttgtgggtgctgaacaccaaactggagaccccgcccctttgtatccatgaggtaggaggtgcccaggtccggcaaggagaccctggctggcacctcgaagggcagcgctgtggtccaatggacttccatcagggccccacggctggccaatgggcgtggccctcggcgacggtgggaagc

SEQ ID NO: 37002 - DNA, 276 bp, Mus musculus
  source 1..276: mol_type = other DNA
agcccagtctggcctagttacggtcactggtctgtgaaagtgttacaaaccaaagggacagggtctctacatagccttggctgtcctggaaccaggctaacctcgaactcaaggagatcccttagagcaaaaccaactggttcttctagctgttacagtcagtgagattaaaagaggcgagccaccctttctacgcaggcgcactccgccgtcgcgataggtcggcgagctcgacgctggccctttaacggccccttcccgggggcctgctcagcg

SEQ ID NO: 37003 - DNA, 423 bp, Mus musculus
  source 1..423: mol_type = other DNA
cccttgggtgctaaggacggaacttagatcactcagagaccagcctgcagctagcactggctacagctagacgcgaataggccttttcattgcctaagtgtccccgcgggccggaggcggcgggtctcttgagaccgcaggaccgcccagcgcagggaaggaagggacgccgccacgtcttcttccgaggcgcctcgaacacggcctagccgagtgtcgccaagtgcgcgtgcgcgtgcgcgtgcgcgtgcgcggcaggcccgtcccgtcccgcgaccccgcccgctcgccgctccgccgacgcatgcctcccttccaccccggaggcggccggagcatctcgctctggcggtggccgcttgcgttcatgcgcgccgccggcaggacggccctccccgtgacgtgaccgcccactcggagcgc

SEQ ID NO: 37004 - DNA, 352 bp, Mus musculus
  source 1..352: mol_type = other DNA
ccccagtactggcaagtagtccacagaccaggctgcccttgggtgctaaggacggaacttagatcactcagagaccagcctgcagctagcactggctacagctagacgcgaataggccttttcattgcctaagtgtccccgcgggccggaggcggcgggtctcttgagaccgcaggaccgcccagcgcagggaaggaagggacgccgccacgtcttcttccgaggcgcctcgaacacggcctagccgagtgtcgccaagtgcgcgtgcgcgtgcgcgtgcgcgtgcgcggcaggcccgtcccgtcccgcgaccccgcccgctcgccgctccgccgacgcatgcctcccttcc

SEQ ID NO: 37005 - DNA, 541 bp, Mus musculus
  source 1..541: mol_type = other DNA
cggtctgaacccggtttgcacatggccagactggcatgcttgtctttttccccagttgataaaggaaaagggacacttggtttttgtaaaaaaaccgggtggtcagggtgcgcccctgctctgtcgacactgctgctgccacccctccgggcccaacgtccccgtgggctcgcgctgccacgggcgtctatattaccttgtagaaagtgactgtgtccaagggaagggcacccttcgtgtgtaggccgctgccgccgtgagcgccagacaccccggcggcggcggccatcacgccggatggtgggacggagcgctccgagtgggcggtcacgtcacggggagggccgtcctgccggcggcgcgcatgaacgcaagcggccaccgccagagcgagatgctccggccgcctccggggtggaagggaggcatgcgtcggcggagcggcgagcgggcggggtcgcgggacgggacgggcctgccgcgcacgcgcacgcgcacgcgcacgcgcacttggcgacactcggctaggccgtgttcgagg

SEQ ID NO: 37006 - DNA, 467 bp, Mus musculus
  source 1..467: mol_type = other DNA
gagaagaccaagcccacagtgtgctctttagtgtgtgtgcttcacacagcatgcagtccagctgttctgagtgtgtgtgtgcttcacacagcacgcagtccagctgttctgagtgtgtgtgtgcttcacacagcacgcagtccagctgttctgagtgtgtgtgtgcttcacacagcacgcagtccagctgttctgagtgtgtgtgtgcttcacacagcatgcagtccagctgttctgagtgtgtgtgtgcttcacacagcatgcagtccagttcacacagcatgcagtgcttcacacagcatgcagtccagtgaaatctttcgtgaaatgaatgttctacagacctgcttcaggacccttcatgtaacagtaatattgtctgtatgtgccgtggcgcttcgtatatcatatatcatatatgtaaatatacacacacacattctttatattcactatatagtacatta

SEQ ID NO: 37007 - DNA, 467 bp, Mus musculus
  source 1..467: mol_type = other DNA
agtgtgacatttgccaggctctgggctcagtccccagcacttagactgtgttcttggtactcagaccactgcccactgtgatataagctcctggaaggcctgtccataacacattgatttatacaatatgtatatataatacatatatatatacatattgtgtgatataataatgttaatgttgaatataacaaacatttaatgacctcttagtaattttcactactactagaacttttaattgtgtccccaaacagggacaagttttagcagaccaaagttttattttcttaattgtgactctgagagggtggggcccccctgggtatgcccccagcctggaacttcaagtcttcaggtggtgcaggacaaggcagccctctgctccatatatgtttcagcctcctgcccttaaggtacagggcaggattagatggggtggagcccagctgaggtaggggtggagc

SEQ ID NO: 37008 - DNA, 423 bp, Mus musculus
  source 1..423: mol_type = other DNA
atatatatgtacatatctatatatctatattagaatgtttttccgttattagagaatatatatattttttcttgacacaaaatctccaatcccaagtgttatacctcgtatgatttaggttgtaaatatttcacttataacataaaattatttttataccacctaaaagacagtttcatttagttaaagtatatatgcatgaaaatgaagaaatgggggaaggaatgtgttcacacaacttctgttttccttctaatggataaagccaactgcagtcagcaagttaacttagattttaggctctaatatagttctgtggtaaaaataagataaccttatgctttagaaatttccatagagaaggatcatgtcttaaagccaaaatttatttggagaactcttaattgttcagagaacccagag

SEQ ID NO: 37009 - DNA, 464 bp, Mus musculus
  source 1..464: mol_type = other DNA
agtggcctgaggcctctccctctggtagaggagtccaacttccaggaggaggactgtgccccctgctgtgcgcaccagtaatcacagtcctgactgttaagagttcctttgaactgcctcagaaatctaacagaaaggacgtgtactaaactcctttgtgtatactttaggccagcctggtctatccgggacagccagggttacacagagaaacctgtctcgaaaaatcaattaatcaatcaatcaatcaatcaatcaaccacgcttctagcatcctcgggatgctgagatggctgcagcaggcagcaacagagcacgatccggttggttcccacacagccgcagcgggctcccgcgcatgcgccctccctggccacccagcgccacgtcagtggaaggcccgggggcctgtgctgcgtgcggcgcgccccggggacgacccggctggcgcctgcacatccacc

SEQ ID NO: 37010 - DNA, 525 bp, Mus musculus
  source 1..525: mol_type = other DNA
tgctgtttttcttttttaattctgaaaacaaaggggaggagatatgaaattcgagcatatctttgtgcagacccccggggggaatctggacccagacaccttgtctggtcactggctattacagcgcgggtgacaatatccttccaaagcagggcgatgctcatacacagcagtctcctccttctgggtgcttcagaaacaggctgggcctcagcttccaggcccacccagttggtagtgatgcgttcacctggttgaaaggcacacaagtgaccaggcgtccacgtctctttctagccaatgacgtccggctgttcatggaataaccgcattcatgaatctcttcgccgccatatctgcacagatgtgagccttaggcgccagccaccctgctaggagcgcacaccactctggctactgacttggctttgggagccaggggtcgcgccccttaggccgtgaggggctgggactccctgaccacgcccccgtgtctccgcctcccattggcggctgcagggggcg

SEQ ID NO: 37011 - DNA, 518 bp, Mus musculus
  source 1..518: mol_type = other DNA
tggacccacagagtgtccaggatgccatccttccgagacatatcagaccaagtctgattgcctccggtctgtctgactgggcgcacagcatcgcccccgcgccctgggccgcgctttctcgcagcgagggcgacgtcgagcagaggcgcccggcaagtccgggggccggtggagcgagggctgccgaccctccggcccggcgcgaggccgccgactcaccggcggcgctgaagccgaagtcggtggggaccggcgagtgacccgcgagctccagtcggatgaccaccagtgacacactcggcgctgctcggcgtgggccccggtgggctgacggaaggctgcggcccgagcccagaggccgagcggcccgcggtcggcagcgccgccaccgcctcagaagccgcggccgccgcctcagcagcggcagcccccgtcgcgcgcagcctgccgagcccgcctgtcggccgccgtctctgacccgccgggtcgcgcacgcgcacgcggaaaggggcgaggcc

SEQ ID NO: 37012 - DNA, 462 bp, Mus musculus
  source 1..462: mol_type = other DNA
aaggatgaccttgaatttcgggtcctcaaggcagtgctaggaattccacccagggtatcctttttggggctagcctcgcttctatgctaggcaagaattcgtaggcagagcagctgcccaggtggacagcggcttcccggcaccgatgcctgtgcagtagctgtggcagacactggacatgtacctgagtctgtggcacagtgctgacactgatccaatcttccgatctttagctcaaagtacagaatgatctcggagtgggccccggtggccggacgagcccaccggtggcagcgccgccaccgcctcagcagcggcagccccaagtgctccgcttccgtctgtcggccgccgtctctgacccgcggggtcgcgcacgcgcacccgccggcgggaagaggcgtggcccaagtcgcgcatgcgcttccccttggctgaccgtctggacagtgtccgaggagc

SEQ ID NO: 37013 - DNA, 489 bp, Mus musculus
  source 1..489: mol_type = other DNA
gtgctcactatagcacctgcacagaggacaatcttgagttagtcttcagcagaatccaatacgtagagaacatagattatcttttctccaatatatagggtcagtatcttgggctactcaaaggcagatctctgagttcgaggacagcctggtctaggacagctaggcgtacttggagcctcttacacagcgttttgtatcacacaaccgagtggttatgcaataactagctcaggatcgcacgagtgctctggggctgttttctgtgtccgcaaaaataatcatcccacgcagccccgcagtgcccggctctcagtggattatcacccaggaagcctcagagtctctgcggacccatagactctcggtgagccctctttgcgtgctctgcgcacgctcctcggaccctgtccagacggtcagccaagggggcagaagcagctgtcgaaagcgcatgcgcgcccggggcctcgcccctttccgcgtgcg

SEQ ID NO: 37014 - DNA, 656 bp, Mus musculus
  source 1..656: mol_type = other DNA
tctgagttcgaggacagcctggtctaggacagctaggcgtacttggagcctcttacacagcgttttgtatcacacaaccgagtggttatgcaataactagctcaggatcgcacgagtgctctggggctgttttctgtgtccgcaaaaataatcatcccacgcagccccgcagtgcccggctctcagtggattatcacccaggaagcctcagagtctctgcggacccatagactctcggtgagccctctttgcgtgctctgcgcacgctcctcggaccctgtccagacggtcagccaagggggcagaagcagctgtcgaaagcgcatgcgcgcccggggcctcgcccctttccgcgtgcgcgtgcgcgacccggcgggtcagagacggcggccgacaggcgggctcggcaggctgcgcgcgacgggggctgccgctgctgaggcggcggccgcggcttctgaggcggtggcggcgctgccgaccgcgggccgctcggcctctgggctcgggccgcagccttccgtcagcccaccggggcccacgccgagcagcgccgagtgtgtcactggtggtcatccgactggagctcgcgggtcactcgccggtccccaccgacttcggcttcagcgccgccggtgagtcggcggcctcgcgcc

SEQ ID NO: 37015 - DNA, 484 bp, Mus musculus
  source 1..484: mol_type = other DNA
tactacaggcaagaacaccatgcctgcctttaattcactggttcttaagcaatttcacttagaaaaaaccaatttaaactcatttgaaaaaagttaaccatttgtttccaatttaattacaacaccttaaaaaaaaaaagttgacattcttgggaaagtctgtttagtcttcacggcttctgaggcggcaagcttccccacgctggcagggcaagtcggcacgcagtggcacctgggggcctactgtgtgccaggccccgattgcaggtccccgccccgaaggtgcccgcaggccctccaagggggtcgaggacacccgagcagctcacggcgcccgtccccgagttcagacccgccttggcgagggcggatccctcctggccccctccacggccctagttcgaccccggggagagcgaacgcggcccagcgctgcgccccgctcctcacgtgtccctgatcggccccccgggccgtctcacgt

SEQ ID NO: 37016 - DNA, 653 bp, Mus musculus
  source 1..653: mol_type = other DNA
ggctccagggagccagcggctcgtgggagcctgtcgtctgggaaggcttgcagtggcccctccaagctgggggcgtgggcggcctgcttcctgttgggggagggggaggggacaggcattcctctttcccctccctccgtagagtcgcggggaagactggcgtgcagtgagtgactccacttcagaacaggggcaccccacccgggcggccaggtgcctactcggcccgttccgggactccgaggaccttaggacgccgcggaggcaggacggctcggcggagcagggtggggctggccccttcccctggagggaaccgcttgctagacccggccgggcaagctcttggagggagtccgcaggggcgcgcccctaggaggtcccgaaggtcggggcagccacgcccatcgcgcgcctagccccgccccaccccttctaggggccccgccttgccgaggcacgcggtgactggccagcgcgagaggggcgggaccgagcacgctcctccccttcgctatgctacctcccaccgggcagcgggcggaggcgcgagaggagggcggggccgggataggctccgcccccggcctccgcaggcggccccggggcgtggctctctgtggccacgcccccaggccgccctccgccgccgc

SEQ ID NO: 37017 - DNA, 241 bp, Mus musculus
  source 1..241: mol_type = other DNA
gggtccttgagtccccccagggagccatgactctatctggacctgctgtcacaagagcccgaagctgtcctgctggccagcacactccctgccacccctttggcaaagttgattcttgtcacctggctccagagaatgtcttgctgctcatgatgaaacagatatgcccagccctggctgagtcactctcacgggtggtgacagctggccatgtacaggccagggactgggataccccctc

SEQ ID NO: 37018 - DNA, 289 bp, Mus musculus
  source 1..289: mol_type = other DNA
tcgctcttgtcctccggctaggaggaccccggacggaatcccagcgactcctgggaggtcacgcaggggtgcagtgggtcggtaaaggatggtctcggactcactagatatcctgtgtgccccaggcttggcgacaagcgccgttgagccgccaggttgctccgggaccgaattctgggaactcccgaccctggcacggtccctttaagagggatttttcaggcgcgcgggcaggcgcgtgtggctcggaggcgttccccctcctgggcgggccgctcagggttaaagg

SEQ ID NO: 37019 - DNA, 377 bp, Mus musculus
  source 1..377: mol_type = other DNA
gctgctcagtaccctcaggctaagtgcctggcctgcctggaagccaaggccagctgtctgcgtggggacagcagcctgcgttatgcatcctagagcaggtgggagccagggtgcctgatggacacaagatcctgggtcccccacctggggcacaaagtaacacagaggctcagccagaaggcctggggtcccccagacttggagctaagctagcattttgggatcttggtgggtactttgtatcctgcccccccctcactgggacagtgtagtttagactcaagtgaccagtaggtctcagggctggagcctttcagtgcctggccctgccggtggtcagctcagggggtgagatgacatctagctgtcttgagagt

SEQ ID NO: 37020 - DNA, 689 bp, Mus musculus
  source 1..689: mol_type = other DNA
aggtccggagctgctacagcgggccttggagaacctcaactgatccaagcagctgttggggaaaggctgcttccgcaaaggtttctctaaggacatcctgcagcaacatgtacagcatgctgggcgcccggagactttcccacggctccggggcgccccctcgcggcggtcacccgcagcgcagcgagcgcgtggcgcgcggggttgcgactcggccggagggtcgcgcgtgtgtgctccgtgctcccctcgcgcgaggccacgcgaggagagcggccgcacgcactgcagagagctcagcgcccgcggcccctccgcgctcccgccgccccccctgcgcattgatccgcgcgcgcggcgctgtcggcgagcggcgtgcgcgcagagccgggccgcgctcccggggtccagcccgggtgttggcggcagccgcatccccggccgcgcgcccgcccccaagatggcggccgaggggggaccgcggggggcccgggggccgaggccggccagggctgtacgggcgaccagggggccgcgcgcaagacggcgcctggactggcggcggctgcaggtgagcagaccagcccgcctttgttcgctgccgccacgagcggccgccgggacgcgggagccgccgaggcgggaggagcgcgcgcgggcaacgcgggggagcgggacgcggctgcgca

SEQ ID NO: 37021 - DNA, 263 bp, Mus musculus
  source 1..263: mol_type = other DNA
agcctgggctctcccgtcctcccagcacttgggagacagaggctactccactgctgtctccagcagccggcataacatggggacccaggaccttgctggagacttgcccaccctcaggagtaggctgtccccgtgaagggtgcctggatccagagccaaaagctcaggctcccccattagccaggcgggtggccgcctttgagcagctcttacttcagaaggagtggggggtggggggcttaggtggcctccgcctcacctac

SEQ ID NO: 37022 - DNA, 280 bp, Mus musculus
  source 1..280: mol_type = other DNA
tcaactctgtagaccaggctggccttgaactcagagatctgcctgtctccgcgagtgctgggatgcatcgatagatccactgcctggcaccagttagtctcttaacgttcctagtccaagcattgaaaccactgcccacccagtggcagacagtgaaaacaagtcgttttaggtcactgtgtaaccaaggtggcgctgagggccaggaatgcgttgccggctgtccttagagaacgcgagtcgccgctgtcacaaaggcgcgggttccagggcggcgggg

SEQ ID NO: 37023 - DNA, 423 bp, Mus musculus
  source 1..423: mol_type = other DNA
tgaatgcgctgaggcccagagccccaggaaatgtgcaaattcccattttaaaatctcttaaattattatataactttctgagttcaagaaagataattcaaatctcctacttaatgtgccactcatattgtatcgtagatgctttattgcagtattatgaaattttgccagtctccgaggggtgattcagtgttgaacgctcgcagcgcgcagcagcagggggtctatttcccccgcccgtttggcggaaggatcccgcgcgcggtggcggagtcgcgctcaaccgtctccgcccgggctccgccccaccggcgccggccccgcccccttcccgcgcgctctatgggcccgtaaagaagtcccggccgggccgctgcactcccgcgcgcgcatccgtgcgccgcccgaggctggcctgaggag

SEQ ID NO: 37024 - DNA, 333 bp, Mus musculus
  source 1..333: mol_type = other DNA
gttgtcagccaccatgtgggtgctgggaaccaaacttggctcttcgggcagagcaacaagtgctcgttatatcacaacaccaacctagcttgccaccagcatggaggacagtcctgtgcagtgccacacagtattgcagcacccgtggagatgcagccttgctagcccacacctgcaggtggttacaaaaccggctgaattaggccagaattgggtctgaataggtgtgctaggaagcccactccttcccctcacacacacacacacacactgtctcttagtgactcaggtaaaaaggccccctgaattcagctagggagttcatctcctcca

SEQ ID NO: 37025 - DNA, 294 bp, Mus musculus
  source 1..294: mol_type = other DNA
ccaacctagcttgccaccagcatggaggacagtcctgtgcagtgccacacagtattgcagcacccgtggagatgcagccttgctagcccacacctgcaggtggttacaaaaccggctgaattaggccagaattgggtctgaataggtgtgctaggaagcccactccttcccctcacacacacacacacacactgtctcttagtgactcaggtaaaaaggccccctgaattcagctagggagttcatctcctccaagggcaaaggcaagggccctccccctgggctcttcagagc

SEQ ID NO: 37026 - DNA, 339 bp, Mus musculus
  source 1..339: mol_type = other DNA
acacacacacacacacactgtctcttagtgactcaggtaaaaaggccccctgaattcagctagggagttcatctcctccaagggcaaaggcaagggccctccccctgggctcttcagagctggggtgtgcctgagtctctaccctggcttggggtggggaggtcagggcgcccccctcttccttccaacgagctgagggcagctgcgatcttctccctgctctgcacacccgccagccgcggggcccgggagggaggaaggaagccctggccaccctccatcctcggccagggggcaccgtggggtgaccaaggccctggcccccggggacttgtgact

SEQ ID NO: 37027 - DNA, 228 bp, Mus musculus
  source 1..228: mol_type = other DNA
tggtgtacaccagactggtccacagagtgcaaatgatataattgcctggcatgagggcccttggctaaaagaaccaaaaagttaagaattcttttgtttctcttatcataaataaatccaaattcaatgtaacttaaagagtcacttcttgactggggaatctacatttttaaaaaaaaaaaaaatttctgagggctccttagaaagagctgttttggcctcgcgagc

SEQ ID NO: 37028 - DNA, 386 bp, Mus musculus
  source 1..386: mol_type = other DNA
caggctggcctcatgttcgccagggattagagctataggccatcatgcctgaccccttctttctgccaaaccctcttgaaaagagaaggctggagaaagaggcctcatctttcagccctccacagtttctgaaggcctccaaatcagagggtcaaacttaggatctagggtactagatctggggctttaaacacaggaataatggaaatgttaggattgccgtttctcacccagtatactagatggtgtagaatcccaatcttggtttcttaataaacaagatatagtggcacataatttgagagcgagtctgaggtcagcctgtaataatttacagtcctcgccgcgcggggccggggcggggtcggagagggggcggcgctgcc

SEQ ID NO: 37029 - DNA, 346 bp, Mus musculus
  source 1..346: mol_type = other DNA
acctttttaaaaggttgtctgcacaggccgcagcggccacaggagacgagcagtcccctttccgggtccccgtccggagtggcggccagtgcgacggctacttcgcgctctgccccgaggccggcacaccgactgccggagccgatctcgtgaccgggtccggccgccgggtccgcctcgcacgccctctggccgctggggcgagggggcgacatcaggccgagccgcaccctcgcagcatcccggccccacccgggtagcagccgccgtggggtcttacgggggcccgtaagggtcatttcccgtcaagggaaaaagtgcgggggcaacatccgggcacccgcgg

SEQ ID NO: 37030 - DNA, 398 bp, Mus musculus
  source 1..398: mol_type = other DNA
agcgtatgattttgaacaaaataaacctttctgtgtttgtaatctgttcctgcagctctgtctgggtgctggacagagaacaagctcttgagcgctcagccctctctcaagccgctcaagagctacccgctgcccgcggggcccatgacgagctgcgcatatcgaggcatgccttcgcgcgacagccacggcgtcgggggacacgagttcgttcacgcagccgttatcggttgggcctccggcgaaggcggttgctcgcgaattacgctccgcgcccccgggccgcagcaccggtgcttgggtttgacacatagggtgacaaccgaaggtctgcaggtcctagagatgcccaggcgcaggagcctggttacctgaggttcctccgccctcgggtctac

SEQ ID NO: 37031 - DNA, 423 bp, Mus musculus
  source 1..423: mol_type = other DNA
caacctctgaagggggatggtacactggcccttctttggtctgtctacacacgtattatatggactttttatttagcccatgcttctaacctctatcaacgaaggggctaatattagtctcatttttattgttcgagattatatattaaaacaaaaacaatcaaaaatacttttgctggtcaagtattctcggtcaccgaattaaatggcatgctcttcgaagcccagcatggccctcgcgaggcgcgctatggcagcttcagggcgttagacttttccctcttctaagtagcaaaccgcacttcagcatggctacgggcagagcaggcatggagggcgcaagcgcgccagccgcgggtgcccggatgttgcccccgcactttttcccttgacgggaaatgacccttacgggcccccgtaaga

SEQ ID NO: 37032 - DNA, 550 bp, Mus musculus
  source 1..550: mol_type = other DNA
gagccatgattgtgggcctagttggatcccagtcatcccgcctcttgatttttttaaggaaggaggccagcagctgtgatatcagaagtcaactgtcctcagccatctaggggacagttaaaaccttcccaggcccgaggcggctggaccctcggctccccgccaggttaggagcccgaaagctcagtctctgtcctgctccgaggccgcctcggcagccgagccccgctcctcggcaggggggccgcctcaccgccttccgtccgggccaaggcgggcggccccgcgaccccgggccaacggctcggcatcccgtccacacgctctgagtcggcggcctccggctccctgtagacccgagggcggaggaacctcaggtaaccaggctcctgcgcctgggcatctctaggacctgcagaccttcggttgtcaccctatgtgtcaaacccaagcaccggtgctgcggcccgggggcgcggagcgtaattcgcgagcaaccgccttcgccggaggcccaaccgataacggctgcgtgaacgaactcgtgtcc

SEQ ID NO: 37033 - DNA, 330 bp, Mus musculus
  source 1..330: mol_type = other DNA
gactgtcttaacatgacaaggaagatgtgatgggcacatatctgtaattcctgaacacaagtgggtgcagatcagttcatattcatttatatgtatatgccagcctgttggccgccacttgcattgtcaggcggatttctgagttagaggccagcctggtctacagagtgagttccaggacagccagggctagaattattaaggagtcttcaatttcaaaatccagccttttattctgaacgtgcatgcatgcgccacggtcatcgcctcacgctgacgcgccccctggcgtcacttgcggtcagcgcagccggagcaagtcaccggaag

SEQ ID NO: 37034 - DNA, 287 bp, Mus musculus
  source 1..287: mol_type = other DNA
acgttgttatttatttattgaatatgagtacaccattgctcagaagagggcatcagatcccattaaatgtggttttgagtgtctgtgcaccacatgcatgtatgtgcccataggaaccgaattcccctgcaagagcatgcacgggcaagccatgccttgcaccaaggaatctattcccagtgacagggacagagaggggggcgtgccaccttcgcctaggacgctccctcgaaaattcaatttttaactgtcccggggggcggagccgcgtctggaccggaaggacc

SEQ ID NO: 37035 - DNA, 345 bp, Mus musculus
  source 1..345: mol_type = other DNA
cttagactcctcagtgaatcccaccaaggaatcacagggtgaagtcagttcctcctttcgtctgtagcaggtggggacagttgagctacctcaacaggactggtctttaaacagcgctctgtctaatggagacatgacagtatgattccttcagccatgacagaaccaaccctattgggtcttgttgcatgatttaaagtttggtaaataacagccagagtcaccctaggctttctgcagaggttcggaaccccaggtaccagggccaagcttccagcccgaggctccgccctccggtgtgcgcgcgcccccctcctccccgagccagaggaagtgacgtcaccg

SEQ ID NO: 37036 - DNA, 242 bp, Mus musculus
  source 1..242: mol_type = other DNA
aacatttgcagatactaatcatcactgtgtatttgctagagattttcagattatctccttcaaaatatctaaataaatgtggaaactccttcagtattgaagatttaggatattgggctcctgcacaggtcacactgcagcccgtggctctgggcatcactgaggctccagcagcccctggctctgggcatcactgttgactgtccagttgttgtataaataactcgtcagcatgccaggaa

SEQ ID NO: 37037 - DNA, 560 bp, Mus musculus
  source 1..560: mol_type = other DNA
aacaacagatgatctgtggttctccttctctcgcattgggcatagctgctacagcataacctgcccaagagtgggattccctgtcggggcacagaacccgcggaattcctccccttgatgcagagcacggctcgcgctgcccaggacgcgaggacaccagtgcgagcgcgcctcggcccccctgcgttcccgaagagcgcccacccgtgaactccgcgctctatccccgcgcgcggtcgatacgggccgtggccccggaaaagtcaggctcaccctccgcccgcgccggtggccgcagcgcatcgagcacagcgtggacgcagaggtggccctggccccgtgcgcgcgcacaggcgccgcgcgcggcctcgatccgggttcctggggggcggcgcgcgggaggaggcggggcctgctggcggcgtgggcgcgcggtgcgcgcgcgcgggagggcgccggaggagggggcggggccgcgccgcccgcgccgcgctgggggctctctcggccaatgagcggcgtccacatgccgcggcggcggcgagaggggaggcagcggc

SEQ ID NO: 37038 - DNA, 293 bp, Mus musculus
  source 1..293: mol_type = other DNA
cttctactatttggagatagtccatggtcaggaacttcctggcagcctgtcatcgggtgcacctgtacatgtggactgaacaaagggttgtccggaaacagcctggccccttgtctgagtcacactgggtcttacaacatttgaaggactgcccttttctctcaaatgaaatgagtggggagggggaattttaaaaatgcccatcttctgaacagcggggcggggtcatctgccagccaggcctgcagttgccaggacccgcccccgctgcagtcactggaggaactggaagt

SEQ ID NO: 37039 - DNA, 324 bp, Mus musculus
  source 1..324: mol_type = other DNA
gactcactctttcttttaagatgggaatattatatttaaatcaccaccatcaccatggtcatcttcacggggagggagcttgcctggtcctcttccacccttgacaggtgacaggtcccacagtgtcatctgagactgatctcagtcatgtccatgtagacggagctgccatgaccctcaggggttgaaaggcagtgtgcaacactgttgctttttcactgcatgaaactacagatgctgcccggccccaccccagctctttgaagagggaggtctctctcagagcttttgctttagaggaactctggggttcctttaaaagaa

SEQ ID NO: 37040 - DNA, 379 bp, Mus musculus
  source 1..379: mol_type = other DNA
gtgacaccttgtatcaaaaaaatttaatatgagtgaaaaaaatgctttttgtttttgtttttctagagtttctctgtgtagccctgtagcgaaaaaaaagttttttgaggcagggtctatgcagacctagctggcctggaactggctttatagaccaggtttgcctccaggttgctggagtaatatgcaaatataatttaaacatgccaatttaatcccattgcttttaaatacaatgatttaaaaatgtcttttcagctgaaggtcttttaagagagcttccctggtatacacatatagtaccggatccctgtccacgtcgactaggaacctggtcgccttggttgacggggaaccgatttgccatgggacactgagg

SEQ ID NO: 37041 - DNA, 185 bp, Mus musculus
  source 1..185: mol_type = other DNA
atccatggagccaagtgctcaagccttgtgtatattgatgtatctgttacacttaatataaaacgcctattaaaaagggacccccccccaccccccaggtgctggctgttgcctctgcagagcacagcgggtcctttgcagagggggaggagacgcgctcctcaggtcgcgcgccgcctatttcc

SEQ ID NO: 37042 - DNA, 393 bp, Mus musculus
  source 1..393: mol_type = other DNA
atagatctaacagtgctactactaacaaataaatggaagagcgcaagttgacaaagagctttgaattcttagtgaatttgacacaaccctttggctgccggcagaaacatgcatgcagacagccactgttacccaactgggagactaaatattttaagtccagggagggaaccgccagacggctcctgggttttcccccgtcgcctttgggggaacttctccacgctcagggacaaagcggcgtggagcatcccaaacttgcggcctgttcgcccctgcgcgagtcgggcgctacttaagtctccgcgggacccggcgcgcgcggccgaggctgcggcgggcacgcgcgctccacgccgggtccttggccaatcagcaaggagcccgaggcgc

SEQ ID NO: 37043 - DNA, 350 bp, Mus musculus
  source 1..350: mol_type = other DNA
aatattatttaagccttaatccagcaaggctgaagaaatttataaaatttgaacattacatcaattgaagccagcctggaactgggagttctctggccagcaggttctcctgcaggttagaataaaagcttcaaaccaactcgggccgagggaagggaagccaattcagcctgagcggctttctctccgacagaccgggcgtcacgtcgcgtcacgccccgccccgccctcgggccccccgaagacccgcttcggattggtgggctccgcccgccgctcggcgtcttcccggggcgtgagccgagcgtggccatgcccccttacgtagggacgctcagtgggtctcggga

SEQ ID NO: 37044 - DNA, 590 bp, Mus musculus
  source 1..590: mol_type = other DNA
tggtgagaattcttcactgttgaagaatccagaaaccagccgctcgtgagcactagagagtctcaaggccaagtcttggggtactgacagctcctagtctagcagctggacgaatttccccaattcttcccgaggccgacaggcctgcggactctgggttgggggcctctgggactcgcgggcatcagatcccgatcttcgcaagcagatcctgctgcaggagacctgggaacctgtgcctggttctcccgtggccattggaccgggactcacgagacgccccttagggacctcctgtggcagcttgcggcggcagtggcgccatgcaagcaagccacctatatgtatcccgcagcgcgcggcgcggacccgttagggcggggcgcggggcacgcccccacgcagccccagtccccgcgccgcgcgccccgcggcctccctccacgggtccgcccccgtgtcaccacaggccgggctccctttgtgtgcggggccgagcaccgcggccgcgtcattggtccgcccgcccggggggccagccccttcctggctcgcctcatgcatatgcatgagcaccggccccgccccgc

SEQ ID NO: 37045 - DNA, 348 bp, Mus musculus
  source 1..348: mol_type = other DNA
tgaggccatccgtgtctgggatgcgcccgccgcctgcaactcagccctccaaaagtcagctcccgggcggcggcggcgcctgcgtgcagaggcgcaccgctaacagcgcccggtgcgtcccaggcgctccgagcgcgatcggcaacaatgtttacgttccggggatgacgtcgacaaaactttttccccctccgccaaaatgcagggggcaggagtgttgacaattaattggttttccttttctgtattttgcaagaggaccggaaaaaaataataaattgcaaaaggaagcaagcagcttactcctccagtctcttgtgaggctcagggtctcagacacttaagtgg

SEQ ID NO: 37046 - DNA, 344 bp, Mus musculus
  source 1..344: mol_type = other DNA
accaaaggctttcttccggtcagctgcagtctgaaaaggatttcagccccgggagtttaaaagttatgcagtctgtacagataagggtctggacaggctggcccctccccggtgccaggccccgggggctttcacgccagcaggcttggctagcatttccgcgcctcccgctgaggccatccgtgtctgggatgcgcccgccgcctgcaactcagccctccaaaagtcagctcccgggcggcggcggcgcctgcgtgcagaggcgcaccgctaacagcgcccggtgcgtcccaggcgctccgagcgcgatcggcaacaatgtttacgttccggggatgacgtcg

SEQ ID NO: 37047 - DNA, 296 bp, Mus musculus
  source 1..296: mol_type = other DNA
ccgccgaccgaccgctagtgcaagaaacgagcgcgcgcgcacactccacttaagtgtctgagaccctgagcctcacaagagactggaggagtaagctgcttgcttccttttgcaatttattatttttttccggtcctcttgcaaaatacagaaaaggaaaaccaattaattgtcaacactcctgccccctgcattttggcggagggggaaaaagttttgtcgacgtcatccccggaacgtaaacattgttgccgatcgcgctcggagcgcctgggacgcaccgggcgctgttagcg

SEQ ID NO: 37048 - DNA, 499 bp, Mus musculus
  source 1..499: mol_type = other DNA
gctcagatgagactcccaaggtgtgaacctttttagtctctcctgtgggaatggcaggcacaggctaatggcaggcacatgctaatggcagtagtccagaggcttgggcagatggctctttgtgagttcgaagccagcctggtctatataacaagtttcaaacccattctaaaattaaaataaaaaccctgttactatccacctttttttatcttttttacacatttacagtctcctgaactataattgacttcggtgcctgggaccgtgttgcgctactgaccttttgccaccttgttccaaggaggaaataggcctcaggaggcgcccagaggtgacctcggatggcctaagtcaagagctccgggacagcgtggggcgcttccaggaaggcgtcggaggcggtgcggggtacgtcactcgcacggacaccgcccaccgccttgtgggcggggtgtgtccggccaatcgtggagctcgcggaggtgccggcttggga

SEQ ID NO: 37049 - DNA, 280 bp, Mus musculus
  source 1..280: mol_type = other DNA
cagagatctatctgctctggctggtatgcaatatcacacccagctgcaggtgtcatggcttttgactgacagcaccagctgtcaagagtccactggctttggcctaggtcaggcaatgtgaaggaatacatgaattttccctttaccccacgaggccagagcccgggggatcgcccatgcgcatgcgcgggccccaccctcgggcgagggggtgaggctggcgccggggcggggcccgtgacgtcaggtgcgcgcgtggctccggctgcgcaggaacagc

SEQ ID NO: 37050 - DNA, 330 bp, Mus musculus
  source 1..330: mol_type = other DNA
tctgcctactgctggcagccagctgtactgctagtagttctgggagtactagccgacaaggattatccgtttccaaagagccgagtatcttgagtccgccctgaaaacaggctgctgacggaaggcattcgccggcagggggcgccatggctccacagtacgggcctgcatttgcacaccggctatgtagcagcaagggctggatgcgaacccgggtgccccctgggactgcaagacaaatacccggggtccccggatgggaggctgcctggcagaggtggcgccagctgcccgtgggtggagcctcgtagctgccctgtcgctctactg

SEQ ID NO: 37051 - DNA, 366 bp, Mus musculus
  source 1..366: mol_type = other DNA
ctccccccccttccccggggggaaggcctgagaggggggtctccacggcttctatctcccccgcggctggggctacccttccagctacggaagatccacggtgtgcgcccccagggcctcccaaactgtttccaaactgcccaggccggtggtggacgcaatcgagccccctccctcccaggagctgtgctggggaagggaaaccaaggtttggaaccacactagccttcacattcctgggaggatacaaccctcgcctgttattaaaggtccggctcgggctgccgaggcgaagcagccgcctcgccggggcttcgtgggcagggcggcagggtgcggcagccaatcagcgcgcggctttagacg

SEQ ID NO: 37052 - DNA, 366 bp, Mus musculus; identical to SEQ ID NO: 37051
  source 1..366: mol_type = other DNA

SEQ ID NO: 37053 - DNA, 374 bp, Mus musculus
  source 1..374: mol_type = other DNA
gagcagtcagtgctcttaaccgggctgtcctggaacactttgtagaccaggctggccttcatgcctggcactgctaagacaaggatattattgtacatccctggcttggctaagccaggggacagacccattttacagatgaggaagctttgcaagctgggtttcaacctgctttccaagttttgaatctacaaggagatcacagtctcaaacacccccccggggggtcatagaaagcttgcactggactgaggcggggtctggcccccttaacctgcccagagctgactcaggggttcccaagcctaggattgcccagggctcttcccccaggacggccaggccaggggcggggccctgccttgccaggtggt

SEQ ID NO: 37054 - DNA, 177 bp, Mus musculus
  source 1..177: mol_type = other DNA
ctcttgaaagcctctttcaaacactcaggggcttcagtttactcagccttcagatgagtgaatctttaatcccttgaggccagcctggtctacagagtgagttccaggacagccaggtacacagagaaaccctgtcttaatacctataaaaccacgtggtctatctagccggtgccc

SEQ ID NO: 37055 - DNA, 377 bp, Mus musculus
  source 1..377: mol_type = other DNA
gaagccccggcgaggcggctgcttcgcctcggcagcccgagccggacctttaataacaggcgagggttgtatcctcccaggaatgtgaaggctagtgtggttccaaaccttggtttcccttccccagcacagctcctgggagggagggggctcgattgcgtccaccaccggcctgggcagtttggaaacagtttgggaggccctgggggcgcacaccgtggatcttccgtagctggaagggtagccccagccgcgggggagatagaagccgtggagacccccctctcaggccttccccccggggaaggggggggaggggccgctggggcccggggctttggcggcgcagctgccgccgccgggagagtgcctgggga

SEQ ID NO: 37056 - DNA, 327 bp, Mus musculus
  source 1..327: mol_type = other DNA
aaagaagcctgggggaaatttccccagattctcaccccccccagacttcagggggagcagttccatctgttgtgtagtcacccagctctgtcctagggtagggattacactgcacgccgtttaagattaaattgtcattttcggaaaccccagggaggtagcccagagacaatgtcaattgccaccgcgcccgcggacccacggcctgcagtctgccatccccagggtgtgtgtcttgggggggggaggggccccccatcgcacctgcggcctctgggtgagtcctggcgcgggcccgtcccgcgtgctgggaggtcggggttaccc

SEQ ID NO: 37057 - DNA, 497 bp, Mus musculus
  source 1..497: mol_type = other DNA
tttcctaaaatataaaataaaataaaagtgtctttgttaggattgcaggcacgcgcatgtgtgttgacacaactttctgagaccaacttcccctttggaatttggcttctgggccaaacttccaaacaatagcgacagtattttgatttgtggctggacagctaggctcctgcagaactctactactgtttaagagcggtgatggagagtcagtgtgggggaaggagctccacccctacccaccacgtggagtgccctccttgcccgcagtgaggccgcagggctattcccaagctccgggcgtggcggaggcggggcaggggctccctgagcccaggctccccgagaggcgcggcctggctttctcgtctctctactccagggccagccggaggggaaagaggacacttttttttttttttgtccgcccggagaagaaaagcttcctcctgcacctttaagaggcagaggtacgaggaggcccgcgccctccccct

SEQ ID NO: 37058 - DNA, 442 bp, Mus musculus
  source 1..442: mol_type = other DNA
gaatgcttctatgtagcatttgtcaggcaaacatttgaaagcatcaatgagagactgttttcttcagtttatagatgagaaactacagtctaccctagacagctcaggctagccttgaactcatgaagttccaggtaggcaccaccagcctagcttaactaacagtgactgaggatagagttaaaatcttatgttgtccacccttgcctgtaatttgccaggtccaagccagtcacattatgaaagggatgccaggctgctctcccctgtcacctgtcacagtgccttgaaaagaatttcttttcctccagggtgtctcaaattgagcacatgttttaaaaccacagctacttatctgagtagctaaaatcccagtactacagaggctgacgtaggattttcagtgagtttcaggccggcctgacctacaaggctttgggga

SEQ ID NO: 37059 - DNA, 476 bp, Mus musculus
  source 1..476: mol_type = other DNA
taacaaaaagaataaatgattccaataatattttttgaaagaattaagtactgtggaagtgttccatcagtgatcaattagcccagcctaacaaatacttcatttttttctttgatgcctgggctgccactcactgtgagacaaagctggcctaactttattacaggcatgagctgccatgcctggctgaacgactctttgtgtatctggtgtgagccgccccatgcttgatagcaatcaaacctgggtcctctgaaagagcatccagtgcaatgaacatcactttaattttttttaatagttaaaggatattttgattctaaagatgtaaaagaacgtctcacctattttgaaatttggtaataaatgtttcttcaaagcttaaaaaaattagttcaggttttttttttttttcaggtgaccctcttgtctcagcatactgagtgttcccattctggttctagagtctgaaaagg

SEQ ID NO: 37060 - DNA, 398 bp, Mus musculus
  source 1..398: mol_type = other DNA
gcatgataaaacaggcatgaagccaggcctggtggcacatgcttggagccccagcagcttccagcctggaacagatctttcctacccccggaggaagttacaaagtgcatcactgtttgtcattggataagcagatgatacagtgaacagtgtttctgtgcatagccctggctggaccaggctgatctggaactcagagatctgcctgcctctgtaaaccccagattacaaaaatcacagatttgtgccttggaatgagtgagtcttatggtacccaaaatcatacataccacaggtggggacccctgctgtgtggcgtcttaaaatgcttaacattggactaatttagatctgccaaatgggaacagcagtccagccagcctgggtaggagcttagc

SEQ ID NO: 37061 - DNA, 366 bp, Mus musculus
  source 1..366: mol_type = other DNA
gaatgacggagggaatgagcaatgtcctgctgcttcccctccggaaaagaccaggctccttcccagcctgtgcgtgctcaggctcccggtctctgcagggcgatgcagacctcgtccaccatccacgtgctgcagttgctgcgggagctgctcgcggctggaccgcgccccggccccgccctgctccgccccgccccaccgcgcctcgccgtggctccgagcttttccaggagcggccccgcctcgcctcgccccccagcccgctgcccgcgtcacggcgcgcgacccggcttcagcacccgtgcactggagcctgcggggaccggcgacgaaggaccatgaagctccgggctccttgggccccgc

SEQ ID NO: 37062 - DNA, 300 bp, Mus musculus
  source 1..300: mol_type = other DNA
tatccgtcatatggacttttcttgttttataaaacacaacaccctggaaccggagttacagatggtcacgagctatactgtggatcctgggacctggagagcagcaggtgctcttaactggtgaaccatctttacaccagaaggatggtgcttttaaacgcgacaaataggcggatttctgagttcgaggccagcctgttctacagagtgagttccaggacagccagggctgaggggaggggactcctcctcgcatggaaggagcagactcggatcacgtgaacgtcccgtcacgtgacg

SEQ ID NO: 37063 - DNA, 422 bp, Mus musculus
  source 1..422: mol_type = other DNA
cttacccagtacttagcacccagagtcctcactaactgtgcactaacactcggggcttaggttaggtgatttgcaacctagggaaatccacctgactaagctagctgtgtgattcattattgaatgaaaactgtgaataaaaaagcttttatattttcttattttcttatttccatcgtgtctgtccctcaggagggagacgatcaaatgtcttcaatagtcatacgattattttttatatttagtagctaagaatttacattactggacatatatcttttttatataccataattgcccaaataatttataattgtgtgaaaaattcttagcttaaattgagtgacttaagtcttctgtacttactccagtcaatgtaaatcgccagatagtctgtcacaatgatgagcgcatgcttgtca

SEQ ID NO: 37064 - DNA, 351 bp, Mus musculus
  source 1..351: mol_type = other DNA
ataatataaaacaaaagggaaatataatatatatatattatatttatatattatatataaaatataataatatataaaatataatacacacatactgtgttataagccctaaaagttagaagacaggaacacagcaagtagccggccgttttgcagctgtggcattttaaaaataaacaggacctattagggctcgtggctgttcagtgcctgagtggcagagaaagggcagcagttgcttctgcccctcagcaggggagacactgctgtctggtgggaagaaggaggattcagaattcccacttgtgaggtcaccattgtgacctcacagccagatggttcaaaatattg

SEQ ID NO: 37065 - DNA, 454 bp, Mus musculus
  source 1..454: mol_type = other DNA
gatgaaatttactttgtgcattaggtcgcccttcacactgcagaaacggcttccaacagctgcagatttctgccgggagctgcaaaacttctggggtagcgaaatgctggccgccctctgctagcgcagccctgagccggctgttgcagcgtcctctccagtccctttcaaaagcttgacaaggggatcttctgggggcgaataaaagacgcttttcttaaactaactgggctgcagccctgggctcatctcaaatttatcactaggcgggaaagggaggtcaatgaaatcatccccaaacggcaggctgcggttggtccagtctacgggtagccatccggggtgacttgctattctgggcacagcgtctgcaggcccgcaggggagctcgcgggcggcagcggcccgggcacggggaggggcggcgcggcgtcttctcccggccccgcggcgg

SEQ ID NO: 37066 - DNA, 402 bp, Mus musculus
  source 1..402: mol_type = other DNA
agtaactcaatccagtgcctactaaataagttgaaactcttgtgtagtacaagtgacatcttccattctatagattttcctgctttggacagaaaacatgttatacattacaagttgaacccagcctgaacttccagtcctggctgtcctgatcaaaggtgtgcgcaccacgcctggctgctgaacttcaaacccactggatgagtttttttctattgcatttttctaatctagtgattaataactattatctgagatgttaataactcagcttaaaataggaatatttaagtcctcattgtgtacatacaaacatacagaatgaacagtgtttgaactaatctttgcatcactaagtatacagcagctatgagaaatttagaattactttataaaggaggt

SEQ ID NO: 37067 - DNA, 422 bp, Mus musculus
  source 1..422: mol_type = other DNA
tttgcttgtgtatttattataatcattcacttacaaaatgtagccacattgtaatctttgtactaacactaacctgacattatttgttacaggttataatttccggtgattttaacatgtgatgaaagtagaaacataataaagggttttctggtttttctgtacttcatttttcattcatttacaaatgaaacaagcaaaataaagtggcttgtgtctgaattatctacggcaaagctttgattccttcagctttaaacgcctaacggggacaatccatattgttttaactcattcagaaccgtttttttaaaaagagcaatcccccagaatgccacgctctgtggcccattcggaaagaggcatgagccaggacccgcccctagacggctttggaggcctcctccagggagagcggctct

SEQ ID NO: 37068 - DNA, 240 bp, Mus musculus
  source 1..240: mol_type = other DNA
acgacaaaatggttgaacactgtgtcaagtatttgctctctgtagaccaggctggcctcgaactcagaaatccgcctgcctctgcctccggaatgctgggcttctagagatctaaaaccgagccgcaaggctgacgtctcacctgcagcagctgaccctgccactgatttgaattggcgggagaataccgctcaaaattgagcgcgattcccgataccgagcatccattctgggaggtat

SEQ ID NO: 37069 - DNA, 290 bp, Mus musculus
  source 1..290: mol_type = other DNA
cactgagggatcgcgacccgatggctttccggtcaaatgcgataaagcgccaaaccccacagttcggcctccccctccctgcagcaggaagccatgatggcgagcgcagcgagcggccgcggcgccatcttgtccacacacaggcacggacaacagcccggccgctaaggcggcgcctctgcttgcccgcactcaacagtactggccgccagactgaatctcttgcgcgagagacatacctcccagaatggatgctcggtatcgggaatcgcgctcaattttgagcggta

SEQ ID NO: 37070 - DNA, 435 bp, Mus musculus
  source 1..435: mol_type = other DNA
tccaatttctaatttcaaactcaaagtagatagtcaatggtagatactctgtaagatgacacttaatcacactttaaaaaaaagagagagaaaggaaatgttatctttctgcaccctcttgcacacatccaggcgctgtgtctgcaatcccagttaggagcacccgctgctcctgcagaggaccggggttccaatagcctctggggctgttgttgtatgtacatagccacatagacaggcagtagaatttcacacgaactcttatgttaatttattaattattgtcagctaagcaaattgcagtgaatggattctccgaggccaatcacctagccagcatgcatgcctgcagccttcagaaggaatgccctcagatctattacttgtttatgcaaacagtaagttgcataagagccttgctagcctttttttaaa

SEQ ID NO: 37071 - DNA, 485 bp, Mus musculus
  source 1..485: mol_type = other DNA
cttacacataaataaaacaaatctttatttaaaggtctgtgtgttgtgtgtgtgtgtgtgtgtgcgcgcgcgcgcgcgcgcgcaagcgtgcatattctgggccgcccaaattcctacatgggaaatcggcaaagactccagttttttaaacagtttcattttgcccgtgattattttagaaattaactccttaaaccccactacctggctatagggagatgtttgcctcggccaaagttttgcaaaagtaactaccgacttctccagaaaaggttgcctcatggagacaggagaaaatcattttcaaaagcgcagagttttgcacatgccgcagtctccgagctatgaaagaatttttctaataccgggcgattcaaactggcagaccttcccaggagtggaggctgtgcttctgggtgtgggtggccccgagaggccgcagagcacagtctcccctctctggcactgcatgggagtgtcccagg

SEQ ID NO: 37072 - DNA, 391 bp, Mus musculus
  source 1..391: mol_type = other DNA
taaaactcagacattggcctgcctctgtctcccaagtgttgggattagggctgggcctactcaaggcagagctcttctgtacaaaaacgcaatggtctttctaccaggccctttctgagctcgaagtgtcccagtgctattcctgtttcacaagtgggacttggatgaaattcaaacagtaattaatatgacctttgcacgagtaattcctatttagggaatcggaatgcagctggggagtcactgacactgcgcagggacagcctgagccgctggctccccctttgccaatggataatgggcggggccccgcccaccccggcacggtggcgtctcgcgacatcctcctagcggctggccggggatatcgcgataaaggctcattgtctcg

SEQ ID NO: 37073 - DNA, 492 bp, Mus musculus
  source 1..492: mol_type = other DNA
ccagtgctattcctgtttcacaagtgggacttggatgaaattcaaacagtaattaatatgacctttgcacgagtaattcctatttagggaatcggaatgcagctggggagtcactgacactgcgcagggacagcctgagccgctggctccccctttgccaatggataatgggcggggccccgcccaccccggcacggtggcgtctcgcgacatcctcctagcggctggccggggatatcgcgataaaggctcattgtctcgcgcgagcgcgccccagcagcgaatttcggggcagccgtggccggcttcagctggcgggagcggaggcggcgggggccgtgcgaccggctgggtgagcgctctcattcgcgctgctgcggcggcctccccgggagctggcggcgctgccgaggcggcccaggcgctgcctaaagcaggaagggggccgggccgggcgtctccacgcccgcccacatgggggcctcctgtgga

SEQ ID NO: 37074 - DNA, 499 bp, Mus musculus
  source 1..499: mol_type = other DNA
agagataaaacaactttgaattctctccttccactgtggaatcctaggataattccccttctggcataagtggtggccaatgagacccagaattcccgtaggtctccgtcgtttccgggatctaagagcactcactgctctgcctacagtgtacttacatatagtaaatatattatatatattaatgatataattactaaaatatctttttaaaaaataataacatgtcacggttagcagatcgatgatcgattgactggcagaccctctgtctccaatgatcttggttcagaccagtgctgagagcccggcccggttcttcagacttgggacctagttcccgctgcgacgctctgggaaccttagaggggccgaaggcttccggcgtgggttcacgttcttgatccgcgagcgagcacaggcgcaagtctcgcgagagcatcactcctgcgcaacgtccgagtgcggcccgccggctggcccggcggtttgagtgcgc

SEQ ID NO: 37075 - DNA, 411 bp, Mus musculus
  source 1..411: mol_type = other DNA
agataaagcacggctaatctcttaaagacagccttgtccaactcgtctgggtcctcagagagcgtcacctgacctaggagacagacggtcaggtgtctaactcatgacagcatttcctatctcagggagttgatacttcatctcaaaaagcaaagacttgagactcaaggagacaagactccccctacaggtgtagagaaagacccagggacactcccaggaagtcccgcgcccggcccctcctgggagtcctaagggaccacagtggtggctactaggcatcctaggggggcggggcacgccaggagtcccggggacccggcgggggcggggggcggaggagtgactggcgggaggggctgcggctcctccccgtgcggcgcggcgcgcggcctccgtgtgcctaggctt

SEQ ID NO: 37076 - DNA, 241 bp, Mus musculus
  source 1..241: mol_type = other DNA
tgagttctcggtcagcctgtttccagagtctccttcaagactctgagattccatttagactcagaggcttcaaggccacccatttttttttttcttttttaccttgaggggaaaaaaaggctcttatgacctcacaacatcatagtgacatcatgaccgcgtgatggcgtcacaaggctctcatgacgtcacacccagcgctggcgtcacgtgcccccccgcgaggggtggggcttgaggg

SEQ ID NO: 37077 - DNA, 357 bp, Mus musculus
  source 1..357: mol_type = other DNA
ggcgtccagatatggatcccatgcttgggtgacagtccaggtccccagtctttcctggaaagaccacagggcccttccttcggaggcccctgtcccccctacaaggtggcagggtcggtaggacctcaggctagctagggtccaacctaggcctcagctcctccctagagaatggagaggacctggtttgttcctgtcccaacaatgcctgccagacacttgtccagctgtgtgggttgtctcatctctcagacacccccaccctcttcttcaggaatctttgcaatgagaatgaacagccctgcctggcccagagaaagcccccacagcctgctccagctaggggcctttgtaggg

SEQ ID NO: 37078 - DNA, 390 bp, Mus musculus
  source 1..390: mol_type = other DNA
taatatgtacaatatacttcttacatatattatctggttcagaaaggcagaaatgttgctcaggcaggccctgaactcccagtacctgggcttacagatgcataaagctatgcccatgaggatcttaataacccagccacaagaatatttctgtcccctgagtatgcgcacaggcctgttgcagatgcagagcatccagcactcgggacctggggccaggttgctgtccaagagaaccagggaggttcctcccgcagcttgccccggaagctccgccccattgaggctccgccccactagggaggttctttcagcccatttctccggaagccttttcctgaagactcccaggaggcctcaccggctccttctcggaggccccgccccccc

SEQ ID NO: 37079 - DNA, 437 bp, Mus musculus
  source 1..437: mol_type = other DNA
actttgtaaacgtaaactaagtaaatatcaatataggacgtttaaaaaagttactattgtggcactcccagctagctcctgactggatgcgaggcaccttggttgcccatgaaccacgccgctctgcattgtgttcacagcgagcgctgcgactgaggaggggcgtgactgccacagacacgccctcccccgcccacactgcctcctataggagaggggcaggatgtgacacgtgacgcagcgtttccagggaacccgagctcacccgtacagctaggagacagggcagtgagtcccgcactgtcttcaccccgctgtgactcgggggccactcgtccgtaccccgtgctggggacaccactcttcccgggaagacgtctttctacgcgggcctgcccaagcggccccttgctgcctggcgcggagccctcggcggt

SEQ ID NO: 37080 - DNA, 370 bp, Mus musculus
  source 1..370: mol_type = other DNA
tgggcagacatctaccttaggtaaagtggctccagggacttaagtgaagttcactactcttatcagcagtgctggagagcggagttgatattataaagcactttataacacccctctgtttgctattatttaagagcgttgctctgcgcactctggggacttggtcctaagtctcccaattccagtttctctgggaaatactgcaacaagagagtctcatgtacacccgacagcgcgggctcgcaggtggcgttgcgaccgtcccctgccaacgcggaggtgcacggagaatcccctctcatgctagttagaggtgggctccctagaggcggaacccagagctccggagatcttccgggacggccccaga

SEQ ID NO: 37081 - DNA, 331 bp, Mus musculus
  source 1..331: mol_type = other DNA
agtgggaggagggcagctgcctgctgctccactatcatcgtcaccatggtggccaccttcttgagcgaatataagctcaaacctctaagttatttgatctagaccagtgagaggtggcgttacaactggagcttccatgatgccatgccgcctcatcgaagagaagtcttcattacagagtttcttttgaaagagcatttaaaaggtcacaagagattcccctgggatgtggaggcatttcttgtcaacttctgtattgtattgaacatgtacacagcttcacagacagtgagcagacatgtaagagacactaccatgaagccctaaagtc

SEQ ID NO: 37082 - DNA, 370 bp, Mus musculus
  source 1..370: mol_type = other DNA
ggcaatggccctgtgatctccggagagagaaaagagactccagccaggctcctgtcctcccctagcctctgcagccagaggctgtgatgtgaggctgggggcagagcagagccagccctgtagcaaggtttgcacagcagcgggtctggtccagggtgcccatgatccggtcggtgggcatcccctccttcctgagggtggggggaggggaccgcctgcctgtcatgagcagcctgatgcagggaagcttcctagccatgccccaccctgcctcggtgcgcaggccgaggcctgtttggggaggttgccacagcagaactgtgggattggctctgtggtcccagtggaggagagagaatcaattctccct

SEQ ID NO: 37083 - DNA, 423 bp, Mus musculus
  source 1..423: mol_type = other DNA
gcagcacctgccagctcggacagagcaacggggaccaaggcagcatgtccttctggacctcagctctctagactatagtcgtgtgaggatcattcacactaaaaaagttctgcacttgctcagtacagttactctctggatgtggaaaccacagagattgaggtgaccggggacaggagagcaatggtgtactctgtctctcatcttcaacccccgcccccaccccaggatggccatgggcctgggaccagccttgccctctgagtgagtccttatacacctcctgagggagctgggtcactgtgaagccacccatgcatttgggggtgcagggggtagtctccccgagcacctgacgctcagcctagcctgggaccaaggttgtgtaaccccacagcccctgtccaggcattctgggatgac

SEQ ID NO: 37084 - DNA, 343 bp, Mus musculus
  source 1..343: mol_type = other DNA
tcaggctacgagactgactagccagtcatacataatacataatatgggtttccctgtggcaaggcataagcctgatagccctggaggacacacactgatcactcatctgtggtctcagagactaatctagcttgagatgggatgggtaccatcccataccaaaaatgcttttctgctatggcagtagctgactctgtagacctttccagactaaactgtagacttggggccctactctgggatggagcacggtttatcttcatcatccagaactgagataatggatatctggcttctgtgacagtacacagatatgttctagaacattctgactcattagaac

SEQ ID NO: 37085 - DNA, 409 bp, Mus musculus
  source 1..409: mol_type = other DNA
gtaacagtgtttctaaatacaccttagggcaccttttggtgacttcgtgcccgaggagatgaacacctggtgtggccctctgctacttcaagttttaacaaacaggatcccaccaaacaaaacaaaaaacccttggcttttttttttttttttttgagacaggaccatggggacctccctctgctgatggccagcttgtgcaaaggactctacggcaggaggcaggacctagcgtggggcctgcccgcccctagcggtccctccccgagcgcggtcgcccctcgccctcctcccgcgcgcgggctcggcagtgcggggccagagtcggagcggctcttccggcgcaggcggcggcccggctcctccacgacgcgcccccgccgctcccccgcgcggcctgaagaggcgc

SEQ ID NO: 37086 - DNA, 386 bp, Mus musculus
  source 1..386: mol_type = other DNA
cgtctgccttgccaggcttgaaagcacaggcctttaatctcagcatccctggtctgtagtaatattactaccctcagtgcccctaccctagggctgcacttgctgcaagcccactggaagtcggaagtaggtccggagttccagcttccacctctgactagtccgagcctggctgtgcaggtgcttacctcgggccggaagcattcggcgagacggtagaccgaggatgggaaatctaaggtttccaggtctgcgcatgagaggtcttggccctagagccccgccccctcaggcctccggcgtcgccctgccctctctggagcgagctgcacgcacgcgcgtcaggggaaactaggggaggtgcgcgcgctgcgctcgccggctcg

SEQ ID NO: 37087 - DNA, 521 bp, Mus musculus
  source 1..521: mol_type = other DNA
acaggcattcttatataaatataattgcctctgcccctcaccctacaacccattggggttagaggcagattctgcggagatcgagtcgctggcagcgaacccactgagatttccaaagggagtcccagtaccgctacccgggggacactcacgccccttgctccgattgggcctcactgatccgcagcgctgcactggccggcgggctccggctagctctgcgggcgccgtcagccttcacccgcactcaggggggctcccctttgatggagtcgtctaggactcagcccttgcggccgggtacccggagtggcctcacgcgaccgttaaattccaaggaacgtgcgcgcgcccggcgcctcagccgcgattggctgctcggaagagagggccgagccggcgagcgcagcgcgcgcacctcccctagtttcccctgacgcgcgtgcgtgcagctcgctccagagagggcagggcgacgccggaggcctgagggggcggggctctagggccaagacctctca

SEQ ID NO: 37088 - DNA, 235 bp, Mus musculus
  source 1..235: mol_type = other DNA
gttttgtgaaggcatctgagtactaaacatattcaacaccattagtacacaggctttaagagttttaagataatgttctcattgcgatctcagagcgtattagaagcttcctgtgagatgaattctcagtgcattgaaaggagtgtgtatcccaggccggcggcctcaagcctgctgtaaaagagaggtccagagtcttgccatcctctctgtcaggatgaagggcaatattcct

SEQ ID NO: 37089 - DNA, 457 bp, Mus musculus
  source 1..457: mol_type = other DNA
gcgttttatgtaatgtgatgagcattactatgcaggcagaactccaaaatatagtacctttggaaggttattcatcacatcccaaccggggagtcgaaactttgccaagttcacttgaaatattccaaagagttcgtgtgacaaacgtcatgagatgcaagagcgatcagtctcaaaggcgtcttcaagcagagacatgacattttttttttccccgtctcgaaataaatgtcaagaatgggttaagaagaaggaaaaaaaaaagtacttcttccatcctccctggctgtttaagaaaagaggaaggcgcgggccaatgagcggcgcgcgggaggccggggcgcggcgggggcgccgcggggaccgcagccccccaaactttggcaagttgcgggcggcggcgcagcgcggggcgcggccgcgagaggagccgccccctcgacgcccgccgccccct

SEQ ID NO: 37090 - DNA, 504 bp, Mus musculus
  source 1..504: mol_type = other DNA
gatgatgaccatggaccacctcaggagctcgcaatgattatgctatttttattattttttaaacatgcacaataagagctgagttcgaggccagcctggtctacagagtgagttccaggacagccagggccacacagggaagacggggtccttgtaggtgcggggcgcatgcgcgcacgttcacctcccggtggcacccaagaggagcggaccttcttcccgacagcccgcggacctcaaccggtggggcgggggtggggtgttctcgcgaggtctcggcgagcgaccgcggaagtggcggacacgtgactgtcctaggccgcccccaccccggagccgcgggaatggaccgtggcatcccccttggatcccatctccggtaccaggctagcgggacacggcgggaatccgcttccttcatctaggaaggcgtgattcgggtcgcgcgctgcgtgcgcgcggcgcctgacccgtcgccccgccccctcttcctgcggggcgggg

SEQ ID NO: 37091 - DNA, 446 bp, Mus musculus
  source 1..446: mol_type = other DNA
tagctactaagatattagataagcagtcaccagagtgcctggaatcctgcctacctaggcatttttcggactggaacctaggtgtgagagcttggccagccaggcttttccaagatagcatggcagagcaccccggcaaacttatcaagggtagccagggctccctggctcctaggagcctccaaccggccggccacaggcagagttcgcctagcttgtgtggccctagagactccccagcttctactgggatgcccaccgggcggacgcctgggctggcgtgaacgtcccacgcatgcacacgcggccccggtacggggcttcgggaagccgtgcagtcgctgcgcggagtggccggtggcgcgcgcgggcgcgcgggcgcagggctgcgctgagccgggattggccgtcgcgcgccctcgcgcccgccccgcaggcgcctggca

SEQ ID NO: 37092 - DNA, 438 bp, Mus musculus
  source 1..438: mol_type = other DNA
ccccgcgcggtggaggcggcggcggcggcggtggcggcgacggccccgggcccggagatggtggagcagaggggcccggggaggccccgcagcgacggggtaagcaggctcctttcccgcactgagcagcgcgccagccgggccggggcctcgcgcacgtgggcgcagcaagggcccccctcccccccatcggtgctcgccagcgggcagccgagaccttgagtccccggaggtggctagtaaccggagttactgtctagtggcttaccagactggcagttgggagagcccgctctgaggagagtctccacacccagtgctccaatgtttgcagccaaggtgcgcgctggccggcagcctggccaggcctatcgcggaaggttaaggcactaagcaatggggattccttaaatggactgtaccttcctttaaggtctt

SEQ ID NO: 37093 - DNA, 399 bp, Mus musculus
  source 1..399: mol_type = other DNA
agagcagggtggtcttgaactcacagagaactctctctgcttcttgaggcctattctaacaaatctcactgaagggagttcatagcaggaagctgatattcttccctgatatctttcttagaaaggaaagccaacaagatggctagctcaacagcagaggcccaggttgccctgctcaacggctggtatttgccacactatcttttaaaaaatacccttcatcccatgccatgcaaattcaatagctggaaagcttaagtttgcaaagttaaaaaaaaaaaaaaaaagcttatgagcttttttaaaaaaaccaaaaacatctttgaagtccgcccccgtttccatggaaaccaggcttctcccaagggcggagcttcgagaggctcctccctcgcagac

SEQ ID NO: 37094 - DNA, 333 bp, Mus musculus
  source 1..333: mol_type = other DNA
cacatgcttgccgtatcccgggaggccagaagtgggtctctggaagagcagccagggcgctcaatcctagaaaaaacttttccacttaaactggttttagaaaactgtccatcaatttaaatttttttgtcatgtaaagccaaataaacaaacaaaaagaaatctcattattctcaaaatatacacttctgtatgttggacgtatatagtcaatttatttaagtaattcaaaagacagaagttccgacgacgtcgtgaggcggagcgagtcgcccaactggcttggcggggtgccacgtcggcgcgtggccgacgccatgttgaagcctggca

SEQ ID NO: 37095 - DNA, 410 bp, Mus musculus
  source 1..410: mol_type = other DNA
acagggtttctctgtatagcgctggctgtcctggaacacactttgtagaccaggctggccttgaacgtgctgggattattttaaaacagggtttctctgtgtggccctggctatcctggaactcactttgtagaccaggctggcctctgtgctcacatgcttgccgtatcccgggaggccagaagtgggtctctggaagagcagccagggcgctcaatcctagaaaaaacttttccacttaaactggttttagaaaactgtccatcaatttaaatttttttgtcatgtaaagccaaataaacaaacaaaaagaaatctcattattctcaaaatatacacttctgtatgttggacgtatatagtcaatttatttaagtaattcaaaagacagaagttccgacgacgtcgtg

SEQ ID NO: 37096 - DNA, 564 bp, Mus musculus
  source 1..564: mol_type = other DNA
gataatctctccaagtcttgggactgagatccaaatttccatcttgcactgcgatatgaagttagtgggcacaggccgactttggggactgaggacccctatgcgcgggcgcccgctggagtcgggctaagcactagccagcagggagctcctaggtgcgagggtcctcctgcactatctggatcgcagggggagcccacctcctgacccccagtgttgaagcagccaatggccgtgcgcggtgacagccgctgccttggaggcgggggtcttggggaccggagccggggaggcgggaccggagccgggggcggagcttcggcttcgcggggctgcgcaccgagacccccggggacagagactcgctcccacgtcgcctcgcagcgttcccacggggaggagccggccaaccggagtcactcggctctccgggaggagtctccgggccgcggtccctccgggcaccgggcgccaccgcctcccaggccgggacccgcgtcgcatcaagtccggagacgctgcgggcctgcgcacgcgccgccgccctcgccctcctccccgcgg

SEQ ID NO: 37097 - DNA, 375 bp, Mus musculus
  source 1..375: mol_type = other DNA
aatcctagcgccagactggtctacatcagattcaggataatctctcctggcaagtcttgggactgagatccaaatttccatcttgcactgcgatatgaagttagtgggcacaggccgactttggggactgaggacccctatgcgcgggcgcccgctggagtcgggctaagcactagccagcagggagctcctaggtgcgagggtcctcctgcactatctggatcgcagggggagcccacctcctgacccccagtgttgaagcagccaatggccgtgcgcggtgacagccgctgccttggaggcgggggtcttggggaccggagccggggaggcgggaccggagccgggggcggagcttcggcttcgcggggctgc

SEQ ID NO: 37098 - DNA, 357 bp, Mus musculus
  source 1..357: mol_type = other DNA
tacatataataaataaataaataaattaaaattctgaacaaggtgaaattttacaatatcatatgtcgcatagatttaaaaaaaaaaagatttatttttattcctttaactactttcagcatcctcagagattctctgtgggatggtccacccctgccagcttaaataagcaaggtgagaaacaacaaaaaaattggatttctcatctttattgagactcactgaatgtggatcctctgcaaaagcaactagcaggttctgtcggtgcagcgcctgtccctccgcggccgccgtgcgtccgttacgtggcagccgtcggccccggccaatgagcggcgcccgcatcagcccccttgg

SEQ ID NO: 37099 - DNA, 284 bp, Mus musculus
  source 1..284: mol_type = other DNA
caagcccctctcctgaagagaatcttcacgtcacagtataagtagagatttcctagtttcggaagacttggttcatttgtgtcacaaactttggttagcttttgaagatgtgaacctactaaatgcacacgctaactgctttttacacagtggtctctgaaacaaagtgaacctccggcggcttgctctaagcaagccaggctggccaactgcgagcccgggcgtggcgcctcccgtcaccggaacgtcgtcgctggggttaccgttttccgtcgggcgacaaa

SEQ ID NO: 37100 - DNA, 192 bp, Mus musculus
  source 1..192: mol_type = other DNA
tttaaaatagtagttatatatacttaaagtgaacttcacaattgtgtcgagttctgtgctgtacttcccagtttggaaaagaatgatacacacgcctccgtgaagcgccgcccacgggccaaggcgcactcgatttccggcgccgacgagtgacgccacgcacgccggagacgacggaactgcgcgcgagaa

SEQ ID NO: 37101 - DNA, 552 bp, Mus musculus
  source 1..552: mol_type = other DNA
aaagctaaattattgctctaatataagcctttaatttaaggctgtattgttgcctcttgcatcaggccagaaatcctttcggtgataacccaagggttgagactgtacacatatctacatatctgcctgttcacactcctaatagtcatctgaagaaggcccagaattccaacaaagtctggatggcagccacagctgatctcctttcatctgagacttaaagtattcaattaacattttaaaaagcagcctttaaagttaaagaacttcttccatattttaaaaaagctatcagaggctagtagtattctaaagactccgcctcatgtgcacagacataaatgtttacagttcacttttaaactaaacgcattcgcccggagctcaggctgccagtgcggaggccgcggaccgtgtgtccccgccgctctgttgacattcccgcaaggcgccagcagcaaagcacggcctgacagcgcgtcgcccttctcgcgcgcagttccgtcgtctccggcgtgcgtggcgtcactcgtcggcgccggaaatcgagtg

SEQ ID NO: 37102 - DNA, 501 bp, Mus musculus
  source 1..501: mol_type = other DNA
tgagtcccaggacagccagggctacacaaggatgtcacatgatacaggttgcatttgggctgatgaaccatctatagctgagattgaaggaaaaccaaaatatggcttggtgcaaacgctctatagcgcagagttttatagcgagaatgctgtgtaaataaatgtacagcggtcttcaaggcatggcctggcctggttaacacaagcctttcaaatggagttccttaaatggatgtaggacacccgtgttctccatgtatacgcaccataatgcatgtagtcttgtcgctaccacttgggtgcttgagcagcaagtgctgagctatctctccacccgtgttttttgtttttgacatctggaatggaaagaacccaccccccaaatcagcattgcctggtgtgttgggccctggctctggaccaatcatggagcgggaactggtcctcccgctggacgtgtagacctagaccaacacgacattcccatcattgattggtggt

SEQ ID NO: 37103 - DNA, 364 bp, Mus musculus
  source 1..364: mol_type = other DNA
gtattaaatgctttatttgtgtagaccagactagcctagctgagttttaaagcttgcaacacaatgtctcagccagctaaagccatggctaccgggcagtcagatctgtgtcatccctcagttaagactcccttgtctcaggtgacattgtgtcatgttgacagttcatttgagctgagatctaaaggagtcagctttgacctgggccagtattttaaactgaaggactccagagttcaagtcagaagccgaatctgcttccacatcttaaatcccagtcacccaattagggaaacgacggactgtcaggattccggccgttggtgggcggttccccggggcggaaccggaaccggctgcggcg

SEQ ID NO: 37104 - DNA, 387 bp, Mus musculus
  source 1..387: mol_type = other DNA
tgttgtgaagaggcagtcagcagacactcccttttgctagtgacaaaataaatgtatatttttgagatgagaaagagctagtcctttcttagggctgaagccagtcttgcctgcctgacctggtttgcttctgttgctatggtaaaacaccatccaaaaccaacttgggagggaagagtttattttatcctaggttacactccatttgccctggcttgctcggctgccaactaaggcccacctgtgaggggtgtcatcaccctcagtgggccgggccctcctacattttacttacagaagctaaccacaaaggcagactagggccctcagccccgcgctggcgccgttgcccaggtccccgttgctagggtcgccgttgccacggac

SEQ ID NO: 37105 - DNA, 675 bp, Mus musculus
  source 1..675: mol_type = other DNA
gcctcggccccggacaacaatggggccccggtccgggagagtccagctcccgcggggcctcttctgcctcatcccgcgcccgacccgggccctgcgccgcagcgggcaccgcgctgacctccctcctcgccatgcccgcggcccaggcccggttgaaggtcggcccacgccccggcctggtcggccgctccaactccctcccgagcgtggccgaggagcgcgtccaggcctcggactccgcgcgcgcccaccccgggccgccctctctctctccttccgagggagacacctcacaggtgcgtctccgagccgcgcgcgcgcgctccgcacacccagacgcctccgggaggatgggggtggtgggaggggaaagacggcgcgcgtgcgcacgcgccaggccggccagccccattccctcccatgggaggggcggggagaaggaggagggcatcgcacgcatgcgtcccggggcgtctcaaagtccccgcccacacacgcacgcacgcgcgttcccgctaccccgccctggttaccccgggcaaccgcagtgcggccgcacctgagcagtgcgcttgcgtgctttgccctgccgcagccgcagggagtggcgcgtcgtcccctttcccctccgccgccgccgtgtcggcgccgcaccgtctcctcgaggactagtcg

SEQ ID NO: 37106 - DNA, 807 bp, Mus musculus
  source 1..807: mol_type = other DNA
gcgcgtccgcgggtcccgggagctcagggcaaagagtacttacgcggagccacccggtcgccagagctgcaggtccgggaggcggcaggtgtgacgcgggcaggcggctgaggcccgcagcatcccgccggcttggggccggaccccggggcgctgccccgcacccgcaatgcggctcgtacccggcccgggccggcggttgcagccgttgcgccgcgcctcccccgccgcgccggtgcgcagcctggctccgagccccccgcgagcgaagctcaaggattctggacgtgcgcaggctgcgcgcctcacctgccagggtccctcaggcggctgcggcgctcggcctgcttctcgcggtggcccgcggcccatgggcagggacggtgggagccgggtgcgcggcggccctgccgcggggggcacggagactcaagagacgccgcccggtcgtcgcatcccgtccgctccctccgagcgctcgccgcggtgcacgccgggagccgttggctacccgactagtcctcgaggagacggtgcggcgccgacacggcggcggcggaggggaaaggggacgacgcgccactccctgcggctgcggcagggcaaagcacgcaagcgcactgctcaggtgcggccgcactgcggttgcccggggtaaccagggcggggtagcgggaacgcgcgtgcgtgcgtgtgtgggcggggactttgagacgccccgggacgcatgcgtgcgatgccctcctccttctccccgcccctcccatgggagggaatggggctggccggcctggcgcgtgcgcacgc

SEQ ID NO: 37107 - DNA, 383 bp, Mus musculus
  source 1..383: mol_type = other DNA
gtcagcccgccctggattcaaggcccggtggccttcagaagcctttgtgacagattctcatacactaattaagtatatgaaataaacaaatattttcctggttcctttctgtaattatcccagctagtcactgtgcagataatatggtggcagagctcaggcctccacctagctgtgccaacttctaggtcatttcatcaagaagaaaagagaacttggcctctcatagtctatggaaatttctagttaaaaatcagacaaccctttctgtctttctttcccaggacagagtatctccaggtacttcattttattatgagcaaaaccagggatctcagatcttctgtttctacagtttgctataattccaaaaaaaggcagct

SEQ ID NO: 37108 - DNA, 335 bp, Mus musculus
  source 1..335: mol_type = other DNA
atgctcttcagtccctgccagcaaagcaggcagaatctcaaactgtgggtcgagacccacctcccttgcaggaaggtggagtttatattatggttcataactgtagcaaaattactagggaaaggtgttgggggcatctggaagtgtccccgctcccctccccccttcctccagaaaatggacctagggcagatctgaccctagggacgctgcaacctgcaatggcccggctgagctgaggtggctgtggacccaagtcagcaccaccttttgcaggctggagactttgcagtcctcaccctgccctggcccagtgggtggccaggggggcggga

SEQ ID NO: 37109 - DNA, 439 bp, Mus musculus
  source 1..439: mol_type = other DNA
ccctgcctggctgagcttgtggcagatgcagggcagcaggctgctacccgcagggcttattgcaacagcagagtctgtgcccctccatctgctgaaggaggctagctgtcaggaatgttccagcttaggacgtaccttgaaccaggatggtctcagtccccacgggtacataggtcctggtttgagagaaaaataatctccaaggaatctctggcctttcggccactccccgagggcctgcatggcccaggcgcccagctaggtagtgccgctacccagcagtgtgtgttggctggagggcctctctggcgggccccaccatccaggacttgaaggagaagccatggaggcagggctgccccagccccctctcccaggaaggccctccaagagcctgtggctgatgctccagcctgatcctcaccccggctggagatcc

SEQ ID NO: 37110 - DNA, 480 bp, Mus musculus
  source 1..480: mol_type = other DNA
cctacccggcctgctccttgggcagatgtcctggtagactggggtgtccttccaggagcaccctgacattttcacagggggtatgcttgcataggccccctttgtctctccaccagccggccgggatacagggaagcaccatctttctgtcccagtcccctggacttctagaacagaatggaagggcaagggcctcccgggagcccttgggaccttgcaccagggtccccagacccttggccatctgggatccatacctccccccccccccaaatggctgtggtgttggagtactcctaagtacacccacagccctccgagaggtccaggctttggcgcaggtggaaccggctggctggcgggagggctggctggcgggcgggcggaagaggctgcttgctccctgcctgccggcctgtgccagttggcccgcccagccgaacctgggcctgtgcccggcccccgcccgcccccgcccgc

SEQ ID NO: 37111 - DNA, 274 bp, Mus musculus
  source 1..274: mol_type = other DNA
agtggaatgcaggccttggcctcactgaggaaggaagtcaccccatgcctcgctgtaacacgaagcatttagaattaaaggcttaaaggctctcgcactgagctcaatagccgccaggcagtctgataagcccctcgaacacattcctggatggagtcaggggcccagcgcgcctagaaaattcctggaattcctggcccgggctggcagacggtgccagggtcttctgccctctgtagcggaggggcggcgcccaacctcgccggaatcccgc

SEQ ID NO: 37112 - DNA, 541 bp, Mus musculus
  source 1..541: mol_type = other DNA
ccccacacccggactcaaaagctcaggggtggggagagggaaccggcggcatgggtgcaggaaccccagtacccctgaggaagaggcccttgcccttggcagaaccgaatctgctgcagagagggcccactatggggcatgtgaatgagctctactgctagtgggcagtccaagactggaccatgggctcagaacgtagcctaggcacgtgtcctggaaaacagggctgcgtagcgcgactcgcgtgggcctctccaggatctcccaggcgaggcccagcgcgtcgctgagcatctgcgtgcgactctgagggctccgtgggtggccctcccggggcgtcgtctccgcatcccctaatttaatagctgaaacgcgattccgaggaggtatttgctccgccttcttcagctcggggtgcgcgcacggcggcggggtgcgtaggcctggaaggcgtgcatgcgggccctttaaggcggcaggggcgggcttccacaaggccccgcccctcgccccgcccctcgccgccaggagcggagccgcg

SEQ ID NO: 37113 - DNA, 511 bp, Mus musculus
  source 1..511: mol_type = other DNA
acaggagccaaagccctgggtccccctatggtggcctgactaggggcgccaggccgcgaagccgcagggcgcctgcgccaaggcccgctccggcctcagtgatccgcgcgctgatccctccgcggagtcgcccgaggctgaccgcattgcccgcggagggaccgcgcggaaggcggggcttcggtgactatataaagagacgccgggcgtgactgccgccaccaccgctggtgaggagaaagccgccgcacccggtcggggacgggagggagaggcagccccgcggcccagacgtttggtttccgtggcccgcgcggaccgcggctgccccgaggcagaggactgggcggcaagatggcggccagacccgcgaggccgctgccctccggttaagccggggacgtcgcccggcgttcgtccgttcgtttgctgacggagggggttgggcggcggttcagcctgcctggcctgccgccccctgtgacgtcgcgggttgcgtggcctcctaatg

SEQ ID NO: 37114 - DNA, 326 bp, Mus musculus
  source 1..326: mol_type = other DNA
caattttgtctagatgccagctctttctgaaaccaggctggctttgaactcagagatcgcctcctgaatgctggaattaaagggaaatgtacataccaggctggtacgcgcgcgcgcgtgtagatggcgtcgccacctgacaggctggcccagaatgccattgctctaaacggctgagccatctcttcaattaacaattaatattgttatacagttcaaatgtctcagatcatatctggcaggacagtttggtcttaaaacttacataaggaccgcccacagacagaacgccggcgcgtcgggcctccagttccgcccctcaactg

SEQ ID NO: 37115 - DNA, 396 bp, Mus musculus
  source 1..396: mol_type = other DNA
gaccagcctggtctacatagcataaatatgaacaacatttggaaattttgacctttacttacttcagatctaatgccaacagttttcaagaactgtgtagactgtctgttcgtattttttttttttaaatttattaaaaacccttttccaccctgtcactgtgccaaaacagtgagggctgatgggatcccagtgtgacaggagccaaagccctgggtccccctatggtggcctgactaggggcgccaggccgcgaagccgcagggcgcctgcgccaaggcccgctccggcctcagtgatccgcgcgctgatccctccgcggagtcgcccgaggctgaccgcattgcccgcggagggaccgcgcggaaggcggggcttcggtgactatataaagag

SEQ ID NO: 37116 - DNA, 429 bp, Mus musculus
  source 1..429: mol_type = other DNA
cagtagaccaggctggcctagtgggactcagggtataacttcctccctcagcctaatgaggctcttaaatttttcaagttcatagtcctcggagggtcatatacaagaagctcagtaggggccggtacttcctgacaccagaactgactgcaaatcctttatatgggactgctcgatgctaaatcattgctggaggggcctgagaacgaaagaacgcgtgctccgcgccgccacgcttgcaaggatccggccccgatcaggagtgatcctgtgcaagccccgcaggctctgctgtgcagcagagtatcagcttcaagggtacaggggaggcgtcccctaggggctgcgggcgcggggcggggcggggctgcaaggcggggcggggcgacggcgcgcccacgcggtgcggccccggagccctctctggcc

SEQ ID NO: 37117 - DNA, 162 bp, Mus musculus
  source 1..162: mol_type = other DNA
aacctgcaagatttcccccggcgccccggctgtgaactcactctgttacaagaataatcttacagttttaggcttaagactcgcgcctgcgcaggcgaggcactcgcaccttttgcaggcgcggcgcgctgctgggggtgtgaccaggccggatgtcccaca

SEQ ID NO: 37118 - DNA, 280 bp, Mus musculus
  source 1..280: mol_type = other DNA
acccagactctaattcaccttccagggcctctcagagaagcacctcggagcttccctcaaagggggcgaagcctggcccacggcggagccgtgcctcctgaaagagcgctctgatctgcctgaggctggtatccctcacagatgcctcctctgcgggccaccccggggacgcccagcgttgcgctggtctccacaggccttggcgacatcctgacgcttaaccgctgggtggccgcctgaggggactgggggggggggaggacacctccctgcctcctct

SEQ ID NO: 37119 - DNA, 270 bp, Mus musculus
  source 1..270: mol_type = other DNA
caaaagatggaaatgagccatagatttttatgtggtttctactcctgcacaagcagcatgaccaagaagcagcccagggatggtaccacccacaaggggaccctcccctgcttgtctaagcaaattccaatttggccacttgcacatgtgatcctgtaggaacacacacacatgtgcgcacacatacactgcttggactctgaaatctgtatcttactgatgtcaaccagaaagtgacatcacagtggtcacaacttctctgtgctctgt

SEQ ID NO: 37120 - DNA, 357 bp, Mus musculus
  source 1..357: mol_type = other DNA
gccctggcagaactcactgtgtcgactacactggtttcgaacgcacccttgctgggatttatctcttcagtccttaaaataataataataataataagaagaagaagagttcgaggctagcctggtctacaaaatgagttccaggacagccagggctacaccgagaaactgtctcgaaaaaaaccaaaaataaataaattttagtaatttttgttttaagaagagacagaaacctggattaggaacccagtttggggccggaacctcggagtctagggttccagtttcccggtggaacgccggatttccgggggcggaaccggcagccacccccgcccagcttgcccagttaaaagg

SEQ ID NO: 37121 - DNA, 285 bp, Mus musculus
  source 1..285: mol_type = other DNA
cagggtctttgtgcagcacactgcccaggctcctggaccaaaccgctctcaccgtttaaagtacattgggtgagagacacaaaagagtctcgcctttgccacatgccccaggccggtttctaaagacagtggggttagtcagcgcgttcccaagcgcagtgctcgcagggagcaaggatccagctccatcctgcgtggtggtccggatccatccctctggccgcgagcgggggccggaggtgggcctgggcggtcccgggggcgggatcagcaggaccgcggctg

SEQ ID NO: 37122 - DNA, 336 bp, Mus musculus
  source 1..336: mol_type = other DNA
ggctttaaataatgcacatgtctttgtaaatagtgcaggaggctctgagccctgggctctgcacaaacctctcaaaaactgcctgaggctgcggatgtggatagtctagcaagcaagaaatccagggctgctgggtgcccccccccccccactattcctggaatttctggaagttcacagaacttagtttggggacatacatagagtccagggcatccttagggtctagggtcctctcaagtcccctctccacatgtggtcttgtacgtggctgtctgacacctggtccctcggggccccggctccgccttggaacagcaggcggcccctacccct

SEQ ID NO: 37123 - DNA, 344 bp, Mus musculus
  source 1..344: mol_type = other DNA
acccaggaccacccgcccaggggcggtactacttccagtggctcccctacagggcaatctgatggaaaatgacgctagctcatgtttgttaagtattttgtcatggcacaaagaaaattaactaacctcgttggagtgatgctgggtttcctctccccgcggagcctaatgcccaaaggccagcgggtcattttggcatcccaggctcacaatgcctgaaggccgcctagtgagcgtggacatccacgctggttctcgtgcgcgctcctcggggcttgcgactgcgaggctgggcgccccgcaaccaggaaggtgggacctactttgcggattggggctcacag

SEQ ID NO: 37124 - DNA, 666 bp, Mus musculus
  source 1..666: mol_type = other DNA
gcttgctgcaatccagggagtccggccacctgaattttcggcgagcacttgagccgggcctgctcgcacatgacccggcaagcagggatgggtgtggagacctgctcgggccctccacgagcggcgcgaactcgtgcagttggatgccgatgtccttgcacatgggaatctccaccggctggcacttgccgtctccagggcgctctaagtccatggagctgatggccgtgcacgagcctatcatcacctgcagcaccagccacaggcgcgggcccgggtgttgcatggtggcgccctcaatgtcccagcgccgctcagggccgccgctcccgggcacgggctgttgctgctgcccgcggctccgcgccccggctcgggcccccgcgcatgcccatccagtctggccggagcgctcgcggcgcccggggccaccgcggtgggcgcgcggcctcagcggagtcggggggcggcggcggagcgagcgccgctcagcgcgcaaactttcttcttccgggcgcgggcgatcgcggaccgcggtggggcagcgcgggcacaccgtggccctgggccctggagctcctccctcccggcgcccgcagctgcttccagcacggcgtcccgggatgagacaggccccgcctccgcccgccgccccgccccgctgct

SEQ ID NO: 37125 - DNA, 391 bp, Mus musculus
  source 1..391: mol_type = other DNA
tcacctttagtctgtttctaaggtaagcttgaaactagagtgaattccatggttttatgtatacgcaaatatttagatagcattccctttatttatttatttagctaactcaacactacaagccaggagccatcttgattctcaggttgtcaggttcctgctacagcgagcttgccatctgtggaaaggtaactttgaaaagtggcgcgaacctgcctcatcaatgaaaatttacgtctcaggggtggaatggccgacttttaaggccagccagagatggagtcccaactctttctctgcaagaggggcttgggtgtggtctcgagaccccgccccacacaaaaccgccacccacgtggcacagaggtctggtagctcggccgaggcctgg

SEQ ID NO: 37126 - DNA, 276 bp, Mus musculus
  source 1..276: mol_type = other DNA
cttcttgcttcggaaggagcctgcacttagaaggaaaaaggttcagcctttaagaagtgtgaggtacatgcaaggtatgtgcagctgcatatacatgtagacagacatatgtatgctttttgtgcccagccatctctgtgctgggaagcacctcacacatgaggtggttctgacagcgatcagaggttcgcagtgagcatcagcccctgagcttctgaggcagatctgagccttgtctgctggtgtttgcaaaatacctgagtgaacgccttccca

SEQ ID NO: 37127 - DNA, 294 bp, Mus musculus
  source 1..294: mol_type = other DNA
gggtctgtggcccatctccagagcgatcatgacaagacctcggtcttgagtaactcaagccaattaatttggccttgagatattgagggttttaacctccctcattgcagagtcaggatagtttttgagacagcctgcaatctgggttacatgcacacatatgctgatatacatgtgcacgtactgacacatgcacaggcacatgcacatgtgcccatgaacacacacatctgctctatctgctctaatacattaaaaaaagaagccaggatacgggcgaggccagcctggtct

SEQ ID NO: 37128 - DNA, 390 bp, Mus musculus
  source 1..390: mol_type = other DNA
ccccggcaggcagaggcggcgacgcggccaccggagagtgtgcggcggggcagctgagcggcgggtgccccgccctgctggccggtggggatgcgggaccggctgcccgacctcacggcggtgagcagaaagccgcatagcggtctgagccgagctccgaggaggaacgcccctggaggcaacggttctaggagccccggggcctccagaggcttcggtgtctccagggagtcttcaggaaggatccaggcagcctcctagcagggtcccagggagctttcggttcttcaagagtcacaagatgcacaccctcggtgtttctgagcagagtctcagggaaagttgggaggtctccaggagaccctggccaaggggaggtgagtcctctcc

SEQ ID NO: 37129 - DNA, 193 bp, Mus musculus
  source 1..193: mol_type = other DNA
tgaaatgtctttgcagactccgagggctctagcctggaccacacctgtcatttgatcaacaagttttaataacgctcgcgacgacccgcccaggtgccttgggtcccgcgggagggggtggggcaggcgcaagcgcagagagcgcgggcgcggttgccgtggcagcgcctgcccgagggagggcggcggcgcg

SEQ ID NO: 37130 - DNA, 707 bp, Mus musculus
  source 1..707: mol_type = other DNA
tacatatactccaaaatatagtaactttgtatttatataaatatgtaactgacgttccattaaacatactatgttaacgttatgttataggcccaggctagccttggaaccctaaggggctccttttagattgcatagtacaaagtaacccagcagcatctgtatttgctggtcaattgctgctcgcctggactaactgcatccggtcccatcctcccaggaaggccaggccgtgtccatgccgggcacgcatggctgacgcaagccgggcctcgggcgcgcgcacccgacggcggccgcgcacacttagcgatcgcccgcccgcgagatccccggtgcctgtggacacaggacttggggacgaaggtcgggcggtgcccgctgagcggcagcgagcgaccgagaagcagcccgcccacgaggcccctggctaggccgccgcccgcgtaacgcgcggcctcccgcagccagcgcatgcgcgtggcagcccgcgctcagcgccggctcccgcgggcccttcacggtccgcgtgcgtgcgcgtccccgctcggccggcccacgtgacccgccgcccctctcccgccctgggcgctccgagggcccccggccgagtcggacggctccagcggacgtgcgcgtgcacgcgcgccgcgtggttgggcgcggcgccgttgctccgccctctcccggcttccgcgcgccggcgt

SEQ ID NO: 37131 - DNA, 140 bp, Mus musculus
  source 1..140: mol_type = other DNA
cacatacatgtatcacacacatacatacacatgcatacatgcatgacatgcatacacacatccatatatcacatgcatatcttgacgtctgtcactctgcaccagccacgggtggactctgggccaagaggtgtggcgga

SEQ ID NO: 37132 - DNA, 688 bp, Mus musculus
  source 1..688: mol_type = other DNA
cgcctggactaactgcatccggtcccatcctcccaggaaggccaggccgtgtccatgccgggcacgcatggctgacgcaagccgggcctcgggcgcgcgcacccgacggcggccgcgcacacttagcgatcgcccgcccgcgagatccccggtgcctgtggacacaggacttggggacgaaggtcgggcggtgcccgctgagcggcagcgagcgaccgagaagcagcccgcccacgaggcccctggctaggccgccgcccgcgtaacgcgcggcctcccgcagccagcgcatgcgcgtggcagcccgcgctcagcgccggctcccgcgggcccttcacggtccgcgtgcgtgcgcgtccccgctcggccggcccacgtgacccgccgcccctctcccgccctgggcgctccgagggcccccggccgagtcggacggctccagcggacgtgcgcgtgcacgcgcgccgcgtggttgggcgcggcgccgttgctccgccctctcccggcttccgcgcgccggcgtccgctgcagtcggacaggcgcgtcgaggccgggagggtgcgggcgcgggcgcgggcggtgaccgggtgggcgcggggcggcgctggcgacgaggcgaggcgaggcggacgggcagcgccctgggctttttcagcccgcgctcttcccggccgcggcctttgtggg

SEQ ID NO: 37133 - DNA, 336 bp, Mus musculus
  source 1..336: mol_type = other DNA
gaagttcttctctccgacttgatctaactcgaaaaaaattaaagttaaatgtataactcaatgatagtgttttacctagcaatgatataactcaatgatagtgtaatactagcatcttaactgagctaggacagtcagagttcgagtctaatttatttgtctccttggcggccgccctccaacgacagtagaagttggcgcgcggccaccaaccgcgctttcgtcacatcctaggaggcctccaaaaaatggcagaaataaatttctttccaagatcatctacttaattttttagcggctcaaacagcttgcggctctcacctccggaaagagcgg

SEQ ID NO: 37134 - DNA, 391 bp, Mus musculus
  source 1..391: mol_type = other DNA
tggtgtttcacagcaatagtaacgctaagagcaaagtatgatctcagttacagaaataatctaatcagaattagaaatttaaaagtgtttaatcccaagtttctttaaagtcaaagaaaaagactatcaatataggattctgtattcatcagcattctgaaagtgggagtcaggttgccctgacatgccatgatatctaatacatatctaaaacattgtacaaaattcttaagagaattgtcaaaaataatctatacagcgtgataactctgcatccagcgaactaccatggagacagacttcattctttggactcccagggaggattattccctccgggtcaccgcggaacccggagacccgggaacccagataccccggaacggactgc

SEQ ID NO: 37135 - DNA, 357 bp, Mus musculus
  source 1..357: mol_type = other DNA
ggggaaggggctggagacccagccgctggggcgggggctttgtacaaattgggaactccagcccgccggaagcatggggggttcactccccttttttccctgatgcaccctcagcagcagagatcgggccaagactctgtggcccgcgggctcccccgtgtgcccatcacgcgcgctgcagcggtctttaggtcctaagcgcgtccagaggacggactcgcagcccgatccgccggctccctgtctgcagcagtgctccagccttcggggtgggcaaagcgtgccattaccgggtcccgcccgcgcgggggcccctttaagggagtgggcggggcgatagcatggccctgccccgga

SEQ ID NO: 37136 - DNA, 328 bp, Mus musculus
  source 1..328: mol_type = other DNA
ctaacagattcttagaatatatattccataaatgtttgctaaaaaaaaaaaaagggttggacagattgatgcgttgttttaaggtgcatgaaagaaaagctttaatattaacttgaaattttttgacctacatattatacatctttatgagatacactgtgatattgcagtgcacacatacagtaatgtcagggtagttggcatattgatgtatgcaaatattacactgtgcaacaggatattagaaattatttttctgtctgacaaatacaaggccctttgatttgaagacatgtccaattctggggctagcgcaccgtgagcgtca

SEQ ID NO: 37137 - DNA, 342 bp, Mus musculus
  source 1..342: mol_type = other DNA
tttgtccaaattcttgttagaatcagcgattaagagcactggctgctcttcccggaggacctagcttcaagattatcttctaatcagaagaaggcagccaccaattggagagtatccttctcttggcctctgcatgtaactgaggcccaggctgctccctatttgtttgtggtggccctcaaccaggatcctgaagccccctggcggcagcactgaggcgccacgctgctccccctagcggccgctcccctgcactacagcggcctagcgccctgccccgccccgccccagcctggtcggcccggccgggggaggggtcgcggtagcggcggcgtcagcgac

SEQ ID NO: 37138 - DNA, 382 bp, Mus musculus
  source 1..382: mol_type = other DNA
aaaaataattatttttacttatatgtgtatgcgtgtccctgcatgcgtaccgatgccctcagaggccaacgggacccaaacctcaaattcataatgtcagtatgactgaagttgctagaattgcaggcatgtgcactgagacagggtttctctgtgtaacagtcatggcttcctgaactctgtagaccagactagcctcgacgggggcccgcgtgcagggatccggcactgggacgcagcttgggggcgggattgggaagccccgcccctgggggctggaccaaggcggccttccaacccggttttgcagagctgagttctgggctctggagtcgccggaggcatcagcagatcccagccgagccttgagtgaggactgtga

SEQ ID NO: 37139 - DNA, 510 bp, Mus musculus
  source 1..510: mol_type = other DNA
tgactttttctaattaaaacaaaacaagtgccaaggggaggtaatgtatatcccccatcccctcttgaaatccaagcgctgtgaactttattcatttgctagctaacgaggtaacaaaaagactttactcctacatcccagtaaactcggggcccggggctgaccccgaaaggcgcggattcggggggtttggattagcgcgaaggcctggaggcagcgactcgagtttgcggccatcgagccgccaggcccgccctcccgccagcccgggcttacatcttcatggtgcccttaggccccaagttggtcctcagaacatcctgcaggccccgagccgcgctgatgttcaccgccagcgctgcctgggcccgggccacctcggccttccgccgccatggctggcctagctccgggagaggccgagaacaacgtgctctctgcggggtcttccacccggcccgcccccggcgtgcccacagagcacctccattgggtggcgacccgcgacgt

SEQ ID NO: 37140 - DNA, 535 bp, Mus musculus
  source 1..535: mol_type = other DNA
atacatgtttaaaaattcagtacgtatctatatgttaagtgctcaacatacagacaggaaaaacacttatacgcttaatattattttctttttaaaaaaatgtttaaaagaatgctttcaaagactgggcaccactgtccagccatgaagttgaagcaggactgctacgagttagaataccagtccgacatagaatgaaacaaggattactatttgtttcattattttaaaaaaattaaaacaaaatccattttagttttcaagcctaagaacagactgatcctgagtcgaccagggtatttctgtgctccccaatttacggataaccagtagctagagacaccctgcaactagaggccgacgcctctgcttcctgtcactgcagggcttttcctgcaccgcggagccgcgcagcctccacgctgcaaactcttaagcgccgaaccgtgacgctgggaacggaacctgcgcaatgacgtcgcgggtcgccacccaatggaggtgctctgtgggcacgccgggggcgggccgggtg

SEQ ID NO: 37141 - DNA, 308 bp, Mus musculus
  source 1..308: mol_type = other DNA
aaattacataagataagcatgttgtcgttgttttgaaattatccagaactccctgttaaacatgtaagatccttgccagtgtaaaacataatttatgggtttcataatgtctaataaatacttaaagaggatcattcacacttgaaatgactgaaaatgcttcagtcagaactctgccacccaacttgggtgaaacaagattttttcacagacaggcagttagtgcccagcaccgtgtgggcgggcctgacaggcaagctcccaaggagcgccctgccattggtcactgagtcagtgcgagtgcgcag

SEQ ID NO: 37142 - DNA, 292 bp, Mus musculus
  source 1..292: mol_type = other DNA
aaataaaagactcttgtcttcaaaaaataacaatgtattcctttcaaagtgtctgagcatataagacattcctgtattacagatacaccacatacagatagatatgctgtgaaaatacacactcatacacataattaaaagtttgcttgtttgtctttattggctcagattaaaaaaaaccaaaaggctttgtctccttccgccaggtgtcacccctgatgtagttctgccccaggcctagccctgctggaccttggcctgcatcatttttggcaggccagccttccatcac

SEQ ID NO: 37143 - DNA, 304 bp, Mus musculus
  source 1..304: mol_type = other DNA
aggtcttcttttattaagaaaatttctctgcaacagaaacttgaattatgtacagaattttctttctcatagtttcttttttttttaagatttatttatttattatatgtaagtacactgtagttgtcttcagacacaccagaagagggtgtcaaatctcgtttctaataagctcggctatgggagcagagctcctttagcgaaattctgcttatgtaatttaatatttccaaacacgtttattagtaaattctttataacagaaaaacagagtttttttccgggcctaggacgctgagtccag

SEQ ID NO: 37144 - DNA, 363 bp, Mus musculus
  source 1..363: mol_type = other DNA
aatgcttgctctcttgtcaaagatttgaaagagtgtgtcagctatacttacgaaactagggttctatctaagtttgcttcctaaatctaaagacctcatttatatgatatatatccttgtctttaatcttttatcgctccgccataaaaggaacccaacttaggataaaacagccggatatccagtcctgatgctggatgcacctctaaaataaagcttgcttttgattagacaatagagtttagtcttcatccactcaattttcaggtttaacacgtgttaacacacacttgagatgccagttcacttgagatgctgaggcagtcgccaagcaacttcccggcgtggtacgcagtggcacgc

SEQ ID NO: 37145 - DNA, 346 bp, Mus musculus
  source 1..346: mol_type = other DNA
aggaagccagaaaagggcttcaggtcccctgggactggagatgttttagtaagtctgtcttcttaacttatgaagccccaccttgaatgtagctgcatcatcaacacaagcaagatgctagaattcccctttctttgctattgtattctcaaacgatgaaaacagattattgccaaacatttggttataacaatgaaatagtaatgtcgtgaagagaattttcttgtcacaagaacaaagttaaaaagccagttttctttttgcacaaatgaacccaaactaggctagcataggtgtgtgcacaaccacacctgacttcagagcgctccccggcggagtgaccagc

SEQ ID NO: 37146 - DNA, 266 bp, Mus musculus
  source 1..266: mol_type = other DNA
aagtattcatgaacccatttaaaaataggtttttttaaatgtaaaaatagttttgcgcatttaagaaaaaagtttctcacatgtcacaaacgtgtctctggagctcttgattgctaccaggagccaagggcttgcccagtcgcatgcgccgcaccgcctccctggcggttgcgcgctccgccctccgcctcactcctctcggggcggttgggccgcgcgcctgtgggggcggggcccggaggaggcgaccgagccaatggggcgcg

SEQ ID NO: 37147 - DNA, 383 bp, Mus musculus
  source 1..383: mol_type = other DNA
aaccaaacaaaaacattctttagggaacttccttttggacaccttggggtggttgtatctttagttcaactcaaagatttaggttgaaacctaaatgatatttacctccgttttaagaactggcagccaaggcttcaagactgtaagaccacttaggtcttcatttgtgactcgaatgacatcacacaggtccaggagacacttctttcatgctcagagacctctaagaagagacctagctttcttttcacaggagttatgaagaacagggcttctgacggggcctctagatagccttgagccagcagctgtacaagcgcttgccctcaaccaagttggcgcaggcggcttctcttgccctcccagagaggaggctaaaaagc

SEQ ID NO: 37148 - DNA, 367 bp, Mus musculus
  source 1..367: mol_type = other DNA
gctagctctctaagccctggattcaaagtcttgccgactgctgcgatcgcaggtatgtgctaacagttatcacaggtaacttagcatttagcagataggctaccttgagctggcttatgcagctcaggatgacctagagactactggcgtaaccggcatacaaaaccatacctgatttagcaaacggttttgaaacaggttccctggaacctccagcaatcttcctgcctcagcctcccgggtgctgcagggatgacaaacctgtcgtctgtcttcacctcagcaaaggttttgtgtgcttgaacctcagtacaactagtgctgacgcgtgattgatgagtcacacccacctctcccaattgctctt

SEQ ID NO: 37149 - DNA, 150 bp, Mus musculus
  source 1..150: mol_type = other DNA
tctctgagctacatagcctacgttgactagtgtagaccaggctggcctcgaactcaccggcatgtgttttttgtttttaacaaaaacaaaaacacaaagtcattactcaggcgggcgtgccccgcagcgatcccggcatgcaccccggcg

SEQ ID NO: 37150 - DNA, 342 bp, Mus musculus
  source 1..342: mol_type = other DNA
acctttcttttttaaaaaatttaaactccgagacgcagcccagatagctcgcctggcttcagggcacttgaatccagttgatgctggggatggaacccaaggcttcacgcgtggtacggaatactttgacagctgcgtcaagcaatggccaggcagtgcaggtggacatgtgagggtcccggaacaagtcctggctcccctcaaactgcccgtgtaggcagcagcagggtatgtcagaccccaccccgcagctcctggctgccccgcggcgcggcccggctgcgggtagcctatggcggcgtgcgtgagatcccgcggccacgcggcggcgggaggcaggag

SEQ ID NO: 37151 - DNA, 397 bp, Mus musculus
  source 1..397: mol_type = other DNA
ccttttttcactggcccgctgctatggagacaaaccagccagtcctgggccctttcccaggacacatgggaaagcaggaccacggtgctgcccctatgagcgggcttcctgccaatcaggggcggaaccgcgccgggggaccagcgctgtcgttgaacgtcggaagtgcagaacgcgtgcccttgcagagagccgcttccctagataacggtggttgctgatcgaggtcgtcagtgggcgatcacctcccctcggcagacaggcgtcgctcgcgcttgtcagccaagagccaatcagaattgggtaggcctgtagccactacggcttaaggccgacgaacctcctgacaatcagggcgccagattcggccaatggctggaggcagccaaccagcgac

SEQ ID NO: 37152 - DNA, 377 bp, Mus musculus
  source 1..377: mol_type = other DNA
cttcctgtctccacctagccaggctgggatcacagcctagttgctattggaccaatttccttaagattctcctaaattgaatcagtttcaagtcctgctcttaaaaagagcggttaaaaaaaaaattctgctgggaacagtgttttgtttttgtgagccagtctcacggacaactgtccagctgggagtctcgcgagtcacagacacgtcagcgagggcctcacggtcactcggtgtcccctgccctcagggactgccccttcgggtggacagcctccggagcggccagtccccggaagtccgaagcgtcacggaaatgacgccacgcgtacgcaccgcgcgcgtgctcgcggtgccgggggcggggcgtgcggggg

SEQ ID NO: 37153 - DNA, 305 bp, Mus musculus
  source 1..305: mol_type = other DNA
cctttcccccttgatcactaattgagaaaatgccttacagttgtatctcatggaggcatttcctctgtgataactccagctgtgtcaagttgacacaaaactagccagtgtgttttctgacaattaaatgtttatttctagataaacactctataagacagggtgacctagaactcagagatacacctgcttttttaagaagtattttattaatcttgcttgtgtatttatatgccaacatttggaaagttgctttccaatgctggttcaaactcagctatcaaccttggtgaagtttaaagctt

SEQ ID NO: 37154 - DNA, 319 bp, Mus musculus
  source 1..319: mol_type = other DNA
tacctaaggagaaaattctcacaaagagtttgagaccagcttgggtcacatagtgagttttaagtcagccagggatggattcagaccaggctggcctcagtgtaactgatctcctgggttttcaataatcatgtacaaaggtcagtattaatgtggttagaggaatttaaaaaggataatattttgctgcttctaaggatccaaacaccatgatagttggctcctcattggttcgcgaatccgtgtatgcttttcccatttgcaaaacgaagacagtctgtcccttccgcgccgccgtcgcgcgcgggcggggtcagag

SEQ ID NO: 37155 - DNA, 233 bp, Mus musculus
  source 1..233: mol_type = other DNA
acctggccaatcaggcttaccttaagccatgctattttccagagattgattaagctcactctcttaaaatagcaaattctgtttataaaacttggaaagtctgtatatgctgaccatttaaagtaaagagaccaggctagccttgaactcacagagatctctgcctgccttggtccctagagtgctgggattaattccacaggtgtccatggtcacctcccacagctgaggaa

SEQ ID NO: 37156 - DNA, 426 bp, Mus musculus
  source 1..426: mol_type = other DNA
tcccatgtgcataggtgactactgagttcgaggccagcctggtctacagagtgagtcccagaacagccagggctacacagagaaacccctcaaaaaaaaaaaaaaaaagatatatatatgtgtgtgtgtatatatgtgtgtacatatacacacatatatgtgtgtatatatatcactgacttcacaaccatctgtaataggatctgatgccctcttctggtgcgtttgaagataccgtgtattcatatacataaaataaataaataaatcttttaaaaagtaaatcttaaaaaaaaaaagtgtacttacatataataaataaatcaaaaaaaatttttttttaaatttaaaatgagcgcccataataggtaggcgtaactggcgcctgtaaatgacgtcagtgcgccacttgacgcatgtgcagta

SEQ ID NO: 37157 - DNA, 297 bp, Mus musculus
  source 1..297: mol_type = other DNA
cggttaatccagggtcggtcacctggcctggaaatcgcagcaatcctcctgcctcagtttcctgggcgctgggattacaggccgtttgtagttggcagtttttatgatactaacaaaatcccaaagccgggttagggaggccaggccgccgaactctgggcacaccacattggtcagtcggaccagatctcgagctcgaggcgccaagtgctcggctgaaacgaccctgcggcgcgcgaacccttaacgcccaaggagtgcgcggctcttctactgcacatgcgtcaagtggcgcac

SEQ ID NO: 37158 - DNA, 419 bp, Mus musculus
  source 1..419: mol_type = other DNA
agtcagtgatatatatacacacatatatgtgtgtatatgtacacacatatatacacacacacatatatatatctttttttttttttttttgaggggtttctctgtgtagccctggctgttctgggactcactctgtagaccaggctggcctcgaactcagtagtcacctatgcacatgggactcagcgctgaaatacaggtctgtgtcatcaagctgaattccttttttccatttattgactgattgattgaggcaaggtctctttatagccctggcatacgtagtcctctaggaactcccagagatccgtctgcctgtgcctctggagggattataacagtggagcaggaagctcgcttgcttttgcatcttttctatttgagcctatcagagaggaagttagagcttccgctagctc

SEQ ID NO: 37159 - DNA, 222 bp, Mus musculus
  source 1..222: mol_type = other DNA
gggcctgtgtacaatttacaagtgcaatgtgaaaagaaaataacttttttaaaaaattctttcagaaaagcaaactgagtcagggtgacatcctttttcatgatcaaatgcttttgcacaagccagagcagagctaaagatgttttcccggagccagcagcggcaaggaccatacctcctgctgatctcgggagaagtgctccaaaatccatggctgtggag

SEQ ID NO: 37160 - DNA, 362 bp, Mus musculus
  source 1..362: mol_type = other DNA
aaccaggtgggttgttctctcttcaggagataagactacccttggtagcaagatgtatcctgttagcagctggacacttggtgactctaagctaattgttgcccttcaagtgtgagtcaagggagaccaggattctctctgggtgtagacttgggaagtcagccccaggttaggctgcaaacaatctgtgaagtttccaccccacaccttgtgttagcgaagggatggctcacagcattttgctctcaccctggtttccccatggcatttggggaagagggccggctgctaagctgcagctcgccccccgtgagtgtgagtgcgcgcgcaccgaggcgttcctcaggttgcgctgcctggaa

SEQ ID NO: 37161 - DNA, 302 bp, Mus musculus
  source 1..302: mol_type = other DNA
gccaagactggggcgccatccctaggccccagactattcttttttattgtttttacataaaaaggagacattccttgcagtggcacagtgcagtctgaactgcagagtagacatgctgtccacggaggtggtgatttaacattttaattaattaattaactaactaattaattaatgcaaggttatggtaacaatcaatgtgagttgttattgtcatagaatctccctgaagctggagttacagtgtaagttgggccctggaaccaaactcagttcctctcgggatgacacccaatgttggg

SEQ ID NO: 37162 - DNA, 423 bp, Mus musculus
  source 1..423: mol_type = other DNA
aagctaagcagagcagctaagccaagagatgtcttcctcgtctgccgggatggaaaacccggctgcttagagagcgctgagaaccccaagggtccctcacagcccttagcacccaccctttccgggtgcgcgcgcaagagtgggccagcttcccctagctgtgcgctccgcagcctgcgggtggcagcggcgttggcgacgcgaaggaggagtcggcgccgcagccgctcccctcgggaccgcgccccggggagtgtgagtgccgcagccgcggtgtcaacgggccgtggtgacaggctgcgggggcgccagcgcgcatccctcccccgcgacctcccgagacaagccagtgtgtccggcaggccccggaggctcgtggggtgggggcggagaggacgtcgcgctgggtccctgctcccgccc

SEQ ID NO: 37163 - DNA, 433 bp, Mus musculus
  source 1..433: mol_type = other DNA
cagtcacttaaatgactgagggccgaattaatgatttcatccatccatccatccatccatccatccatccatgcttagcttagctgagctggctccagtgatagatgataagttaccatccatggagggttagatcaagatctttttcttctagactaggaaagattatgttatattgtgcacctactgtgtgcccagaatctgtttgcatatgagattggcctagaggcaattcaaccccgggctacgggcctagtagcctctccttggtttagcggttcttgcccgtagagggaaaggcgccatggggaccaggggccggtccgcaaccgggtgggagccacagctgtcagtgtcgcacccagggactgcgcccccgcggggccaaccgggcgccagggtggagaggggggcggtggcaccggctggcggc

SEQ ID NO: 37164 - DNA, 626 bp, Mus musculus
  source 1..626: mol_type = other DNA
agattatgttatattgtgcacctactgtgtgcccagaatctgtttgcatatgagattggcctagaggcaattcaaccccgggctacgggcctagtagcctctccttggtttagcggttcttgcccgtagagggaaaggcgccatggggaccaggggccggtccgcaaccgggtgggagccacagctgtcagtgtcgcacccagggactgcgcccccgcggggccaaccgggcgccagggtggagaggggggcggtggcaccggctggcggctccggctgggcgcgccgagaagtcccgctccgagagccgcgagcgccaggagtaaggcgcgctcggtacaatccgggaaaggggtgtcctcgcgtcactaccagggaccccccttcagccccgggtagccggtggcgctggcggcgggccgcctgaaggccggagcggagctagtcctgcgcgccccgtagcagcgggcaacacccgcggcagattgcgactcccggagcgtgtcggtgccacgccgcagcgggcccaggacccatcagatcagcccgcggcggtgccgtaccggcggcacccgctgttggggagcccgaggcggccgccggggagctgctttcgcctctgccgc

SEQ ID NO: 37165 - DNA, 266 bp, Mus musculus
  source 1..266: mol_type = other DNA
tgcacccatgatcccggagacccgggtcctggttcccgtgccgtaccgtgggggctggaaggccgcgcagctctccctctgagcgccttttctctgtgtccctggggaaccccgaaatcttgcattcccagggcaccgtggcgcagcagcccagcccccctggcttgacatcagcaagctggagtagtccggggcgcgcgcgcggactacaaatcccgattggcattgcgtggcctcccggctggcgcctgcgcatcacgggcccg

SEQ ID NO: 37166 - DNA, 226 bp, Mus musculus
  source 1..226: mol_type = other DNA
actgtaactgcagttctagagaatccatgcaggtaatgctgggtatggaacaaacaaacaaacaaaccatatatattaataggttttctttcttctattgcagcaatattcctgcctaggggttacaggtgtgaaccactgtagtatttatacaaaacacttcttggaataggacctgggtccatagccttcccagtagtaagcatggccgtatctacttccgcca

SEQ ID NO: 37167 - DNA, 317 bp, Mus musculus
  source 1..317: mol_type = other DNA
cctttcctgatatgaacaaagtgttctcattttatttgaatgctagtattaatggcatgtacaccaagcaacaaatctttaaaagtattttttaaatattttattttttttaaggtgctgtgcttgacacagacactggtcttctgaaaattagttttaaaggaaatgcaatgtcctaaaaggcgcacgcctttaatcccagcactcgggaagcagaggcagtggactctgagtccgaggccagcctggtctacaacgcaggctagccagggctcgtgcaccgaagccacgtgcacgccacgcagcccggccggcgg

SEQ ID NO: 37168 - DNA, 416 bp, Mus musculus
  source 1..416: mol_type = other DNA
cttgcagaggacctgagttctgttcccagcatccatgtcagacagttcagaacgacctgtaactctgggggcacgcacatttttgtgtatacacacacacacacattttttttttttttaagaaaactggcagccagatgtggtgacatctgcccagcactcagcacttgacaggaggcaggcggatttctgagttcgaggccagcctggtctacagaagcactgagatctgataccctctttgggtgtgtctgaaaaacagctacagtgcacttatgtattatagtaaataaataaatcgtttaaaaagaaagaaggaaagaagattttcctgcctccataataaacgagacaccattgattctttattcctgcttggcttgatgcagaattgatgccaaccagtaatcctgcct

SEQ ID NO: 37169 - DNA, 378 bp, Mus musculus
  source 1..378: mol_type = other DNA
tattatacatttgtgagccaccatgtggttgttctagagatagaactcaggtcctcaggcttgtatgccaaggactttatctgcggagccatgtccagtcctggtcctgtaaagacaggacttctaaagtcaatctcacgtaggccaggctatcttcaaaagccctggctgtcctggaactcactttgtagaccaggctggcctcgaactcagaaatctgccggctttatttatttattttattaatgctgtcttcagacaacaccagaagagggcatctggttgtggaagagcagtcagtgctcttaagcactgcaccagctctccagaagactaagtctaagagcctgcagcagaaaccacttcttctttttagtg

SEQ ID NO: 37170 - DNA, 314 bp, Mus musculus
  source 1..314: mol_type = other DNA
gaagcagagctgaccactgtatagatttaaataggtgtataaacatttactgataacaaatcatgagtatattttaaacaatttttggtgttcatataattttaccttttattaaagatgggacctgccaggtgtaaggagtgaggtccaggccagccctggctgactcgctcccatttaaaaagggttctgtgtttaagcagcagagcctgtgtatagccctggctgtctccaagtactgggtatttatttatttttttaagatttatttatttacttatttatcatatgtaagtacactgtaccattccgaa

SEQ ID NO: 37171 - DNA, 518 bp, Mus musculus
  source 1..518: mol_type = other DNA
tcattgatcttatgaagtagttgagaaaaataaatataagaaatggaaatcacgagttcgtcccaagtttgggcaagtccactctggttgcttctaaagccagctttgaaaagggggacctccccaaatcaggcgacaggccagccccggggctcccctggcctttgcaatgtccctaactttgcaatttgcaaaggaaggggggggacactaagttctaggtctcaccccactcccctcccccatccgggcggccgcgcaggccccaggtgcgcgcgcttccattgacagtccaagccggagagggccgggcgccgcggcgcttcgcctcggcctagaggggggcggtggggagcgggttcagaactacaactcccggtgggcggtgctgcttgtgcgcacgcgcagcggcaccttcggagaaaagggggcaccggcggcccccccgcttccctgcacgcgcttgccgcccgcctgcccccccccccccccggcgtctggcgacccagcgtggagcg

SEQ ID NO: 37172 - DNA, 496 bp, Mus musculus
  source 1..496: mol_type = other DNA
acagctaagttcttttaacttttgcatttaacttagatgaacagttagttgatactcttcgaaagtcattgatcttatgaagtagttgagaaaaataaatataagaaatggaaatcacgagttcgtcccaagtttgggcaagtccactctggttgcttctaaagccagctttgaaaagggggacctccccaaatcaggcgacaggccagccccggggctcccctggcctttgcaatgtccctaactttgcaatttgcaaaggaaggggggggacactaagttctaggtctcaccccactcccctcccccatccgggcggccgcgcaggccccaggtgcgcgcgcttccattgacagtccaagccggagagggccgggcgccgcggcgcttcgcctcggcctagaggggggcggtggggagcgggttcagaactacaactcccggtgggcggtgctgcttgtgcgcacgcgcagcggcaccttcggagaaaaggggg

SEQ ID NO: 37173 - DNA, 410 bp, Mus musculus
  source 1..410: mol_type = other DNA
aggtatcctttcagttcgtgagtgttcaggaccctaaaacagttagagaaaaacctgggtccctcccttctgaccttggacactccaggcataagagtgacaccacctagggatcctccgggcgtcctctgggtgaccttgagctgggggagtctcgaggctccgaggttgtgagtcctcccccacggtggcacggggcgggccgtgcgggtcccagagcccgggctcggcttcgcgctcgctccgcgccccgccctccgccgcagcccgcgccgggggtgggggccccgcgcagcccccggccggccgcccgcaccgcgtccgccctaccgagtcctggccaccgggcccgggccggggcgcccggagcgcttggggagtgtgttgtgtgtatgggaggtcccttcccc

SEQ ID NO: 37174 - DNA, 391 bp, Mus musculus
  source 1..391: mol_type = other DNA
tctctctgctgtgcctatcccagcaaaggcccctggttaccaaccaactgctgggtttggagggggagggtcccccagtgttcccctcccccatttagtagttgtacctgtaatcccagtatttgggtcctaaaacaacaacaataagggttttagggtgtagttgtagccaggacgatcaggtatcctttcagttcgtgagtgttcaggaccctaaaacagttagagaaaaacctgggtccctcccttctgaccttggacactccaggcataagagtgacaccacctagggatcctccgggcgtcctctgggtgaccttgagctgggggagtctcgaggctccgaggttgtgagtcctcccccacggtggcacggggcgggccgtgcggg

SEQ ID NO: 37175 - DNA, 251 bp, Mus musculus
  source 1..251: mol_type = other DNA
gggctctacccctgagccccgcccccagcccctccctggggttatcctaggtaggtgctctacctctaagccaggacccaacctaagaggtggattcgttccagtctgccatgatttaggtcctatttcaacactgaaatttgttctgatgaactagacagagtctcactgtatggaatatttacatagagaacccggagaccaggattgtgggcaccgcccccaatccgggccccgccttcctgcgcccg

SEQ ID NO: 37176 - DNA, 472 bp, Mus musculus
  source 1..472: mol_type = other DNA
tgagatctgatgctctcttctgaggtgtctaaagacaactacagtgtactactttgtgatagctctgaaatttgtgatagtacatagctctcaagtactggaattaaagacctggaaagcatctctttaaaaatacttatttagccgccagtacttgggaggcagaggcaggcggatttctgagttcgaagccagcctggtctacaaagtgagttccaggacagccagggctacgaaaaaaccttattttagcaagaccagcctggtctacacagtgagtttcagagccatgaaagtaaaaagaaatgaaatgattttattttatcttatttaatgtcacaattaaataagatataataaaatagatcactgcggcctctagcggccagggatggctacgcggtgctctctgcgcaggcgcaggaaggcgttgcccggaaaccaggacccagacttccgtcaaagcgcgggg

SEQ ID NO: 37177 - DNA, 254 bp, Mus musculus
  source 1..254: mol_type = other DNA
aggcagcttgtctatccagctgtctctggcatgctggaaggatacccccaggagtgtgtgcacatacatgtgcatgtgtgtgcacatgcacactgcacataagcctgtgtgtatgtacatatgcatcaggataggaaccctggttcctctggttccaagttgtccagcttggtgagacagggtctcactgtagctgtcctagcttatatagaccaggctggcctcaaactcagagctctgcctgcttctgcagg

SEQ ID NO: 37178 - DNA, 371 bp, Mus musculus
  source 1..371: mol_type = other DNA
caagccaggccagccatccagggtttcctgggcccccaggagccttcctcaaagctctcattcagaccatgggaagtcggcctctgttcccttggggatggcaccggaagacagctgctctggggcttgtccttgtccctagagaggcccaagcacttggtgctgttgtccaaggttctccagatcctagagaagtggggatagagcctagatccttctcagagtcagagcctagctctctcttcttagggtctgagcctcagtcagagcgaagaccccaaagacactttggctgtttcctgtctcaggctgaaaaagaggccttcctcagccacacttctgcctcctcccctgtggtgtggccacacagg

SEQ ID NO: 37179 - DNA, 386 bp, Mus musculus
  source 1..386: mol_type = other DNA
atttctttttcagagcagactcctgcaaaaataaaacatatctaatctcttatcagtagacagagaatacaatttgttttgtctttataagatttattttgctacctagaacaggcccagggaccatttgtcctgaagaattgtgcccaagtgggaccaagtggggcagacctagggcctgtcacccaggccagcctgggcctgggagggcagagcgtgcgcgcggcgccccgggggccggccgccgcaccacgtgggccgcagagcgcgccggggccagcagcgggccccgtcggcccaaggccgggcgcggcggcgcgcgcatgcgtgcgtgcgacttgcgatcaggcagcgcggcggacagccccggtagcggggcgggcggg

SEQ ID NO: 37180 - DNA, 464 bp, Mus musculus
  source 1..464: mol_type = other DNA
aagccagggcttcgagcatgctaggcaagcactcttaccgactaagctatataatacatttctatctttttttggtaattaactttcagtggcttggaccagagaagcttcaagatgcccggtgggcggctcctcccagctgtgccgccgcgggtgaaactgcccgccgaagaggaggagccacgcagaggcagcttcggccttcagcgccacggaagacccaccattaagggggcgtgccctctctcgaggaggcgcagtcccaagcagggctggcagcgtggctgcagctcaccggccctgacagttccaacaggcagagccggcaagcctcttctcaccctgcagagggcggatctgtctccgaggggcgaggctgcagctgcggaggcggagccgcgcaggggcagttccagccggccgcgtcgcgcgcgcgccccgcccctgccgcagctcgcaggccc

SEQ ID NO: 37181 - DNA, 333 bp, Mus musculus
  source 1..333: mol_type = other DNA
cactgtgccttgctcaggggcggtgcaaagctgtgcttggtctctgcaaccatagacagatggctaagacctgtctcaaccatgatgaactagatctaacccagttttgggtaaagcctgtctctagccaggcttggctgaggcgcgggacagctggcctgtgtccccacactgggcctggggcccaggcagaggggcgggggcctggctactccagccttggctagggctgggtcctggcaaaggccccccttgcatttctggcgtgtgtgtgtgtgtgtgcaggaaaatagacccatacctaggaggcttgcaagtctgcctaccaggcag

SEQ ID NO: 37182 - DNA, 222 bp, Mus musculus
  source 1..222: mol_type = other DNA
ggggttgcatggcttgcaaagccccgttttcaatgactgtgagtctcatggcattgactggaaatgcacagggagctcttttccctcacgcgaccgcatcgcggtctcgcgccccctggcgtggtgcaaggcagcgttcagcttgaggatgctaaaggtccaacttggaaagtaaggccatatcatgtggcaactgggtccccatggcaactggacccccac

SEQ ID NO: 37183 - DNA, 318 bp, Mus musculus
  source 1..318: mol_type = other DNA
gactccacaatgggagaagtcccctttgcttcaagtctcatggcccagcaaattcctggcattgagttggaaggcgctgtcttcctgtctgtgtgtgactgtgggtacccatgcagagacaaagggcttcatatcagatggaaacttactctgacccagaacccccataacaatgttggatgtggtgatggctcactagccagctagtctagcctcattagccaaccacgcaggcgcacacgcatacatgcatgcacacatgaacatgcacacacatttaacacgcatgcaccaggaactgaagctcctcagagcctg

SEQ ID NO: 37184 - DNA, 294 bp, Mus musculus
  source 1..294: mol_type = other DNA
ttcttcggtcctgatcgatcagcagcggtctgagcacaataagttttaccagctgtttaactactaagattgactcaaacaaagttcttgggttgttttggattttcagaccctaagaaaccatacaaagcttgagaatctgagtcccatgcctggaagtcccatggtaggaggaggaattaaatcccattcaaggagttccaagtcaccctgagaaacttttttatttgtgaaaaaacaaaaacaaatcctcacgtgagtttgagatcttctcacgctggaggcggggccagg

SEQ ID NO: 37185 - DNA, 534 bp, Mus musculus
  source 1..534: mol_type = other DNA
gctgtttaaattgtgttagacatttgtgcatcagaggacatgtgtgtctcctgtcacagaggtcccaggtccttggggcttggaagcaagccgcctctacaccctgaggcactatggctgggtggggaaagcaggtgatctaacttcctctggccaacagtaggaaagttgctgttgagtcccattaatgacaataatagccatgatggtggtgataaagttgatttggtaaaagcaacatctcttggacacccctagactcttgtctcacgggagcctggaatgagtcttggggaccttcccacgggagcccggaatgagtcttggggaccttccctacccggtgagcatccaggtgctctaggctggtgactcagtgtctgtgtcccagctgacctcagcgtgagcctgggggctgggcgggtgactcaggggcccaggacaggggcctctgaacgcctttgttggcccaagctcaggacagagaactggtcccgagggaggcctccgggactgaaacccctccactgcagc

SEQ ID NO: 37186 - DNA, 352 bp, Mus musculus
  source 1..352: mol_type = other DNA
tctgcttgcctcagcctcaggcaggagccaacacagccatgtaggcttgccaccagcccaggtcacatgagcccctgaggtgcagagacttggacaaggccagagtgcttgtgtcaaagcctgagggacttggagcaggtgctacaacgggtgcctccatcctacgcctcccgcgctaaagaagacggagttggtgatttgcacttcaaatccttgaagcgctgtatagctctagagaattgaagggagggagcttagacgaccccgccctcctttagccaaatcctttctcctatggtgacgggacacacgtcactgtcccctgggccagaagagcgagctccaccctcct

SEQ ID NO: 37187 - DNA, 415 bp, Mus musculus
  source 1..415: mol_type = other DNA
gcccggagccatctctattcagtgcaggtaactacagtacaaatccctggctaagggtttaatcctggtttttcaagactaagactctgtcagttaatcgattaagtgagtcttgaggacgtgctctggggagcctgacagggctcccaacgggagcatcactcctggcgcctcctgaccatgccggaggcacagaggacagaggagcaggccaggtggggtccgctcgccagccgagaaaggacttctcagagtgcacagaacccggcaggattacgtaattccgggagctagagcagtttaaaatgttgcgaaaccgtgcaagggcctcttacagccccgcctacgcagagtccccggtggctccgcaagcgggtgcctggcagtggtgaccccgtccagggcgtggcagggg

SEQ ID NO: 37188 - DNA, 330 bp, Mus musculus
  source 1..330: mol_type = other DNA
ggggaaaggtcattccagagctgcccaccctttcccagcttgtgggccaaaccagggagtttgcattggttggcttcgcaagattagagatgagcctaattttaaaaatattttttctctccttccaaggaccgaattcaaggtctctcagtccattcttattttacactgaaggaaacaaagaaatggatacccagctccagtcactagtcgacactgcaccctggcggcgaccgggagtcgggtcacgtggccagggtttcacctgccctgctgggcagggacaatcaggccgcttgttccctaagccggtcgccatggtgacaggag

SEQ ID NO: 37189 - DNA, 403 bp, Mus musculus
  source 1..403: mol_type = other DNA
cagttaatcgattaagtgagtcttgaggacgtgctctggggagcctgacagggctcccaacgggagcatcactcctggcgcctcctgaccatgccggaggcacagaggacagaggagcaggccaggtggggtccgctcgccagccgagaaaggacttctcagagtgcacagaacccggcaggattacgtaattccgggagctagagcagtttaaaatgttgcgaaaccgtgcaagggcctcttacagccccgcctacgcagagtccccggtggctccgcaagcgggtgcctggcagtggtgaccccgtccagggcgtggcagggggaggagggaccagtcccacgtagcgcttccctggtcctggtcgcaagggggcagggctagcgctgtatggctacgccc

SEQ ID NO: 37190 - DNA, 313 bp, Mus musculus
  source 1..313: mol_type = other DNA
aggacagaggagcaggccaggtggggtccgctcgccagccgagaaaggacttctcagagtgcacagaacccggcaggattacgtaattccgggagctagagcagtttaaaatgttgcgaaaccgtgcaagggcctcttacagccccgcctacgcagagtccccggtggctccgcaagcgggtgcctggcagtggtgaccccgtccagggcgtggcagggggaggagggaccagtcccacgtagcgcttccctggtcctggtcgcaagggggcagggctagcgctgtatggctacgcccagcctggaccacgtg

SEQ ID NO: 37191 - DNA, 319 bp, Mus musculus
  source 1..319: mol_type = other DNA
ttccgggagctagagcagtttaaaatgttgcgaaaccgtgcaagggcctcttacagccccgcctacgcagagtccccggtggctccgcaagcgggtgcctggcagtggtgaccccgtccagggcgtggcagggggaggagggaccagtcccacgtagcgcttccctggtcctggtcgcaagggggcagggctagcgctgtatggctacgcccagcctggaccacgtggcaggacagccctaggaagcacactttgcgggctgtgggcatgctccgctgggcgcgagcgtggagggtcccccgtggggtactcggtgcct

SEQ ID NO: 37192 - DNA, 270 bp, Mus musculus
  source 1..270: mol_type = other DNA
agagatgctcaaaatctcaaaagtatttttctatttccaatagaggccaaggccagcctgatctaaaaaataaaatggtaagcatgcctggttccttgggtttttgttttgtgtctgaagacagctacagtgtacttacatataataataaataaatctttaattaaaaaaaaaaaagaattccaacccctcgtggcagggcggggggggcctaggttgtcagcgccccctggaggcgacggaggtgcacttgctccttgcgccttgcct

SEQ ID NO: 37193 - DNA, 275 bp, Mus musculus
  source 1..275: mol_type = other DNA
aggctggccttgaactcagagatcctgttcagctttcaaacctggcattgaggctcatgtctgcaaaacctgtactcctgtggctgaggtaggagcaggtgttcaaggctagcctgggctacacaggttccactccagctcaagagtcagaatccagggtctatctaaggaaccaggtcccgagggctgggtttgtacccctttccccgtaggcggagccctgggcgggatgactggggcggggcgcgggctggcgctgcgcagccgcggggcgg

SEQ ID NO: 37194 - DNA, 468 bp, Mus musculus
  source 1..468: mol_type = other DNA
gagcactgactgctcttccaacatacatgcaggcaaaacaatgtactgtatgcatttatatatgtatacgcacactcacaaacacacattttaataaaatatgtgcacaataaaatgtgtatttattttatgtatatgagtacactgtagctgtcttcagacacaccagaagagggcatcggatccccatggttgtgagccaccccccctcagctgtttgagtacagaaatttgtggagctttgttgatttcaagttagaattgtaagtttaaaattgttaggcaagagctagccagatagctcagagggtaaagctttatgacttgagttcaatccctagaaattgatcttgtgcttgtgcatgtgcgtgcgcgcgcacacacacacacacacacacacaagaatttaaggtagaaagagtccctctaactgattattgcttcttaggagaaatatgacccagaatt

SEQ ID NO: 37195 - DNA, 332 bp, Mus musculus
  source 1..332: mol_type = other DNA
aaggaaccgtcgaagccctagagccaccgggagcccgagggcgtctgcttgacgccaggtccgcgcaggtcctggtcgctgagctgccgcgcgtgaagcgctcggcggcctcggcgctcccggggttgcgatccggatggtacggtgcgggagtaagtcctccctcgcgagcacaaacccgggctcggaggcaacccccggacctgccacctccatagcggtgacagggtccaccccaggcagcgcgcggccgccatgttgtggctgggagggggcggcgccgaggcagccaatggaggcctcgaatcctcgtccccaccttctagccaggc

SEQ ID NO: 37196 - DNA, 241 bp, Mus musculus
  source 1..241: mol_type = other DNA
tgtagaggattcagatattatttatgtcaatggttgacatgacaactcagtgcaatcatgcatttaaacagtgacagaccttataccacatatttaaagggacgcccataatcggggcgactcgccgatcccgcggggctcccagctccggcggtctccggctacgagatgccatctcgatggtatggcaacgctgcctggctagaaggtggggacgaggattcgaggcctccattggctg

SEQ ID NO: 37197 - DNA, 240 bp, Mus musculus
  source 1..240: mol_type = other DNA
tggtatgacaaacatttcacatctttctataaagcccagacacaaggatttgtcatcttttgagatttttaaaatctgttttattttgtaaattaccttttattaattagtaacagaaactcaggaagttggcgcccagccctcgggaacaccccggcgggagatctccgggtgcggcccgccccctatctgccccacccccagtctggccagccgcggcggctgcccctttaagagcgg

SEQ ID NO: 37198 - DNA, 296 bp, Mus musculus
  source 1..296: mol_type = other DNA
aagtgaactcttagagtccacttctgaactttgaggatgaccctgaatttctggttatccatctatcatctatctatctatctatcaatacatatggatctcagaggtcaaattttaaaaatcgagtattttcttccaacatgtgggtagggtttgaactcttgtcctcaagcctggtggcaaaggcttttcgagtgttacacttacagaatcacccccatgctagtgtctgtggttcggaggatcgaacccaaggctttgtgcacgctagcacgttaagcgctctccagagcgcc

SEQ ID NO: 37199 - DNA, 339 bp, Mus musculus
  source 1..339: mol_type = other DNA
ctcgctttgggctttgcgaggctgtcccataccaacggacagtgttgccaggccttgcctcttcaaacgcgcgaggttcagtgcgcaacggacaggccctgccccacagggaacggaaccttctggcccgcccctcgaggcgcgcacgtcccggccccgcctcacagcgcccgctaacggccaggccccgccctcaagtccgccctgcagagcgctccaacggccattccgaggtgcgcttgggaccaagccacgccccaaagaggccaacgctggccagccccgcccctcgaggcgcgccaactgtcctcccccgccccctcgtgcgccgagacgtga

SEQ ID NO: 37200 - DNA, 334 bp, Mus musculus
  source 1..334: mol_type = other DNA
aatatttatgtcctcagtacttggtccaatgcacagaacacaggcaatattcgtgtgataatgactcccttgaacttgggcagaggctcaaggccagcctggtctcagggctacacagagaaggaaaccctgtctcggaaaagcaaaatgaaataaaattttccggtcaaatgccatggccctcgcctggcccacaccacgtgcggacgacgatgggctcagcctggctggaggcgcacagcagggacgcccccgggcgggtgcgcaagcgcgctgaggccttgagggcccaaggggcgggcgggtgcgcgcgctccctcgcgcacgcgcgcac

SEQ ID NO: 37201 - DNA, 642 bp, Mus musculus
  source 1..642: mol_type = other DNA
actatatacacacacacatatatatatatacacacacatatatatgaatgaatatagtcttttacatatgtacatacagaaaaccttctttttcaagatttatttttaaaggatgttacgtgcacgtgagtacgtgcacctgaggagggaactcctggagctgcagccggaggcaggttccagctacccgatgtgggagctcttgggtcctctgaacgagtacaagatcttagcccatatttttaaagaaagttcttcattgtcgccccaatgcggaacttcagtttggagagggcctgagttcccgcccagtacagctccacccgcgcatccccgggcgtggccgagcgcggcccctttaagaaggggggcggagcgcgagtggaaagacaaagcccctggccgcgcgctccccctcccccctccggcgcagcacacggacagtgagtgcccggatgtcggtgtcgccgtcggtgacagatggcgcaatgtctgtatcagtgacagtggaggcccgtgctgcgctgcaactcaacttcgcggctggagcccagggggcgggactcgacctcggagcggcagcctctctgagccaataggctgcgaaggccgacgagccctccgcctatcggagcctccgcc

SEQ ID NO: 37202 - DNA, 562 bp, Mus musculus
  source 1..562: mol_type = other DNA
tgggctgggcacgtggcttgtctagcctgggttccatccctagtctgatgccttcttcaggaatgtctgaagacagctacagtgagtgtacttacatataataaattaataaaaaaaattcaaggtgagcttgaggccagcctgggttatatgagaccctgtctcaaaggagcttgggagcttgggatggtcccctcccacctgggaaaaagtcccgcggactgtggcagagaggcgcggcacctttaaagcgcgacgggggcgtgccctgagggactgccccgcccctgggcgtgtcctcctactgaccacgccctcggggtgccgagccgcggcggctggcggcggagaccacgccggctctggctggagtggcggcggcatcggcggcggcggcgacggcggtggtagcggttgttcctccgaaggcgccacgcgctccgggacacacgtgggcggccgagagatggcgcgggagccgcgacgtggcgcgcagatcccgggacgcgggatggagcggtgcgagtgagcccgagcggccgcgccgcggggcgatggccgt

SEQ ID NO: 37203 - DNA, 265 bp, Mus musculus
  source 1..265: mol_type = other DNA
catgctacaatctctttctgtcaatgttactaaaatatgaacttttaacatgtgaaatcttggagccagctgtggtagcaaacatcttgattcccagcacttgggagacagaggcaggtgactcagtttgcttttgtgacagaacgccaagcataacattgagaccaaaggaaaggctttttttgtgccgcataaaatgctttgtcccatcacgtgtgcagcgcgtgctgggagaccctcagcgcatgctcgcatgctcgctgcg

SEQ ID NO: 37204 - DNA, 412 bp, Mus musculus
  source 1..412: mol_type = other DNA
atcattggtcctcctcatcaatgttgagaattgatcccagggctttgcacatgctaggcaagcacaccagtggggcaggtgctacgcccccagcccctccctgggggattctaggcagggactctaccactgagccacgccccagcccctccctgggggattctaggcaggggctctaccactgagccacaaaggcacgtgctttattactgaacctttcatccggtcacagggagaggctgacacaggacagagtctgcgtagccttctgagttcagtcttcgaggccagcctggtctctacagaggctacactgaattctaaaaagaaagtagacttttttcattctacatacaggacctcattatgtagctgcgcgggttgtacaaattgttgcggcggccgtaaagcc

SEQ ID NO: 37205 - DNA, 238 bp, Mus musculus
  source 1..238: mol_type = other DNA
gctttatctgactcagcaaatcagactcatactccagtgggagtggtgcagaggccactggccgggtcagcagggagcctgagtccctggccccagctcacccttcaggagctcggctctaatctgctgttagagcctgaagatgcagtcatctccagtgaagttcaccgtgtgtttctgtctgtagttacagatacaaccacatccagctgctgccctcccggcgaggggaccagct

SEQ ID NO: 37206 - DNA, 344 bp, Mus musculus
  source 1..344: mol_type = other DNA
ttccaggccagcctggtctacagagtgagttccaggacagccaggtctatacagagaaaccctgtctcttgccgttgaccctcaacctcaagatgtgatggtgtgaatgtaatcccagcatacattcaagcaaaacacacattttaaaaaattattttgagacagggtctcactggcctgattgacttagaacccaaatgccgggattacaggcgcgtgccaccactcctctgcagtccaggaaactagggctctcgcgccgtgctccgcacgcggcggcggtttcccctttccacccggcgcgccgcgtcgacgacagtgacgtcggcggcggcgcgcggcgc

SEQ ID NO: 37207 - DNA, 392 bp, Mus musculus
  source 1..392: mol_type = other DNA
ttcccagtctgtaggtgctcccagaacaggcaaagagatctgttagtttggaaagctctggggagatccacaggccagtatttggggaccctccagaacggtcctccagaacgggggacttcgaggaccactaaggccgccatcgcgggtccacactgttccccagcaagccggtgaagcatggtgtgcagccatgctctcgggaactcgtggcgccggctggaccgcaggtcctactgctcaggctggtctgtggcagccaggccccacccacaagccttcagagcaatcatagtgcttcgccctgaggcggcgctgtcaaccactgtccccgttagcgccggatccccgcgggtagggaggggcgggaggctccgcggggatcccggggc

SEQ ID NO: 37208 - DNA, 472 bp, Mus musculus
  source 1..472: mol_type = other DNA
tgggaacaagccatcatctcaggatggatggatggatagatggatggatgtagagatcaatggaggacaggtagatgtacgtatgtatgaacaggtagaccaatggatggatagatagatcaatggatgaatgggttgaatggatagatagatggataggtagatgtatgtgtaaatgtatgtatgtatgtatgtatgtatgtatgtatgtatggacaggttgatcaatggattcaaaggatgtatggatagatagatggatggataggcagatcagtagatggatggatggattgatggatggatggatggatggatggatggatgggcaaagtcatctaaaacattttcccttggctgtggcccaggcaggatgacagcccaagaaatgggcaacaacttccccattttttggaccacagtgctcaacgatttaccagagcctctatctcctgagctgtccatataaaga

SEQ ID NO: 37209 - DNA, 260 bp, Mus musculus
  source 1..260: mol_type = other DNA
tcctcagactcagaacaagtccgtggacactctgtagaccaggctggcctcgaactcattaaaggcgtgcgctgcctttaactactgccccgcactgcatctgatgttttgtggctgcctgtaaggctgtccctagagaggcgcagcttctcacttgctacatagtgagacactatctaaaaatttcaaagtgttaagcagacttctcgccctgcgggcccatgtccccgcctaggggcggggctcacgcgcagattacg

SEQ ID NO: 37210 - DNA, 449 bp, Mus musculus
  source 1..449: mol_type = other DNA
tccctcaatgaggatctactagtagttaatggctgttgggaggagagacatttgctcctgaaagcgactttaatgaaactcactgggatatgatcaaagtacattatacacatcataatgaaaccattacttggtataataaatataggttgattaaaatttttaaagggagcctgtaaaggtgtttgtgtgtgcacctccacaccttctctcaaggagatgataaactcaaccttaagttttcatctaccctccactcaaacagatgtaatcaaatgtttttttggttttgtgtttgtttgtttgtttgtttttaattaaaaatcaagaagaaggaagctcctgaggagcggaggactccacgggattgggccttcccccacccccacccccccatggggcggtgcttgaggagaggccagtcttccgctgttgccaggggagaccgc

SEQ ID NO: 37211 - DNA, 420 bp, Mus musculus
  source 1..420: mol_type = other DNA
caggcgtccgtgagttcgaggccagcctgaagtttggaggctaagttgcatataatgcaactcgcatccggaccgcgagccggactgactctgtcccccttccatgttggtcgggatgtgagccgggcggcccagacccggggacgcgtgtgccgcccccggagttccttcctaggcaggcagccccttgtacctgggccgaagtgctgaagggcgccggctggcaggagctacaagaaggcgcagtggccgtctcgcgagagaagcgcaagaagcttgagccaaatctcgcgagacaggctcggccgtgtggttccttgtctagcacgccctagacccggcgagcgaggcctgacgtcacagaagtcatctctgggctccggccacttccgagatctcgcgagagaggcccggcttcac

SEQ ID NO: 37212 - DNA, 396 bp, Mus musculus
  source 1..396: mol_type = other DNA
gttctgccacccagacaacttagactggcctcaaactcactgtagttgaggcttagtcaaggcttctggtagccagatttctgaggggccccggggaccagcggggcctctatcagccacggccattttcagctgacaaaagacctgagatcaccggtgagctgaggccagcagcaggacgccacacgaggtggcgcacagcggggcgtggcccagagtccgggctaggcctgggagcggggcttctcggagagcgccgcccggctgcgaggcgtgccggcgggacctgcctcaagagcgcgcacgcggcttttgtgggcggggcctcggcggggttggccacgcctcacccccgcagcctcccgggccgtggtagcgcctcagtggtgcgggctt

SEQ ID NO: 37213 - DNA, 511 bp, Mus musculus
  source 1..511: mol_type = other DNA
gcagcaagtgctcttaaccagtcctgaactttagaatagttattatttttttactgaggcctccgtcccagacctaggatcgcggtcgacaacgcgagtactcgctcctccgagcgggtcaggtggggagatgctgcccaccccgccccgggacgccccgggaccccagccggcctcttccagggggcaggaaagttgggcctggctgaggtcaggagctccggggccgcctgacctgctgcgcgacttctgtcaggctccccggcaggacgtccgaccggagccccacctggagcgctccagaccgggttgctaggggcggtcccaagattccgcctaatccgtgaagccgggcctctctcgcgagatctcggaagtggccggagcccagagatgacttctgtgacgtcaggcctcgctcgccgggtctagggcgtgctagacaaggaaccacacggccgagcctgtctcgcgagatttggctcaagcttcttgcgcttctctcgcgaga

SEQ ID NO: 37214 - DNA, 306 bp, Mus musculus
  source 1..306: mol_type = other DNA
cccaggggactgaagcaggagcagtcaatgctcctggattacaccagggagtaatctctgggagcttgggatcccatgatccggtgactccagagcctgaggccgaggccctgcttggtatatgtcccaaatcccaggacgctggagttggaggattgatttaaaaaaaaaatcccctttccagctggtcgggggaaggggaggagagatacaacctgcctgccccctgctggtcccgtatccgcagcatcaggtactccagacctgcagatggcggccaccaggcgggccaggaggccgcctcta

SEQ ID NO: 37215 - DNA, 338 bp, Mus musculus
  source 1..338: mol_type = other DNA
tcgaggccagcctggtctacaaagtgaattccaggacagccagggctatacagagaaacccttctgaattcgaggccagcctggtctacaaagtgagttccaggtcagtttctgggtcagaaagatactcagtgaatcttgccggtgtcatgagacctccacaggtgtgccatgacatgtgaaatggggctggccccaggccaccgcccttcgttttcttcaacaagagaagtttccagatgggggcagaaccttcctggccccgcctgcccgccccctttgcaagcttagggggaggaatgcagaggggaggggcggcgaggggcggcccctgagac

SEQ ID NO: 37216 - DNA, 212 bp, Mus musculus
  source 1..212: mol_type = other DNA
ctgataccgggatctaaggccttgactagtgtagactgcttccccgccaggggtccccagcggctgcgggttagaccctgccccccatccgcgcgcaatgcccactgggagatgtaaattcagcttgctgcaggtcacaggaccgggcgggaccgggcggggcgcgcgcatgcgcgagtacgtggggcgggaccgcagggggttgtccgccc

SEQ ID NO: 37217 - DNA, 385 bp, Mus musculus
  source 1..385: mol_type = other DNA
cccaggtcatcccctggcaccggcctgtgcgccccgcaggcggaaggctgaggctggtcgggggcccgagcccgtgccgcggccgcgtggaggtgctgtacgccgcggacgcgcgggtggcctgtcgcgaggcgggttgcgggcccgcgctaggcgccacgggccttggtcattttggctatggccgaggccctgtggcaccggtactgaggcccgcctcgggctggggacagcacaactgcggccaccacgaagacgccggagcgctttggggcccgaccccccatgaacgcatgcgctcacgtctatgggcgggccttgcgcaggagctccctgctgtgggagcgagcggaagctgcgctctctgctgcactgcagcggaagt

SEQ ID NO: 37218 - DNA, 283 bp, Mus musculus
  source 1..283: mol_type = other DNA
taaacttatgcatgtacatatacataaataaaatatcaggacccaggtcacaactgtctgcagtcagacacaaggaaagttttaattctaacaagattttgttcttctcagagtctctatatagccattatgtattttaatatttatttatttattatatgtcaagcagcccgtgctccaccaacaggggtgctcggcgcacaggggtgaggaacactcgggcttctctgcaacctgagcccagagggggagagatggcaggaggaggggcacctggcctcct

SEQ ID NO: 37219 - DNA, 331 bp, Mus musculus
  source 1..331: mol_type = other DNA
gagtccctgcctagaatcccccagggaggggttgggggcgtggctcaggggtagagcccctgcctagaatcctccagtgaggggctgggggcgtggctcaggggtagagcccctgcctagaatcctccagtgaggggctggggcatggctcaggggtagagcccctgcctagaatcccccattgaggggctggaggcgtggctcagtagcagagcccctgctattcaggaaaagaattaaaatttgaataggatcctgtcccaggctgaattcgaaggcagcctagtctacgatacaactataacccagattctgatcgttggttcagcag

SEQ ID NO: 37220 - DNA, 405 bp, Mus musculus
  source 1..405: mol_type = other DNA
aagccaaggtttaacttgtttctctgtgtagccctggctgtcctggaactcactttgtagaccaggctggcctcgaactcagaaatctgcctgcctctgcctcctaacattttttaatagattcttttcttatttaaaaattttaaatctatgtttttaaagactgtgcttgtaagctcagcgcctaggctgatcctggaccccttccacccctacaagtggactcttatagctggggattaattagtagtagaacacttgtctactgttccgtggaacccacgtaaaaagaaatataaaaattattaaaaatcaaatgcatttggttcagcccactcagcttcatcagaactacatttcccagaaggcactgcgtgaggtggacatgcgcagcgcggtgcttgg

SEQ ID NO: 37221 - DNA, 517 bp, Mus musculus
  source 1..517: mol_type = other DNA
ttgagttcaaggccagcctggtctacaaaaaaaaaaaagagttcaaaagtcatcttctgttatatagttagtctgtatctgagttcgaggccagcctggtctacaaagtgagttccaggacagccaaggctacacagagaaactctgtctcaaacaaaaaggacttgtagggtttgtataaacaaaatgttcctttcggaggactagtgcttccactggagaaggaacggacattccggacatatctcccaggggctggactaggtcagggccagcctaccacacaggctctcccctctcctcacttcctggataaggatggatggccagagggtggctcctggcacccagagttcaggaatcctaggcatgtggttctgggcccagatagaggaggggagtctccctcccagggccagggagtggggggtcacgtgaaggccaacctagttctggagtggggcccctgttcaggagcccactgagcccctccctggggtgggctgggagcagggag

SEQ ID NO: 37222 - DNA, 427 bp, Mus musculus
  source 1..427: mol_type = other DNA
tcctggagtctcactggccagccagtctagactacagaccttgtgtcttacaagcctgcccaagtctgataatctgaatttgatccctgggacccatttggtgaaagtaaaggtgcaggcttttaatcccaacatcgagcccagcctggtctgtagagagagttctaggacagctagggccacacccaggtccctccgtgagcctgggctctctctctgagaatcgagagcaccaggagggatcctggtggtggaagaatctccgggtgccagcagctacacttcggggcaggccccgcccgccctcccttccaggtggccaatgagggacgcaagccgcataggccgcgcccattctgggcatccaggacgcatgcagtgtctccccgcccccgcaggaggggcggggaggggtgaatggagtagc

SEQ ID NO: 37223 - DNA, 210 bp, Mus musculus
  source 1..210: mol_type = other DNA
gtttgttttcccaaaaaaatttcccccaaatcaaagcctgttttggagacaggtttctctgtcctggaactcactctgtagaccaggctggcctcgaactcggaattccacggggcggctgaggtccgttctccagcctctatgcagagatctcggcggcgcctcgcgtcctccgagcgtaaggctggcgttctacttccttccggttcc

SEQ ID NO: 37224 - DNA, 364 bp, Mus musculus
  source 1..364: mol_type = other DNA
ttattatggttatgattattattttgtgagtgcacacatgtgtaaatggagaagtctgttctctaccaccacgtgactaggatgattctaaatttcatccggttgacaagatgagcctcctgcaggggactggagttcggttcccagcacccactggggcagggggggctcacaaccacctgtaactccagctaatctttaaactttcggcctcataagtccgccagtgtcggcccacccgggggtcctgcagcagcagcccacttagactcttagtcccattcagtcggtaccggggagccagctacaggtggctcaactccgggcgcgggagcgcatgcgcacggctcgccctcagccttgc

SEQ ID NO: 37225 - DNA, 236 bp, Mus musculus
  source 1..236: mol_type = other DNA
tgatcgaagccagcctggtctacagagtgagttccaggacagccaggcgccgggcgttggctgccaatgcgcgagattcgactggggctcgaatcccggatacctttgggtcgcccacgttgcaggagcagagccatgggtggccgagggctcaaccgaacccgcgcctccacgtcgctaaggcccgctgccggggagcccaggaaccggaaggaagtagaacgccagccttacgc

SEQ ID NO: 37226 - DNA, 419 bp, Mus musculus
  source 1..419: mol_type = other DNA
agagcagtcagtgctcttaaccactgagccagcgacagggtttctctgtgtagccctggctgtcctggaactcactctgtagaccaggctggcctcaaactcagaaatctgcctgcagtactgggattaagtctgtgggtgtgtatgaatgtatatatcacagacatgtacacacatatatttgcaatgcttcagagccatgccaggaaagaattctcattaaactgtcaatctatgtggcagagttctcctctaaccccagcaatcaagagagcaccaagaattcagagtcatccttggctatatccctccctcacaagatggggtagcccacacccagagcagcctgctcctggcccctccccagagcctatagcctcagcctctgaacctgtcgcagcctccgggagcagcctcag

SEQ ID NO: 37227 - DNA, 245 bp, Mus musculus
  source 1..245: mol_type = other DNA
gtttctacagcttgcctgagaacagaggggttctgtgggccccagggatagaacactggatgcacatactcacacacacttgagtgtgtacacacacatgtgcacacacacatgcacacacagggctgagctgacagacaggcctgcatccggccatgctaacagccttaggtaagccagctggctcccgcctgcagtgcgccgccacagccacaggctgccctgaaggaaacctgccagtcttc

SEQ ID NO: 37228 - DNA, 411 bp, Mus musculus
  source 1..411: mol_type = other DNA
tgcaggcgccaggcagttgccttgagagtgcgtggctcccgcaggttcagacccttggagccttatgatggcccacgctgtcatccttgaattgacttgctcccagttgtcaggaaatttggatacgagtggatgtcacagtctgatgcttttgcgacagatggctctgaggggccacgaggcacccactggggcgctgagcgtatacttagtgtataggcatgcctcgccgcagcggtgcccagagctcagcaatgagaacatgtccctgtttggttctcacaccaggatatagccaggctgagcctttcgtgctcggaccacccacctgggtccccctagatcttgtaggaggggtcggtccccaaccagctattcaggtcacgtggtccgcggcagggccccacggat

SEQ ID NO: 37229 - DNA, 359 bp, Mus musculus
  source 1..359: mol_type = other DNA
ctttcaccttcaagtgaaagacttgaagttaattcctcgtcaggtagatctgctgtacagattataagattattatctccgagagttccctggtctacaaaccggacagagatatacagagaaactctgtgttgtgtgcgaagtccttggggacctgagacgtcgcctggggccagcccaagtgagaatcaggcaccctgatttgttttgaaacaggaaatgaaattaaagtgctatcatgaatatcactcgtacctccgaggagagagtgcgcatgcgcctcaggagagcgcccctccccccgggggtttgagagtgcgcgtgcgcggttggcgcgctcttctgtcgtcatcaatacg

SEQ ID NO: 37230 - DNA, 468 bp, Mus musculus
  source 1..468: mol_type = other DNA
cctgggtcgggatgccctagagcgccaccagagaagtcaggcaatacctagttctggttctgtcgaggactgtgtaggagctcttccccagatggtttcccgcaccccgagggcaggaggaagacagggggcgtggctctgggctcctggatgttgagaaccagacggcggagggtcggcctacagcgcccgcccctgtctgactctcagtaacccagagacatttatagggtgtccacgcccggggtgaccccttgggggccaccaccctgggcttcgggagacgctcccacacgagagggattccttcgactggcaacgagacctgggcacccgggtctttctgctcagccactgtccggaggaagacgcgccactggggctccggagctagtggctcgcgccgcgtgggcggggggtgcggtggggcggggcccagaggcgcgcgctgctcaggcaaggaggagg

SEQ ID NO: 37231 - DNA, 664 bp, Mus musculus
  source 1..664: mol_type = other DNA
aaaatcagatacttttcctgatgtgacttttctttttttttctttttttgttaaaaaatatgtggagtaaatgtgttttattttaattcaaagtttcaaacgagaagattcttttcttgaaaatatttaggaatccaaactagtgtgtttagagtgactgtgcaatccttagtggcaactgaacagctacaaaaactttctttttttaatttttctgaaaaatagtgtattatcgctctgaagccattagatggcagataaaaagcccccttttaatatgtgggtttgatttttttctggcgattttgccctgtggcccgcagggcgttaagtgcgcaacacgtccaggcctcggctggcacagccctgcacacccgccagccccagcccacactgccggtgctgactgggcccaggggacctgctaggcgcaggtgggcctggcaaggccggcgaggcccggcaaggcccggcgaggccctgctggtcaggcccggaggcccggcgccctcagaactcccattcgatgggctcctcccggctggcagccttctccaggcggtggatgatgctccgcaccaggttgtcccgggcgcccgcggcctcgggcagaccgaagaggctctgcagtgagctaggccttcgcgcaggcgcgttggcaggc

SEQ ID NO: 37232 - DNA, 751 bp, Mus musculus
  source 1..751: mol_type = other DNA
ttctgtagcatggttgggacagagttgtgctccaagacttgccccagtcctggcggacgctggagcggctctgaagggtggggaggccgtcgccactcgctgatgtgtcgtcgcggcggcagcagccgcaggctccaaggcttccgctgtggtctggaggtcccccagctggagcgcataggggaggagtgaggtcacccgcagccccggcgcgcgggctggccggtggggtcccgaccgccggctgtgcaggtgggctccgctcgctccaccgcgcgcaccgtgcgaaagagcgcagcgcccgcgccccgctgccgcagcgcagcccactgtcctcaggcgcgcagagcgaggggcaccagcgctggccaccggcgaccgcgaccttcccgggggcgggggtgttggggagagctgcggggtccggaggagaccccgcagcgccccctcgaggccgggccgccgtagggtcgcagcgcggcctgggaggggaggggtcgcgagggccccggatgcccgcgctcgggctgtggagagagagcgcggcgcgcgcgcgtcaaggctgccgccgccgccgccgccgcgtttccctcaggcttcggactccatggctgaggcggtggcggcggcggcggcggcagcggcggcggcgccgtgaggaggaaggagtccgcgtccgcggtggctgaggcggcggccggctccaggccgggttttggcgcccgcccgcctgctgcctcctggcggctcc

SEQ ID NO: 37233 - DNA, 565 bp, Mus musculus
  source 1..565: mol_type = other DNA
tgaaaacactgtgttcctactgaacgagcgctcagtttcaagtgcactgcacaggaagtttctggggttgtgtcgcagaagcatggttgggacagagttgtgctccaagacttgccccagtcctggcggacgctggagcggctctgaagggtggggaggccgtcgccactcgctgatgtgtcgtcgcggcggcagcagccgcaggctccaaggcttccgctgtggtctggaggtcccccagctggagcgcataggggaggagtgaggtcacccgcagccccggcgcgcgggctggccggtggggtcccgaccgccggctgtgcaggtgggctccgctcgctccaccgcgcgcaccgtgcgaaagagcgcagcgcccgcgccccgctgccgcagcgcagcccactgtcctcaggcgcgcagagcgaggggcaccagcgctggccaccggcgaccgcgaccttcccgggggcgggggtgttggggagagctgcggggtccggaggagaccccgcagcgccccctcgaggccgggccgccgtagggtcgcagcgcggcctgggagggg

SEQ ID NO: 37234 - DNA, 493 bp, Mus musculus
  source 1..493: mol_type = other DNA
ctgaccccacctgcaccaggggcctgggcagggtgggccactgagtcatgagtagctgccccacagtctctgcagaactgagaaaagcaagtgttggttacttctctctagctgtggggaaaaaataaataccaaagcaaggtaaatttgttctggcttagtgagcttccggtggggttatctgcatccgcagtcagaaagcagagaaggcaggaactcagctctctctctctttagcccatgggatgatgccacctactcttagggtggttcttcccacctcagttaacaatctagaaacttcagagctccctggaccacggtgttcagggacccgtggctggcctctgaaagagacaacagctacaggttttatctcttgtgcctaggcagctccaatgtcttttcgatgttcgatcaggccctggtgaccctggggaccctgggagtctaagatttcttgttgctgcaacaaagtgctccctaattctgg

SEQ ID NO: 37235 - DNA, 367 bp, Mus musculus
  source 1..367: mol_type = other DNA
cccccactttatggggaggggtgttcagcgcctcctcccaagaatattccacattgctgtcaactggcctgtgctgtggctggccccaaattcacaatcagcatgtggagcccactaccacacaagctaggcttaagtgtgtgtgtgagagggggcttatgcacacgcgtgtactgaaccttgagcccggtcagaagccccagggctggaggctctgtttctggagtccaagatctacctctgaaaaatggagatagtgatatctcacagtgtcacggtgtttgatcaaagactgaaacatgcctgggggtacccccggcagagcccacctcgccgaatttgaaaaggcggccctggagaggcgtgg

SEQ ID NO: 37236 - DNA, 264 bp, Mus musculus
  source 1..264: mol_type = other DNA
tttaaagcactgactgctctcagaggagtccacaaccacctgcacttttgtatacgtgtgtgtatgtgtgtgtgtgtgtgtgtgtccacacgcgcgcgtagttttttttttttttttttttgtttttaatatgaaaaaactcagagaatgagcttctcagttatggcttgtcctctgatgtaaaccttttaaattgaaaaacaggtctctccggctcccggaactgtcagggtttcctgggctactgcgcagctgttcccggtc

SEQ ID NO: 37237 - DNA, 287 bp, Mus musculus
  source 1..287: mol_type = other DNA
ttaactcagaacaagccgttagtagtaccaaggcaagtcttataaaaacatttaattggggcgaagtagggtgagaatcttaaactccatcacatttatgaagtatgtattaatcgtaatacttttgtgtacaacaaaccttaataaatataaaaaagggactttctaaatactatttaagtacttataaggcaaatactgtgtttgaattctctgatcatccgtgggaagaaaaaatggcaatgtcattgtttaagagcccaaataatctgagaatagtctctgct

SEQ ID NO: 37238 - DNA, 344 bp, Mus musculus
  source 1..344: mol_type = other DNA
gctgagctgtagcttccataggcactatgtgactcacatttgttgtggataacctggggctaatccttaatttgtaaaataaggcacacagcatgtaatcatattaactgtgttcctacattaatttaaaataatcatttttattacattttattttgtgtttgcaaaatctgaggaaaggaaaaagtccctttagtgtcgccccgccccttggggagcagcgcgcgttcactggccagtgaggtcctgctcctgctgcgcagactctgctcttcccaatggagcagctccggtcctccagagcaccgagccgacttcctagagacgtccccaaggaggcacca

SEQ ID NO: 37239 - DNA, 285 bp, Mus musculus
  source 1..285: mol_type = other DNA
tgtacttaaatagtgaccgacacttcaggcacatgcagagtgcctgtgattactggaggtttcagaatcatagggcaggagggcccctcaattgagatgggggaggacccagtccattgtgggtggtaccatccctgggctaatggtccttccccttatagctggaacccaggatagctaccaattcctcttgctttatgagagactgagcatctctttgtgagagaactggttcctaggtgcccccgcccgccccaaggcaaaggaggaaggggcggggcctcc

SEQ ID NO: 37240 - DNA, 199 bp, Mus musculus
  source 1..199: mol_type = other DNA
gcatagctctgtctcacatagaaccttaggcctatgttcagccccccactctgggcccctggacccttggagccgctggttggcagggctgagaggtcttgtcacccccacaaactcaggctctcttagtccatcatggaagcctgagcgcctccccactcctagggcggggagtctcgggctaggccggaggccggcg

SEQ ID NO: 37241 - DNA, 552 bp, Mus musculus
  source 1..552: mol_type = other DNA
gaccctgcccactggccgcccgggttctcacctgggttgacagcattggcgccccggggtggggcagcggcggcagcagcagcaggagcaggagcaaaagccggggttccgggcctgccgcagccatggctagcagcacgcttaggctacacccaggcccgcaccggcgctgagctgagcgcctggattccgacgtcccgcgggcgcgggctggagggtggggaggagccgagggtccggtcctgggcactgcctgactcacaccggagcaaccgaatccccccgggaggggaaggtcacgcgggggcgggtctgggtggcgcgcggcgggggcgacgggcccggaggggccgggaagccggaggcgggatcgcgcggacatcctcgtgggtctgggttcaacacctatcctgtcccgcagcgcggggacacgcaccggggattttaaaaagtgaccatgggtaaccacaatggaattaggtttgcccctgaaagcgaaagcttgctgatctccgcacgcgtatgtgtgcacgccaccggaaggggtgtgct

SEQ ID NO: 37242 - DNA, 147 bp, Mus musculus
  source 1..147: mol_type = other DNA
gtcaggcttggcagcaagcaactttacctactggcctaatttacataggcagcctaggctacctccatccaacatccagaagctggaggaaagtggggcgggctttggaagcacaccccttccggtggcgtgcacacatacgcgtgc

SEQ ID NO: 37243 - DNA, 417 bp, Mus musculus
  source 1..417: mol_type = other DNA
acatgatgatcatgtcctgtcccaggcccagggtctgcaggtaggaactccgcagactgcagaaagtacccctctgtctctgccgtagccacagtgatcaccagcaatttgtctgtcatagccagagaactggcacttaagacacggcttagtgtccgtgtttacgggagcctggaacccctgggaaggctggacactcccttccaggctggcggacgtgtcgaccctgcccactggccgcccgggttctcacctgggttgacagcattggcgccccggggtggggcagcggcggcagcagcagcaggagcaggagcaaaagccggggttccgggcctgccgcagccatggctagcagcacgcttaggctacacccaggcccgcaccggcgctgagctgagcgcctggattccgacg

SEQ ID NO: 37244 - DNA, 357 bp, Mus musculus
  source 1..357: mol_type = other DNA
agcacaccccttccggtggcgtgcacacatacgcgtgcggagatcagcaagctttcgctttcaggggcaaacctaattccattgtggttacccatggtcactttttaaaatccccggtgcgtgtccccgcgctgcgggacaggataggtgttgaacccagacccacgaggatgtccgcgcgatcccgcctccggcttcccggcccctccgggcccgtcgcccccgccgcgcgccacccagacccgcccccgcgtgaccttcccctcccggggggattcggttgctccggtgtgagtcaggcagtgcccaggaccggaccctcggctcctccccaccctccagcccgcgcccgcggga

SEQ ID NO: 37245 - DNA, 268 bp, Mus musculus
  source 1..268: mol_type = other DNA
ccctttaagcggtagagagaaatggagttgagtcacccgccctccaaatgtccttgggtgggggttctgggcgggcatcccatactgtggcggagtagggagccaggccccctgctcagcaacgcaggctccgcgccgcgagctcggctagcgcacgcccctctagccgagggccctactgcgcaggtgcagtccccatgaatgaacattgacgtcaatggggcggggctatcccacgtgaccccgcgcgctcccctttataaggcag

SEQ ID NO: 37246 - DNA, 139 bp, Mus musculus
  source 1..139: mol_type = other DNA
aagattacattttacaagtagctgcagctgaactccctaaactgaagtcaaggacctggttgccatgccgcttctccgcctccagccccgcctgcgcgccggatgagatgggggtgggcgcctgcgcaatgcgtccgtg

SEQ ID NO: 37247 - DNA, 306 bp, Mus musculus
  source 1..306: mol_type = other DNA
gagttccaggctagccaggtggaagaggctggtccaactcagggcaccaggagagtctggccccatgtggggagtcagacatgcttcacagcaggcctggcgggtgggcacatttcatgccctctggtcactgggcagtaacccaagagaaagccaggccaacttttcctggatgtaggcccagggtgcacaaggggcagacagcactgtcagggtccatagcttctctgtgatggctgggaattccaaacaccaggctttgtagacacacgtgtcccagcaagtcactgggaggcgggcagccca

SEQ ID NO: 37248 - DNA, 437 bp, Mus musculus
  source 1..437: mol_type = other DNA
gagacagaaatctttctctttttttaaaattacaaatttattttatgtatatgactatactgtatattcagaagagcagtcagtgctcttaacggctgatttcataaatttttttaaatggcccctgctacagaaatagataaagaaagtccgtgtctccatattgcacactgaacactgagtaggtactttgtgtctgttgtccttcaaagtcagtctgagctacccagagaggctctgtcgcttgccatgcaagcatgaggacctgagttcagatccctcctggtggctgacaggtacatacgtgtatatgcagacaactttcatatacataaaaaataaatttacttcaaaaactaaaaataattttaaaaacatgttccagcactggagacacgtggatccccgggactggttggccagcccgcctgattaat

SEQ ID NO: 37249 - DNA, 378 bp, Mus musculus
  source 1..378: mol_type = other DNA
gtgagggactcccaaacaggctgggggctccaagtgtaggccgctcccacctgtgatgtcatggaccagccggacccttgtgatgacagccggaggtcaccggtgcccaccctcgggggttccggaagtttccagagctgcagcagactttgtcctggttacagatgccaaatattaggcctctgatctgaccggtctgtctgtgacttgtcaccgcaggagactgtcgcctgcgtgaacggtgtctggtgtctccgcaggctgcggtccgtctgtcacgtgggtgtctgccccgccgctgcgggtctgctcccgctccccggggtctcggggcttgaagcgggcgggggcgccgtgcggcccggaggggtgtgtgcg

SEQ ID NO: 37250 - DNA, 455 bp, Mus musculus
  source 1..455: mol_type = other DNA
atacgagactttgtctaaatatatacataagaaaaaaaaaacacccaaagtacatttttttttctgaatatgttgcttttacaccagcatgaagcaaaaagtttgtggcatccaacaatgttaggtcccctgtgattctttcaagcttcacaggccttaaacttgccaagtatctgaggctagctagcatggaacctctggtcagctcccagcgcagggattacagctgtggcccaccctggggctcactagcaaaggacccacgaggagcctcgcccactgtaaacatgctcagagaatagattctggggcagtgtcttgtttgcaacacacacacaagctgacagcttgagcctggggctaccagtcgccctaacctgtagcccccagaccttcctgctggagtcgggtctggccttattgccccggccagctagttgtcccgggccggggac

SEQ ID NO: 37251 - DNA, 367 bp, Mus musculus
  source 1..367: mol_type = other DNA
gaggcagaagcattggcagcactcatttctctctctctctctctctctctctcacacacacacacacacacacacacacacacacacacactcacacggggcgagggcgggggtgggggagagtcaggaaaaggatccacgtcttcattcctccacagtggccaccgaggtgcggcggggactgcgcgcccagacctgcgccgatggggtgcaaaacacagggtgtaatccctctcttcgctccttgcacctgcccaagccccgcccatggggaggcggccccgaggcccgggccggacttagccctgtccctcgctgagaaggggcccctctcagggatacactttgttaaacaaaaattcaaaaa

SEQ ID NO: 37252 - DNA, 363 bp, Mus musculus
  source 1..363: mol_type = other DNA
ctttgttaaacaaaaattcaaaaaacaggatttttttttttttaatgtaaaaaattatcctttggacaatgcgtgtgtgccggcgcactcacgaccggcggagcgccagtggaaggccgagttccaccgctggagctcctacatggtgcactggaagaaccagttcgcgctgctcagacctgtgaccccttgggggaccccaggtcctgccgcccgtatatacactatttatttaagggctgggatataatacgaccgagcccccaggccctggtgagcactgaggcaccctgcccgcagcatccggcggaagcaagcgctgggcccgcccctaggggcggagcctgcgactgcgcagccagg

SEQ ID NO: 37253 - DNA, 294 bp, Mus musculus
  source 1..294: mol_type = other DNA
ggcctctttggaaaatgtttttgagaaagggttttagaaaattgtcaaggactgagtaactcggtttttaaaatgcccccttgtaaatacacctcaagacagtggcatgctcccttgtttagcttagtttgtttccagactgcaatgagtagcacatactgtatttttttgcagccttgaggaggtcaagaggtgccccagcccagggctattgcaaagcaacctttggataaggcctggcttggcccagctcaacttccgtagctccgagaagctggggcgattttgtcgcaa

SEQ ID NO: 37254 - DNA, 331 bp, Mus musculus
  source 1..331: mol_type = other DNA
cctgggccgaaggaagggatggggaggagggacccaccacagcccttacccagatacctggcactgctggagaccctgagccgtgtgggtagagcgggcccaggctcattctgagcaatggaggtacactagtggctgccccattgtaggggaggacataggtgttttgttttatttttctaactactgaccataaataaaagaccgaccgagagaattgctgggccagagcctctcagagcggcctgcagcccaccctgcagcttggctccggaggagggcggtcttctcttaacaggaacgtgaccctcccctggaatgtggtgacgtc

SEQ ID NO: 37255 - DNA, 373 bp, Mus musculus
  source 1..373: mol_type = other DNA
ggggctagcccggtctacataaagagcagataaaggatttttttttcgagacaggtttctagccctggctgtcctggaacgcactctgtagaccaggctggccttgaactcagaaatccgcctgcaaagcaagcagggttacctgcttatttacccggacctgagtcgggatggaggatcacggctccctcccgtggcccgaggcactctgggtctcccgagcaatagtacgactccggcaggcgccgaccgacgtcgctctcagttccaggtgtgtacctgagtcaggtggggggcgtcctggagctcggagtgcagtcagaccctcaccatgggcatctgctagcatcctggccaccatcgggaccaatgg

SEQ ID NO: 37256 - DNA, 254 bp, Mus musculus
  source 1..254: mol_type = other DNA
tatgatattctcaataccacataaactggcatggtggcatgccagtcacaattggaggctaacctgtgtcaaatctaacagtttgattctcagaatccatgaagtaaaaggacagaattactacatagacacacacacacactctttctttctttctttctctagccctggctgtcctggaactcactctgtagaccaggctggcctcgactgagtaagtacaacagcatctgccactgtcttcagttgtagaa

SEQ ID NO: 37257 - DNA, 411 bp, Mus musculus
  source 1..411: mol_type = other DNA
accctcccctcaaactgatggatgagagggggtgctagcaagagaggaagggccctcccagccatcccgagggcccccaggtacccccgccttggaggtcaaggctgcaggcggcggggaagtgtccccctccggtgttacgcgcgctcagtggatctccaggacttaacgagcacgcactgattgtgtgagcgctctctccgccctgctccaactaggtggcagggggcgcatccagatgtggaatctcaggtcccgctgcaagtcacatttacgcacacatctgtgagttcagtcctgaggattcctgggctactgcggcggccccccccccccctcccagagaaacccgggctccagggtgttgggagatggggcggggggaaactctgacatgggactgtctccgca

SEQ ID NO: 37258 - DNA, 341 bp, Mus musculus
  source 1..341: mol_type = other DNA
ggaggccgagcccagccaggcgtggcttgagtgggagtcctggtctgttccagatcacagctgggctggacccagtcactgggggacagactcaaggtgcgtgggtgggaagactgattcccagtatccttggaagaccagggatccaggatcatcctgagaggatttgggggaatgcctctaaaaagcttctctcagggagggttagggggcctctcttccacaccctgagctgtctgccactggcccgccaggctgctggtcagcgcctcccaggtgggtggggcagggctgtcaggccctggctgactctgactcagggtgctgcacgccccctcagg

SEQ ID NO: 37259 - DNA, 584 bp, Mus musculus
  source 1..584: mol_type = other DNA
tgttcattaaatatatagatcattaacctaaatcctagaagttagggatgtatctcagttgagtgagtccctgcggttataaccctggcactcacatatatagcagagtgcacacttccctttccagccttcagtcagattcagcctaggtaagtggcctggagatgtatctaggacgaagccccaaagcaggcttcacgcctttctgcagggatcaggggctaggaacccaagcactgcagttcctgtcccttccgccagggagcggccggtcatggcttgccggtcgcgggaagcagcgggaagctgccaacacttggcacctcatgtgggtccctcgcagagggaggagtccatcatggtggacagctgtcaactccactgcgtgggatggacgtggactacaggcttccggcccctgcgatcccccggggtcgctctcgatcctcgagtcccgccctgcccggggaggggagaactgggcgatccacgccacgcccctctgcgaaccctcaagtctcgcgagccttaaatcgccttgcgcacgcgcacgaccataagcttatcggttccggcttggagcg

SEQ ID NO: 37260 - DNA, 251 bp, Mus musculus
  source 1..251: mol_type = other DNA
tatcagtggcaattattttaaaactttcttttgggcaaaatggaggtcctacgagctgaagggcctggcccactgcacttcgcagcacggccagcccgcgccgtccagctgccagggctgggagcatggcccccgacccagtgtctgccccaggcctgtgtcattgaggccaggcctgggctgctgtcagctggaggtggtagctatgtcgttgccccctccctcattttggaggggcatcctccagaaag

SEQ ID NO: 37261 - DNA, 334 bp, Mus musculus
  source 1..334: mol_type = other DNA
cacataaagttgagatcgcatctcaactctgcagcctgagtccatagtcagcatcatgaggattaataaacatggagcggtatgaggcctagtctaggaagcctacaacccctcacagtgaacttttatgggaccgcctccgggaagggagtggcctcaccagggggcgtggccaacccgagaattgggccttcttgcctccagtctggagccgcccaatccggaggggggggggttctggaaataaactacgtcgttcgtccagcctggccctgggcgcggcggcgacggccgcgtcactggcgggcgggatccctccgctctggggagagct

SEQ ID NO: 37262 - DNA, 310 bp, Mus musculus
  source 1..310: mol_type = other DNA
ggcctgggttccatcccctgacccatcctcatatatatattagtttgagtttgggctacatgagaccctgtcttaaataaaatctaagttcgaggccagcctagtctaaatctctctgagtttgagaccattctggtcaaataaagatggagaggcatactcctctggtcccttctgaggatggacatctctggttgagaggagacccctccctcaccccatgtcatcagaaggtcccattcgaatgaagaagcggctgtacctttaaagcagcaaccaatcggccgcgccgttgggggcaggggatcca

SEQ ID NO: 37263 - DNA, 317 bp, Mus musculus
  source 1..317: mol_type = other DNA
ggctggctagcctctctacagagtgacaaacctgtatggtttggtgtgtgtacatgttagctcaaccatggcgtgctcagtggtagaccccccctgcctagaatcccccagggaggagctgggggcgtggctcagtggtagagcctctgcctagaatcccccagggaggagctgagcggaagtgcccctgaagcaggggcgttgatgttgaaaaaaaaaaaagaacttttatgaaaatcaagtgtttgacttcagacacacctacattcgtgctactctggggcggagtcctctggggcggggcctggctttgagtc

SEQ ID NO: 37264 - DNA, 225 bp, Mus musculus
  source 1..225: mol_type = other DNA
cgagaagcgcccgagagatgccagactcgaactcgtcgggtcttggcgctcgagctgaacatgttcgtcagtatcgaaagttttctttacatgtacctcttatttaaaaaaaaaaaaaaaagttcctaactctcagacagagaaggtttggtctttgaagaacaccaatcttaatttggtcacaagttgaccggggtgacctggatttactgcgccccaaaccgg

SEQ ID NO: 37265 - DNA, 303 bp, Mus musculus
  source 1..303: mol_type = other DNA
gactaagtcctcaaggatggcatgaatccacctctgagcaatgagattcacactagccggacttggattttctggaaaggcggtgatgttgagttcccgcagctgcgccttgagatcagaattcatctccagctcgagaagcgcccgagagatgccagactcgaactcgtcgggtcttggcgctcgagctgaacatgttcgtcagtatcgaaagttttctttacatgtacctcttatttaaaaaaaaaaaaaaaagttcctaactctcagacagagaaggtttggtctttgaagaacaccaat

SEQ ID NO: 37266 - DNA, 176 bp, Mus musculus
  source 1..176: mol_type = other DNA
gccccactttgtgatgtggaggtcaggagcctcactgtgtggcccaggaagagaaaataagcagtgcgttggggacatcccctcctgcacaatgccaggtccccaggcaaaggacagaatgtccaagacctagagaggcctctgaagggactcaatgcccgcccagttggccagtc

SEQ ID NO: 37267 - DNA, 360 bp, Mus musculus
  source 1..360: mol_type = other DNA
acaggattaagtccttttgggagatggtgtgtctggacagtatgtcaagcaggctgctggtcgagaaattgttctcaatgagactaaagaactgatactcaattgttctaaacattttattttattttattgagataatgtctcatgtaatgcagtaatactcagatgcattaagcttacatacaaatcccctggaagcccggtactacttaggagttctcagtttttctcttcagagttcagttgaaaactgagtctgctacaacttcctagaagaggaaggacttacccagccatacccagcaaaaaggtttatgtgccccagactccatgggggtggggcctagatgatagaggggc

SEQ ID NO: 37268 - DNA, 340 bp, Mus musculus
  source 1..340: mol_type = other DNA
aggccagcctggtctacagagcaagaggccatgagatccttcgtagtctctaaagtttggtctggccatcacaagtcttctccagggggactttggcaggtctgacgactttcccgactgcgcaggaggaaatggtcccttctgttgatcaggccgcccagcgcgcgggtctctaataccctaaagttgagacctgtagtccccgcctcctgggcgggtcttctccagcctcgagagttgtgattggatgtcgctgcgcggggcgggccgaccaggaaccgcggccgttggcggggtgctcctctcctcccttcagtggggactacggcggctccgagga

SEQ ID NO: 37269 - DNA, 394 bp, Mus musculus
  source 1..394: mol_type = other DNA
acatatgataggcctgaggccttccaggcctgcaagacaagttctagtgagcctgtctcaaaaacaagagggatcgctcttgaggaatacgagaggtccacaggatcccagctcctgtgaccacagccaccatcctttgaggaaggtgtctctgagagactaagtcctctttcacacatccttcagtacatttgcagaggctcagttcggaggctcctccctggagaactgccgctatcaggatgggctaggccaggccactcttctaattactagtttgccccgggctgcctctggcgtggtcccagcggtgcagggctcctactctagcctatgaatcctaaactcaaattcctgcactcgacccagctaggtcagcctcccttagacctag

SEQ ID NO: 37270 - DNA, 241 bp, Mus musculus
  source 1..241: mol_type = other DNA
ctgccacttcaaggctgtgccaccgcgctgagttgtatgcagtgctgggggcttgaacctcgcgcttagtgcactctaccagctgagccttttaaaagactcagattcaaattctgactgagccacacaacatgttttcttgaatatttacatgaacgccgtatgacttggataaataaagtatcttttacaaagcgaggatgagcattctgaaggctccagcaaccggcgaggaaggggg

SEQ ID NO: 37271 - DNA, 633 bp, Mus musculus
  source 1..633: mol_type = other DNA
gcagaggtcagagctctgatgaggggtgaggtcacatccctaaccactcccaggtggtgcccctggtggtctcccgcacgggccaacctggtgcgctcagatcctggcgggcggcgcccacggagtccccacacggggaacaaggtccgggcgcctgggaggctgcaaggggaggaggcccagcaccgccagccaattctcgtgccctccccgcacctagggcggggtggcagggtgggggcacggcggggactaagccaagggagcacgccccctgctgagcagatgcgctgatctccaggcaggcgactcggagtccctctgcccgcctcaccgcttggtagcacccaggggccgcagccgcagcctcccacccgggagcactaaggcgcaccgggttcgcgggtgggtgcgacctccaggcttccgctggggggcgccgctgagcaccccgctccgcttagggcttgggagacccaacccagcacaacacggctgagtagggggcgcgggtcggcgtgcagcgccgcaccgccgttcccgctctgcccttggagggtgtggaagggtggccgggggcgggtctgggggcggacccggaggcggggctgtctctgcggcagggcccagttc

SEQ ID NO: 37272 - DNA, 513 bp, Mus musculus
  source 1..513: mol_type = other DNA
caattttccctttttaagagagggaaacaccgtatcagagatttgatttctaaagggccttaccaccaaaccggatggttggcactattcttgttcaagtccatgtttgaaaattttcatagccgctcgcttttgaaaacagagaaggagtttctcgtgaatttacggtgaaaaccagagactgtgacaaatcacagccagtgggtcacattgactatgtatttatggacagtcaggtacccagaacatgtctggcacgttccttgagactcttttggagaacctgcaaaagcctacaagtaagggcctccgaggaagagttgcctggaacctggcaggtgtagggttaaagcaaccagtttgggacccgcagcggcagaagctgcagcagcaacagcagcagctacagcagcaactgtaggctgcggctgcggctgcggctgtggcaggcctggctccgggccagctggcagggagcccaggacttcctggtgtgggggttgtcaacagccc

SEQ ID NO: 37273 - DNA, 412 bp, Mus musculus
  source 1..412: mol_type = other DNA
aggctagcctagtcttcagagtgtgttctaggacagcctgggctacacagagaaaccttgtctgaaaatttttaaaaagccacattttcgccatagtaaaaatgataggctagccagacatggtgtgcttggggccacacaacacacctgcagaggtcagagctctgatgaggggtgaggtcacatccctaaccactcccaggtggtgcccctggtggtctcccgcacgggccaacctggtgcgctcagatcctggcgggcggcgcccacggagtccccacacggggaacaaggtccgggcgcctgggaggctgcaaggggaggaggcccagcaccgccagccaattctcgtgccctccccgcacctagggcggggtggcagggtgggggcacggcggggactaagccaagg

SEQ ID NO: 37274 - DNA, 574 bp, Mus musculus
  source 1..574: mol_type = other DNA
tttgaaaattttcatagccgctcgcttttgaaaacagagaaggagtttctcgtgaatttacggtgaaaaccagagactgtgacaaatcacagccagtgggtcacattgactatgtatttatggacagtcaggtacccagaacatgtctggcacgttccttgagactcttttggagaacctgcaaaagcctacaagtaagggcctccgaggaagagttgcctggaacctggcaggtgtagggttaaagcaaccagtttgggacccgcagcggcagaagctgcagcagcaacagcagcagctacagcagcaactgtaggctgcggctgcggctgcggctgtggcaggcctggctccgggccagctggcagggagcccaggacttcctggtgtgggggttgtcaacagcccagcgtgggaggagccttgagagccactcaagggactggagccagcggggggctgagccgccccctcccacagcagttaaccgaggctgcgcctgggctcccccgtggaagcgcccagagaacactgggtagccgattgctgcctgccgtggccctctaggccgcct

SEQ ID NO: 37275 - DNA, 312 bp, Mus musculus
  source 1..312: mol_type = other DNA
catttagcccatgatggtcttgaactcactatggagccaagactgactttggtctgtatctgaccctgtcaggagaccagaagctagtagccctggctgtccaggaactttccctgtagaccaggctggccatctgcctctgagagccctgagacagactctcatggccagcaagccccagggatgctgaggacccaaatgcaagtcctcattgcgttggatcccctaaaaatccacagagaacgcttaaagagtttctgggctcttgatcaatctcggttcttgggccagaagagacaaggccatcaatga

SEQ ID NO: 37276 - DNA, 313 bp, Mus musculus
  source 1..313: mol_type = other DNA
ggccattgagccccgggggccaggctggcttcgaactcagaaacttagtctaagaggacaacagaaaggagtcagttctctccttccaatggatttaaaattaaggcaatattccgtcaattcccttagtacttccttatgcaaatatcagaatccagggattttgcaacgaatttgattacagtgaaagaggactaacgctttaagttccctaaggaaaagtagtctagataggaatccgtagagtacctagggcaccgtcgctctaacgccccgccttaaaggcgaagttagcgtgtggccaatggaggcg

SEQ ID NO: 37277 - DNA, 355 bp, Mus musculus
  source 1..355: mol_type = other DNA
acaaatagtctgtggactggaagccatcagtctgatccgcaacgctagcgggtggcgctgagggaccgatacgcaggcgctgcactatggcagcggcgtccgaggctttagtacttgtttgttttcaattcagaaaatatattaaataatatattgcattttattgataacagttcttgagacaatggtctcgattccttgcgatcgctcatgaataattcatgagcccgcctctttcgctgggaatgcacgccccttggaaacgtgctgacgcacgctgcggtcacactccccgcccctagagcggagggggcggaacatcatctccagcacgtgttgccccttcaacccgcag

SEQ ID NO: 37278 - DNA, 363 bp, Mus musculus
  source 1..363: mol_type = other DNA
cgcagcgtgcgtcagcacgtttccaaggggcgtgcattcccagcgaaagaggcgggctcatgaattattcatgagcgatcgcaaggaatcgagaccattgtctcaagaactgttatcaataaaatgcaatatattatttaatatattttctgaattgaaaacaaacaagtactaaagcctcggacgccgctgccatagtgcagcgcctgcgtatcggtccctcagcgccacccgctagcgttgcggatcagactgatggcttccagtccacagactatttgtgaacttgtagtttcacggctactccggctgcgcagacgcagaagcaacttccaactgcgcacgcgcagcacctgagcgcac

SEQ ID NO: 37279 - DNA, 287 bp, Mus musculus
  source 1..287: mol_type = other DNA
tgacacatagctgctcagagctgtgtttgcccacttagtccaaagaaggttctagtgtggccataactagagggagtcactcaagagctttgtggaaagagcctcctcagaggcagcactgagcaggtaaactgaagtctctgtgtgggctttaaggtggagaggatcctcaaagccttgattctgcctgggcactgtgaaggctcccctgtccaatgggggctgggccaaagtccagttatgttgtcagatggagaggtcctgccccaactcagtcctccacatgt

SEQ ID NO: 37280 - DNA, 326 bp, Mus musculus
  source 1..326: mol_type = other DNA
tgacacatggctgctcagagctgtgtttgcccacttatccaaagaaggttctcctgtggccataactagaggaagtcactcaagagctttgtggaaagagcctcctcagaggctgcactgagcaggcaaactgaagtctctgtgtggaatatgtgactaaagtccagtcaatgagccacgtggctgtggagtagctttagagtcactgtccaggagcaaggtggaggggatcctcaaagccttgattctgcctgggcactgggaaggctcctgtccaatgggggctgggccaaagtccagttatgttgtcagtgaccacatctctc

SEQ ID NO: 37281 - DNA, 369 bp, Mus musculus
  source 1..369: mol_type = other DNA
gtcccaggccttacatcatgaatgacacatggctgctcagagctgtgtttttctagtgtggccataaatagagggagtcactcaagagctttgtggaaggagcctcctcagaggctgtactgagcaggcagactgaagtctctgtgtgaaatggaagactccaagaactcaatgtgagctgtcatgtgacaagtgcggagtagctacagagatcagggcaagccttgattctgcctgtgcactgggaaggccctcctgaggacaaggccttgtctccaagccaacaatgggggctgggccaaagtccagttatgttgtcagtgaccacatctagatggagaggtcctgccccaactcagtcctccacat

SEQ ID NO: 37282 - DNA, 354 bp, Mus musculus
  source 1..354: mol_type = other DNA
aaaaggacagaaggttgtttagcttttttcaagttgacacaacaattgcttccaccagaatggcctgtaggcacctctgtggaaatatttttgattaatgattaatgtgagagggcccagaccacagtgggtagtgtcacctctaggcagaaagcattctgtcctccttcatgatggactctaagttgtaatacaaaatgaacctttttctctctctctctctctctcccacaatgacagaaagcgaactatctgataagaagcaataacctttgtactcagtgataatgataacactggcctcagttttggtcgatatttcttaccaaatgaattcaaagattcaagtgggca

SEQ ID NO: 37283 - DNA, 325 bp, Mus musculus
  source 1..325: mol_type = other DNA
acaaatagctttatatggactcaacagttacatttaactatctatctatctatctatctatctatctatctatctatctatccacacataaggatgctcccaaaatcgactgggaaatttagagccgtcagagttctccaattatgggacgcacagtgtaagacacacagcggcagcttctgtcatagagtctgggaggcagcaaggggccttaagtgggagaaagccctacttccaatctcaaagcctcccccgtgacccggacgccagagtcactttccagagatcgcggcttgagggcagggcgcaagatcctagaccctgc

SEQ ID NO: 37284 - DNA, 283 bp, Mus musculus
  source 1..283: mol_type = other DNA
cagagaatgttttcaatggctttctagccttcatagcaaagctagtggaaaattagtgatctttaaagtcatggagcacaggcttgtaatcccaggtcctgggaatacccaggaaggccagcctaggacacatgagaccctgtctccgttggtagtctcacgcttttgacatgttcaaaacttctctagaaggaagaattcatctcttcttaccaccagggtaggaatgtcacagtatgtgaaccctgtgatcgtggaatcacctcccccgggcaggatgcca

SEQ ID NO: 37285 - DNA, 323 bp, Mus musculus
  source 1..323: mol_type = other DNA
ccctcacgcagggcaggtgtggaatccaaaaccttggaaattatgagaaaggcctctttctgtcatcctcacaagttgtcagactcagaagtttagactgctcttacacaagtgcaggaagtcttacaaagctattctaactgaccttagtagttagattacataaagcttaatgagatatgcagttaatccttctgtaataatgtaagacaatgagaaggacctttcaacacatcctagaggttttgatttctaaaagcctgagtccctcccaggcctgccaggacaggtcctgatatgacctcatgaggagcgactattgt

SEQ ID NO: 37286 - DNA, 283 bp, Mus musculus
  source 1..283: mol_type = other DNA
cttaatctgggccacaccttctgtttaaggacattggaagaaggaagagtccctcttcttcggccagcacatctgttggaatctacttctacagtattagttctgtgactctagagaaccctaactgttacagtgctcatgtacacagtgtgtttgcaaacatggggtcctcccagcactcggattacaggcatgtgactgatctagaggcgccaggctagctagtgtttgtctcaaaaacaatcggattcctagaggggcggctgctccccctccagagggg

SEQ ID NO: 37287 - DNA, 300 bp, Mus musculus
  source 1..300: mol_type = other DNA
aataaacctgcctttattataatataatctagcctggatgtaaagtgaattaattaataatcaattaataaaaaaggaacaatacttcaattgctttttaattttggagtattgttttataaaccacaaggcaaagagataaaggcagtaattagcgtctgtaattcctctgaaagatccttttaaagtgctataatagcatattctacagaaccagtgtaagtagcttgtttaccagggctgatctgtgaaaccagacactggcttgattattctcccgtgttcctagagccggaagct

SEQ ID NO: 37288 - DNA, 400 bp, Mus musculus
  source 1..400: mol_type = other DNA
ctctgtgtagcccgggctgtcctggaactcactctatagaccaggctggccctggccagatttttttcttaaatcttgccaaaacaaaaacaaagcaaaagacaacatgtcagtcatgtggaagtttttcttttctgtctcagaatgctgggatggcagccagctgtcccattgcaagcattcacttatgcatgctcttactaaataccaaatgttcaaaactttttaagcatttttgtttgtatcacatattttgattgaatttttctatgaaatttttttttcagcgatatatatctttgtcagactaaataactctcttctgttaaaatatatatatatatatatatatatctagggggtgctttaagagcactgactgctctttggctcacaacca

SEQ ID NO: 37289 - DNA, 508 bp, Mus musculus
  source 1..508: mol_type = other DNA
tgctttaaaaaaaaacccatggtgctattttggatataatatcattagcaccaacataaattccaaattttaaaaatataactattatacttatcaagcagtggagaaatcatgttaaaaaggtaatccttttttctactataagaagttttgaaataaaatattttcttaattagtgagaatgttcaaaataattaaagaaaataagagcactgactgctcttctggtatctgaagacagctacagtgtacttacatataataaataaaataaatcttaaacaaaacaaaaaccaaaacccatggtgcacttttatttatttattttgccaggctggcctcacagagatctgcctgactgtgcttccccagcgctgggattaaaggcgtgcgcccacatttatattaaaggattcttcaagtttcatatattctctctcagagccactacctgaatttcctggaccttcccaacctggccagcaagtggcgcagtctggtgcccttg

SEQ ID NO: 37290 - DNA, 240 bp, Mus musculus
  source 1..240: mol_type = other DNA
ttgtagtccaggctggccttgaactcatgaggtctgcccgcctcgattaaaggctgtgattaaaggcgtgggccacagagtaattactaacctgagtttagatcctcagtttttaaaagcggcatgcgtacaagtgatcaagtctctatagattatatgcaacatgaaaaattttatatcctgaataaattgtcttgacagtgtatccacttgctactaagtactggcagctgccccgcc

SEQ ID NO: 37291 - DNA, 329 bp, Mus musculus
  source 1..329: mol_type = other DNA
ttctgagagcagcaggccttatataatccgagtcattttggggatgtggccataagtggggaaaaagcctgcctgcttggtacatagccgcagcatatgtggagacactgctctggtgagtggtgggtccctgtcagctggaaagctgacccctgcctgtaccagccctgctgggactaaagtgctgacagtgcagatagtggtcctctctgtgctaccgcacttgctgctccagcagggcacgtgcaacgcccatggaatccatgagggctaggacttgaattcctggtgtcctagatatgatcttgcaggtagtgtaattacctgac

SEQ ID NO: 37292 - DNA, 167 bp, Mus musculus
  source 1..167: mol_type = other DNA
cccagatctaagacctggcaaggtagtatctacctctcaaagttgttgatagtcaaacccttgacagggaggaggccccgtcagcttccggtagaagagctctgccaccggactgatacagtctttcgcccagcagttgggaaccccctatctgattggcgggttct

SEQ ID NO: 37293 - DNA, 265 bp, Mus musculus
  source 1..265: mol_type = other DNA
ttccgcccgcctctacttccgcttggagggcggccgaaaacaaccaatcgcggcgcgtagcggtctggcaagccccgcctctggacttcggccagtctccagtggacgcgggaattcgctagcgccccgactccccttgggtcacgtattgaatgcattgaaccaagtcacccggaaggaggattgcttcgtccttaagcgccatcgctgccggggacggtgtggcagagaacccgccaatcagatagggggttcccaactgctg

SEQ ID NO: 37294 - DNA, 315 bp, Mus musculus
  source 1..315: mol_type = other DNA
gggtgtacagcatgtacactctgaagccttataggaaagaaatagttacctagtttatattttgacagaccactttggttttaagaaacaagttcagcagatgaataggtgataatcatctggttaaagttctgctgggaatcaagtcccagcacttggaaagtacccggagttcagggccagcagccagatcactgactttgaggccagcctggtcgtccacaaaactgtagaggtacatgtctgtaatcctagactttcattacaggtttaagtgtggctacagatcctcatgttaatacatgcctgtaatcc

SEQ ID NO: 37295 - DNA, 235 bp, Mus musculus
  source 1..235: mol_type = other DNA
tcacctttaaaacccctaaagggggccatcaggcctgtaatttaagagcgtctctgccagggcgggactcagtatgcctataaggatagcaactactttaaatttagggctcagagctgaagtaattagaatagagtaatatgatctttacacatgcacgtagaatgaaatttttatataatttcagactgtgaaacgatatggtctattttgacatagggaagaacatgccagg

SEQ ID NO: 37296 - DNA, 340 bp, Mus musculus
  source 1..340: mol_type = other DNA
tgggctatatttcctatttcacaggtgccatattttctatattgctattaaaccttttatatatatatcagctgagtcccatttcaaacatgcacagacccagacagtggggccattggcctgctatctattagtaattatccaccccaaggatactggttggggtagctcagtcttcctcagctatgtagcgagctcaagaccatcttggtctccttgaagtgtaatacataatatgaactatacaggattaataaaaggcaaaaaatctcgcgttttctcaccttttgagttttcccagcgttaaaaaacaaaagaaaactttagtttcaatatcttt

SEQ ID NO: 37297 - DNA, 406 bp, Mus musculus
  source 1..406: mol_type = other DNA
aagtgttcactaaatacttggtataatcaagcttggagtttactctgttcagaactgagtgctagacttttgttaaatcttgtctacaggaaatacaattatacccttgccactaaggtttcataaaacactctagcagcctcgggagtttctagaagggataacttgagctatatctttacatcatttttctcagcgccctttcaaagggtcgctgccaaagcgccgctcacccggcgctcggcgccatcttggccccgccccctgacaggagtaggtcctggcatgttcttccctatgtcaaaatagaccatatcgtttcacagtctgaaattatataaaaatttcattctacgtgcatgtgtaaagatcatattactctattctaattacttcagctctgagc

SEQ ID NO: 37298 - DNA, 298 bp, Mus musculus
  source 1..298: mol_type = other DNA
agaagccagggtcaagggcttcatgcccttgccatagtattatatgtaactcagctacctatagttctaagtatcgctacagggtcggctcaaggctgcctagaatctaacttagctattgtcaaaatataataaagcaaagttccaggagattaattttccgtgaacttttcgactactggagtgggagtattacactagagccctcagggaaaatataaaatcaagtttccatttatacacaccttcctgctggctcaccggggagcaggaatcttcagccttaaatttataatgc

SEQ ID NO: 37299 - DNA, 256 bp, Mus musculus
  source 1..256: mol_type = other DNA
gtacaacttagtaacttcggcacattcacaaagatatgcagacttcaatatgaagtggcctcagtctggcactgaactccgcaaagcaggacattatcatcttgtattgatcttacactactgtgtgtacacagcaaatttgatttactcataaagttaacacgtgaacagcttttcacgtgtaaacgcagatgcatattcctattgcaaggagtgcacgttcgtgtggcgacactgccccgcgactctccggaca

SEQ ID NO: 37300 - DNA, 311 bp, Mus musculus
  source 1..311: mol_type = other DNA
ctctacgaaatatttgttatggagctgtgctaatttcactatcaaaatatttgttggatgaataaatgctacgaaacgtttacttattttttaaaaggttattagacttattttattttatgtgtccacagatctcctggaactggagttaccaaatattgtgagccaccatgtgggtgttgagacccaacccctggtcttaggctacagcgctagcatgaggttgaggcttagcattcatgaagccctgggctcaacgcccaaaaatttgaattcatcctcagctttagaggaagtttaaggtcggaggc

SEQ ID NO: 37301 - DNA, 358 bp, Mus musculus
  source 1..358: mol_type = other DNA
tattggtaaataaagaatttatgtgtgtgtgtgtgtgtgtttgcgtgcccgcacacactcccagagaccggagagactggcattctggctaaagcggatgctaggctggcagccagatatcctccccactggaatcacagggacacgcgtgtttgggagcaggtctgagtatcttaatatattaaaaaacaatttggagatcaaacaaattgtaaaatgtttcagggcaagagctgctcttctaataaatctcttgttttgtggaaagccaaaagaaaaagatgtaattgatcctacttgaaaggagggtagaagtgacatctttcaaatctttccccacaagtggctgcttggaccg

SEQ ID NO: 37302 - DNA, 368 bp, Mus musculus
  source 1..368: mol_type = other DNA
ccggcgtgcgcacgcgaggccagcctggtctacagagtgagttccaggacagccagggctacacagagaaaccctgttccaaaggggcaacctcacagtttgaacttggaagaatggtcaccacctcagaggtcctttcaggtctcagtggacatcccacctcggtcgcgagacgcccgccgcagctgcgtgcgcaggcgcgagattaactggtcttcgcgcggctgagagtgtcgcgagacttggcgcagcgcgagctcgtgctaaccacgtgcagccgccaggcagccagcgcggtttcacccaacgtgcgggccgaccctgtccccgcccctggggccggcttgggctaccgctcgggccccgcc

SEQ ID NO: 37303 - DNA, 621 bp, Mus musculus
  source 1..621: mol_type = other DNA
atactgaattactctggaaagcattttaaccgtattaatgcctgggttctagatcctggacctgatccactggaaacctttgctatgatgtcagaagttacaatcacaagttctatggtttgcattgtgaggctttgcctagctaaaatcaaagacattgttacaagagaaaatgtattccttgcatacacatctgtatgaatgtccctagcgaaggtgacctaataacagagatttgattattgtttatgttggaaatagaaaaaaaaaaaaaagaaaaatggaaatattttgcatgtatgtgggatgcattatacatgttttcaaatatttcttaaggtaaacaatgaaaagcatccatagcagcattggtttcctaaatggtagtttttaaaatcaaatccaaatgtttgttttgattgttttaagtgaatacttaaatttgttcttggaatacatagggcacgaacaatgtatatagatttatatacaattcacacattttcagatactttatttacaaggtcaggaagccctgccttaatttacccatgaaagcaaggccttgtcaattctggcttcatccacccctgggttgaagcgtactcagggtggacctga

SEQ ID NO: 37304 - DNA, 365 bp, Mus musculus
  source 1..365: mol_type = other DNA
gtgagatggggaggacccgtccccgccccttcccaccccgactcttccctctttcttctcacctgagatgagggagggagggattaggtttaagctatatccccgggcccccatcgcagcgcagacataggtgctctcctccctgggacggggcacgcggaactctagaaccccgttctcggccgcggcggggcccgagcggtagcccaagccggccccaggggcggggacagggtcggcccgcacgttgggtgaaaccgcgctggctgcctggcggctgcacgtggttagcacgagctcgcgctgcgccaagtctcgcgacactctcagccgcgcgaagaccagttaatctcgcgcctgcgcac

SEQ ID NO: 37305 - DNA, 362 bp, Mus musculus
  source 1..362: mol_type = other DNA
atttttcttcaacaataaaaattgacctatgaatgcattttatagtactcatcaaagaattaggatatggaaactcttccaaagtcttaatgtttgtgcatagtttttggaatgctatagtgagccatgctcctggccatgtgtaaaagcatgctctcgcccctgggcctgtttatgcatgcatatgcttttgtgtacatgtgtgtgaatggcacaagtgccaggatgacatactaggaaacccatgctagaataagaggaaactgcttcttcctcactgtgtcccattgtacacatggaactccggctggagcacctcaggaagtgaccttactcagaatgctggttaccaggtaaccaga

SEQ ID NO: 37306 - DNA, 385 bp, Mus musculus
  source 1..385: mol_type = other DNA
tgtggatcaggatgtagcacctttgttgttcaaaatcaagtgaccggccccgaaattataatgatgtaaatatatttaaaagaatttaaaagaaaaggaaaaaaaaaacttaattattttcatcacaaaaggtcacacacttaagacagtatataatttttgccttgaattttggaaagtccagaccgtcacagctgtctctatgaaatagaaccttaaccatgtgacctagcttattcgctataaattatggatgtacatagcaagctttgtgtgtgtgatataaggaatatgctgagtttcacaagaaaccctctgtcttaaattagctgcagctcaaggggctggacccggagccctgtccaatcggaggcactgagttgag

SEQ ID NO: 37307 - DNA, 618 bp, Mus musculus
  source 1..618: mol_type = other DNA
aaaataacttcctgagaccaggaaagtcatagctctcaaggattttgtagctgttaagctagaatctaaatactttgaagatcttgtcaatgggtcattgcaatcaacatcacgtgtattcatttatttcaagtcagggtttagatattaaaactcatcctgtagccaagctgaacttgagattgcgaaggcacgcgccaccaaggttgactttgcctgcaatttttaatctgaatataagaaaacttttacaagtctctttccattttgaaggcaaagctaatgagagcagatttcagaaattttgagatgattttgaaaacggacatcttcccatttgtttattcgactaaacacatgtacacatacttaactcataatcacatatgactttatgtatagaattaaaagcaaatgtgagcttgtccagagaggactttagcacagaggctgaagtctttgtgcatatacgcgacaggactcgtgtcaggcctcctatagaagtccaaacttggagacgagctgcagctaagaacctgttaacctgagctccttcagctgtgagctggagccaactactgtctttcagaggacagagaacctgaagctctgtccaat

SEQ ID NO: 37308 - DNA, 660 bp, Mus musculus
  source 1..660: mol_type = other DNA
tccgtagagcacagactccgcccctctgtgaacttttagcagaaattcccagagattcctacttcctactaggggttggggatccagaagccctgtggccacgagggcaggcagcgagacgcgccccgcccaccgcccgcgcatccgcgccactcagccaggctccgcgcggcgccgccagggttaaggcgcaggcgtgtcccctggggtggggtgggcccggcagccttgccgagcttctggagtcccatcggatcgggggcccaacgcgctcctccgcggctgcgggtacccgaggtgccaggacaccgcccggagaggagcttgtccggccgcgcagacgccccgcgggcttcggggagggactctccactcgccggggaggagctgtgcggctgcaactggcggcgcgtggagcttcagggacgcaggctaccaggccgagagccgcgcgcacagggccgaagccaccgctgcctgcgggttcccagccgggcctctctggctcccggctcagcgcggaggaggcgcggcgacaccgcggggcgcggccagggagcgcgggctagcgccgggccggccgggcctcgcggggccacggctccgccaatctgcgggcgctgacgcggggggcggctccggcgcgctcggatatcagcg

SEQ ID NO: 37309 - DNA, 269 bp, Mus musculus
  source 1..269: mol_type = other DNA
tagcgaacctgtactttgaactcaaagtcccaagccctgaccctcttgcaggccccactggtgaggcagctgtgaacctctatcccaactggcatgcaccagcggtaggtagccacgtgtggatacccttcctatgcagggagccacactttctcatgagccaaatggatgcctcaaggctctagctgcagcctcccgcaggggaggctaggccttcggagctcagcatccctaagacaagaaaagattttgtttttaaatccagtttt

SEQ ID NO: 37310 - DNA, 345 bp, Mus musculus
  source 1..345: mol_type = other DNA
tgcatgccagttttccttcacattggcaggaagaggtgtgggccaccgccagccctgcctgctgagagcacaggccaggtgaagctcagacagagcacggtgccactgtgccctgagcagacccggagcggcgccagccaggtcgggctagcgtgcggggacgcggggcctgcgcgacagagctctggtgtgtccctggcattcagagacagctgtggtccctggggaggacagcggtcggtgggcgacccgcgcgggcgcggtgcgcggggcctggcggccggcggcgacgcgcagcgggggcgggcggagggcggcgccgctgcagtgcggggacccgctcgc

SEQ ID NO: 37311 - DNA, 771 bp, Mus musculus
  source 1..771: mol_type = other DNA
cgagggaggggcgctccgggagcccgggcgcctgtgggctccgagccgcgggcgccgagcttgcgcgtgtgtggccactgcagtggcggtggcggccgggcccgatctggcccgcgagacccctgagcgcttccgaggtgcgggtcccgggcccggaatccgggggaggcggggggcgggggagggggaggggcgcggtggcggcgctataaccccctccctgtcgccggccggctccacacgcgcgtcctgcggagcccgctcaactcctggagcccggcctggtcttcccgcggctgctgctgcggcggcagcggcgccagctcggccctccgcccgccctccggcccgcgcgggcggcgtagcgaggccccgggcgggtaggctgctgccaggcggcgcggccgcgggagctgcccggccccggcgggcggagggcggagcgccgcgccgtagccgagggcgcgccgcggaggggcgcacgcaggccgccgggccgcgccgtgctgggccgcgccgtgcccggcccggggcggcagcggcgagaggaaggcccggggacaggctctccggactgcccggagccctcagggagaggcgaggcggtggtgcggcgggagctgcagccacgctccgcggtcccctcccggggctgacggcagcaaatatgcggatttaccggccgggtcgctcctaaagccagcgacggggagcgagcgcggcggcggccagctacccggcggcccaggaggctcccggagcgactctgtt

SEQ ID NO: 37312 - DNA, 247 bp, Mus musculus
  source 1..247: mol_type = other DNA
tgtagaccaggctgaccttgaactcagaaatatgcctgcctctgcctcccaagtgcaaaggcatgcaccaccatgcccggctgagcagtgtcttatttattattaatttcattctagatttgattttattcgagacagaaagcctaggctggcctttgtaggcaatgcatgccagttttccttcacattggcaggaagaggtgtgggccaccgccagccctgcctgctgagagcacaggccaggtga

SEQ ID NO: 37313 - DNA, 161 bp, Mus musculus
  source 1..161: mol_type = other DNA
ctcatgtctaaactgaggtcagaccgtgtgcctcagcttaagctgcccctgaggaaaggaacctgaaggtgcaggcttgcagaagcttggccactcaggccaagtcagaggcactcttggcctcgcccctagccatttgccacgccctaaggccttagcgc

SEQ ID NO: 37314 - DNA, 385 bp, Mus musculus
  source 1..385: mol_type = other DNA
tagccagctcacacgcctgtaagtcctgcttcgcagaggctggcttatctctgcgagttcaacgccagtctggtctacagtagagttttagggcagtcaaggttgctctggcttccagcccgcagggcagggcagcactgctccttcagcaggagtcggatcttctgggcccactgaagccctgcctggaactcagcgcgcgcgtgcgcctctgcagaggagcagcctccctaggtgcggcccctcaagtcccagcgcgcccgctccccgccctttccccgccccccgcagggccgtggcgggtcagcggcctccccattggcctggagcgcaggccggacgttcgcgtcgctcccgcctccgatcccggcgcggcgcgcgattg

SEQ ID NO: 37315 - DNA, 336 bp, Mus musculus
  source 1..336: mol_type = other DNA
ttacagactccttaatctgttagaaatgaacgccctgaactcaaactcattatttaaggatatgatgctgtcagaggacaactctgaccctgtgtcactaaggatgactgccacctggaggggcactccccgggcaggtgtgagacaggtcaaagggcgcgcgaataagacgcctcatcgctgagtcttctgcctcagtgatgacactaagctggggacagctcagcgtgtagtccctctcagaccccccctcaggggcgtgtcctcgcgcggctcccgcgatcccggcaggctccgcctcgatcacgtgcggcccgcggcgcgcccgccctcgca

SEQ ID NO: 37316 - DNA, 360 bp, Mus musculus
  source 1..360: mol_type = other DNA
caaaatgtgcattggggcaggttgcatgttctgtctcctgatcccaaaacaagttctgcaatggcatgacaggtcaggagggacagatgcccctggccccttcctccccagtggggactgtggctactattgcgtttataatggagaaaatgtggccagttcttgtcctatctcttggagggctagcctgagctgcccgcgacctcagccaacccaacaggcacgcttgcgtgttgggtggcccatccttccgcagcgcgggttccctgcgaccccgccccaggtggacccgttgaggccgggctctccaagaggccgctccctgtccgcgccgctgggggccgcccgcgggccgcgccg

SEQ ID NO: 37317 - DNA, 401 bp, Mus musculus
  source 1..401: mol_type = other DNA
gtctaggctgggcttctctccacagacaagacctggctgtaaggactgcggccttcctcagctcagtgcagggcgtggataacaccccagggaataggccccgtggtgaggggccctgcttggggggtaggactccaggtgcctcggcaggctgcgccagacagctagggctgtaaacccagccacctgctgggtctccaggctgctggggtgagagctccctcagcttcagcagacactcactgcttctgaaggctatgagctttgaacctgctgggcactagggtcctgaggacacaggggaccctcatactattggttcccaaagtggcctgacctcgcctggcccaggcttggataacctctgtactgccgacagaggtccttagctttaagcctag

SEQ ID NO: 37318 - DNA, 244 bp, Mus musculus
  source 1..244: mol_type = other DNA
gatggccctaccccggtgtggcaatgtcatactcagaggctgggagagaacctgggctccctggaagagggctgatgaccaacaccttcagacttctggccacagaagatgccctttttgctgaaaactcaggcaggaactgtccttatttgctaatcagtaccaaaagatgactgccaggcttctttctgcttcgactcggggtggggccagtcgtccgctcgactagctcgacgcttcctgg

SEQ ID NO: 37319 - DNA, 506 bp, Mus musculus
  source 1..506: mol_type = other DNA
atgatagcaagtatgattctgccttttttatttttttatctgaaataaaagttctgatgagtaagaaagttttgaacagcagttacccgctagctgctagaagcacctctgaggtacatgtagcctggacccagtgcgggccctgagcattagcagtccgggcagctgccgtgcccaccaggctgcatgggggtcatggagggcaagcagtcctgccaggccacagcactgttgccaagtgtcacatgcacgcacatctggaaatgcacgtgtgggaggcttctgtgccaccactgtgccttcaaagaattttgtccttagttctacagacaaatgtctgtttagttcactctccgggtcccaggacctgagctgcacccaacctgcaggccctcccttgcccaggggctggatgctcttcaggtgcagaggatgtgagcacacttgatctggagggcagactgtccaagtggatagggaggggcctccgtgcctgccaagggagg

SEQ ID NO: 37320 - DNA, 373 bp, Mus musculus
  source 1..373: mol_type = other DNA
tacacacatgtgtgatagcaaaaagtctggtgtttgcagcagtcctgccatcatcaaagagttaaaccagctgctgccttcactgggcttacctactgacagtactgaacttactagatttaaagagcttatcattagcgccactaacctgtctatagagaagagagttcctgctttactgaggtctttcatgggcactcagtggcctctgaaagcaggcagcaaaggggaccccttgtgggtctgtgtatcaggcagaggcacacgatggcctggaggtgttacacccccaggtgaggacacagtgcctgtgctgtgtcctagtcagcagtgagagtggccctggtgggtggggaacagtatctctggcaca

SEQ ID NO: 37321 - DNA, 378 bp, Mus musculus
  source 1..378: mol_type = other DNA
tgccatgtaagctgcccagatcccaggaactacatgtatgcacgcaccactacccctggtgttaagggcttcctgactgttaggcaaatactctaaatggcaccattcccactttttggacagcagctacacagtgggtcggagctgttttctccggacagctccacttagatgggggcaggtgcgccgccctccagcattaaggcggccggccgtggctggccaattgtccgttcggactgggggcggagcctgcgggaactaagcaccgcctgacggcgttgctcggcgggcgggggcgggaccacgcgagcagcccccgggggcgggacggggtcacgtgtgtacacagcccccacggcgtgcgcgccgtgagct

SEQ ID NO: 37322 - DNA, 358 bp, Mus musculus
  source 1..358: mol_type = other DNA
tgagacattagtgcctcccagcatctggcattcagggctgaaaatgcactcaggagtccaggtccccagtagcgctgggatggctctcctacagcactcaggaggctgaaggaacttggggctgataccgcatgaccagcctgcaactttgagatctttaaagtattctcaagaccaggcaactccgagatgcagctgcagccattaaggggtgccaggtgtcacctgctatccagattggccactgtcctgagtcaccctgtgccagggacagagggacaagaccctcatccatgtggcaaccttctgcgagtggccagcacacttctgcaagtctacatggtccacttaaacacag

SEQ ID NO: 37323 - DNA, 459 bp, Mus musculus
  source 1..459: mol_type = other DNA
catggctggggccctgcaacgcccatagaggccaacctgagctcgggggctatcattgctcacttccaaggcctgggaatgtggagagaggagccacagttctgtctaggcacacccaagagccaggggtgtcccacggactggctcagcctaaggtccagcatgagtcagtgtgcactgactgcagcctgcgctgcagtccctctgaagttcaggcgcgcagagcccgttccacggcctgtccccagagctcctccctttgggcctggaggtgccactaggtacctctctgtgacagacagggtgtgtgacacacagagggcacagtggttatagcccgggtcgtctgtgcctgcctgttcagtccccaggagaaggcctaggcactcactgtggtagccggtgagcccacaggccacatccagggttttgcagaactgtcaaaggccattaggaagg

SEQ ID NO: 37324 - DNA, 294 bp, Mus musculus
  source 1..294: mol_type = other DNA
ctagcaaacaggttctcgctctacatccacatacatttatacctacatacataaacatgctgtgtactaagtaagttcggtctagaactagagacagagcctggtcaaaatgccggctacttgtagactgtatcatccctaggaaaactatagcttatcagtgttcagttttaaagccagcacaagacagtatcattgcttcaacaaatgaggaaggattcttacctaaaaggtaaacaatattataatcctttcacactttaaataaatgtgtcagtgggtgaaaatagccca

SEQ ID NO: 37325 - DNA, 234 bp, Mus musculus
  source 1..234: mol_type = other DNA
ggtttctctgtgtagccctggctgtcctggaactcactttgtagaccaggctggcctcaaactcagcgcctgcctttttttaagatttatttatttatttatttatttaaagtacactcttcggaagagcagtcgggtgctcctggtaacagagatactccggccgggtcctgtctcaggctctcaggtacaggcaagcctgtcagtgacgtcatcacggcgcccagccccatc

SEQ ID NO: 37326 - DNA, 173 bp, Mus musculus
  source 1..173: mol_type = other DNA
ctccctccgccgctcgcggcagcccgcagcccgggagaggccgcttttaaattcaatgctcccatggggagcaggagtggggggctcgccgggggcccccggccggccgagcgcggcggtgcccctccctccccacccaaaactagagccgatgggccgcggctaattatcga

SEQ ID NO: 37327 - DNA, 337 bp, Mus musculus
  source 1..337: mol_type = other DNA
cactaaaagccctgttacaaggccagtgacagcactttgtgtgtgtgtgtgtacacatacatatattatgaaatgtacatatttacttatttagtgtgtgtctcgagaagacccttcctagcttccctagggctgggacgaaaggcgtgcacctccaagcccggcaccccggccagaattcggccgcacgtgcccacgccaccaggtgttgccctggcaactgactgcgctctcagctcagagagatgacgccaatatcctgcgccagggctgcgccctcccatgcggcggccattggctggctggaagatggacgccttcccgatccaatggatag

SEQ ID NO: 37328 - DNA, 317 bp, Mus musculus
  source 1..317: mol_type = other DNA
tcaacaggctgccaactctagagctagaagagcaggggccttcttcaggtctcccggtggtatgcttgcctggcatgcaggaagcctcagggtcaaggtcatctttgcttttataataagctagaggccaatagttatggctaaaggccaaggcgagtaccgggcccctattcttcaagtcccaggaaagagggggcgtgggcctgaccaaactggggcgtccaggccttcaagaggcgtgatcttgtgggggcgggtctgaagaggcggggcctctagggggcggggccggcggcctcgcaggcgtcaagagtgtg

SEQ ID NO: 37329 - DNA, 335 bp, Mus musculus
  source 1..335: mol_type = other DNA
caagtctgagttcaattttcggaacccaaaagtggccacacattcgtggtagtgtgtgcacaccaatccacatacatatgaacacacatataaataagtaaaaaaaaaaaataaagttttataagtgttttacctctgtctcagatataagatgctacatacatatctcccaccttgagaacatggtcaggggaggctccagcagcctcaggatcccatacccagtgtgcgtcacgctcgcctgacacccccagaccccgccccgggtgtgcatcaggggcgtggtgccgacgcgcgggccatcgcgggggcggggcggtgacgcgcttcgacgc

SEQ ID NO: 37330 - DNA, 412 bp, Mus musculus
  source 1..412: mol_type = other DNA
tcgctcctggggctgaaaaccagctctctgccttgctggcaccaaggaggctggccatcatggggacaatccattaagggcgcttgagggtcttgggctcccaatcctaattttggaatgtctatctgtctgtctatatgtgtatagatacactcagacattcacacacatacataaacacacatacatatatatgtatacacacatacatgtacacacacacaaacatggtctcgggaccatgtctggaattttgtctagtacctatcctgatagctccatgtagaggtctccatggagagggagaggccttcaacattgtatcaatatgaaagtaggattttgactttcagcctccggccgccagagggcggtgcaaacactagtaggctctgccttgtgagaaatcagc

SEQ ID NO: 37331 - DNA, 324 bp, Mus musculus
  source 1..324: mol_type = other DNA
ccgaagcttggcctccactgggggccacatgaagccaggctgccccagaggaggctaggcctccaaggctgcctcccggcaggcgcgggagcttctgagtttcttttctgaaacagagtaactaggtagggcctctgagtactgacagccaaggaacctgagggggtttgtcaccccaggatctgagccccaggctggaaagcagctaggcccctgttcaagtgtgagcccacagctgcccagaatcaggcgagctggtgggacaccaggtggccgtggtgggcccccagggaccccgaggtgacacccaccccgaggtgacac

SEQ ID NO: 37332 - DNA, 405 bp, Mus musculus
  source 1..405: mol_type = other DNA
ataggactaagttgtccaagctggtcccagattcccaagtgtctgggaagacatttggctaaaattcattcattcattcattcattcagtgagacccatgcctggtttatgcagtgcggggaatgcaacccagagcttcatgcatgctaggcaacctgcccagttttaagtgcgcaattctggagcagttctcttcacaggggtgttacattacaattcataataataacaacattaccgttatgaagtagcgaagggtaaaaaaacactattctagacctttcttagtgccagcaggtgaaaggcacctgccagcctcagttcctggaagccagctgctactgggcaaacagtcccagcgggatagagtgtcgccaggggcggggacaagcctctgcttctcct

SEQ ID NO: 37333 - DNA, 373 bp, Mus musculus
  source 1..373: mol_type = other DNA
gtgggtactgcatgcacatataaataaacaaacaaacaaatactgtttaattcttttaagtattctgcaagatgaacaataattagtgtaaatgagactttgcttgcgtagcatacataaactcctggatgttatccccacaccagcaccatgtgtgaggagaatcaggagttcaatattttccttgatcaacctagggtacttgtgaccctattaagtgtgccttaaaaacaaatattaaaatattaataatattaaaacaaatattattttgtgtccacaccgccaccgagatcctggagctcggagaggcacactgtcgaaccttaggccctgggactgccgtggcctacggaccttaggcccaacggac

SEQ ID NO: 37334 - DNA, 299 bp, Mus musculus
  source 1..299: mol_type = other DNA
ccctcagtggtccctgtgtgcctcacccaactagttattgactttgggcttcaggccagttttattatgtgggcgctcaggccatgctgactagcaacattgctgagattactctgttttatcttccctttacttgtccttagacatggccatggaggtgtagctaaagtcactttagtgttgacaggcactccagtctggcttacagttttctgtcagtatactaaagtaaccgaggcagctaactatattacaaagtttatttggctcaacataattggcagctccatggctttgtg

SEQ ID NO: 37335 - DNA, 433 bp, Mus musculus
  source 1..433: mol_type = other DNA
aaaagcaggctttggagccttcagtcccggctggaggtctgagcaagggtagacccacagctctgtccttgaccaccacaagtgtgggctgcctgccggtgctgcaggctggatctagtcgagtcgcaggacaggccacaggacccgagctcgggaagctcctggtcctcccctggtggtctggcaacccaagggatgctccagctcggaggaggcgtccaaaaagggttgcacccactctgcccccgcacggaggctcgaaagctgtgcgcaaggccttagcccggcgcttgaacttgattttgattttcaacccaaggccaaagctacccccccccccacacacacagaggctagtgggaggggaatccactactcggaaccttccgggaatgggaaggtgtcacgcctcccggcctctcagcccaagggg

SEQ ID NO: 37336 - DNA, 347 bp, Mus musculus
  source 1..347: mol_type = other DNA
gccagactggagtgcctgtcaacactaaagtgactttagctacacctccatggccatgtctaaggacaagtaaagggaagataaaacagagtaatctcagcaatgttgctagtcagcatggcctgagcgcccacataataaaactggcctgaagcccaaagtcaataactagttgggtgaggcacacagggaccactgagggtgtctgtccaccactctgttgagggctgggaacaggatgactatgtcactcaggcttggagagttgacgagaaatgccagctctaagcagtttatttcctcttgaactttaagagctgactgagacagaagtgacctttaaaagg

SEQ ID NO: 37337 - DNA, 449 bp, Mus musculus
  source 1..449: mol_type = other DNA
gcacagtctatgaataaaggaataaacatactatttactcttatgtatgtaagccacagtcagttcgtgcctggcctccttggatcaccagatgatccacaggtgagggtgaatgcctactaggcaagtactctactggcccggccccttacacagggctgtagtaaggtcagagttcagtccattgcacagtgaacaatacagactgacctaaagcccgagagtacagtgttgggctcaaaccttttatcacacaatcacacagttagagcctgcctttttgggtgaagctgtaggaattcccaaataagtgggtagtgacttcagtgtgccttgtgctcactgtggccacagttgatgaggaaagcagacccagcgtcaccatctgccctcatgtgtatctgggcatgttcacactgttcttaaaaacaccatgaaattcagagtat

SEQ ID NO: 37338 - DNA, 340 bp, Mus musculus
  source 1..340: mol_type = other DNA
cagagaaatggctcaggggttcagtgctcagcctggtctctatggacatcatgcatgcacataccagctatatgcttctagaaaccgggttttaatttattccaagaggtttttattcattagtcacgcccctagacaaatttcatcaggctctgaaggacttcttcgcaacgcaactttccaaaacttttgtgagttcgagggagacatacattacggcgcaccccggggcaggaagagcgccctgcgggacaggcagccgggcccagtttggttccgggtcccctggcgccgttttctcagatctcgcgagaccccggcggaagtctcgcgatatata

SEQ ID NO: 37339 - DNA, 286 bp, Mus musculus
  source 1..286: mol_type = other DNA
gtgctcagctccttgtctcagtgaaacattgcttcaaacagagtccccatactgtttccctttgcaatggaaatgggagtggaaaaaagactaagaacagagtttaagacttactttcttcgtttctgactgaattgaggtcagacaatgcacatggagtgcagagcccaaacctgcctgcagggggcactctagcctcccctcccaggggctatggccggtcagacaggctgcgcgccccagccaaagtttcccggggcggagcctcgcgttggaagcgagggcg

SEQ ID NO: 37340 - DNA, 505 bp, Mus musculus
  source 1..505: mol_type = other DNA
gaggagctgggagtccagcaggtcccacctgcgcctgtggcattgacgcgctgcactgccacctgactccaggctcccggagctgccccgcagtccagcacccggagaccgggcctcaggatctgatgcttctcatctccaggagtttgaaggcactgcggcagcggtaactctccacctttgggatccttccgcgtgagccacaggtgctcagcgccggtccggcccctgtagtgacacactgcagaggcaagaaagtcttggttcaacctttttgtttctgcatatgtatgtgcgatatgcatgcacgcatgtgtattagcatgtatgtgcacatgtgtctgtagagaagggacgtccccttcgcttgctctctaccttatgtattgatgtaaggtcgtggggatccgaaccccgtctgtacatgaatacacccgtgtcccgctccccgggacggagggctggtggtttcctcccgccgccggaagtcccgccctcgcttcca

SEQ ID NO: 37341 - DNA, 324 bp, Mus musculus
  source 1..324: mol_type = other DNA
ctctgtcagtcagagggccaggcctggaggtatgtatgttcaacttctagcctggctaacttgtgcatcttcaattatatattgagaccctatctccaacaatacaaacaattaaacactgttctaatgtccgtagcacctttcacaggggctgccccggaagagctgctgaacgctgccccggccgcggccacgtggttggggcgtggcggcgaggttggcatgggcgtggccacgccggacaagagctggcgtgggcggggctggccgggcgggcgcgggagtcacgtgggcgagcgggctcacatgactggccgcgcgatg

SEQ ID NO: 37342 - DNA, 416 bp, Mus musculus
  source 1..416: mol_type = other DNA
tgtaaactaccatatgggtactgagagttcttattaagattttcgaaactttgaactggaagtatcaaaaatcttgactatctttctggcccacgtgatcgcgctctcccgcgcgtgaagaccgcagtcaccggcagacagaatcacagtgactttcacgtcgctgcagtgaggatggccattgagattaaagccgctcatcggaccggtctaatgtcagtcaagcagtctgtctgattaaaagcaaagcttacaatcaatttgagaatccacttgacgcccgctgggagaggcaaaggaacttctaccatctttcttctaccttaaaaaaccttttgggctataaataaacttgcatatcttgaaacttattattttaattgtttctagactgcacgcacatggctccgcgctag

SEQ ID NO: 37343 - DNA, 424 bp, Mus musculus
  source 1..424: mol_type = other DNA
ctgtgtcatactgctacagaaagaggcggtggctcggaaccagtcccctgctttgggaaggcagctcagtgctgggatgtgatatgtgggactcagaggactgtttgagacagagcttctcttttctgaatatagagagggctagggagccagcaagctccagactctctctctgcctcccggtcttgccatacaggcaagcaccacggagcctggctcacgacaggttctgtgggctgcggtgacagcttgcaccatgcctggctctggattgtcagcttgcacagcccacgttgcaagttcaaactgcgcccccactccggattggttgctgcgggcgtagtcccgctcgttagctctcgcgagaggatggagggaggtctgcctgggggcggagccgcgcctcgggcggggctgctagcgg

SEQ ID NO: 37344 - DNA, 314 bp, Mus musculus
  source 1..314: mol_type = other DNA
gccagaggctcagccctgccagggcctgtttgaggtggcctcgagggccccagtggatccttctcagcccaagtggggtgtgggaaaggccctccccatctgtagactggacactggaatgtgctgagcagagccaggccccactgagccactgcagcggggcagccctgggatgttggggggggccctggttacaccctccctacaagccccctctccagcagggttagcctgaggggggaggaaaatgggcacagaggtccatgtgaccaggcccctagaggtggggcccccatgccccgccccagcgggct

SEQ ID NO: 37345 - DNA, 409 bp, Mus musculus
  source 1..409: mol_type = other DNA
caggggcagccaggcggagagccgcccccagctgcgctcccggaagatgcagcaggctcgggctcggaccctgctcccactccaggcgcccccgctcgtgctaggcgcaggcaaggcccccgcccgtgggaagggggccgtgtgccggggaggcggagctgggtcacatcagcctttcatccttcgaggaaagacaggcctgttttgcctgaacttcaggtccactcctaagacataagtagcaccgttccccagggaaggaaacccgcttcccagcttcgggggcgcgtcctccacgtgcagccgtggcgggcgttggtcaggctgggtgtctcccagagcagctccggagggtgactcggcgcaggcggtgccgtgggtaccccagctgggtggttcccagcccctt

SEQ ID NO: 37346 - DNA, 210 bp, Mus musculus
  source 1..210: mol_type = other DNA
gtggatatgttcgctccacccggggagaagcaagaaccagtagcctagtttccaagatgggatacagggaactttctttacatcttccttttgcatctttagaatgatgcccctagagacaggtcactggttccctggcaggccaatggcagtccggaggcagagactgccctggtatgggcggggtctgcgtggtgccgaccaatagca

SEQ ID NO: 37347 - DNA, 352 bp, Mus musculus
  source 1..352: mol_type = other DNA
caggagaatccttgtattagcagacaggatcacgcgcgcgcgtgcgcgcgcgtgtacacacacacacacacacacagaggcaatctatcactggcctgctgggccaccagggaagtgctccctatctggcctgggttggaaagccacggaatcctgtggcccatgggcctcatggcgccagaccccaggtctaacaactagggagtcagtcaccttgccaacatctcagtttctttacagaaaaaaaactatcgttaaggatggtaaccttgcctgcgggaagccaattaattctggtaggccccttgctcgcgcacactttgcgcgtgcacaagattccggggaccacatc

SEQ ID NO: 37348 - DNA, 449 bp, Mus musculus
  source 1..449: mol_type = other DNA
tggtgactggagggtcctgacactctagaccccggagtttagcgctacccgctgtgggaaccgagggtttcagcaccggctgtgctgactcacctgctgctgcccaggtgtggtggtgcacgcctttaatcccagcactccggaggcagaggcaggcggatttctgagttcgaggccagcctggtctacaaagtgagttccaggacagccagggctgtacagagaaacccttgaggccagcgaggccttgcctcccagcggaaagccacgcccacaccgagcccgcctggggacgctccgcccactgcctgcgtgggcacgtaccatagaacgccctggcgtacagtgtgaaaatgccaaactgcacaccccatgtccgtcacgtggtacagactccaattcccgcggcggggcggggcctgtgtggggagggcggggcctcggccagc

SEQ ID NO: 37349 - DNA, 213 bp, Mus musculus
  source 1..213: mol_type = other DNA
aattttatttatatgagtacattgtagctgtcttcagacatcgatagatggttgtgagccaccatatggtctcttaacagaatgttctggaagcattcggaatactgtctgggcgtggtggtgtacccctctgacgacggacgccaccagcactcagtcagtgtcccacgtgctcctgtggggagggtgtggcaccgtttcctaccaccctcc

SEQ ID NO: 37350 - DNA, 414 bp, Mus musculus
  source 1..414: mol_type = other DNA
ctgagtgattatgacaaacacagatgtgtgtgtgcgcgctcgtgcatgtgtgtgcaatgtgtgtgtgtgtgtgtgtgtgcgcgcgccagtgcacatacatacaaaggcacaactggaaatttgaactcatgtcctcacacttaatcatattttaagaaagtgcctagggagacccatacaataattttgtttgtttgttttctcgcccatgtaacactcaaagcagcttttgtttgaaaattgtttttggaaggaaaacgactgagctttctccctaaacttatgggctcacagccgggagagcgtagttattgtgactgacaaacgatcagagcacttctaattggtttcattctgaaagaaagcacgcttgctgcgcggcgccgccccgccctccgcgccttcccctccgcc

SEQ ID NO: 37351 - DNA, 283 bp, Mus musculus
  source 1..283: mol_type = other DNA
cggtaatactgaggagaagggcatgcaagcttcatttcaacccttactgaggaatacgcagacattggagtgagggtcaaccccaccctcgggcctgcctcagcacccacatggtgacacacatggtacagacacatacatgtgagtgaagcattcataaaactaaagtgtgtgtaggtagatccctgagtttggggccagcctggagctagctccgagacagccagggccccttaacaaagcgtttgcttagcaagtccctagtattagcctgggatgcaga

SEQ ID NO: 37352 - DNA, 164 bp, Mus musculus
  source 1..164: mol_type = other DNA
gctctcctttacagactgaaacaagcgttcttggtgtgtggccaggtctgcaaccccaaggctgtgggggtggcaagaggggggtcactgagcttactgtcccccacactttaaaaagtaatcttaattaatttttcaaagagttttcggctgagtggcctggc

SEQ ID NO: 37353 - DNA, 584 bp, Mus musculus
  source 1..584: mol_type = other DNA
tataaactcagctaatagactccccaggccctgggatgtctggccacgcatgaccttggacacttcttccaaagccatgattgaaaactcgatcgcgcgtccctggctggaagcaggaaggctcccgggacgcatggaggggcgtgcccactggccctccgatccctagtccctcgggctcagtagggactgcggtgccagggggccgccacacctggtgtcgtcccacccgcgggacgtgcagctcagcccctggggtctcccggcaagggagcaggcaccgccccgcctgagcacgccccgcagacaagcccgccggggaagcgcgtgccgagacggcgcgccggctgcaatccccgccgcgggtccctagggggcgcagcgggcgcgggaagtcgctctgggcccgggcacgaaattgcaagcgggcgggcgcggcgagtttgaaaacaagcgagcgccgtgggggcgggtcccaggcgcgagagccgccgggctcggccaatcagatgcgggtggcgggcgcgggcggcgcgtgcggccgggctgtgaatggggcgcggcggtcgcggcggccgaggcga

SEQ ID NO: 37354 - DNA, 318 bp, Mus musculus
  source 1..318: mol_type = other DNA
tctgagtgaggctaaaggtcaatcattgcatcagtctccatttggagctgaatcattccactgggcctgttaagttgaaatgctttatgtatatatttgtgtgggtgcacatgtatgtatgagtggccagcgagcccaggggtccacagtccagggcttataagcacttttaaagtagacatttagaatacttaattggagatgaattcactggttttttttttctttaaactttaagaaagaaagaaggaaagaaaaaacactggaacttcagagttccagttagtactgttattcctagtctagctaggaagtaat

SEQ ID NO: 37355 - DNA, 468 bp, Mus musculus
  source 1..468: mol_type = other DNA
tgcaggaccttaaattctcaagggattcacatggtgccaagttcaccatttagtggtgcacagctgtgatctacatacatagaccctgtctttaaaaaatgaatttttaaattgattttaaagggctaggcgaggccagcctgatctaggtattcaaaaccaggctagccttggtatgagacagtgtcaccaagcttgtcgacagggtaggagagaatagactgctgagagctgtcctctctgaccacacaaacacacgtgcgcgcgcgcgcgcacacacacacgtggtaaataaaatgtaatttgcaacattatccctggacttggaggagggggctctgtgtctctctgcacccgcccacctcgagtggaagctgcgcgcgcagcgcgagggtcctgcggtgtcccggctccgctccaggccacgatccagcccgggtttccgcgcgcgccgccccgccccgcccc

SEQ ID NO: 37356 - DNA, 372 bp, Mus musculus
  source 1..372: mol_type = other DNA
tattactaggccatgagcactaggtattgattggcaagagccagaaagacacgggtccaagtgtctttcccactgtggtgtgcaataggcacccatctcccaacccaaatattacagaatttataaaacgtgtctgccatacatagtctctccaggtctagagtctaccactggcagttccggggtttcggagccaggagttctgggttccaaggaccacggttccatgactccctggctgagcccaggagctgccccgcccacctgccgcaggaccggaagctggtcgggtgggagggatggccctcccacgtggtgtggcaccggaagccgtcagctagcgctcccgtgatccagccaggacgcgggagg

SEQ ID NO: 37357 - DNA, 314 bp, Mus musculus
  source 1..314: mol_type = other DNA
ttttaaaaaaagatatgactcgtatcacatgtcgtccacaagacttcatattcctgctgtatctgcagtatcatctgcagtgtctgcaactgtggcaagctgtcgtttctcaaagcgaaaggatttcagtcaactatggcctgacacaaaagaggaggggccccttcagctgtgctgcccagaacttctgggatatccccagggaatccctcctctccaacccagccctggatttggagaagtgaggccaagctgaggagctggcattctttacagatgcaaggcagggcagagtgccttacctgctgggcacc

SEQ ID NO: 37358 - DNA, 437 bp, Mus musculus
  source 1..437: mol_type = other DNA
tcaccttccctgtaactgacggtaacctggaaaaatgagtgaaactggaacaattatgctaccagtaacacaaaggtaagttcccaataccacatgcacttcagtggtgcttcaactgcacactatatataacttaagccaaaaataaaaaggacttcttgctctgatgcagtgagtatattcactgatggtaacttctcagccctgatgagagcaccactgtcgccctgggcctgctggagcatcctctggggatagaggacagtgcattgtccctcaagagagacttctcagaaccgggcaggccgggccgggatggagctcttccggaagccttctagcgcgagaaagcggcagcggcatcggccggtgcgtgcgtgtgccgtcggttctggaacgcgaccgctgaagcccggcgccatgttggcccggagctt

SEQ ID NO: 37359 - DNA, 343 bp, Mus musculus
  source 1..343: mol_type = other DNA
agagcggcacatgcctttaagcctttaaacttatttattttacatgtattgcatatgtacacataccatgacacatatgtagaggccagcagacctgcttctccaacccataacaatgtggtcaagttctgggtcctgagtcactagcgacattcaggatacatgtttcaaataagcttacatttttacttgtggactctccagccgcagactgttgtgagggagattggtaaattccacctctatcttcctgctccctgggagttcctagggagccagcctctctctggaggggcttgggtgggtgggtggaatgcacacattccaaggatgcttcccccac

SEQ ID NO: 37360 - DNA, 299 bp, Mus musculus
  source 1..299: mol_type = other DNA
gggaactacattaactaggcatggtagtgcaagcttgtaatttatctaaaatgtaaaataaaattctacgaaggatacattaaaattacgtatgcaattgtcaatgaataaataaaaatatattcaataaaataaaagtgtacctttcgtccactaactggggtggaggccggggccttgccgaggccacctcaaaggccacacctcttagagatcttaccgtttctcggtcggccaggcccgccctaagaggctccgcccccagaggccccgccccttcggaggcctcgccctgtccg

SEQ ID NO: 37361 - DNA, 275 bp, Mus musculus
  source 1..275: mol_type = other DNA
aatctggtggctggtgagccagctcttcaagccctgtggtgtaggaacaaagctaactcctgcaagttgccagaggattggagttcgaatcccaacacataaattaaaaataaatgctttaaaatattaaaatgcaataaagtaataatagtccccatcttaccccaggcgtcccctgtggctttgcagtgctgcccggatggcaagccgtaacagaggcagttcagtcggagggagggggcctcccagccgggcgattggcagcgtgcgcccaa

SEQ ID NO: 37362 - DNA, 398 bp, Mus musculus
  source 1..398: mol_type = other DNA
aaccattttaaaggctactttaaacaagcgtggtggtgcagctccataatcttttaagagaccggctagcctgggaaagtgtgcgccatcttttccctcaaggacagcacactgctcttgggaactaccagccttgcctagaggttcagctatctccttgaagggaaggcttcccatttgcacggaaggaccgtgaccgcacgcgcctttcaatcgtttgcagttctgcgcctcgcttttcaaatctgcaaaacggacgttgcgccaaagttcctagaacaatgatcaacgactcaggtgcatgcgcagtcgaccggaaacacccgcggatgcctgcggcgaagaggcggggcctacgcagcgggcctgcgcggaacgccgccgtgcgacgcgagggt

SEQ ID NO: 37363 - DNA, 62 bp, Mus musculus
  source 1..62: mol_type = other DNA
ccacgccgtctggccgtaggccccactggaggccggacctgggtggagagggcgggcggggc

SEQ ID NO: 37364 - DNA, 332 bp, Mus musculus
  source 1..332: mol_type = other DNA
ctggggaggcgcccctccgctagaattgagatctttccgggcatcggtattcccaggcccgggcgttggaaaatgaaaccaaacacgtctcggggactcggattctgcgactcccaatggcccaacgggggccttttattattattattattattcgcggctcacaaggagaaaaaaaaattaaacattaaactttaactcaaaagcattcgaagttttaaacctccagagcttgtgacgcctgaacgggcgcggtctgttgagtctcacggggctgggacacagcgagccgggccgcttccctgagccacgtccctggaagggcgaggcga

SEQ ID NO: 37365 - DNA, 290 bp, Mus musculus
  source 1..290: mol_type = other DNA
aaacatttattattcatttattcagcaaatatttatttgttcagtgttgggcagactctctgctcttacttagcacgcatcacgcccccagcacaggcaggcggatttctgagttcgaggccagcctggtctacaaagtgagtccaggacagccagggctatacagagaaaccctgtctccggttaagagcactgactgctcttccagaggtcctgagttcaattcccagaaactttgtctgaagacagaccgggtccatccgggcgcaagcggaagtacgtctaggcgt

SEQ ID NO: 37366 - DNA, 431 bp, Mus musculus
  source 1..431: mol_type = other DNA
gcctgcccaccccacgctctttggagtggcaccctagagagggagcgccgggcgcgggcgcaatgagcagctcgccggttcccggctcttcccggctagcttgtcacctcctcccgaagaaggaagctgacaggaggccttgcaatgcccggctcagcccagacgcaggaggaggacggctcggaaaaattctcaccaccagttttgatcattcagccccgccgtggggagcctggaaactgctggagccccgaggtccaatgcgctgcggccgggggctggcccgaaggggggggccgaaaggggggttgtgtaatgtaccttttccaatcccgggtttattaaaagcttttccgggggctgcgggagcggggccgcgggagggcggaggagttggcgcgccgcgcgcccggcccggggagcggttttct

SEQ ID NO: 37367 - DNA, 432 bp, Mus musculus
  source 1..432: mol_type = other DNA
gtgggccccagcccagcgatgtctggcagtcacccagagacactagctaacggcccaggcttagtcttgcctgggtgtgatcaggcagttctccttgcaacacctccagttattggaccactggggctcgcccgggaggggccttgagtctctaagaggtcaagatccatgacagagttctgcttccaagttgaagcagaaggggcccccccggatctggctttccggctattgctagcaattgctagcaagggggagtgactctctgtccattcgggtccgggcctcgatgctgaccctcatccatccacacccagagggtcctggggtggttgggtgacccccgagacattgaatggggcagtgttttttcaaaatgagtgagcgacgcggaagcgccctcgagtggccgctgtggcgtcctataaaacc

SEQ ID NO: 37368 - DNA, 240 bp, Mus musculus
  source 1..240: mol_type = other DNA
caggggcctgcctggcatgtggggaatgtccccactggtagaccagcaccccggggctttttgtgggcggccacagttgtcagcaaggtggctgtctgacccgggaatagaaatctcggtttctggcatccagacctgagttacagagtgaaacccggtcttgaagcgcaggggaccgggcgcgcgctgcagagccccctccccggcaggcccgggtaggggcgtggccacggtaccctg

SEQ ID NO: 37369 - DNA, 405 bp, Mus musculus
  source 1..405: mol_type = other DNA
acaaccacacacacaacttgaggtttttttatttatttaaaaaaaaattttttttgagacaggatttctctgtgtagccctggctatactgaaaggcccgctgaaaaaaattcaatttctattttttattttgattttatgcatatgcatgttttgcctgcatgtatatcggtgtacaacttgcatgcttggtgcccacagaggctggatcttctagaacaaattacagaccactgtgagctcaaatttgggtcggtgctcttgagcgctggccagcactccaaccttgaaataccttgggaggagagttgggtcattttacctttctcacctggtacagagcatcacctcaagaggggataatagcctggatggaggccggctagcgctgcgcgcaggcgcgag

SEQ ID NO: 37370 - DNA, 503 bp, Mus musculus
  source 1..503: mol_type = other DNA
cagctcaggtgggcacctcagtgaccaggtgcccatggcagtgcaggccttccgaggaggagggctcaccctttctcctgagaccatgtgtgccctgcagcatctgagagaaaacgttactctctgcatcggcgcagagaattgttattaattttgacgccaacgtctttatgaagaactaggccaagaacgtcgttgcattaattcaataaaaatatcacctttcagagatcacattgcaggtaggtgttttagaaagaatcgagaatgacactcagttttctttccttctaacacaatcttattttaggagtcctgagccagggacaagacttgggacttgcagccattgctctcagagcacctcccccaaactgctgggaggaggtcttgcgaggatccctagatgcagtggcgcgcgaaggcgtctgggacacagagtttctgtgcaaactcggacttccgggaagatgctgcacatgcgcgtcgcggcctgtgcgcgt

SEQ ID NO: 37371 - DNA, 617 bp, Mus musculus
  source 1..617: mol_type = other DNA
agcgtggtttgttttcaaactatccaactaaacttggttacactcagtcttccttcgctgagtgacaccgtgggaatctggagcccttgagttcttcagtgcctctgtcctcgggactgaccgtgcagcccaaagcgatgcagctgtcccgctgtcagcccgaccacctcgaccctcccaggcgccgcaagctggggacagcggggtgcccgggtgaactgactgggcaccatctgtgccccccgatcgctctgcgccctcgggcctcaccgagcaggcgtctccgctgcccctgtcagcctccgcgccgagctctcgctaggcctccctagcccgcacagccgagtctgttcgctgccgccccggaagctccggcctcggccctgcaggctcggcaactccagcttagcgaacgcaaaggctgcgacggcgcagtggcccagcgcaagcgcgggcacgcgcacaggccgcgacgcgcatgtgcagcatcttcccggaagtccgagtttgcacagaaactctgtgtcccagacgccttcgcgcgccactgcatctagggatcctcgcaagacctcctcccagcagtttgggggaggtgctctgagagcaatggctgc

SEQ ID NO: 37372 - DNA, 380 bp, Mus musculus
  source 1..380: mol_type = other DNA
tagactataggaagtggattcagccaatttcctcacagtctggggaacagtgtccccagctgagcaccagcctcaccagtgatggatggtgctatcccagcattatcaggcaagtggcagccatgtggattataaaaagttttcctcaggagacagatttctgagtttgagtccagcctggtccaaaaaacacaaagaaaaagagtatatttaattaagtttttttgttactgtttatttacatttcaaatgctatcccaataattaagtttttaagaaggaaaaaagttttaacagaaacatcagtctgtcagttacacatgttttatttcaaactggttgccagattggaaggccgatgacatcataggcatccgctc

SEQ ID NO: 37373 - DNA, 487 bp, Mus musculus
  source 1..487: mol_type = other DNA
tattagttttgatgccaacgtctttatgaagaattagaccaagaccactgctgcattagttctgtaagaagtcgatggaatgttcattgtattgtaccaatgtcacctttcagaggtcaattaacagatagaaacccagttgtgtctccatcaactttggaagcagataggacaagagcacttttgcattaaacatcaagttggagaagtcatttgacaaacacgttttttttgtcttctttcttttaaaagaggtggtagacacttcttatacttaaatgtttgatggaaacttctagcacttcagttaaacagagcgtgacacattttttttctttatctaaaagcaccaagtgggtaaatggatataacccctcaagccattcctgaagcctaagagttctgggcggcccctccgcccagtggcacgcatgctgcgcgtgcgcacttctgtttgtgtgcatgctcgcgcaagcgcacgtccgct

SEQ ID NO: 37374 - DNA, 439 bp, Mus musculus
  source 1..439: mol_type = other DNA
agagcagtcaagtgctcttaataaaaatgagccccaaggcagtggggtttctttcatcagccaccagtatggctagtctcgctagccatcttcacttccaagattgaaactacagccatgcccgtctggcatttagttgcctttgataagcatgctttcctctcacagtcaggttagctggaccagtgagctcgggtgcctgtcattcaaggatgtggctgtggccttctcccaggaggagtggcagcagtgatgctggagacctacagcaacctcgtctccgtgggtgaggaccacttgcttcccaggtgctcggatgtgggacgcccatcagagctgatgcctgtgaaactaaaccccccggggctcttgggctgcactgcagacccaggatcgctttccaggtatgacattatcaaaccggatgttatcatcaagt

SEQ ID NO: 37375 - DNA, 411 bp, Mus musculus
  source 1..411: mol_type = other DNA
gactcctaaagcatccagtctacatgggagggcagaggctagaactctggtctccccagggtcatgtccagggttggtctctataggtacctagggcatttactccaggcataggtggccagcgctctttggagctacagagcactgccctgagtagaaagccatgcaaggctatttcccaatattcttgccaggcctggaaatccagtctggccccatgtcagggtcagacgggagggtccggtggacaggaggacgggctcccgacacgtccctgtcgtctggcgaggggtgctcattgtgggtagctataaccatcctccatgcatatgggggtgcgacgcagcagcaccccggaagtgcccccctcgtgggcgcggacaaggcggggccggcgggcggcacttccgg

SEQ ID NO: 37376 - DNA, 292 bp, Mus musculus
  source 1..292: mol_type = other DNA
gctctgggtgacaaggaggcctttgcctctaagagagtctctgggctgtgccgaccagcctggtctacacagtgagttacaggacagccagggttacactgagtactcttcattaacagctagtttagtataaattgtaaataaaccatcgcccatagattgtatactagtagtcgccccactcccgggggcgatcagagcactccgacggggcggggcctcgtgcttgcccgtgcgggcttcaccgccagggggcgcccacgagagcgcgcggccgcagcccgagcttggc

SEQ ID NO: 37377 - DNA, 354 bp, Mus musculus
  source 1..354: mol_type = other DNA
ctcggcacagtccagcagttctcctgtgttaggtgtgcctgccatcccaaccaaagttaggcttctgactcagagagacctgcctctgtgatcatattttggaaagaaattcttaaaaagaaagcggttaagagcactgactgctcttcatggtggctcacaaccatctgtaatgttctggtgtgtctggagacagcgacattggactcacataaaataaataaaacaaatctttttttttttttaaagaagaaaaagaaaatagctttttaaatctacgcacagacaataatttccggcctcccgctactttttccgtcggaagtcgcctccgtcgcgggcactgatgacgcc

SEQ ID NO: 37378 - DNA, 403 bp, Mus musculus
  source 1..403: mol_type = other DNA
catccaaggagaattcagatagcagctccgcttgggcagttgttccaggaggctggaaccggcatggcagagtgcactgtgaaaggcattcagaagtagaggatgctcttcaaagtccactagtttgggggtcgtcactgtcactgtcggggtccagacgcatggtgaggttgtccacatggggtagggccccatctgcagctggaatggagcccatcccacaaggggctcggagaggactgtcacggggtcccgacggccgccgcccagccggggtgtcacagagcccgggccaaccgtccgccgctgccggcggaccccagcggagcgctccccaagacttccggcgcgtccatggcgtcatcagtgcccgcgacggaggcgacttccgacggaaaaagta

SEQ ID NO: 37379 - DNA, 382 bp, Mus musculus
  source 1..382: mol_type = other DNA
accgagcttggggcacctgtgtggggtagccctggatagcctgaaccttgctatataacccaggctggtctccaagtcacggagatctgcctcagcgatatcactttgatgatgatggtgatgatgattgtgatgatggtgacagtgtgccaaggacgtcattaggtccttgaaggacagtatgtcaccaaattaactccattcagatagttaagtggaggttctgagaggatcacagagcaaatcaatggccgtcacaggctcttggacccagttatggagagactccaggtgtgccaggaataccccccatccctggcacagcctctgcctccctctgggcctggccaatgtcagggacagggctggccagccccccgcc

SEQ ID NO: 37380 - DNA, 290 bp, Mus musculus
  source 1..290: mol_type = other DNA
caaggccagcctggattagagtgagttcaagaccagcctctctgcagtagagagagaccgcaaaacctctggggttcttcatccactgctctggagtgcgggtctcactggccagctcctgggaagtcctgtgcaaatgcctacccaagcactgcaaaacactcctccggatgccccagctaattgaaacggtgcgggactggccgggaggggccgcgcacgctagcccagcaaaggcgcgtggaatagcgggcgccctctctgtcatcgcgggctctgccacccgctgc

SEQ ID NO: 37381 - DNA, 617 bp, Mus musculus
  source 1..617: mol_type = other DNA
ggcttgagttgtagataacagaatgaatagcactccagccagccccaccttcgcgggtggcctggctgccacgtcaggcccagcgattcctggggactcagaggcgccccccaaaagtcgcagttacgccagcgctcgctgagccaggacggatcaagttcgcgagcggaccaagcgcagaactggggggcccagagctgcgacggacaccccagcccgtgtgcacactcggaggggtttcgttgcccgcgagatgggtgtgtctggccatcgcaagcccggcagccgaatgggtcggtcgaatgggccaaacgcgcgcgctcctgccccgcgcgcctcgccccggcggccgctcaccagcacaggagcgcgtctgtcccccatggcggcggcggtcggcgcggcacagcggcaccggagctaggcagcgactcgggacgcggcgacagcagccccgggcgcgacgtggccagggacgtggccgaactgccgtcgcgcgcgcggggcagcctgggagagcgggcgaccgctggggccacgcccccgccacgccccttaaaggcccagcgtcggtgagcagccggactttacatcccgcgtggacggtcaactgagga

SEQ ID NO: 37382 - DNA, 469 bp, Mus musculus
  source 1..469: mol_type = other DNA
gtgcacacacacgtgtgagggcttgtcaccaagcctggagatttgagcctagtcccacacagtccacaaataaatttttatttttatttttattgttttgtgtgtgtgtgtgtgtgtgtgtgcgcgcgcacacacatgaaggcaccctcagatggtctattagaagaacagcaattgctcttactaatacaaaattttaatgtaattttaaataaaaattaatagattttgacagatttcttatgacttatttttattattatttaaaatgtgtgcatgggcgtgcaggtgctctcaaaggatcgaacttcggtcctatctgagataggtatttctgctatcttagcggaggactctgggtcctcagttgaccgtccacgcgggatgtaaagtccggctgctcaccgacgctgggcctttaaggggcgtggcgggggcgtggccccagcggtcgcccgctctcccaggc

SEQ ID NO: 37383 - DNA, 345 bp, Mus musculus
  source 1..345: mol_type = other DNA
tcagaagatctccgcagcaagctggctcgcaggaccagccggctcaccgagctccacatgcatgagcacatgtatacaggcacctacatacgtgcgcgactccgctagaaaagtctctggataacatgcactttacgcagacttgcaagtcttagacataatttagaccaggtctgatggttctcctcggtcaccagggggaccgtgggataggcgcggctctctagggagagcattctctccagatctttttaaatcagtctattaaacccggcacttaacagccagcagctgacttccgggtcaggggcgtctcttgtgggcgcgctccggactcgggccgga

SEQ ID NO: 37384 - DNA, 504 bp, Mus musculus
  source 1..504: mol_type = other DNA
agattctgttgagattggcttgctgtgcacccagtttttattatttttaaaataaacacttaaaaaaagatttatttagctagttcaaggtcagcctggtctacagagaaagagttccatgacattgatatgcagagaaaccctatctcaaaaagtttttttaaaattttattttgtgtgtattttgcccgcacatatatgtgtgcactacaagcatgcctgatgctgagaaccaaactctgattctcttcaagagcagcgagtgctcttaacaacagaactacatccccacacaattattactgtgtgtatgtcatgtgtggacagcagggcgtcctcgtccttcctctccaggatgctctagaggggcagctgcgctgcaggatccctagctaagcagctactgcagctactgcaaggccgggcggagtctggtgggcgggaccgctcggcgtctaggctccgcccacaccgacaggggaggcgtgatggcgccggagcagt

SEQ ID NO: 37385 - DNA, 380 bp, Mus musculus
  source 1..380: mol_type = other DNA
gaatgaattatatgcttaccctatcatatcagcaatctttaaaagaattcttctgacctttatccttacctccagtccagagctgggattccaggtatgcactacctgatatataccacatctgtttcataccgccactatacagaattttctagcaggatcttacgctacagcatactgtgcgagcgaacgggaccctaccaagcgtgccaagatggcggccgccccgccccgcggccgccgagcccgttctccggctggagccgagttgccgagctttcccgaaagcccgtggaagccaggaacggcgcgggcgggcgcgcgggcgggcgggagcggccccgcccggagcctgggagctgcgtcgacggcaccgaggg

SEQ ID NO: 37386 - DNA, 348 bp, Mus musculus
  source 1..348: mol_type = other DNA
ttcgtgtggtgaccaccaaccataaaattatttcacaacgactttataactttagttttgctaattttacgaatcgtaatgtaaatatctgatattctccagagaggtcgcgacccactggaccctagagtcacttgtgttcttccaccatgagggtctcaggaattgaactcagatcctctggagcaatgggaagtgcatagatattggctctcctggagccagctacaggtggattttgagccagggtcctctggaggaggctagccttcacttgcaggaaagccgcccgaggggcggggcggcccggggcggggcgggaggcggagtctgctgcctgcgcaggcg

SEQ ID NO: 37387 - DNA, 379 bp, Mus musculus
  source 1..379: mol_type = other DNA
atgtccagattacaaatattgatacctcactaggtttgactacagctatatttaggtttttgaaataagtaggttagggtcagggcctgaaaccataagcctgtgactctcaggacttaatttgaacttggaggcccaggtcaactagtcaatagcctatctatacatacattgaatgtagcccatggtctatacacctgatgatatagattctccttactcatgatgtctgagtaagacaaaagtcttaaatatatattacatggatcacagtcgaatgcgaccctgtaacttcctcccggggaggggacacttccagttactgcgcctacgggtgccgagcgcggccagcgcagtgcgcctgcgagctgtccctgca

SEQ ID NO: 37388 - DNA, 533 bp, Mus musculus
  source 1..533: mol_type = other DNA
aaaatgggacttttaatgcccaagctaaagagcttagcttcttcttctgatctgtgttttaaaataaaacaaaaaactgtgtccacaatcagcagtgaatgctcttcactactttgtccagcctcaggatccagggccccatcgcggtgagggcccgtggatcgcagagcccagtggcctcgccaccgtagtccgcagggccacgcgtaggagaggcatgtcccggggtactggctttagggccccaacccgggcctcgggaacggaagcggcccctccccgccctgctgccgtctccggcggagcccggcgcttagctgacgcgtgaggccagcccgcgccccgccgcccttgggcgacggcccctcccgcgtttgcccggcccgttagctgcgcgccgcgcctcttgcgcgacggcccctgggcggcggaggccgtggcggcggcgcgtgcgggcgcggccctggtgcgccccctggcggcccggccggcaagctgcgggtgcggcgctgacccggaggcggcggcggcgg

SEQ ID NO: 37389 - DNA, 405 bp, Mus musculus
  source 1..405: mol_type = other DNA
ctacctctcaagtgctcaaatttaaaaattagaagcatataaaccactacgatgggtgatttttttaaaagatagttattttatatatatacgtatcacttatacatatacatgtacatatatatatatatatatatatatatatatatatatatatatatatatgcatcacttctaaaattatggattttcgaaattagtcaacagcatttgctgctcttgcagaggacctcccaggggatctgatgccctcttctggcctccatagagaaacacgcggtctttgtctgccgcgccagcacacccctgcttgtcctgcccactcggggcacgtggatcagccaatctttcctagaaaaaaggggcgggacgcccgcccccctacagaaacttcctggtcactgg

SEQ ID NO: 37390 - DNA, 323 bp, Mus musculus
  source 1..323: mol_type = other DNA
tactcatctacataaaataaatgaataatttttttccattttatttttttccatttttttatattaggtattttcttcatttacatttcaaatactatggccgactaggctccaaattttttaaaaaactgtgcatacatggcatggcatggcatggcatggcgagcgaggtctcatcctattagatttaattatagttgatatgtaagggaaaagaggcttttagccataaggtgccagttggtgtaatttgaggccagcctgatctagaaagcccaaaggattcttttgacaaacataattctagaacagttctagaactg

SEQ ID NO: 37391 - DNA, 393 bp, Mus musculus
  source 1..393: mol_type = other DNA
attttccatatggtctgacatatagtggtgtttgaagtaggaggatacagacagcaaatttgcatttacaaatctgtcaccgttcactgctatgcctttaagcctccctccccaagtcttcaagaataaagaaacgaattttgtctagagcttcctcacagaggacccggtccagtccgcgagcttgcccgctttcaagagaccgggataccgggaactctatagaatgcggtttgctccatggatgcaggactcctccagtcacagtcaccgcgggagagttggcgctgccgctctcgggaaaagacgcgtctccccaagacctcttttgattggccaactcaaaggtcaagttggtgacgttagaccagcccggccaatgaaagctcgggg

SEQ ID NO: 37392 - DNA, 405 bp, Mus musculus
  source 1..405: mol_type = other DNA
agctagtctatcaaaatcttgtacagtatcagacaacagaacacatactatgtttccagaccagattatatagcttaaattcctccgaatgagtcggacccggccgcagaagggaccgggaccctaggcagacacagcgccggcgcgctagggcagggtgcggcgcggcacgaacggcgcctgcgcaccaggcaggggccgcacgctcctacctgcacgtggcccgcgtcggtggcggggccatgcaggttggaagctctacatgcagaggtgcgctgcctggtcagacagcagccgccttctttctgactccccgagctttcattggccgggctggtctaacgtcaccaacttgacctttgagttggccaatcaaaagaggtcttggggagacgcgtcttttcc

SEQ ID NO: 37393 - DNA, 367 bp, Mus musculus
  source 1..367: mol_type = other DNA
ggaagagtggtgactggcatgggcagttgcccctccagcttcctctgtgctgtgggcctcctggagaagaggagagtggcacagacctgcacaagcaagaggcaggctgaggccatcctgggctgctccatctgtctcaagacacacactgcaagttggggtggtacagtaaaaagagtctgcttctcatcaccagaagctgtgactgttgattgacctgtgcagtctgaagggcactgtccgtcacattagttcttcaaagtagaggacaagtatactgaactatggcttcaagccactgtttggtggaaaacaaaagcttatgttattctattttaacccgcggcccctttaagaggacaggagg

SEQ ID NO: 37394 - DNA, 307 bp, Mus musculus
  source 1..307: mol_type = other DNA
tttagggtagattaaaaaaaaaaggattgatttattttatacgtatatgtgtgcttgcatgaatttatgtgtgccacatttgagcaagtgcccacagagccgcatcagatgccctgcagctggagttattggccattatgagctggaactaaatccaggtcctaccatattgcttatagtccattgcttataattgatgtaagtaaaagtgctatatagaggttgaccttcgtgccagccacacccagtttatgtggaaacgttttttcacacttaaaaaataccgtacatcttccgggccgccggc

SEQ ID NO: 37395 - DNA, 227 bp, Mus musculus
  source 1..227: mol_type = other DNA
gtgaccagtacttcctgctcttgcagaagatatcctgggtacttgcatgcacatggtgcatagtggcctagactcatccccaaagcccaggactctgcgcctacaatccagaattggaaggctcacccgtgatccagatctcatggagatcttgaggcacagtgcagggaagtcccagatctaggcgtggtctgggccacaccttctgctggaggcctccagaagga

SEQ ID NO: 37396 - DNA, 386 bp, Mus musculus
  source 1..386: mol_type = other DNA
gatcaaagaatatatattttcagcacattttagttgtgcgcaagggcagccagtgtgctaagttcgaccggcacaacgtggtggggagcatgcctgttttctgtgagcaacatgacactcacatagaggtcagagaacaacttgggggaattggttattcccttgtaacctcgacagataggtagacatgggtggcacccccttgcaccccatttcagtaccctgtccttgagcccttaggactagcagagtccgctggggccaggtgtcctggccagatgcgatccgggtcccctggcaagtccccagagaggtcgcctgctctcagaactgctcagagcgaggggcgtggccgcaggtgccgccctggcccctcccaggtggct

SEQ ID NO: 37397 - DNA, 369 bp, Mus musculus
  source 1..369: mol_type = other DNA
tagcaagtttgtctggcttgtcagcgagtcctaaattcaggccctcaagcttgcaaggcaagcaatctcttcattgcatttgagacatcttctgaggagctccaaggtgactcaagacagggctgctgtccggcccagggctgggctaggtagccatcgatgaagtcatacatattgagctcactgctacgtcagtacattctgtgcttgatcaattaaaatttttaaaaatttcaacgtttcctcaaaagtcccagattaaattatgtgggttattatggacttctttatatcttcctgtctgcagggggcgcaccgatcgccaccttgccgcctatggctgactggtccaggtgtcggtcccggcat

SEQ ID NO: 37398 - DNA, 392 bp, Mus musculus
  source 1..392: mol_type = other DNA
aaggctgagaagcctgaagtactgagttcgaaccctgggattgcgcacatacaaataaatatttttttaaaaactaaaaagttaataagaggcactaacccggggacccggtgtcaatacccagcatccacatgggagctcacaactgtgaagaattagaaatgacgactatcctttcttatgaaggctgcgcttcggacccgcggagtcctgagaggggacgtagcaacccgctcctttcctcccgactagcacagagcgccgctggctagcgggacccggcgcgacctcgagagtgcgcacgcgcgccaccccgagccggagaaattgcggctgagcgcagcagccatccggcccgccctctagcctgaggccgggggagggccggactg

SEQ ID NO: 37399 - DNA, 297 bp, Mus musculus
  source 1..297: mol_type = other DNA
caaataaaccctgtaggctgctttggttgagatgtcttatcacagcagaatgggtcacccaaagtccccttgcctctgtggatgacagacacatgtgcatatactacacacacagcccctttatggcagccagggcctcgcaggggacagaatgtagcctcacaatcctgctcgggttcttaggttctgagcctaaggctctgctctgtaggaggtgacaccagctcacatatttcatcccactgccaagagatgtgatataacccatgaacaagaacctctttgaaacagctccct

SEQ ID NO: 37400 - DNA, 422 bp, Mus musculus
  source 1..422: mol_type = other DNA
catggcagtagctatgcagagactgcatgggcctgtgtcagaccatggtcctctcctagggagccacatcgccatgcctgaaggaagcgccgcaggtgcttagagtttttatttctaattagtggccacagccagcagttgagtaggcttcagtgggtgagcgtactgctcgcctggtccctccctgtgggtcctgctgcagaccactctcgaaagttatttataaataattgtaacaaacattattattattatttttagaaaaaaagcaaaagctaactccggccgtggccgggagtcagaacttctctggaagtccaaaacaccccgccagcggcagccgctgaggcgtctttaagaccccgcccacgtgaccccgatcttgtgaccggcgggagggcggggaacccttggcgcgcccg

SEQ ID NO: 37401 - DNA, 216 bp, Mus musculus
  source 1..216: mol_type = other DNA
cagctagaggaagcagctgagtcccacgccaagtcacttgggtccctgaaggaggactctaactaacaagaaacgctgccctgcacgagctgtacctggcccatccccgggtgagtggccaagtccaacttggaagcacaaagtttctgtcagctccagtttgagggggtttcctcctgggccagctagtggccaggagttctgcggactcaagtc

SEQ ID NO: 37402 - DNA, 447 bp, Mus musculus
  source 1..447: mol_type = other DNA
accccggaactttcaaaattgtgggtggctccatccatactagaggtccaggtagggcgaacagaggtattacctccactgccaagccttaggcgagatggcctggtccactgggtccagccaccaggctgctcagcgcctgcctcagctggggctgtctaaaccacgccatcagcaccgcccatcggtctgctagaccgcgcccaccggctcactctgcggtgccactctggcggacacagctaggtggggggagtaagggcgcgtcccctccccttgggggccaatcagtccggcgcgctggccgggcttctgctccgcttagcaagccgcgcgaggccgccccgcccactctagagtactcagcctaggccccgcccacctcaggtggggctgccccgccctctggccgtacggccccgcccactccgcccgcctcaggtgggg

SEQ ID NO: 37403 - DNA, 393 bp, Mus musculus
  source 1..393: mol_type = other DNA
tgttctgaacttgtaagccatgggattttgaaataccccctcccaatcttttgcggggagaatctgatactagaaaagaacggggccccagtctttgccatggccacaagaaccttcgagtgaaccagactgtccgccagaacaaggaagcccacgcgagccgcgtaggtggctcgcgggtcccgctgggagaattcctcctaggcaagtggagtcatctcggtcaggatttctcacggcaagttgtccccggggcttccctaaggagccttggggctgggccagctgcaatgcgcccgcgccccgccctccgcgtgacgcgaacgccggcggaccaatcagagagcgcggcgcgagccccacgcgcctgtggccccaccctccaagagggcg

SEQ ID NO: 37404 - DNA, 254 bp, Mus musculus
  source 1..254: mol_type = other DNA
gcttagcagtcgttatttttatcagagaagctgcaactacctgctggtgacctccaagacttgtttgttgttgaggttccctcatggaagaagaatcggaaagatcactcctacagtctatagataccccatgcaaagaaaaactttgtctggaccttggttttgaatgtagatgttctggaagtacaaaatgtataccaagtaaggttcagtgaagagaccttatctctggaagcatgcgcacctggcgagcg

SEQ ID NO: 37405 - DNA, 669 bp, Mus musculus
  source 1..669: mol_type = other DNA
acccttcagtccgaatcttgaagctgcagcagcccagagccccaccggcctaggtgctcagcagataggtcacccaggggcagaccgcccctccctgccccgctgcccgcccaggccgcacccacttgggggcggtgcgcccgagcttagttctggtgggcggacgccgcggctttaagccggggagcagcagcggcgtcggcggcgagagttcttggggactcgggcccggatgctgggggctagtcggcaggtcccaacggtcccgggagatgcacgcgcgtgcgtgtctcaggcgtgggagagagtcggtgcagcacgacggctccacggagaagtggagaaggctgtccctgcttgaccgaggtccttccggccccccaggagccgcatttagtcctccgcggcgccgggctgcgctggagcggatggagggacgcgcagcgctagcggccgcggaggttggccctcggcgcttgccgtagctcagcggcctgctggggggcagtcgctgagagtcggagtcgagggggctgcggcaccccaccaaagccatcctggcatctgcgggcctccacgcaggctcctggctctctgggccagacgctgagagtgaaggtagcggcggctacggcgccccctggcggcccggaggcgcgttgtccagcc

SEQ ID NO: 37406 - DNA, 410 bp, Mus musculus
  source 1..410: mol_type = other DNA
agcctcagctacagatgagcccctgtctccaaagaggggtagctggttctaaggaagaaccatagagtctagccgcttgctggggaaagaaagcccggcttttactttatcgaatacaccagttgcacagggcacgaagtcttcccttggaacttgcaggatctagtgtgtacccacgcgcgcacgcgcgcacggttcaagcaaatcagttggttctgagattgtgactaagaaccagctccgactgaaggctccccgccggctgcaggaaccttgcagctcccccagacccccttgcgcgcgcccaggacaagcgcggtccgcgtagcgccgtgctcgggcgcgcgcacgcacgcacacacgcaagcgcgaggccgcgcagggccgggccggcaaggcggcgggcgcgc

SEQ ID NO: 37407 - DNA, 336 bp, Mus musculus
  source 1..336: mol_type = other DNA
tggactactaccatagtaagtgccagggacgatttccttaagttatcccagtcttctttctggagagagaggaggttataaagataataagtattttttgtatatgtgtgtttgtgtgtgcatatgcgttcctgtgcacatgtgtatccatggacacaaatagctatgtgtgctttcacctctgtgatcatatacatattatgacatactagaaagaaattgctttttcctccctgaaaccaggcttcccaggacagtgtagtggcaccactgtgtcccattgtacacatggaagacagaggacctcaggaagtgaactcatgatgctggttacca

SEQ ID NO: 37408 - DNA, 485 bp, Mus musculus
  source 1..485: mol_type = other DNA
atagtacattaatcaataaatcatgtaaataaatttctgtttctggaaacataacctgttatctgaagagctcaaaagatgtgctgtaatgggtgtgcgtgtacacacacacacacacacacacacaatgtaataaaacacaatatactacatatcaaataatacattaaaataattacaaatgtttataaaaaccactctattaagaaacttgtaacaatatagcaaaaatatacacttccttcttatgtgttcatatgcattcctgtgcacatgtgtgtgcacggacacaaatagctatgtgccttcatctgtgatcatataaatattataacatactagaaaacccatgaggattcctgtgaaaccaggcttcccaggacagtgtagtggcaccactgtgtcccattgtacacatggaagacagaaggctcaggctggaggacttcaggaagtgacctcggaactcatgatgctggttacca

SEQ ID NO: 37409 - DNA, 393 bp, Mus musculus
  source 1..393: mol_type = other DNA
gctcaaaaaaaaaaaaaaagtattaatttatttacttaccctggtgtgtgtgtgtgtgtatgtttacacactctagttcactgcagggtttcatgtaacccaggctggccttcatccagctcttccatctccccagtgctgggatgacaggtgtgggttatcacaggcacctctaagccagaattgcaaagctactcagcaacttggccagcgactctgccatctttgggacacagagtctggggaaccacggctggggtgcacaggtccgggcggcttagtaccccgaggggtgggcgggccctgagatctggccacagccgcccgggtcccgcccccggtccctgcggggctgtgcccgaaggccccgccccccgcccacgaggaagtggc

SEQ ID NO: 37410 - DNA, 382 bp, Mus musculus
  source 1..382: mol_type = other DNA
cttataaattgcatctacatagaatacagctgaggacctgagttcagaagaggatctgttgctcttggcctccaggggcacctgaattcacatggacacaccctgactgtcctggaactcactctgtagtccaggctggcctcataaatatttttattttattttattttattttgaattgttcttcagaaccacaaagcctgagctcccaacgctgcacacttgggccatggttccttaaagaaaggagtaggacgccgccctagcgctgacgagcggctgcctcacctgagcagcagccgctcttcaggttctgcgcctgcgcctgcgccaagcgccagctgagagcggccgctctgcgcaggcgctccggtcacttccg

SEQ ID NO: 37411 - DNA, 256 bp, Mus musculus
  source 1..256: mol_type = other DNA
accagtgagtctaacagattagaggatcggagactccagcctctgccgcataagcagaggtgcttctttatctccggcgacaaactcttcagaataaggccctcgcggggccccgcccacctcgcgcggagattgcgtcgcccacacggctaggacagggacaccggggaacgcggattcctggcagcagcccggcctcggtgtgaggtcccagatcctcgcagccgtggcggcggtggcggcgtcagtggcgcgc

SEQ ID NO: 37412 - DNA, 518 bp, Mus musculus
  source 1..518: mol_type = other DNA
aggtcttattatgaggcaggcgtggctcctcaaaagctccaccgcaccagcgcgggacgcggtgactcagtctccggccaaacttcagatgctccggaggcttggccgagactcctgggtcctgctcggagaggccctcaaccactgtggtcctcggcttcccaggcattgagcgtcgaggcccacgcatggctgggaggcgacggggatggcctccttcagcgcggatctcttagaggccccagacccgcgggctgaggggtccgcggcagcccgcctacggccgccaccatctcggctccggcggctgcagcggcggcggcggcgcctcgaactgacaccgcgcgccactgacgccgccaccgccgccacggctgcgaggatctgggacctcacaccgaggccgggctgctgccaggaatccgcgttccccggtgtccctgtcctagccgtgtgggcgacgcaatctccgcgcgaggtgggcggggccccgcgagggccttattctgaagagtttg

SEQ ID NO: 37413 - DNA, 424 bp, Mus musculus
  source 1..424: mol_type = other DNA
ctacttggagtcttcgacagtcagatacactcagactctaagactttgcctgtcccgaggattgccacggagcagtccccggggatcaaggacgggaggaactaggcgagggtcccgggttccagggcccagggctggggtaacctctggccgggccccgcactcactatccatgccggggaagggcagcggctgcgccccgagctgctgctccacggcgatctccaagtcgaacttgctgcatggcggcggcggcggcctcgggcccagctccccctcaggtcgcttgccgccaccgccgccgccgcagccgccgccccgcgagggatgccgggagcgctggagcccgcgccggccctcagagtccggccactccttcaggcctgactagccgccgacccggtctgtatcttacacaagaggc

SEQ ID NO: 37414 - DNA, 457 bp, Mus musculus
  source 1..457: mol_type = other DNA
gagagatggctcatctgttaagagcactatctgctcgggatccaatgacctcttttgacttcagtgggccctgcatgcatgtggtacacagacatatatgtaggcaaaacacccatgtacataaaaataattttaaaaaccttcaccttaattttatgtcagtttatacaggcagtgcacacatataattcccatatgactagactaactctgttattgcatacagtcttgctgtatttcaggcccaaatttgggaattaatggcaagataatgcctgtagctattcttaaatctaatacttctgattttgggtcaaaaaaactaccatttaagcaggtgtccttgtttgcaatccttgggaatggaaccagagcgcctgtagaaggcaaaaagtcaaaaggtcccttttctcttttgtccttcccgctccggcaggggtgcgtgcgcccttcccag

SEQ ID NO: 37415 - DNA, 320 bp, Mus musculus
  source 1..320: mol_type = other DNA
acaagcttttccctaatctgcactcgagtggtgtggaaggcacatatatgcattactttgatttatctgcctccacttgccagttagtgggattacaagtctgtactaacactaccggcttatgcggtggtggggcaagcacagacctgggaccctaggtcgcctgagacgtcctcagagtcgagggaccgcggctccagagacagcgttctacggagatcccgcgcaggcgcacttgcgtcgccgcctcttgtgtaagatacagaccgggtcggcggctagtcaggcctgaaggagtggccggactctgagggccggcg

SEQ ID NO: 37416 - DNA, 425 bp, Mus musculus
  source 1..425: mol_type = other DNA
gtaaccctggctaccctagaatttctctctagaccaggctggcctcaaagcctactggccacaggatgccagaagagggcagtcagactctgtgagttcgaggccagtctagttcccagagctatgtctcaaagagtcaaaaacaatttttaagtaattaaaagaaaaatatacatgtgtatatagatagatagatgtagatatagatatagttttactttatttatgggatcctctaaaagagtcttttttttaaaatttatttatttatatttatttttttcaagacaatttttcatccatccatccatccatccatccatccatccatccatccatccatccatccatccatccatccatccatccatccatccatcgactgtcatgacgtgcggccctttggcgaggcctcttcccagagg

SEQ ID NO: 37417 - DNA, 384 bp, Mus musculus
  source 1..384: mol_type = other DNA
cctgcctgtcctgactttgtagaccaggctggccttgttttgtttttcaaaagctagtcaagtgcagaagcaatagaaaaaaaatacgaacaattaattgatataacttttctcaagtccaggatcagctcatgtcatcaggagccagtcaggtctgcctccccggcagcatattaataagcgcagctccttgggagatgtagtcccgagagcctcagccactctagggcataaagaatctttacccttgagctaagcccatgctctggttttgggggtgggaaatagattagctctgattggtcagctccacaagggggcgggctcaggagtagctcctccttcccgctgtgctgctaggacctccgggattcctagagaggc

SEQ ID NO: 37418 - DNA, 384 bp, Mus musculus
  source 1..384: mol_type = other DNA
agtgtactctggaagtgcaacagtgctcttcaacactggcagtattttaaaatatttgatttatgtagcagttgttcctaatactagataattataagattgtaaattacaagattctgagcttcactaatttccttgcatctactattgcaaaaatagttgagataatcaagagagatttttgtgtcacagtttcaaacagttctcagttactttgtgtctacagtgaagctgcacacagcgaagaggggaaaacgtttgtcccttccaggcagggcaacacctagtacgctcttgcggcccgggaggagtcgggagttctttctcgccctccggctgacaccgggaccgccctcccgtggacttccgtcgccggaagtgacg

SEQ ID NO: 37419 - DNA, 363 bp, Mus musculus
  source 1..363: mol_type = other DNA
caaagaattatttactttgtgtgtaaagtgatcatgaaaactgacaaggactattaaaatacatattaaatatatatttttttaaaagagatctattgtaaatgagacatttgtatcaaccttcctgcggctcttccatggaatgtctaaagactacagcaagtgatgttcaactgtgagtttcacatcatagttaattgtgtagatttagtgtgttttggaatttgaacagtcatagacacaactacaaattagataaaagtagtgcaagtggattgatttgagctcctgtagggaaatgcatgacctttttggcactttgacaaatgccacaccagaagtaagtggcccttgtacaagact

SEQ ID NO: 37420 - DNA, 207 bp, Mus musculus
  source 1..207: mol_type = other DNA
atttcaatagctaattttgaatttaaatcaattatagaatgcattctggttaaattctctctttcagtgagtggcaggacctgtctctttatcactggtactacagtcaagggataacaggttatgagacatggtctcccatatctcaggtctaaaacatttcatatggttttgaataccttaaaggaagtcaacatagggtatgaa

SEQ ID NO: 37421 - DNA, 245 bp, Mus musculus
  source 1..245: mol_type = other DNA
gctgtatttcaatagctaattttaaatttaaatcaatagaatgcattctggttaaattctctccagtgagtggcaggacctgtctctttatcactggtactacagtcaagggataacaggttatgagacatggtctcccatatctcaggcaggtctaaaacatttcatatggttttgaattttcatattgtcaaatttgcttgaatttatgatagaaaccaagatcttcctggcatataagtact

SEQ ID NO: 37422 - DNA, 241 bp, Mus musculus
  source 1..241: mol_type = other DNA
ctgtatttcaatagctaattttaaatttaaatcaatagaatgcattctggttaaattctctccagtgagtggcaggacctgtctctttatcactggtactacagtcaagggataacaggttatgagacatggtctcccatatctcaggcaggtctaaaacatttcatatggttttgaattttcatattgtcaaatttgcttgaatttatgatagaaaccaagttcctgtcatataagtact

SEQ ID NO: 37423 - DNA, 140 bp, Mus musculus
  source 1..140: mol_type = other DNA
gtacattccatagctaatttttaaattagaatgcattctgattaaaagtattttttgagacatgtactcccttatccaatgcttgtctcaaacactattgttgaatttgcttgaatttcttataaaaaccaagaactttg

SEQ ID NO: 37424 - DNA, 180 bp, Mus musculus
  source 1..180: mol_type = other DNA
atacctaaaatgcatgcttgaatggctaattttaaatttaaatcaatagaatgcattctagttaaattctctctttatcactactacagtcaaggataattatgagacatggtctcccatatctcaggcaggtctaaaacatttcatatagttttgaattttatgatagaaatataaact

SEQ ID NO: 37425 - DNA, 263 bp, Mus musculus
  source 1..263: mol_type = other DNA
attaaattgctaaaaatttttaaaacaactttagaaggtgtacaaagaaatattactctctgtaatgtggataaggactattaaaagagacatattaaaatatattttaaaagagtgatttattgtagatgagacatttgtatcaacctagtgtgttttggaatttgaagcaccatagacacaactacaaatcgtagtgccaatagatggatttgagctccgagtaagaaaatgcatgaccttattttggcactttgacaaat

SEQ ID NO: 37426 - DNA, 289 bp, Mus musculus
  source 1..289: mol_type = other DNA
ttaaattgctaaaaaaatttaaaggaccagtttccttcagacattttgtaacaacttgtggttttgttaggagtactttagaaggtgtacaaagaaatatttactctctataattaggactattaaaagagacatattaaaatgtattttaaaagattgatttattatagatgagacatttgtatcgacctctagtgtgttttggaatttgaagcaccatagacacaactacaaaatttgagctcctgagtaaaaaaatgcatgaccttattttggcactttgtagact

SEQ ID NO: 37427 - DNA, 239 bp, Mus musculus
  source 1..239: mol_type = other DNA
ctctcctggccatgtgtaaaagcatgctctctgtgccactgggcctgggcatgcatatgcaaaggatgacatactaggaaacccatgctagaatgcactgtgtcccattgtacacatggaagacagaaggacaacaatgggcagtactggcttcttatagggcctagagccttttatacaaaaggggaaagggctctttcactagaaaaactcagaatgctggttaccaggtaaccaga

SEQ ID NO: 37428 - DNA, 422 bp, Mus musculus
  source 1..422: mol_type = other DNA
actgattaagccatttggctgatgggggtgtcaggaaagggccctaccaggatgaactacactaagggaaaatttcaaactgggtagttaacccttttctcatttccaaagggtggaaaggcgcctccgccttcggtcctgaagccgccacgggctctgagtgccttgacccgagcccgcgacagccggacctgcgcacagcagatgcggaactcgggcgccgcggctcggcttccggggagcgccgtttccagacgcaccggcagggtcgctgcagccgagcagcaacacagactctgagcttcgcgcctcaggggaagattagagggcgtagcggccttcgaaggctcggccaagcgccgcctcggtgagaacaaccgcgggtcatcgccttccgggagacgcctcggagatggccggcc

SEQ ID NO: 37429 - DNA, 346 bp, Mus musculus
  source 1..346: mol_type = other DNA
attatttattttatttatttatttatttatttaagtattacaggcacacttaaacatgtgtggattaaaagctttttttaaatcccttatatgtggacatggtgttttatcacagcaaggcaagcgttctagcatcttaaatacaaccacgtagtttattgtagtatttagtctaaatcctggagttcagaagtgacttcaagtttatatgggctaagtaagtaagtctgtcagcagctccgctccgcggctgagcgaggccctttcgcctgccggcgtcagaagagacggctgccagctccggagtcgcaggcagcgcgaggcttcgcgacgacagcggctgccg

SEQ ID NO: 37430 - DNA, 351 bp, Mus musculus
  source 1..351: mol_type = other DNA
tccatcaatgacctgaatgtacgtaaatacgtatggtagctgcttccctgggtaagagaatgtcaagttgtctttgggcataaatatatccccgtgtcagtgtttataatactggacctgtatattccaaattgctatgatatggaaagcgctaaaatgtctaccaactgttaggcatttactactggcttgtttatcacgtcttaaagaccacccgaaatatagctttctattttgtgattcgatttgtaaataaagacagagaagctcatttcctttggaacttaggagaacaagttatcccgcactaccggagaccaggataacctatatgacagggctataatccta

SEQ ID NO: 37431 - DNA, 481 bp, Mus musculus
  source 1..481: mol_type = other DNA
gtgtttataatactggacctgtatattccaaattgctatgatatggaaagcgctaaaatgtctaccaactgttaggcatttactactggcttgtttatcacgtcttaaagaccacccgaaatatagctttctattttgtgattcgatttgtaaataaagacagagaagctcatttcctttggaacttaggagaacaagttatcccgcactaccggagaccaggataacctatatgacagggctataatcctatcaggcttgggtgaatccccagccctccgaggacatacaggtaggtagacagccctgtgttaccaggggcctcaagatccagggcagatagaggaggtacccaggccccttggttacccaccttggaggaggaggcctgaggatgcgccgccttctccgcaacgccccgcccccgctcgccaatccagccccctggccgtgaagggggcgtggccgcgcggtgccgggc

SEQ ID NO: 37432 - DNA, 357 bp, Mus musculus
  source 1..357: mol_type = other DNA
tggtctccccaattggggttttctacaggagaaatctgtaacactctcctatgttttaaatattaaacagatggggagagatcattgatgtaaaggcctgcctgacagcagtatgcgcgtattaaactgattaagccatttggctgatgggggtgtcaggaaagggccctaccaggatgaactacactaagggaaaatttcaaactgggtagttaacccttttctcatttccaaagggtggaaaggcgcctccgccttcggtcctgaagccgccacgggctctgagtgccttgacccgagcccgcgacagccggacctgcgcacagcagatgcggaactcgggcgccgcggctcggc

SEQ ID NO: 37433 - DNA, 414 bp, Mus musculus
  source 1..414: mol_type = other DNA
catttccaatttttcttcaacaataaaaattgacctatgaatttattttatagtactcatcaaagaagtaggatatggaaactcttccaaagtttaatgtttgtgcatagttttaccctcagggtagggattgctatagtgagcagcatggtacactctgcactgacatgctcctggccatgtgtaaaagcatgctctctttgaccccaggcctgggctatgcatatgctttgtgtacatgtgtgtgaatggcacaagtgcctattcctccaggatgacatactaggaaacccatgctagaaaccctaagaggaaattgcttcttcctggactgtgtcccattgtacacatgaggggctctgcctggaggacctcaggaagtgaactcagaatgctggttaccaggtaaccaga

SEQ ID NO: 37434 - DNA, 392 bp, Mus musculus
  source 1..392: mol_type = other DNA
aacgataaaaatggacctatgaatttattttatagtactcattaaagaagtacgatatggaaacttttccaaagtcttaatgtttgtgcatagtttttagggaatgctatagtgagcagcatctaggtgatcacatacactttgctaaagtttgaggtcctggccacgtgtaaatgcatgcctgaccccgggcctggatgtatgcatatgcttttgtgtacatgtgtgtgaatggcacaagtgcctatttcctcaggcaatacacaggatgacatactaggaaacccatgctagaaccaagaggaaattgtttcttcactgtgtcccattgtacacatctctgcctggaggacctcaggaagtgtcagaatgctggttaccatgtaaccaga

SEQ ID NO: 37435 - DNA, 499 bp, Mus musculus
  source 1..499: mol_type = other DNA
actccggtcagcaggctgctgaaccagcacgcggtgggaattaccttcccaagaacgcatactaaggacagaaattaatgtctccaattttaagtggggcactactgcatatgtggaatgacgatccgaatagctattataaaaataacaatgttcatctctcgagcgctcgtaatatccaattcggttatccccatagattattaggaatactgcttccagtaatgatgagagtactttacacacacgcctgtcttaagatgtcaaaatgaaacctattattttgtacaattaatagacaagataggctagtctctagaaagaaaaccaaagtgaggcgttttgttttgtttcgcaaggtaacgtcagcacgctacggaagtcgcgtccggctccacgcccgcgagggccccattccgggatgtcgcagcgaccagcctcgcgggcccggcgtttctcttcaggcagcttcgcgggcagccctcgggccttgtaagag

SEQ ID NO: 37436 - DNA, 457 bp, Mus musculus
  source 1..457: mol_type = other DNA
acgcttacaatggaattgctatggaaacagtattcatgtaccagaaatctgtttctcgactaaattttgttcaaattcgctttcgtcggaatttaggccccaagttccacagacccggtgtggggggagttgggtaaatcacaggctttttaaagtagtaatttatgaagttttatgaattttctgccgacataccaccctgttacaaattccaagttggtataccccagaaaaacatccaagtgcttgggactctggcggggtttcaactgactgtcagtcgctctaaggtaggtgcttcacgtcggcgctaggacccatctgcaggaggaacgcggcacgggtctcgccccgccccaacgcgcactgggtggagccgtcctccccaagctcgccccccccccgtgggagggcggggcaccatgggcgtggcacagctgcggtgggcgtggcggcg

SEQ ID NO: 37437 - DNA, 580 bp, Mus musculus
  source 1..580: mol_type = other DNA
ttcgtcggaatttaggccccaagttccacagacccggtgtggggggagttgggtaaatcacaggctttttaaagtagtaatttatgaagttttatgaattttctgccgacataccaccctgttacaaattccaagttggtataccccagaaaaacatccaagtgcttgggactctggcggggtttcaactgactgtcagtcgctctaaggtaggtgcttcacgtcggcgctaggacccatctgcaggaggaacgcggcacgggtctcgccccgccccaacgcgcactgggtggagccgtcctccccaagctcgccccccccccgtgggagggcggggcaccatgggcgtggcacagctgcggtgggcgtggcggcgccggaggcgggcggggcgcgctgcccggtcgtcggggcggtagggcctgcgcggagctctctccccagcgcgctgggcggggtgtgctgtgagcggcttcccgggcaggcgcgggccctgaggcggcggctgcgccgtgcgccggggcggagccgggggcgggcgggcggccggcgggcgggggctgggccggaggaagcctga

SEQ ID NO: 37438 - DNA, 329 bp, Mus musculus
  source 1..329: mol_type = other DNA
gtcaacagtgttgagttcttgtagattagtttgactggaataaagtacattttaaccttcttcagtaaagatattcattaaaaaaaaaaacagcacaggcaggcggatttctgagttcgaggccagcctggtctacaaagtgaagtccaggtcagccagggctatacagagaaacggtacggagattattgctgtcagaaattaaggtttaattttgaccaccttaacagagcctggctgcctctcgccgtggacgagtcctggatgcgcatgtgcaaccgggctctacggcccggggcctggagccttagcgggccgcgttcccggaa

SEQ ID NO: 37439 - DNA, 427 bp, Mus musculus
  source 1..427: mol_type = other DNA
cagccttgtcatggtggcatccaagaacaaggccatgtttaccccctaagggagttcacagggaagtgactgcaattaccttgattcatactcaattagttaattaggtgagaccgggttttacgtagtccaaactggccttgaactcaagatgctgaagatcggttctcattaggactgtttgacaaagacacaaaaagggatctctttcccattgctaggctggtgctccagactggaggctgcctccaggacctcccctgggctgcaccgggaggaacccgcgcagctgggcgggcagagcgcgtcaggcagccttgaggagcgcacgcccgcgggtgacagtcccctgctcgggcgctgctcccacccttccaggaaggggcggggaaaaggacaccgcgctcccggagctctttaaaatcca

SEQ ID NO: 37440 - DNA, 384 bp, Mus musculus
  source 1..384: mol_type = other DNA
atctgtaattcttcatttcacttaggaatggctgacatgcagagcccagcctgtcacagatacaaggctcatgggccagtaatagttgcaatcagatattaccctgattgagttatttggtgaggattaaacaagacaagatgtataaattatatgttatagacacgtagtctgtaaatacacccaggggctcgaagtcatcccacatgtgggtggtctgttatgatttctcccagttctgacagtaatcgaacctgaatccatctctttttctcagaagagagcaatcttgagagcgagggttgcaccctgcgttgtctagcactgtagaaggcattattcaacatggaatccgcaggccgcagctgcaccctccctttaagg

SEQ ID NO: 37441 - DNA, 620 bp, Mus musculus
  source 1..620: mol_type = other DNA
tctgtgggcggggctaaaccgggtcccgcccccgaccacgcccaggcgcgggcaggacgagctaagccagctgccgggcacagccagccggtccccaagtgccactgaagagcataggctctcacctgtcgccccgagacacctgctatttaaaaggaacccgactgccccagggctggctattcccaggacttgagtcctcagggagagagactgttgtgcagagatgactctccaaaaatttttctccctggggtgcaaatgtacatctccagagaagtgagagtttggagcaccgccctccttcctcgggagctcacgctgtgggactggcagctccttttccctttgaccacctgaccctggccaggctgggtccccgccccacccagccagctgtcccacgcccggcgcggcgctccaggggtgcacgcagacacttcccgagcgttttctctgtgtgtctgagagggagaatccggccgggagcgatggcggagggcggaacgctgatgagcagggccgactcggcccctcgaactccttgattggtcgagaggctccgagcggcctctgcgctcgccccctaggggaaaggcagcaggggcggtaaagtcttg

SEQ ID NO: 37442 - DNA, 600 bp, Mus musculus
  source 1..600: mol_type = other DNA
gctcggagcctctcgaccaatcaaggagttcgaggggccgagtcggccctgctcatcagcgttccgccctccgccatcgctcccggccggattctccctctcagacacacagagaaaacgctcgggaagtgtctgcgtgcacccctggagcgccgcgccgggcgtgggacagctggctgggtggggcggggacccagcctggccagggtcaggtggtcaaagggaaaaggagctgccagtcccacagcgtgagctcccgaggaaggagggcggtgctccaaactctcacttctctggagatgtacatttgcaccccagggagaaaaatttttggagagtcatctctgcacaacagtctctctccctgaggactcaagtcctgggaatagccagccctggggcagtcgggttccttttaaatagcaggtgtctcggggcgacaggtgagagcctatgctcttcagtggcacttggggaccggctggctgtgcccggcagctggcttagctcgtcctgcccgcgcctgggcgtggtcgggggcgggacccggtttagccccgcccacagagggccctgccgcgccgctgcggctccgccccc

SEQ ID NO: 37443 - DNA, 191 bp, Mus musculus
  source 1..191: mol_type = other DNA
gagtgcgcgcgcaacgtctgagtctacaccatccacactcaccacgtttggtggggtgggaaagcttcatacccacgaattctttacatacacggccctgttgttgaagagcagaattgtttttctgtctccaaaccatcttagagtacattatgcagttcatttagttaacaagtgaaacggccgcgcgg

SEQ ID NO: 37444 - DNA, 284 bp, Mus musculus
  source 1..284: mol_type = other DNA
ggtcacagatctgaaaaccgttctgagttaatcaaataagttccaatccccaaaattaaatctaataacttcaacttaaggcttcaggcttacagcgctgagttctgcaagcatttctcaaaaactgtatttttcaacagttgcactattgagctgatatttacatacattatacaaaaatacaagaaagccagcctggactacatcttgagttgcaggccagccaggctacattggagagctccacgtaaaccacgtggggtgccccagagcctatggcacgg

SEQ ID NO: 37445 - DNA, 294 bp, Mus musculus
  source 1..294: mol_type = other DNA
aattatttataagcggttattgccattagcattcatagttcgagtcctgcttgctgatggtcagaaaggatccgcaaaggatcctggcataggaaaggcttcagaaagaatcaatctccggggctctgcttcgtggttccttggcaaggaacccctgggcagcccaatggccaggtctcagcgccctttggtcttggccttgagaggcctctgctgcggcctacctgctccagctgctttttgtttttttcctcggtgagaaaatgaactagctaaagtcgctatttgcagtcg

SEQ ID NO: 37446 - DNA, 278 bp, Mus musculus
  source 1..278: mol_type = other DNA
gattgtttaatgtaatagtttttaaaaatgaattgctttccttgaacttaaatcttaactgtaagattcctttgacaaggaaataatgctgagggttgtccgaccgtccgtccgtcagtctccgagcgggaagggttggtcagctgtgatctggtcggcccccctccccaacttttaaaatgactgtgtgcgtagcgcgctgcgcctcgaagagtgcctgggactccgcgagccaacctgcggcgggtcatccccgcctctacagcttactggcaagg

SEQ ID NO: 37447 - DNA, 259 bp, Mus musculus
  source 1..259: mol_type = other DNA
atctctcctcagaagaaagtgttttaaacacaagtgtaattgtggattgtttaatgtaatagtttttaaaaatgaattgctttccttgaacttaaatcttaactgtaagattcctttgacaaggaaataatgctgagggttgtccgaccgtccgtccgtcagtctccgagcgggaagggttggtcagctgtgatctggtcggcccccctccccaacttttaaaatgactgtgtgcgtagcgcgctgcgcctcgaagagt

SEQ ID NO: 37448 - DNA, 406 bp, Mus musculus
  source 1..406: mol_type = other DNA
aacaatctagggaaggcaaaggtttgtttcagtttatagaactcaaggtgagaacctggaaggcagattcaaccctctctaaaatacacctaattaaaaaaatatttttttaaacgagagcactaattaagtctatgtggtgttaagcatttagagttcaaagcgcagtgcctgtgctctagagcacagaaccagggttgtccctgaggacactgtcctggtaatccaggcaggtcacagggccacctgtttggtctgcatgtggtacagattacatgcaggtgatggtaatggcaccaagtgtctgtctcattatgcctcgggtggaatcattctttctgcagaagtctctgtcgagcatgcgtgagaccctgggttctgtctccagcagtgtgttcagcaaaca

SEQ ID NO: 37449 - DNA, 275 bp, Mus musculus
  source 1..275: mol_type = other DNA
gtcactttgaagtttcccctgtatgctctcaggggtcatgcctgaagagaaaatgcgataattactccaaacatcattcagtgcccatggtccggggactcaaccacgacagtctcccctgccgcagtcccggtgccaggagcgcaggctggggaccacggcgggcacgtgggatcggctgcagcactgcgccagttcagcccgcctagcagcgagcggccgcggcctctggagagaggttcctccccctctttcagcgagccacctgcagcccg

SEQ ID NO: 37450 - DNA, 227 bp, Mus musculus
  source 1..227: mol_type = other DNA
tgaaatgtgctgctttacatatgtatatttctcatgctcctgttgcaattccagaagtggaatccatgcgtcactttgaagtttcccctgtatgctctcaggggtcatgcctgaagagaaaatgcgataattactccaaacatcattcagtgcccatggtccggggactcaaccacgacagtctcccctgccgcagtcccggtgccaggagcgcaggctggggacca

SEQ ID NO: 37451 - DNA, 603 bp, Mus musculus
  source 1..603: mol_type = other DNA
gctgccaaggtagcactgtcccaggtggcacctttctggctccatcttttgacaaagagcccagaagctaaggcatctggccagtagtccatcaccttcggaagcaaactctcctctccggggagcgaggttgggctgcgtccccttccaaggagggtctcgtgagagcctcggcgccgccgccgtggggaaggcctccctccgagggctcgggctgaagcaaccgcctccggtcagctcgcggacgccccgtgggggccacgcctgcggtcccccacccccgggccaggcctcctacccacaaggccccgcgccactcgcgcaggcgcagaggcggcgagcgtccggcggctccctcccggtcgccgccgcctcagggtcgtttctccccgcagccccggccgcgcgcccaccgcggcgtcccgcgcggcccctttaaggacagcggagagggagagggagaatccctgctcgccgcccgcccgcccttccccctccccgggcggctccggctccctcagcggggcccaacccgcccgcccggcttccatccggctccggcggcggctccttcccgccctcgtctatggtggcggcggggga

SEQ ID NO: 37452 - DNA, 456 bp, Mus musculus
  source 1..456: mol_type = other DNA
agttcaagttcttggcccttacaagttgcaggagcgtttgttttgcttctaggaagacccgcgcggccccgcgctctttccgaaggtgcctggcaaggcgtccggttccctcggacgctccgggtccaagtgccttaagcggaggcggggtcagggaccggcgggaccgctcgggagagggctcgactgcgcctcgttcctcggtgccagggacaccgtcgcgggaggcgcggccagcttccctaggataagacttcccgccccgggggcagggcggtgcacttgacggtcccctcctcagtttcgggcggtcaccagagctgagtaagcttgtccggcgacccgcgcgcctagcgccaccgcacgcgcgctctggcccccgggctacccgccctcgccggcccccgcccctccgggaggaagaagagggtggaccccttgacgtcacaaatcgcc

SEQ ID NO: 37453 - DNA, 406 bp, Mus musculus
  source 1..406: mol_type = other DNA
aaacaaaacgttttagaggaatcctttaaaaattaattttaaaaagcttaatgaaaagctgcacgcctatcccagtcgaggccagcctagtgaatgtacaacatgtagaaccacgttatttgtaattctacagacctgacttgggactcaggttgtgattgccccccaagttcggaacctgaggctcggtgcctaagcactcagcagaaggactttatgggcccgtgggaagtctgtgcatttgcacacgcccatctcccgcgaggccagggccagtgcacacccgagctgcgcccttggccctcgctcaccgggggacagcgagcgtgggagccccggcccaacgctaccctttccttcctggccggaaggacgcacttccggcggatggggcggaggggtgggc

SEQ ID NO: 37454 - DNA, 298 bp, Mus musculus
  source 1..298: mol_type = other DNA
ggacgggtccctatcagctgcaggtgtgctccagctatcccctcccccgcaactcagcaggggtggctggagaacataaaataaatgactacgtaaaatgtagtgaatatttcgtttaaatttgcagacgcttgctgggtccaccggaatgctgcagtgaactgcaaaaccacttattattatcatcattattatcattattattattatcattatctgctacccaacttgcccagcaactcggggagattcagccgctgggcgccggccgccagggaagcgggtgacagctccggcc

SEQ ID NO: 37455 - DNA, 435 bp, Mus musculus
  source 1..435: mol_type = other DNA
gatatcaaccccagcttgcggagagcgggctgcttgtccaaaggacataaggtatgtggtttcatttaaaaataaacattgcaaaattgctttataaaatagccacaattacacattaaaatgaaaggcagaatagagactcaaattgctaacattaaattttataatacagtcatcactactcttttggaaaaaaataaattgcagaagtccacttgtctgcagtccgactctggccacactgtggtgtggggagcacgggtacctgaggttcagaggatgctccccaggttcccccagcctgcaccttgcggtcatgcttcagaggggatgtttcccaaggattccctcatgaggtgagcattctgttttcttaacagtgtgtgcacatctgcaatatccaaactcttctttttaatttttgttatagtattt

SEQ ID NO: 37456 - DNA, 390 bp, Mus musculus
  source 1..390: mol_type = other DNA
cctctctgaaattcaaattaaaattgatgtccattctcataaacggctttttaaaaaaacagaacaagctgtgcgatctctgagtttgaggccagcctggtctacaaagcagttacacagagaaaccctgtctctaagtggttaagagcactgggtgctcttccagaggacctaaattaataccaatgtatattaaaaaaataaaaataaattaaaaagatagtttcttttttaaaaaattaggggatggtatctttgatagattgagcatattaaatcttctttaacatttattatccttctttgatcattattgtgacaaaaggacagacagacagacagacagacagttaggaccttcagagtctgtaccaatccgggaatctaggg

SEQ ID NO: 37457 - DNA, 460 bp, Mus musculus
  source 1..460: mol_type = other DNA
ctgaggctgatataattctttataaaaacttttatcttatgcatatttatggttacttacagattagttgtgagcccccatgtggggagtcagaactgggtcctctgaaagggttgtcagtgttaaccgctgagccatccctcagccctatagaggctaaggcgttagctagggcaaaaaaaaagtctttaaaatgtgtcttacatccagtttggagggctccccaggagggggctcgcacccctcagcctgtgccatcagctctgactcaagctcagttgcggctgcggaggaccaagggcgcgcgcgggaggcgcccaaaccggcggggaagcccggtctcgggtgtccccgcccacaggggcgcggccgcgcggcgctgtcattggtgcccgctgacgcgcagcactggccgtggccgtggggcccgcggagggcggcgcgcggctgatgaaaccgg

SEQ ID NO: 37458 - DNA, 410 bp, Mus musculus
  source 1..410: mol_type = other DNA
aatattctagcatcggcattatattatgctgttttaaattcacaatacaaaatctacatgtagtctccactaccactatatagtttctggtcatttcaattaggaaatcaatgattgtttctgatcttcaaactgtcatgttgaggagacctaaagattaactcactcaataaaatggtttgagattgcggatgtggagaacttgcaatgattaaaacacatgcttctgcaccacggtgtgtcctattttgtgtctacacagtgcgccaactgttgctatgcgggggcgtggcatcgatgcgggcaaggacgccccggaggccccttcccaagtcggctctcgggcaccagcaggggccaccgccgccatgttgggggagctgttcccaagctaagggaggagccagcga

SEQ ID NO: 37459 - DNA, 359 bp, Mus musculus
  source 1..359: mol_type = other DNA
tgtatgtgccatgcatgaaatcatctgcctaatattctagcatcggcattatattatgctgttttaaattcacaatacaaaatctacatgtagtctccactaccactatatagtttctggtcatttcaattaggaaatcaatgattgtttctgatcttcaaactgtcatgttgaggagacctaaagattaactcactcaataaaatggtttgagattgcggatgtggagaacttgcaatgattaaaacacatgcttctgcaccacggtgtgtcctattttgtgtctacacagtgcgccaactgttgctatgcgggggcgtggcatcgatgcgggcaaggacgccccggaggccccttcc

SEQ ID NO: 37460 - DNA, 363 bp, Mus musculus
  source 1..363: mol_type = other DNA
tctgtcctcccaagtacagatgttaattaggggtcattgcagctgctgacctcctggagaccgcccactggtgaccttcaggcaagccgctttcgatttaatcacaggctgcggctagctgcaaacacccctgtgcaaacagggcgcttaggttattgggaagctgtggataaatttctgataaaggcttaaacagaaatggaccttcgatgattcagcttactcttcactggagacttccgggtgcggggagctcaaagagctgaagtttagtttataaactgattgaattggggaaagcccagtggggctccacccatccttctctcgggcttcctgcaagaagcaccggaagtgagttcg

SEQ ID NO: 37461 - DNA, 503 bp, Mus musculus
  source 1..503: mol_type = other DNA
tctcagctttgagtcattcctgggtgagccttaacctttatacagaaatgagaaagcccttctgacacacttatctgagtctataactgtgcaagaacgtgcctgcagcgctggccactgtgtctggacccagctcccgatgaggcgcgggctcatgctgcgccttcaacacatatttgtcaaatcaatgattcactgaataaatttagttagatatcaagagacatctcttgcaatttaacagataatccgggtttgttcagtgaatcaacccactgtaactaaatttattcaagagtggcaggctcgagctaagtagcagagctcccgcctagctcaaagcatctttctcacgctaacagagagagcgtccctcatctatcagaaacaagcatcttatcatctcagggctgaggttcactagtcaggtgaatatttcgagtgactgtcacagggtccctgttgctatcccttgtgatgtcatacgccagtgtggctatcac

SEQ ID NO: 37462 - DNA, 588 bp, Mus musculus
  source 1..588: mol_type = other DNA
gttttatcataaaagtttctctcaggaacagagatagttccatttttcgggtcatcggctaccaaccagttagccaaggagctgtgttagaaggccaggttgttatcctgtaggctgtgtgcacacgctatctaatcgttctcactccactccctggaggatggcgggagggggctgcgagcagcctccaatccacagagctggctcagcaaggtcgcctccttagaagcgtcccgccccgatgccggccggtgcagcacgccccacctagggtctcgggttcctcatcctgtggggtgagggctccgtgttcgccgcagcactgccgcagctgccatggcaaccgtgagccaccgcctcttcgcgccggccgcgaactaacggactccgggcgggcggcggctaacggcgccccgcctcgcccctccccgtttggtgagcggggccgggcttgacagggagagccgggttgcggagcccaggcgggcagccccagtccgcaagacctcggccgccggcaacaggccgctcccccggaggagaagcgggagagccgagaactacaaagcccagcggtccggagcgcgg

SEQ ID NO: 37463 - DNA, 578 bp, Mus musculus
  source 1..578: mol_type = other DNA
tattctgttttatcataaaagtttctctcaggaacagagatagttccatttttcgggtcatcggctaccaaccagttagccaaggagctgtgttagaaggccaggttgttatcctgtaggctgtgtgcacacgctatctaatcgttctcactccactccctggaggatggcgggagggggctgcgagcagcctccaatccacagagctggctcagcaaggtcgcctccttagaagcgtcccgccccgatgccggccggtgcagcacgccccacctagggtctcgggttcctcatcctgtggggtgagggctccgtgttcgccgcagcactgccgcagctgccatggcaaccgtgagccaccgcctcttcgcgccggccgcgaactaacggactccgggcgggcggcggctaacggcgccccgcctcgcccctccccgtttggtgagcggggccgggcttgacagggagagccgggttgcggagcccaggcgggcagccccagtccgcaagacctcggccgccggcaacaggccgctcccccggaggagaagcgggagagccgagaactacaaagccca

SEQ ID NO: 37464 - DNA, 288 bp, Mus musculus
  source 1..288: mol_type = other DNA
ctcagggggcctcagcctctccagtagccaggccccacaaccacatcagttgtgggtctccttgcactgactgcagacctaacccaaaggaatccttttaggcattttacaaactagattaaactcattcaccccacagtggggacgcagtcccctctttcttgctgagtcttgataactcaggcctgggactgctggtgtcctttgcacccaacctcaccaaggtagtttctgcaggaagttgcgggcctgcccaatcccagagctcctgcacggaggcggggcacc

SEQ ID NO: 37465 - DNA, 457 bp, Mus musculus
  source 1..457: mol_type = other DNA
aatctgcatatattttcattcatatgcatgcatataatgtctcgctgaaaataaaaattcaactgttaatattttacaaattaaaggaccttttcatttgcagtttaaatttaaaactaaccatagtgggtttaatcctaagagctttaatacatggctcttactattgtattagaatgtgggattaaaagtatatgcctccaagttctattattgtacactttttataaacgtaaaaagaacctattcgtagttttatctttttgccccaaaagaactagtacatttgccttttgccaagatgcttttttctaaagagaaaacgaactctcactttggaaaacagcaagtcctgtttgtgccccggagcggctggctggcagcggcgagcacagctctctggcgttgtgtaaccgccagtgtaactgcaataataagcaggagctcaagtcacgtg

SEQ ID NO: 37466 - DNA, 318 bp, Mus musculus
  source 1..318: mol_type = other DNA
ctaacaagttcccagcagctgggagtaggtggcaccttatttgccagccttgcaagaacgcaaatctcttccttccttaaagtcttgtgttctctgctattacaagtcaaaacagagggactccactcatttagtagagctaaaattaatgaattcactgagcaagacctgggggctcccctagacatgcctggtgggatctttcaaaactggcttgcacaggcaaaccacgtgcaggcgccctggcccagggccagtttctgtctggcttgcaggaagccggctcgggtgagccgcacttcggccatccgccggcag

SEQ ID NO: 37467 - DNA, 246 bp, Mus musculus
  source 1..246: mol_type = other DNA
cccgttccacctggagagctcaccgcatgaagggctcaccagttggaactgttcatttaatgaaacactttaaaaatgtttcacttgtatctggtctttgagctaagtttaaagaaaataataataataataatagcatttgaggatttaataataatagggttacaaagctcatatgcacacgtgtgcacactaacgtctacataggctagctagactgccagcatgaacactccactctgagag

SEQ ID NO: 37468 - DNA, 485 bp, Mus musculus
  source 1..485: mol_type = other DNA
aagattcatttgatccacaccgagtcacagaaaacagcgtctgtgtgtgtgtgtgttttaaagaacttgctaattctgtggctgtgcattaattcccaaacagtgctttgtgtctcaccaacgcctgctgggtgggctgcagcagcacggccgtcccggagcccgcagaggcccccgtgtttgggccacaggcccccccgagcagtcaccccactcggggaggcatccccaagcacgggccgcacatcccaacggctcggggcgggagcgtggagcgggagggggggcgggcctgcggggaggcgcccgggcctggggacgcagccgtggctgcggcggagccgggccctggccgcgcgcgccgcggctcgggcgtggggctggctcggggcaggcgcaggcacagagacaccatagagctttcccgtagcagctgctgcctctgccgctgcctctcccgcgaacgggccaatgaacgggcctgg

SEQ ID NO: 37469 - DNA, 337 bp, Mus musculus
  source 1..337: mol_type = other DNA
tagagaatgtaaactgccttcaatttaaagtctcaaattctaaatttgcttttgcaagcataacccttacgttctttacttaaatttaaaattttcgtgacaagtagcccagttcctatcaacgaagtaggaaatctgccagctctgaacatctagaactccacttgccctgatacggggacagtgcgtactaagtcctggagctgttactgggacagtacctagttcctagggcacaagcaccgtgccacttttagtgtgtttagagacagtgatctcactgtatgtgtgtccaagcatgtatatgtgtatttatatacacatacacacatgtgta

SEQ ID NO: 37470 - DNA, 532 bp, Mus musculus
  source 1..532: mol_type = other DNA
cagtaaactaaagtaggtttatctatttccacttagaaattcatattcaataaatggaagcttttatttaactaataattaattaagctgcaataaatacagtgctctgcagatcatttttttctgttgtattccttaactgaaaacaaatgggatataaatgctacctctaagccagggagtgcttagagttgagacttgtcctaaaatcaaaccctgcttgtgtattgactgcagaaacgcactttgataaagcttggcccaactgtatgccccaggtgggggagtgcagatctgtggatcccaggggctcactagccactcagcctggctgaatctgtgagccccagattcagttagagaccctgtctcaaaaagggcagcctgactttccagagtacagtctataatccctttactaaaaaccaaaagctctttggtagtaaaaactggtgcaaaccaatgagatacgtgagctttctcctgtgtatttcattgaaacaacattaataggtgctgggcaagtactgta

SEQ ID NO: 37471 - DNA, 484 bp, Mus musculus
  source 1..484: mol_type = other DNA
ttccattccaagtaccacaaactgaaattcttttattgaataatttattatcagtattctgccagaacatggtcgtttaagaccccagtcatgattcctgtgatgtcctcatggacgcgatcagtcatgacctccctgacaccacatgacctttctacgaaggcagttcttaaaacttagcaactgagctctcccctctctgaagttcgatgcgcgggtcggctgctcagctaccccccttaccgtgagcagatcaaccgtttgtgaacacgtagggtgggagcccgtcgtggcgtccgccatgacggcccgccagggaggcccatcactgcgcctgcgcgccaggcaggcagccgcccagcgaccctccgctgaaggccgcgctgcaggctctgtagcgaggggccccgccctgtcgccgcagttcccactgcgcctgcgcctgctgggcgggcaagccacgcctctgcggagccctgccgga

SEQ ID NO: 37472 - DNA, 432 bp, Mus musculus
  source 1..432: mol_type = other DNA
tcatgatgatgtcctcatggacgcgatcagtcatgacctccctgacaccacatgacctttctacgaaggcagttcttaaaacttagcaactgagctctcccctctctgaagttcgatgcgcgggtcggctgctcagctaccccccttaccgtgagcagatcaaccgtttgtgaacacgtagggtgggagcccgtcgtggcgtccgccatgacggcccgccagggaggcccatcactgcgcctgcgcgccaggcaggcagccgcccagcgaccctccgctgaaggccgcgctgcaggctctgtagcgaggggccccgccctgtcgccgcagttcccactgcgcctgcgcctgctgggcgggcaagccacgcctctgcggagccctgccggaagtgccctgcccgcgtgctctcaagcagggctgcctgccgca

SEQ ID NO: 37473 - DNA, 364 bp, Mus musculus
  source 1..364: mol_type = other DNA
gagcagtgctctcaataaactgctatgctctcagaggtcaaaagagttacctctcatagagctggaattctgtacttgagtaagctgcctaatgcaggtaagggataatcctttcagttttccattactaaagggatctggaacctgagaagtccaagactgggcagccatgtctggttggtctcagaacttgatggtccaggaactagttcggcaccacgggagtgagaactcactcgctttcggattgatttagagggatcacaactatggggtatcaagatctcatgagaggggtcccctgtcacccagagtgagaagcccccctcccgttctcagagctcacgtagggtggcttcgcccg

SEQ ID NO: 37474 - DNA, 81 bp, Mus musculus
  source 1..81: mol_type = other DNA
attcatccatccatccattcatgcactgtacaatgtgtcaaatgacatttacaggtcctgcaactttgttgtggtaaaagg

SEQ ID NO: 37475 - DNA, 362 bp, Mus musculus
  source 1..362: mol_type = other DNA
cattcacaggcctgaggaagtgtacctcaggggcagacctgaggaggtgtacctcagacacaggcctgactaggtgtatctcaggaggacctggtagtattcatttctaacagtgagtagctgtgtgcaactgagcatgtgatacgagtcttcttttaaaattcgaattgcaatttccaggatacaatatttgggattattttcatctgaagtttatgtcactcactgttgtaagcagaacacttggtgcctgccatgcagtctgtcacatgtgcctgtgtggaaggcagtcacacctggcacagactgcgggctggtcccttcgggtggtctctatttcaagggcttgtcatttcatgaat

SEQ ID NO: 37476 - DNA, 389 bp, Mus musculus
  source 1..389: mol_type = other DNA
tttttgtatttattaaaaataaggtctggtgtaacccaggctgcccctggacaaactatgtagtggaggatgaccctggcccaattttgcttacattgaaaattatgaatggaattgatcaccggtgagcagtataccaggctaaaataaactttttttttccagccttttctcgtatttgccaatacataaaacaatggcatagtattgctcatgtggtggtgaccccccccccaactacaaattgtttggtggctacttcataactgtaatgttgctactttgaccgtagtccataggttgagaactattggattagatgcgctcaccctctgggtccaggggcggagactgaggcgtctccatagcgacgcttagtactactgcct

SEQ ID NO: 37477 - DNA, 407 bp, Mus musculus
  source 1..407: mol_type = other DNA
tatggaggctctcagagacaaactgaagatagactctaaattttacctctcggcgctgcctggagtctcatgccagcttaccgagagcagagactaagttggatgataacaggggttgtggttatccacccacattctcaggatttagctttggaaatagtcatttaattaaattgaaaggaatagtcttttcattatttaaacacctgctaggggacttcccgcttgaatccaagcacctcccagcctaagctgacagcccctgggccccaggagggatcgaggatgctgcaccatgcagtgtggaccaggcagggagggccccgcgcgggggctgagtgtctttgctctgccggagcggaggagcatctggggtcctgcctgggggccggagggaaggggctgcg

SEQ ID NO: 37478 - DNA, 344 bp, Mus musculus
  source 1..344: mol_type = other DNA
ggtctgcaggaagagtgtgagatatgtcatctctaatctttgtccccaaagaagagacagctgatgcctgctgttgagtcactcctgagcataagtgagcaatttgtccagcacagagtcctggcttaaaacattaagttatagccgggcgcggtgattcaaggccagcctggtctacaaaatgagttccaggacagccagggctatacagaggttctaagtgcagagagacaaggctgggataagtcaccatggttaccagggtaaggctttatgaggtagcagccttggcacccgccccaacatctgagcgagggaagagggaggtcagcccaccgctgagt

SEQ ID NO: 37479 - DNA, 587 bp, Mus musculus
  source 1..587: mol_type = other DNA
ggggaagggatgcctcggcatgggcccgctgcctatttatttatttatttatttatttatttatttatttatttattttaaacacatcattcaggactgaaggaagaaagacaaaactcatggaaatgattttaagtgattcttaataattcatatttaaaattacaacatttctagacagagaagccctgttctgagctggctgtcctcccgcaggagcagctgtcttagtggccaagcaccaacgccagggcacccgcgccagctgccacactggagctgccggagttccacaccagcagccaccgcagtagctctgacctggcctttcatgtctcagtccagacaaacgcgtgattgaagaaaggattcatccaagcccgtgtcacattggccatctggccgctcatttagcaaattactttgtttaaaggcagtagcaacttaaaagactgttaatgcgtgacaaggcacttgacccgcatgattttcgagcggagggagagcattgtcctctcctccaaagcaagggcacgacgccccgcgctctctgtcttaatgaagcctgcctttattaaggggagtac

SEQ ID NO: 37480 - DNA, 195 bp, Mus musculus
  source 1..195: mol_type = other DNA
gggcgattcttctttatataagacattataaacaaacaaacatcatgctatgtacaaagggcatggacactattgtggaggctgccaaaactttggctccttcctgtcattctgaaggctgtctgccaggaagtgaggccgtgctgcagagcacccacaattctgagctcagtgtgagaggtctaagaaaaattt

SEQ ID NO: 37481 - DNA, 264 bp, Mus musculus
  source 1..264: mol_type = other DNA
gtgtacatatgtgtatatgtatatgtatgtatgtgtgtatctgtgtgtatacatacatgtatgtgtgtatttgtgtgtctgggcagccccttagtagaagcacttccagtactgctaatgtctagcttcatttttgtcattagtgaatatgcaaagggaatgcttaaacgcattccatcttgtgaccccagatctgtgggtaagctccatgggggtgcggccacctggctgctgaccccaccggcttcatctaagaatcaagct

SEQ ID NO: 37482 - DNA, 259 bp, Mus musculus
  source 1..259: mol_type = other DNA
aagaagaagaagaagaaaacccttctgtgttttattctgcaacagcgtttgcggcttatcctgggcctctttttactggccctcaaagcaggacccatgctctctgccacagcaagttcgtgaccggggcgtcgggagccggacactgccaccccggttattcactggagtcatggcgcccgagcagctgccctgtcaccatggcaactcaggccgcccgcggagggactgcagattctggaaagttctcctcagtagg

SEQ ID NO: 37483 - DNA, 386 bp, Mus musculus
  source 1..386: mol_type = other DNA
atgactgccaaagtctttatgaaaaggcaactctagctgccctctagagaaaactcttccaggggagggagacccttcaggaataacattaataaaaatttagctttacaccaacatctattaaggctattaatcaaattccatttaagaagaggatattaagtaaattagttgagctgattaaaaacaccttcatcatgccaacaatattaagagttgaattatcgattttgctttttataaaaactgaagatagtccaggaagaaaaaaacgatccttcttccttcactttgaggacagtaaaggagggcgcggtccagctgggcagcaggaccacctacaaccgcgccggttgcgagcgtacaccggggcgctcccgatcccg

SEQ ID NO: 37484 - DNA, 259 bp, Mus musculus
  source 1..259: mol_type = other DNA
tgcccctggtcacgtgggagagccaacctggctttctctctctgtccatgacgtcagatgtcacgggctttgtatgtctctgagacacccagcaccatcctgcggagtactttcacttagctttgaagtcaaactaaatgagccaataagtaaatgggctctccgaggggcctgacacatacatgtttagggtgtggccctaaacctaaatctagaaatgaaaatctagtcctttcaaagaaactctgatataaatcct

SEQ ID NO: 37485 - DNA, 113 bp, Mus musculus
  source 1..113: mol_type = other DNA
aggataaatatgaggtctgcagacagcctgcctggttttctatatgttttatatagcaggggtacctcagggagcccatgctgaggcacccctccatggggtggcctactagg

SEQ ID NO: 37486 - DNA, 359 bp, Mus musculus
  source 1..359: mol_type = other DNA
cccccaccccagggactgggcactctggagagtgggacactttataactgtttttatgagagataactcacctatcataaagttcactacttaaattcaattaagtgcttgttagacagtacattaccagctcggtgaccttggatttgttttttttttttttttcttaagcaagccaacaaaccaccccgccgagccacggccctcgccctgaagaagttggcaaagcagaagctctgggtgcccacaggaagcctcgcccagcttgggtccccaccctctagcgcgcccctggagagggcctgccccgaggggcggagccagacactccagcagccaatgagcgagcggctggggcc

SEQ ID NO: 37487 - DNA, 374 bp, Mus musculus
  source 1..374: mol_type = other DNA
cgtgggttaagagctgctaaatatttggtgcctttttgaaacccactgtaacatttggctttgtacaaacagtaaaacaacagagtaattaattcctttaactgggcccacagtggctccacataaaataatatgttcccatgtttgggggattaggatgttaaagccttgaaatgtgtcaagtcagcaacctattctgtagtataggcatatgtagcatatgtataatatatgtatatatagcatatgtttatgtgacaaagatatatgtcctaggactagaactcaggtcatcaggcaacggcctgagcttgcagcttcgcaagttatatcctaggaagggcaaaaaaagttctctggcttccctttgtggt

SEQ ID NO: 37488 - DNA, 430 bp, Mus musculus
  source 1..430: mol_type = other DNA
acatcaaaagttttagtatttttttacaatagtgatacttcttgctaaaactaaggataaaccaagcagacttttctcaatcgtctctaacccagacccagagtctctactattgaaggaccttttaactgcttaatcatgttctggaagcagcaactcttgttggatctttcagtaagccatgcactgggcttgactaatattgcaggactgctaggtccaaattaaaagtgtaaagctgaaagatttatttaatgtgacgacattgagaagagggtaaagagatccaaagaatcccttccaagtctatctgcgagcacatgctagccgggaacaggcacagaaggagctgctcgctgacttcccggtggcactcgcgccgcgtccccgtcgcggggtcatgacgtcacgggcagagcgcgggctcggg

SEQ ID NO: 37489 - DNA, 301 bp, Mus musculus
  source 1..301: mol_type = other DNA
ttttttttaagatttatttattattatatctaagtacactgtagcagtctttagatgcaccagaagacccaccccttcagaagagcagttggtgctcttaatactcatgacctgaggtcatcaactttgatggtaagcaatgaagatctcaatgtgttgcctgtaagatcttcaaaattgtttcgaggccagcctggtctacaaagtgagttccaggacagccagggctaacaacaaaattgtagtcctcctgtctcggaacaacaggtgaatacaactgtgcctctcctttattctacac

SEQ ID NO: 37490 - DNA, 451 bp, Mus musculus
  source 1..451: mol_type = other DNA
tttttatctattatacttataaattaaaacattatgtgtctgaagacagctacagtgtacttaaaataataaataaatctttaaaaaaaaaaaaaaaacattattgtgttggagacaatagtcatttggttggtatttagttttaattcaatacatatttatatagcagttttcctatatctggaagtaagatactttataatttctaaattatactaaatggtgtttctgagaaaccatagcaactgagttctgttacacgagcgtccatccacctgggggcgatagataaaggtgatgtttctttaagaaacttccccccagggcggggaacaagactgagtctacgttggtggccaaaatagcttgtaagtcttgcaatggactctggaacactgagtttcactgcgggacgccggacttcaatccccataatgccgggcgtgagccc

SEQ ID NO: 37491 - DNA, 583 bp, Mus musculus
  source 1..583: mol_type = other DNA
acaggcagctgtcctcatcaggaaatctctgattttgacataggttctgagtcttagaaagacactactttaggtgccagacacaaaatgttttgatttttacaacaattgtagccacaatatctcagattttctagtatgcaaattttgaacagtttcattctgaaaaccaggaccattcaccattgttcatgaagcctcctgagtccacccgagacccaaaaaaagttgcataagctaccggtactaacgtacaggaccctgaaggagtgtacctcagtccttgggaccccagccaggtgctgactgattcacaggcagtagaagtcagagggctgggcttccacagtgactgcagggaaacctcccactgtgtccccggggccaggccccttcccttgggaagggctgcggaaggcggcggggggctggagggagcgctgggggctgcgtcacccacgcttccccgggctgtcagactccccggcagcgccggggcctcacaggtagagacgccccctcccgcggttcgcggggccggggaggaggggccgggctccgagcgcccgcccctccatctatc

SEQ ID NO: 37492 - DNA, 496 bp, Mus musculus
  source 1..496: mol_type = other DNA
gcctagcctgggttatatagtgatttctaggccagtctattctcaaataaaataatacacatttattttttattttatgtgtatgagtacactatagctatagcaccctctcgctccagaagatggtcccctcctttttttttttttagaaattaaaaaaaaaaaaaaaggccggcagcctggtctacatggtaagatcatgtgtagcctggtgtacacagtgagctccagctactgggaggctgactgacagctgcccatcactctgctgccaaggagacagaggaggccgcgccagcagggcggagcctgcgcgtgcgcgcccccgggtgtgtggggcggagcccggagcgcgggctgaggagcgcgtgcgcacgcgcctgagcgagaagccgtgcggccggtagggggcgctgagaacccacgcggcgctctgcctgccccccaggcgctgtccgccgcggttcgattggagcagccgcggagctgctcttgg

SEQ ID NO: 37493 - DNA, 299 bp, Mus musculus
  source 1..299: mol_type = other DNA
aaggttacttttttttaaaaatatagtatagaatagagttcatgacacggtgttctgggatcaaaggtgtgggccaccctccccttaagacagggtctcatatgtagtttattttcattgaatgtaattttcattgatgatgggatctgttttcctcaataatagacatgtaaacactatttcagttcagtgttaccacgctggaagtcagcatgcttgtgttagaagcagaaatacagcatgttctttattcacatggataattttaactccacccatttatctaggatttaaaataa

SEQ ID NO: 37494 - DNA, 327 bp, Mus musculus
  source 1..327: mol_type = other DNA
ctaagccagggctgggagtttttctttctcttggaaaacaactcacgccttctctaatgggatgggggactctcttatcagaagaaagcaagctctcctgggatgttctctgaaagattccccgggagaaaggggaaagcaggtgattttccccactcccccaccaaacgttgtgcaaagttgggcagctgtttctgtcctccaggaaatagtctgctccctgagctggctgcagcaggtgcctggctggctgagcccctgtcccgcccccgtgccaggccggagtggggggcggcgcctgctgcggcggggcgcgggcatataggg

SEQ ID NO: 37495 - DNA, 347 bp, Mus musculus
  source 1..347: mol_type = other DNA
ttttaaaaccagtttctctcagaaatttactataagcctttataagcacttactagaagtttccactatattcccatggatcagcagcttatactgggtaagttggtccacagggtctttattgacctttagtgtcaaaatatgatccaaaagtttgtttttctttggaaacgttttatctaattaattccgttaaatggtgtgtttcaaatacacagctgcaggtagcacagctatctttcaaattaaacggctttaggaaagccaaaaactcagtcagccccaggctttaagcgcagcttgaaggcgcgttcggccgggacacgctcacgaggtcacatgagagc

SEQ ID NO: 37496 - DNA, 315 bp, Mus musculus
  source 1..315: mol_type = other DNA
ctttatttaaatctttgacagcaaggacactaatactttggaaaggggcggagttttcccctggcagcgtaagctcaaattaagcgctttaaaagtccgtaatataagcctttccaaatccctcctagtacgcaagcgctcgcgcgcccgcgcggaggccccgcccctcgcgtgcacgcccagaccaggcgcgcgcagcggaagttaccgcctccaaggcccctcctggctcttccgccacgaggccccgcgttcgcagtccggttccggttgtagctccgcccccgcgcgggaacacggctggatatccgggcc

SEQ ID NO: 37497 - DNA, 461 bp, Mus musculus
  source 1..461: mol_type = other DNA
gactccatccaatgtttggatgtatctgcatctgtttcagtcagctgctggatagagcttctcagagagaaccaacatcctgggaagcaggaggaaagcttttctgttggaaagagtcaacttgacatgttgtgttaatttcacccattaatattatatctatcacaaattcattcaattagcaaacatcctcacaatcatgaactttcttccagtaaaatattctgttggagagactatacttattctaagtgctgagatgagctttatagagataatctgactggttccctggaaggtttattttcaatgaatggaagcctcaatagatgctcaggatatcataattgacatgggccaagttcatttggcacctctgtcccagagtgcagactgcgactggcttccagggaagcctctgcccacaggttcttccagaggagctggatgctctgacagct

SEQ ID NO: 37498 - DNA, 501 bp, Mus musculus
  source 1..501: mol_type = other DNA
acatacctatatagtagtttctatagtgattccaagctgatgacctttcaggtgtctgaaagaaacttctgaagctactgcagggagcagatcagagctgtgataagttaaaaaaggcaaccaattaaaatctaatttcagataaaaattaatttcattgcaaatattgccatttgtgaaaacaagtaaacctaggttttttttttttctatgttctttctttcaatcttttagattaaaagaatatatagttcagaacataattgaatattggagtttgtttattattttaaagaaaagcagttctactaataaagataacagattatgtagcactaattatgaaatggagggaatttccttccctaagaactcaaacctgaatgtcagagatacatctttaattccttcgaatgttttctaaaatgttacactgttggtgcagtggtggaagtgggaactgcagcgactgctccactcccgtgccggaagtgacgtcgc

SEQ ID NO: 37499 - DNA, 340 bp, Mus musculus
  source 1..340: mol_type = other DNA
gtcttcagttatagcaacagaacatatgataaactaatagtaaatatagtaaataaataaataactggtactcccagtgataagattgccatttttactatgcaagcccaatctatgagcatgggaaagctctccaagacttgaagtcatttgtataaaggtgaactactgattagcacctagccctccaccctttcaaaagatgtatagtgagtaaataaattaattaatgggtaaaaaaaaatcctcagactttaggtctttgggttttacccaaacaaaccaagagaaaaaaagcatttcaggaagtctctttctgtatcagaatcgaaactggaaa

SEQ ID NO: 37500 - DNA, 572 bp, Mus musculus
  source 1..572: mol_type = other DNA
tctaatcactgaatttcttcagtgagactatcctgttaaaaattacttatattgagaattctactagcttcaggtcaaatgtttctagatatgttccattccatgcagaaagtgtggaccagcaagattttaatggttactagtgctgtgtgctacacactgtcattatgtaaacgacatgtgatttattttttttaagaaagtgagatgaatacaagaaaataaaacacaaaaaatctctaatactctgttttggttctttggtacagtctttacatgataattcacatgataattttgtgaagaaaaatggctacttaggaaattcataaagtacttcaattttcatagaaagtatttttttcaaatttcaaaataatggcataatttttcatgataagaaagtagatctgggttttatttttcttattgtgaataactcagtataatttataaagcaatactgaaaaattactgagaatcagaacatgtatacacattcattctgtattcaaatcacagaagcaagatcactgctaatttccctagcaaataaaccagcagctgctggt

SEQ ID NO: 37501 - DNA, 316 bp, Mus musculus
  source 1..316: mol_type = other DNA
ttgtatgaaaaattgtacatgtagataaatgcataaggtcatacacatgaagccattatctcctttatactactaataacaagatcaggtgcctttgctaaagcagtttgatttttctagagcgttttcaggaaatgccaagaatgaagaagactggccatcagtatttcctcagggcacacccagagccactgggaaattctagagggcatcttgtcaaagtggactacctaaaagtccaggtagtggctctggaacagaaggagtcccagttcattgaagcgactgcttagccggaaaactacatttcccgtca

SEQ ID NO: 37502 - DNA, 422 bp, Mus musculus
  source 1..422: mol_type = other DNA
aagatgaggttccttctcgtgaacaggttcacccttcgaagattttgattattgtcataatttatccgaacaattaaattccatttgtttggggaagttcataataatttgtgtcagattcatagtacagacagcctgtatacattttttacatgtttttgaaatgcaatgcttttaaaaccaaaactaagaatcttcagtactttaggaatcttcagattcatattatataacttcatgtttctttactcataaagatctattggtgtaaatttgtatcaaaattatggacacacccatggatctggtgaacctgatctatcacctgaggccatttccttctgtacgtcatgatcattatgaattaaaccttctagaatgtagcaaatgtactgctgagttttcagaacctacaacaggac

SEQ ID NO: 37503 - DNA, 414 bp, Mus musculus
  source 1..414: mol_type = other DNA
tggaagtcagcctggcctacattagatcttgttccaaaaagcaatatcaacaaataaataattagtaaataaataaaactaaatttaaaaaaactacttcatttagaatctcatgcatatgaaatttaagaatgtctcaaaggaaacctttgcaatgaataaaatttcaaggtcatccttgactacattgattatactttttatagggagattccatcagcattaccctaaaaattctactgagcggaatccgtttggaatagatttctgatctcagagtccattgggatgatcaagagtccataagaacagtgggtgcaaattggcaactggtgcgctgcaagcaaaacgttgggacgcctaaggcgtgaatcagccacctccgccccgtcgggggggtggcttaaaggctgc

SEQ ID NO: 37504 - DNA, 463 bp, Mus musculus
  source 1..463: mol_type = other DNA
gcctggctgcacccagctccggatagggatagcccgtccttggaagcaacttgctttcctcccagggtgcgcctgccagcccagactgcgcccgcctggaatcagatggagggcaatgtccccccaaatccaacctgcaccttaggttgagggcttgctcatcgggtccctggtgcggtcacctgagtgaccacagggttctttgggaaactcacctccctacggaattttcccgcttcctggagctccgagcgctggggtgtggtggagcagcggcagcgagtgcagaccctctcccgctggggcttggggtccggaggagcacggagcggctgctagcccctccctccgagggctgaaggggctgacgcgcagggagggtccgggcggggccggctctgagatcgtccgctccccccaccaccccccttggccgcagcgcgtagggaggagggagcgggtg

SEQ ID NO: 37505 - DNA, 462 bp, Mus musculus
  source 1..462: mol_type = other DNA
tgcggagtttttatttaaaaaaatacatgaagtacatacaatatttccctaaatgttttgagaatgaaaacaacacatacttaaacagtagttgttgtgatgctgcttagcagaatattctcctggaaatgtacaatgtcatattgcctgaaacagtgcgtgatctgaatagttcacgtttcatacaaatatttccatatgaaaattaaattgcagatgttcatttaagtataacaatatgtctttagagctctataaatcctaggtattgttgaatgacatttctaaattttataatagcttgtttctgaagtttatttatctctatgatacatttaataatggtactctttataaatagttctcttttaataccagattaattcaaatactcaagcaatttggggattaataggccaaataagcgttactactttatattatagaagaagctttaaaatc

SEQ ID NO: 37506 - DNA, 337 bp, Mus musculus
  source 1..337: mol_type = other DNA
ctacgtaaacgttatattttacttgtccttgagagtaaaggttggcattgcctgctttgcttacatccaggaaagctctattattgagaagccagatggtcatttaatgctccaaacatatttttgtgaaaggccttttggtggaatgtgtcaacacaattctgctgtatacttctgagacctatttttaaaacttggagaggtgaaggatctaaggatccttagttatttcctgctcctttcctggctttaaacaaacacacacacacacacacagagagagagagagagagaacaaaagtaaaacttctgtctccagcccagcagctcccccggg

SEQ ID NO: 37507 - DNA, 505 bp, Mus musculus
  source 1..505: mol_type = other DNA
ctctattattgagaagccagatggtcatttaatgctccaaacatatttttgtgaaaggccttttggtggaatgtgtcaacacaattctgctgtatacttctgagacctatttttaaaacttggagaggtgaaggatctaaggatccttagttatttcctgctcctttcctggctttaaacaaacacacacacacacacacagagagagagagagagagaacaaaagtaaaacttctgtctccagcccagcagctcccccgggcgtggcaagagtcctgtggcagtccagcccagagctgcgacctggtcctgttcctgcagggtctgcagcctgcccagagcagccaggaggatgtcccatatttaggcagactgcctggctacagggctgctgcggcctggagaagcggcttgggcaggaagccgagcccccggggagctgggagctgcggttcccgagccagtcacgtcctgcgcgcggggggcggtagcctgggcccgcggg

SEQ ID NO: 37508 - DNA, 236 bp, Mus musculus
  source 1..236: mol_type = other DNA
tgttcactgatctgttatctgatccaggctcccctcatcaacacaggcccccccaaactggggaaattagggggcaggggtggagccaacccatgagggcagctctagagctcgccacccctccagcctgcagatggcccgcagggcacagagtgaagcgggactgggccgcccggagatctgtaaagagcccatgagtcccgggcccctagcacttttcccatataaataaggca

SEQ ID NO: 37509 - DNA, 641 bp, Mus musculus
  source 1..641: mol_type = other DNA
gcttttcaaaggaagagtgctgggtctattgataatcacaaaacattaaccaagtttaaggattgccacaggcaaccaacttagtgtcaacaaagtgtgtaaatgtacaggatgcatctgttgggtgttcggatttacagccaccccaacacctggccagcatcttaggtgcagaggaacttgccagacaggtcgtgggtggcctgccgttaaggccccacgacttttttttcccggaacagtagttctattgccgggctcaggtagctgccagtccacttgggcatagccccggagctgacatctgggccgggctgcaggccctggccctctgcccccccccatgcctgtgcagccgtcgccgcccgctgccgccagtgacccggtgaccccggaggcccgtctgggcccggtgaccccggagccccgggcatccggacccccgtcacaggcgcagccaggcggccagggcgcctggggcaccggcacggctgagcaacggcggcggggggaaggccggcggcacggaggccgcaggctcggacccctcggcccgcggttcgggcgacgggcaagggagctggcggccgcttctcggctggctacggcgcccgccgccccagtgctgcccctgcgcggcg

SEQ ID NO: 37510 - DNA, 438 bp, Mus musculus
  source 1..438: mol_type = other DNA
cataagcggcgcatgaagcgcctagcgcatgaagcgcctattaggacgcggccgtctgcagtgcaatccggcacttaagagtgcagagccagcagtagctcatgtgcgtcggacgcgagtcgtggaaaccgaattcgcggacccgaagccgtgaagacttgctttccacgctcctgaaggcttgacaaaatttgcgaggagatattttctacttttatctcccgcagctcccgatgtaaaacgggggtgtgaccgttttcttggagttaaaaaaaaaaaaaaaatgaggggtcccgcgacggcccggtccactgggtgaccgcggtccggagaaggctccggaccgcagcccgcgcagcagacctaggcgaggctcggtggaaactctcccagcgtgcttcgcgagcagcgggggcatgcactgctttggcccgccgc

SEQ ID NO: 37511 - DNA, 491 bp, Mus musculus
  source 1..491: mol_type = other DNA
taaaatcatcaaggatctttgttatatttctgtattagttgaattgaaaattatcacccatcaaaccacagtaagctgagggcactgcaatgctccatggaaacaagtatgaggtatttgtgtgtacgttttaaaagcttaaaagcacacagttctttccagacttagatcaaatgcgttaggaagctgagatgcaaggatacatacatacatacatacacacacacacacacacacacatatatatatatatatatatatgtgtatatatatatatatttttttttaactattcccaggaaggaagaggattgattttcctttcctgctaagaggctcagacagtaagatgagactctgtttgaacaaagtttgcactgactttctcacctctggggtaactctcccaggttaaagttggcactaacatcaaaaagtgagccccagcagctgtcgctgcccttccgtcaggacgcctatccgagtgacga

SEQ ID NO: 37512 - DNA, 261 bp, Mus musculus
  source 1..261: mol_type = other DNA
ggtctttttctctctcaaccagatcccagaaaatgagaaaaagagagaaagcagctggccagacatgtcctcctgccctgctggacaggggacccacttggcccaaagcacgccctggtaccccggaacccgagtgggggagtgtgaggcggcggcctgtgggcccctgaacctccatgtcggcgcggggctcatcttgagtgtcccccggcggcgggccaaagcagtgcatgcccccgctgctcgcgaagcacgctggga

SEQ ID NO: 37513 - DNA, 600 bp, Mus musculus
  source 1..600: mol_type = other DNA
gattccattttcctcactactcagagtaagcataaatagataaaaatgatcgattattccatcttcagaggacccgttgggatcactgggcaagtttccaaggttaccaacaaattctggttcatcaagagtgatatttaaataacaaataaaaaccccactctagggagatgtcttcttggttaaaagcaagggctgctctggactgcatgtacacagtacacaaacatacatgctcgaaaataagtaaattttgcatagaaatttacttagaaaatcatacatataagcatataaaacaaacattcacatgtgggcagatcttgggaagagaaaaatagtcagcactgccaagaattgtcttcccaaatctgtcaggtcagatatcttaccagaaattgatgttttctttggacatttataaacacactaattattcaaaagagcatgataggaaccaactgacccttagatacttgctcactctcactgtgactgagagtgtgatgtttgctatgagcataggtaatatgatgtcacagctggaacactattgtgacatccctggatcttccttctacttcattaatgaaaaaccag

SEQ ID NO: 37514 - DNA, 503 bp, Mus musculus
  source 1..503: mol_type = other DNA
ggcggtagcctgacccctgccatggctactgaaattctaaatctaacattcagtgctatatggaatattaagtaagactatatatttacagtctccagacaatggctggatacaaactcggattatgtgtgcacctcacatacgtgtggcaaaaacacaattttgactcttcaaaaatggtacctgtacatcaatggtctatattgaccatcaaagtccattttgtagaagaaaagtccaaagtcctcttcatccctttccttgagggtcagctggatcatcccagtggacaccacagtaggtagactagggcctaggtcttggccttctaggccagcccaggccatggccaggccttggatgcctggggtcacagacttaaccacagactgtggggtcctcagcatctggaaggcacaggccttgccctaagtgccagagccccctcgcccacggtcttgggggtggggcggccttgcctcgggccggtgcggccgccagag

SEQ ID NO: 37515 - DNA, 272 bp, Mus musculus
  source 1..272: mol_type = other DNA
tgtgtgtgtgtgtgtgtgtacactcatgtgcgcgcaagcatctttacacgcactggcagcaagtccccgtgcattctgcgcaaagcccatagagacttgtcatgcctcttagaaagtgcctggtacctcctggtgaggacggcctgcaccttagggcttccctagccagcagagtgcctctggaggactctggctgggggcgggcctcagacaggctctggccggccaatccagagttgccctgggctgcaggtctcaggactgaccagtgt

SEQ ID NO: 37516 - DNA, 600 bp, Mus musculus
  source 1..600: mol_type = other DNA
aatctacctatttcaaaaaaaagctctctttttaaactgaattctgctgctgctacctcctattagtaactaaaaagagatgatccttgaacttcagtacattgtttatctgaaaggaaagtttgctcttcattggaaagacctgaaattcacagaagagtaagactctcccataaaaacgatatattgttgttgatgttattatcattattattattaatattattacattctgctcatcttccagattgccagacctgagccaaagttcagagctctggttcctcgagaaggatgagccaaaggaatctcctcttacatgcagcctgccagaactctgaagctttagtctatgaactctggcttcccggagaagctgaggttaattgagttctgtgactttaagaaacaaattttccaccgtgaggattccagcttgtgagttcaaacctgaatggtccagagtttagctgaccttagcctaggcagaaaatccccttgaaactcaagtagacaagtggctttgagcccggaggtggctttggactgatcagtgggcgggaccctgagtccgcgccccagagcggcaccagtcttcct

SEQ ID NO: 37517 - DNA, 579 bp, Mus musculus
  source 1..579: mol_type = other DNA
ataaatcttaatataaaaggatgtaattccaactctaacttcttatatacacttttttcccatctaaaagaagaaaaaaaaatgtggataccaggcatgaatgtggtgcatatacttacatgcaagcaaaacaaccatctaggcagggccttgagtggcccaagaacttggatgttcaaaacaataagaacatttaaaagtacaattttaatagatttcatatatatatataatatactttctgtgttgtttaataattactatctaaatatattttatatttaaatatagaaatgttatacacacgtatgtgtaataacaaaactagtgtatgactgtagatatggctcagtactagcctaatatgaacaaagtcctgagtttgtaactaaattaagggaactccgcagaggccaccctaaagttttcagggagctgagcaggtgcagctgcgcgtcccaccggcagtgctccgaggacgaggcgccgggcggagcctgggctgcagagccggcgctcggggcggggatcgggcgcggctccgcgctcggggcggggagctggcccagcgtccggagc

SEQ ID NO: 37518 - DNA, 549 bp, Mus musculus
  source 1..549: mol_type = other DNA
tattatgacagtaaccagctgcttagtctgaactgttttaaaacaaaagtgttaaagaccttggaaaacacaagctgtgtgagtccctgggtttgatccctagcaaacacacacacacaacacacaagcactatgtaaacagacagaggatgtgtgagtagaaagtaagatccagcttgtatttgtttttgtaatttgttcaaacatggcttttttttttaactgacttgagaaataaaatgcagggttcaataaagtctcataatattgaaaaatttttaagtgtaggttactgacaaaccttctgttgcataattaggctcgattttacaggctcatttcacaaaatcattaaaggttttcgtaacaacagaaacaaattctcatttggggctattagttagtcagactaagatactgcggctccagccaggcgccagatgttttttgagaaaacataaagagaattaagagctttgtaaatcttacactttcactttggtcttgtaagaaataattgtgacatttcatgctcggaaatgtgtcaca

SEQ ID NO: 37519 - DNA, 149 bp, Mus musculus
  source 1..149: mol_type = other DNA
ctgcttttttcattaataataagcctatttaggcagtttctaaacttaaagaagcccttgggatctatcccaagggggcccacgtcatcccggatgcctgcccatggaaaccgtgtcgggatcactgtgccaggccttgcccagacctc

SEQ ID NO: 37520 - DNA, 188 bp, Mus musculus
  source 1..188: mol_type = other DNA
gccagattatatgccccagtaatttgaaatgtaaatgaagaaagtacctaataaatttttttgaaaaaaaaaaaaaagaaagatggctacccaatgcaaattaactggttttgtatcacaaaaattcttataattaaattgtaattaattacccccatctgcctggaatcagccgagttggaacttaa

SEQ ID NO: 37521 - DNA, 643 bp, Mus musculus
  source 1..643: mol_type = other DNA
tgatagataagacactgtattcatgattggatcttattttgaaattactgtgacattggccaactgataaaatcacaaatatttgggtatctatgggatgccccccacatatatacccctcagcgctgtgacagctaggatggtattttgttttgtttctaaagccaagacatcagaaaagtagataacatatgtacatacataggtgtacctatgtatatctattcgtatatgtctacatgtgtgtatgtatcaatatgtatttatgtatatatgatttatattcacacacatatgtgtgtgtgtgtagatagatagatagatagatagatagatagatagatagatagatagagatataatgtataggtttgtatgtttacaaccgtacctgtacagaatggatagatctaagcttgtctgtttcttttttaaagacttaaagtttctctgtctgggagtgaaagttgcccatggagaaataaggtgtgcgctgccttcagcctaggactgactgtccccgggttccctcctccttgccaggctggcccgaggcggtgctgcgctgtgcggaggccctcccgcgggaggcgcgggtgtggagggcgtgggccgtgggcggggcgagccccgcagccctggt

SEQ ID NO: 37522 - DNA, 366 bp, Mus musculus
  source 1..366: mol_type = other DNA
tcctgagagcaaacaatagctcgtagggttttttttcatatagttgttgcaaaatagagttgttacaaatgtgtgttctataccaaaaggaggctagtcacctgcttgttatctttagtcaatacttcagggatttcatgatggcattaaagtggggtccatcttgaagcaaaaagccagcccttggcctcagcccaagctgcagcttcagctcaccaagtcccccttgcccccggggtatacacgacaatggagcaagggcagaggcctttagatcacgcgcgcccgggaggccctggccgggcccagccaatgggctgacggcacccgcatgacccgcgccaggagggcgtggggaagcaggcc

SEQ ID NO: 37523 - DNA, 367 bp, Mus musculus
  source 1..367: mol_type = other DNA
aaagcatgctataatttcggatatttaagttcctgcgaagcaccaaactaaccggctgctgcagcttaacacatgcgatcctgggctcaggcagatttctgagttcgaggccagcctgctacagccagggctgaggtatggcagtgcatgccttcataccaccctgtgaatcggaggccagccagtcatagaactaccattgcaattgaagtgtgatacgctcagggcagcgatgacctgtcgcactttctcatgcagtcctgaattaaaggattttcttggtatagtataccccatggcttatgattctcaagattacaaccacttgccctgtcaaaaatgttacaggagctctcagagtgcatga

SEQ ID NO: 37524 - DNA, 420 bp, Mus musculus
  source 1..420: mol_type = other DNA
aatttagggacacattatagaccttcttcaatttttatatatcaaatagagttattcttgcacctgtaactatgtgtgttatatgtatagccttaagttgctgaaaataaataaattatactaaagagaaattaagtacctcatataagagccctttaacagatttattagcctggcaaatacgtgttactgtcttgttcttttccatgggtcacaattaaaacaaagaaagaacaacagtacaacgttacatcatttttttttttttttacttgtttattttttacatcaacctgtcaactagttatggaataatgtaataagctcttaacttatgttactttatctttccagatttctgttagtgattgtaagctaaataatggcctttagtaatttaatacactgtaaaggaggacc

SEQ ID NO: 37525 - DNA, 510 bp, Mus musculus
  source 1..510: mol_type = other DNA
aattcatttgcaccctttcaggttgcctgtgttcagaagcagtggccctagcatttaaaacccaagggagcacttgttttccagaagtactttattaatgccattgatggaagaaaaacaaatcagaccctgctctgtatgcattttcttcctattgaaaacagaagctactgtaatgctttcaaatatatgcaaatgttagtggtttggcaaatcttgattacaatataaactacccaattacaattccaattgattttattttattgtcaacattgttaatgataaaaatagagtcgttttacagttatttttactttctggaaggaggcaattagagcagtactttgttcaaattgctgctataaaattcagaacaatttgcctgtaatgattaaaagtggatatagcataaattatcctctaattaatggttgtctaacctttttttctataaaaagaacttcataccttgttattattaatccatttattatttgcaagggggtt

SEQ ID NO: 37526 - DNA, 435 bp, Mus musculus
  source 1..435: mol_type = other DNA
acagagcagggtctgatttgtttttcttccatcaatggcattaataaagtacttctggaaaacaagtgctcccttgggttttaaatgctagggccactgcttctgaacacaggcaacctgaaagggtgcaaatgaattgaatccagccaggctattccgagtctccaagcctggaaacaagggcttggatgcagcctaccgggcagctccgggcggccccaggttgcacctctgcgtcagggggcgactgaccaaggcgctgccctttggagacaaaccattcgactcgtggcgtctgcatcaagtctgaaaggcaaggggggggagaagagagcagattccccctcccccctctcctctcctcactatatctctttatattaaatatatatatgtatatattagagaagagtgaggaagagaaccacctctgcc

SEQ ID NO: 37527 - DNA, 345 bp, Mus musculus
  source 1..345: mol_type = other DNA
tgaaatctgaaatgtccagtatacttttcaggtcagcaggactgtttaccagaatgattcagaatggcttacacatggagtctaaccataagtttccttcctatgacaatgagttgaaattaatattaattcctaagggtcactaaagggtccttaagaaaggccttatttggaataagatttgattgaatttgttcaccaaaagatcctaggctcatgtatatgcaaatccaattcagtattcaataccatgtcatttgcaggggtacttgggcttcccgggaattaggtttaaagcctggagctgcaggctggaataaatggtccgaggcttccgaatctttt

SEQ ID NO: 37528 - DNA, 416 bp, Mus musculus
  source 1..416: mol_type = other DNA
cttttctaccatggcaagaacctttgcactaaattgtgtccaaagataatgttagagaggaggagaagttgtctctctcttacctccctcggggaacgagtttccttgggggttttaaaggagaaaaaactattaacccttggagttcagggaatccagtgggagcccagttcttgtaactaagctcatgttcaataggagataaagatggatgcagaaactcacatatatttggtgaaattttttaaggaaaaattagtttcgatatatggtagctttttctctaacataatttgaattataattttagaataacagaataattaaataaagatggctttttagtattaaaagtggaagaaaattacaggtaattatctttgacggtaaaatgaaaaattactctaattatggct

SEQ ID NO: 37529 - DNA, 293 bp, Mus musculus
  source 1..293: mol_type = other DNA
gcggaatgaaagacattgattttcagcagtccctgtaaagacttcagttgccactggggacgtctctgcaaaagcgcttgctgcgtgtccaactgttttccagtttacaaattttcaacataaattagttgcaacttgctcacagcggtgctctctcctacagtctccgtcggaggaggggggagatcctctaaactgtacttttgagattgctgattggaacacgttgtcttcaaacatctctctctctctctctcacacacacacacacacacacacccgaagccctgtgg

SEQ ID NO: 37530 - DNA, 382 bp, Mus musculus
  source 1..382: mol_type = other DNA
agctacatacagtatagaaacaaaaaggctttttgctggctatagagaacaaagagcttctttctagctgtattttttaaagatcagggaaaacaagtttatcttccagggagaaacacattgtttaataaaaattctcagaatcttggtcttggaaaaaacagggctcacttgtgataactacgaagaaaggctttctggagaagacttcagttcgatgaagtctttctcaaatatttaataagaagaaacacaagactttttgtcttacacacctttggcaagcgtttctgtccgcccgccccaaatccgggtttccggaaaggtcgcgcgctctcttccgcccgctttggggttcacccataggcgacttcctagcggg

SEQ ID NO: 37531 - DNA, 606 bp, Mus musculus
  source 1..606: mol_type = other DNA
atgcgtcacataccacatacattgtattagaggacttagattttgtaaacccaattatttgtgttctgctataaatccacagcattgtagttctttaataaagccattgcgtattttcatcatgttatctctacagtgttgacaccattttcagtgtgatagctcagtatagatattctctgactttcgtatgtgagttgtagcacatgcagtgcattcacatccctacatattgggtaagtaaatgaaaaaaaattacatgcttaaaaaaccctctttaataaatatgtgtttgttatagttttgtacataagaaagtcagacttattttctcttacttgactttcagaatccatcagatagatgctcagttcaggaaccactgttttcagtattggcaacatcacaatgaggctaaacattgttggaaaattttctccacttatgaacactgttgctagcagtagttatatttactctttattgatctaaatattgtccattcacattttagagaaagttcatactataaacttagaatttataagaaattccactgtataatgtacagaacagttgtcaaggaacaatggaatgttggattcc

SEQ ID NO: 37532 - DNA, 280 bp, Mus musculus
  source 1..280: mol_type = other DNA
ggggagagaggcacaattattctctcgaagaagcttcagaggaaatgctacagcaggcttcgtaaagcaagtctgctttcctagggctgttccagccatgtaacaccagtccgaggcatgagtcacttcactcagttttgatgagtaatctcaggtgtcacgacctcgacttccaattgcgtcatttcgaacacaatttggtccagatgttatggactccgacgggttaccgtctcggaaactggggagagtgtcacgtggctctacaggctcgtcacgc

SEQ ID NO: 37533 - DNA, 538 bp, Mus musculus
  source 1..538: mol_type = other DNA
ttatagatccttcgaaattatatctagtatgatgtaatataatgcgtcttagcattttttttacgcaaattagttagtagcccggtgctaagcacttttggaaatagcaattgacatttttatagtccagattttaagaactaaatctaattgtgctgtttatttgtaaattcagtggaatgctcaacagaaaggagaagagactctcattaaggcagtctttgccggaaaagaacaaggtattaaatattttaggcctcctaactgacttctcaaatttgtcaattttttaaaaccaaaattgccatagataacacatacatgaattgagtgtatacatctccaaataaaactgtattcataagcctttgtcctagaacaaaaattcagcatttcctttttaatcccagtgagtctctgccagggatttaataagttgctgaaaatgaacatcatattggatcctagaaatacactgttgtacctttaggataccaaatatatagcccattatgacatcacagtgatttagtctatg

SEQ ID NO: 37534 - DNA, 560 bp, Mus musculus
  source 1..560: mol_type = other DNA
ccgctgcctacagctctctgaaagaggattggtccgctgtctacagctctctggaagacaaggtccactgatctatttgaacttaatgttatcaacttgatggagactttgtgaagaagttaaccttggcacaacagtttcttaggacaaacatttctttttattgtacaatgaatttgtaggcactattggttcaagagtgcttttaatctctgcagggagacctatgttacttatgtatccacatctatatatcagacgcctgcagtgtcacagcaccttaaggaacagaactggcccaggccgccccgcctggcgtcgctcgtcagcactgcgggccacgcccctgcgcacgggttgggtcccatggccctggccgctagtgctcaggtaagcgggagccgggtgctcagcgcggagcgctctgctcgcctgggaggccggaggatgtgctgtccgcgcgggcacatgtcccgggagttcggatgcggagcgctcgggtccggcgccagaccgatgctgcggtgcagcgcgaggcagggcggggcgggcgcggcacc

SEQ ID NO: 37535 - DNA, 480 bp, Mus musculus
  source 1..480: mol_type = other DNA
gtttagtaactataaattcattaaagaatgcagtaaaattgttttttttttttttttttgaggtactgaaaaagaatctttatatatactccacagtgctgtgcaggtttggaccgctgcctacagctctctgaaagaggattggtccgctgtctacagctctctggaagacaaggtccactgatctatttgaacttaatgttatcaacttgatggagactttgtgaagaagttaaccttggcacaacagtttcttaggacaaacatttctttttattgtacaatgaatttgtaggcactattggttcaagagtgcttttaatctctgcagggagacctatgttacttatgtatccacatctatatatcagacgcctgcagtgtcacagcaccttaaggaacagaactggcccaggccgccccgcctggcgtcgctcgtcagcactgcgggccacgcccctgcgcacgggttgggtccca

SEQ ID NO: 37536 - DNA, 756 bp, Mus musculus
  source 1..756: mol_type = other DNA
cattatgccaaatctcttgttattaaggatgtttaaaaggcagagctcggggaagccgggacttcccagcccactccgcaggagggcggggcaaacacccggcggccaatccccgcatccgcaggtcgcggtgtccccgcccactctgcccaggccccgcccttccccggggctgctgctgctgctgcagctgctgcagccgggacgtcagcatctccgagacccctgggtggcggctgcgcagtaggcgggccgtggtccaggccgcgcggtcgggaggggcggagcgagcggcgggagcgagcggcaggagcgcgcgccgggcccgcctcggccgccgccgccgccgccgccgccgggagatgatctgggcggccgcgggcggcccaggctagcggcccctgcccgtgctgcggcgggccagggcagcgaaggtcgcgggtggggggtcgtcctcctccccgcctccgggaggggcgagagggagccggggctgatcagggacggcgggcggaggcgcccgagggctgcgggtccaggggctcggctgccggcggcagggcgactgagggttcgggaacgccgcccgggtccgcgtccccgtccgcgccggcgcggccaaacaggtgtctcgggcggcgggcgagcggccaccctcgcgctctccgcggcccggcgtgtccggcccgaggcgcccggggcgggccagcgccgagcggtcctgcccgccgccccgccccgggcctccgcgcgccc

SEQ ID NO: 37537 - DNA, 402 bp, Mus musculus
  source 1..402: mol_type = other DNA
ttgaaggtgagcactgacagacaaaagatttcataacattctaaaattcaaatttaggtgttctttaattcgaatgtgtactgagacttcataagcaaactcacaggtaaatgagagacttgctttcccattgctgtatcctgtttcctgacacagtattcagttcgggaggccaggtagcttaaaaaagccatcactcttcaacaaggcattcatgacctctttttaatgtctcacatatgctaaaatgtggtcccggggcagggcccacactgggcggagcgctcgactctaggttgtggccctgcccacaagagactcaagcgcggagcgctcgggaggaaggcggggtctccgcgcggcggccccgccccggggcggtgccgggcgaggggaaggcgg

SEQ ID NO: 37538 - DNA, 330 bp, Mus musculus
  source 1..330: mol_type = other DNA
agatttgagacaagactctaatgctacatcagatcatatgtgctaggccagtgaactgagtgagctcctgtgcctcatacgaacggttgcagagacaacagacgtaggttttcttcttctgaggcttctctagaggctagcaagccagtactcagcggttaagagcactattttcaagagacttagatttaaatatatacacacatatatacataatatatatacccatacatatatatacacatatatacattatatatctgctctgctgactcaatccatggaaaatcgattttcaaaattgcaagtagatgcatgactgaattcagc

SEQ ID NO: 37539 - DNA, 356 bp, Mus musculus
  source 1..356: mol_type = other DNA
tctttcagacagccagctctagtactagatatagtgccactagcttgggtccaacagctggtgaaggaggtgaggaaatggacaggggcagcacctcttgctgccagtggctggcaactgtcagtgcccgcaccgcggcattccgggaccaggagcccgactccgcccaccaccccgacggttcagccctcgggaggagagaggcgcggagatcctcccgggtcccaggcctcagccccggccccagtgacttccggaacgccgcgcgtcactaggcagtctaccagtacttccggaagccttgagcccctccgccgcccggtgcgagcgaaccagatcgcggccgcccgctgggc

SEQ ID NO: 37540 - DNA, 289 bp, Mus musculus
  source 1..289: mol_type = other DNA
agcagctcaaattcttttcccttagaaaatgtgtgaatgaaatgacctagcaggtaagtccttacagaggatttcaggtttgtaaataccttcctggcaccaaaatgttgctgcaatggcttagcagtttccacaagctcttcttgtgaaaactacagcaagctggagggcaatgctgcttaaaggtgacctgctcccagcgcccagcgggcggccgcgatctggttcgctcgcaccgggcggcggaggggctcaaggcttccggaagtactggtagactgcctagtga

SEQ ID NO: 37541 - DNA, 256 bp, Mus musculus
  source 1..256: mol_type = other DNA
aattaccagctgttttcttgcagttttcctcaggttaaatgttagggctggaatttatgaagactaaacttcagagttgcctgaagcaggtaagggggtaaaggctgtctgcagctccttccttccttcttttagctttatgaagtttcagctagatatgcagaagatttcagtatctatctctttagaccttctatcttttgctatgtagagaaaggtttatgacagctccttactgagaagagatctgagctga

SEQ ID NO: 37542 - DNA, 770 bp, Mus musculus
  source 1..770: mol_type = other DNA
tggggctgtgctggctgccccgcaggagctggtagggcaccgtggcgcggatgggctgcagcagccgaccggctcccgcagccggtgcgcagctcccggccggccccgtcccgctcccggcagcggcgggcggggagcccgcggtgctgcgccgcatcctctgcggcgcggagtgagggctccgcgggcgggcgggcgggcgggcgcgcgagcgagcgtgtgggagccggcgccgcggtggaggggcggggaggggcggagccgcggggctccccttccgacgcgcaccccgccgccgagggggaggggacgccgcgacggccaacgtccaacggctcaaccgccccgcggcgctctgcggggcgctcacggcagagcccgcgtcgagcccatggccgccgccgccgccgccccgggcatcgcgctgacagggcactcgcccgcttcccgcggctgctcagccctcgcggggggtcgcccgcgcgacacgactcggcgaccacgggcagcgccgggactttagcctcggaggagagaaaggggcctcgaggcgcctcgcgctgcgcgtaacccgcgccaccgcaaacgccgccgccgctgccgccgccacctcggtgtcggcgccccgcctccggccccgcctctgggcgttccggacccggctcctgcggctgcgagcgctgtgattggcagcgccaccctactccgggatgccgtattgtcggagtgagaggagactcggccaattacagtaccacgtttccgctctg

SEQ ID NO: 37543 - DNA, 532 bp, Mus musculus
  source 1..532: mol_type = other DNA
gttgacgtgtacaattcagaatgtgataacgacaaacaggttgtaatggcaggtgcattttgttcttaaagacatttctaagattaaaagggttaaggatccttcactcagctttaactaaaacccggatgcaggtgtatttgcaaaattacagagcggaaacgtggtactgtaattggccgagtctcctctcactccgacaatacggcatcccggagtagggtggcgctgccaatcacagcgctcgcagccgcaggagccgggtccggaacgcccagaggcggggccggaggcggggcgccgacaccgaggtggcggcggcagcggcggcggcgtttgcggtggcgcgggttacgcgcagcgcgaggcgcctcgaggcccctttctctcctccgaggctaaagtcccggcgctgcccgtggtcgccgagtcgtgtcgcgcgggcgaccccccgcgagggctgagcagccgcgggaagcgggcgagtgccctgtcagcgcgatgcccggggcggcggcggcggcggccatgg

SEQ ID NO: 37544 - DNA, 618 bp, Mus musculus
  source 1..618: mol_type = other DNA
cttaaagacatttctaagattaaaagggttaaggatccttcactcagctttaactaaaacccggatgcaggtgtatttgcaaaattacagagcggaaacgtggtactgtaattggccgagtctcctctcactccgacaatacggcatcccggagtagggtggcgctgccaatcacagcgctcgcagccgcaggagccgggtccggaacgcccagaggcggggccggaggcggggcgccgacaccgaggtggcggcggcagcggcggcggcgtttgcggtggcgcgggttacgcgcagcgcgaggcgcctcgaggcccctttctctcctccgaggctaaagtcccggcgctgcccgtggtcgccgagtcgtgtcgcgcgggcgaccccccgcgagggctgagcagccgcgggaagcgggcgagtgccctgtcagcgcgatgcccggggcggcggcggcggcggccatgggctcgacgcgggctctgccgtgagcgccccgcagagcgccgcggggcggttgagccgttggacgttggccgtcgcggcgtcccctccccctcggcggcggggtgcgcgtcggaaggggagccccgcggctccgcccctccccgcccctcc

SEQ ID NO: 37545 - DNA, 377 bp, Mus musculus
  source 1..377: mol_type = other DNA
gccatcaaaaaattcagtgtgaaggacacagtattggtttggcacccaggaaacaaccctaatatccttgcatatggatattaaaaaaaagtgtgtaaatacatacccagctgttttcttaacactgcctttttagcctttaagcccaaatttggactccagatgcaaacctaagggagtagagagagggacactcggtcctctcgatccctgggtcctgcagagagtggccgctgtccccgcaggaagggaggcggcgggttctggcggaggggagggcgccggctcgggccgccgcgctgcgctgcggcgcgcaccggctccgcgttgctattccggctggcggcggccgctgcaggaaggaccgcttcctgcgc

SEQ ID NO: 37546 - DNA, 343 bp, Mus musculus
  source 1..343: mol_type = other DNA
ccttcagcgtacctctgatgttagaagaaattagcatttctttctgggaccaagcccagggctttgtgcatgctaggtaagtcaggttaaatcttggttcagacaaccctaggttcaaccctggtttccgtagggaactaaaacggggataattttaaccaccatattgggccatcaaaaaattcagtgtgaaggacacagtattggtttggcacccaggaaacaaccctaatatccttgcatatggatattaaaaaaaagtgtgtaaatacatacccagctgttttcttaacactgcctttttagcctttaagcccaaatttggactccagatgcaaaccta

SEQ ID NO: 37547 - DNA, 382 bp, Mus musculus
  source 1..382: mol_type = other DNA
gtttaaaatcccaattctaatttggtgctatgaactcaaacatgagtgtgtatctatcactcaagatcaggctctgactaatggagagcgaaatagccagcattcgagaaaggcctttattgatgcccatggtgatagaacacagatagaaaattttatccccctttcttgtagagtccaaggtcgcacagtcctctctgctctggcagtgcctctggccaccgcagccacaggtttacagttcccggcagcagcgcccctcccgcgaccccctccccccccagggggtgctttggccaccagagacgcaagcagggctcattcctccctgagggccaggaggcccgcagagagcctgggctgtaggctcgaccagccgcga

SEQ ID NO: 37548 - DNA, 343 bp, Mus musculus
  source 1..343: mol_type = other DNA
ggtcgaagctcccgcggaccaatccggatcgcgacccccaaggctggacgaggcagctggacctgtcctcgcccgagcatggagacggagctccggggagggcacgtcccgggcgctggagactccaggccgtagtagctcctccatggagcctgttcaggggtggtggtcatcaccaggactaataggtgaccagacaggtttctactgtagaagaatgggtaaactgagccccgctttcctatatgcaagccagggctggcgaaaggtctggctgccagagacagttggcctcctaaccagcctgtcgggcgctggcttccgagacgcgccgggctctggg

SEQ ID NO: 37549 - DNA, 403 bp, Mus musculus
  source 1..403: mol_type = other DNA
ttatttgaaacgttttaacatgtgtgaacttttgggtaaaagtaaatttgcaaagagataaatgaacattgactagtcactaggaagcagctgcagtcttaaaccgcagccgttgaccccggcggctggagactcgacctgtcctgcgggatctgggcgctgagcctgcagaggcgcctggcagctccctccggggccctccgggcggcgcggcgcgcgccccacacgcgcgcccccaagcgcgtccacgcgcggccctggccgggaggcgccgctaaggaagccgcgcccgccgagcgcactgccagcggaccgccggatgaccctggtctatacgcatgccgacagccgcatccgggctttcctgctgcaggctgccctcagcgccaggggtccttcaggt

SEQ ID NO: 37550 - DNA, 526 bp, Mus musculus
  source 1..526: mol_type = other DNA
ttcttctgttaggcctgatctaataaaatagagaacaaaaggtacaagccatgtggtttcttgttttggttgtgaacttaaaagaattagtatttgtctcaggaatgaaatttaagtagaaatagttattaactgggtggaagccaactgctgctactgactcattatactggcagtgtttgtacattctacacttttaagtacgaagtcgctttcaaaggcagttacaagacaatgtgttgactttgacacatattaaccacggtcacattgttactgagggaagtgctcaagttccttttgatagggctgatgctttgtgtaaatatgcagggagaatgtgacgatgaatttcaatgtcagttattcgtcatcctgaagggcgggcgcgtggggtctgggtgctggccctgtgccctcgctgccccccgccggtggtcccctcgggcagctggcggcgggggctgctcctctcagagctctgggccggctctgtcagctggggccccctgcggccggctgtgtc

SEQ ID NO: 37551 - DNA, 416 bp, Mus musculus
  source 1..416: mol_type = other DNA
tgggagctcctcgcccagtgcagttgcttttttccagtagagaaggaaaaaaaaaacttcccagttataactctgttaattttctaggaatttcaccagaaaccccatttatagggaagctattaaaatcttattataatcccatccaggaatcttatgagccacttaatacatcttgattatcaggaagacagaaaagaggactgtagcctcaactcactgtaaattatgactggacaatctacaaccttattgcatgcactgaataatgtgaatttaagtacatgacattaatttctaaatgaaaactcaataacaaaattctcattcctcccctttacaaaaggaatcagcctgctttccagtctagagaagagacaggtcgaactgcgcaagcgcacgcgcaggctctcccg

SEQ ID NO: 37552 - DNA, 446 bp, Mus musculus
  source 1..446: mol_type = other DNA
agttacacaaaatagcttttctttttaacttatgttcctaactttgaaaaatggaatatttgtctttttgcaaatttcatttttcttaacagctgaataatattccattgtgtaactataaaacattttcactattcaaccattagcttatggacatctataatgtttctaaattttggtgattatataaaaacatcatggcccagggatggcactacccatgatgggctaggccctcagtgcttgatcactacttggaggcatttcctcaagggaggctctccagcttgtgttaagttgatacacaaaactaggaagactcagcttcgtgaggaacctgtactcagagaatctgtgaatattcttaaagttactgagttccggcgagggagcgagtgcgcgcatgcgccctcagcttcggctgcccagggcggcgtttccgcggc

SEQ ID NO: 37553 - DNA, 282 bp, Mus musculus
  source 1..282: mol_type = other DNA
ttgtggtgtttttgatgaatgatgactttcagtacgggtccagctgaaccagcttaccaagaccttttttttttttttcaaacaaagagaattacattctagtgctgatagaataacatactagtgacttttttcatgaaagatgaggaaatttacatttaatggaaaatgagaaaaagcataatcacatgatgtttttcagaactctttgtaatactacgctggtgaacaggatgtccaatttctccaatggagatcttaagttagggcttgtctgtgtca

SEQ ID NO: 37554 - DNA, 514 bp, Mus musculus
  source 1..514: mol_type = other DNA
cctgttttcaaggtaacaagtacctttgttgtgttagcaacaatgttgttaagtcccacttttacaagctctctattgaactggaaccattcgcgaacgagactgtcttaaagccctccttaacaacgtgttcttacaggtattgaatatcttttaaattcattttgtacatggagggacacactgtttccctgtatattcacagtgtgagaaaggttttgttaccatttcacagatggagaaaccaatttctgagactgctgctccgcagcacctgtgaaatgcggcgctgttaatttaagtgccatcagaatgcagattaaaatcatccatatgcaaagccatatctaagcggtgacctcgctgctttgctaatcccgggtgggagttaaacaggcccagggtggggcagcgcagcgagcacctgcctccccaggctcgccgctgggcgtggagagcggctaggaggccgggccagggaaggaagcgcgcggcgcgccttgtccctgacggc

SEQ ID NO: 37555 - DNA, 437 bp, Mus musculus
  source 1..437: mol_type = other DNA
aacgcagatctgcgtctccccagctagcgtgccaaatcaaagaaaatcatttgagaagaattctacagctggggcggaggcggccgtccgcggcacggtggcttcgtgcgctgccctgaggtccgggaagagccttcccgagccccccactctgcctcgtgaagcaaagccagcctgctccggagacaggcaggggttcctgctggctcggcggaggccggagcaagcctcgccgccgccctcgccaccgcgccgccgccgccgcggcccctgcgttactgggggagacggtgccgctgcgacaggggaggacgcggctggagctgaaggaggctccaacgcgcaggcgccgccgagccctgcctggatgctcagtaccaacaggtaggaggatattgctgatgaaactgcaggttcatcaggatacagcccttttt

SEQ ID NO: 37556 - DNA, 241 bp, Mus musculus
  source 1..241: mol_type = other DNA
tactagtacagagcgaatgcagtctctttttggagattgggcttccatctttcttaaacaagtttctgtgggttctgagatgacaaggctttcaagtttggactccttgaaatgtaaaaccctgccacccaaactcccagcggcctaggaagttggggcagccccggctcctccgcacagcatccggggcgtggcctggcgaggagcccgcgctggaccgcccccgaggccttagctgtgg

SEQ ID NO: 37557 - DNA, 396 bp, Mus musculus
  source 1..396: mol_type = other DNA
atcattatttttttaattggctaaaaaaaatctccaatcaaatcatcaacattatttcagtattactaacgttggtactgtgacatcatgacagtgaagtattcatttttaagctttaaacattttacctctatgtatccaatagaaatacaatatgtaaattaacctatattatctgtatgctcaccacccagcgatgaggtattttactgctgtctcgagatcgaattattactgtagagagatatttttttctatttcattaacagattattataaagcaataagcttgcaggtgggtagttgtttaaaatcttaccccaccctcgcaatattcctggtattattattttttaaatgtctaataacaaaaaaagggaaaacgcagatctgcgt

SEQ ID NO: 37558 - DNA, 582 bp, Mus musculus
  source 1..582: mol_type = other DNA
gaggcaggcagatttctgagtttgaggccagcctggtctacaaagtgagtcaggacagccaaaaagtataagattagttagccctatgctttttgccaaaatgaattattacctttacatttacttttaaatgttttcttaacctgaaaaacctaacaacttgtcaatggtggatatttaagttaacttacttgaatcgctttttctatatagtttttttttaatcttaaaagttcagcaaacaaccattctttgcaagaaaatttaagtagaaaattaatctgtagtttcataaaaaacaaatttgagattttacttaaaagttgtacccatcatatggtaaaactggaaatattttcaagttacttcatcattatttttttaattggctaaaaaaaatctccaatcaaatcatcaacattatttcagtattactaacgttggtactgtgacatcatgacagtgaagtattcatttttaagctttaaacattttacctctatgtatccaatagaaatacaatatgtaaattaacctatattatctgtatgctcaccacccagcgatgaggtattttactgc

SEQ ID NO: 37559 - DNA, 426 bp, Mus musculus
  source 1..426: mol_type = other DNA
tagacactcaactgagtgtgcccacaacttacaatgagaagatgacaaattgtagacttcaagaacttttcaaagttaatgcttacagatgcatgtgaataatacttataatggttttgagtactaaacttggcatcttaaaatactgtgtatagggctgaaaccatattttctaaacctgatttgcaccacaaatgattcaatattttccaaactttctgattaaatgtgcttattttccccgttagttttaaaaaattagcaaatgtcattaggcacatttggaaaatgatgttggaaggccccaggtttgaaacattcccaaacagcgtattgttgtttcgttagtcctacgaattcactaacctgtggtctatccctcagtcagggatcccagagcgcgctgtgcatgagaaatgtagtctg

SEQ ID NO: 37560 - DNA, 376 bp, Mus musculus
  source 1..376: mol_type = other DNA
gatcaattgcgttgaaactgaattcatgataacaaaagaaactgttaaaaaaaaaagccttatttttttttttttgaatgacaatattaatataaaacaatcttttagactggaatttgtgaatcatttcagatgtcagtttaagatgacaaaactaaagacagtcattttaggttatcattataacaggtaaaagtcacattttattagcatgtctcttatctagaaaattcaacacaacacgtgtgaagttgtaaggaattaataagacttaccgaaacaagggtataagtaattctacaagagactactagatttaaagttagttctccctggaatcccgcggtgtcgccagactacatttctcatgcacagc

SEQ ID NO: 37561 - DNA, 554 bp, Mus musculus
  source 1..554: mol_type = other DNA
gcatgttttatattttaattgagttcaaattacagatattttaaaggcatcatgctctttgagtttatcatttacatccactaaaatgtctttagaagcttttcaggaattataattactgcaaggattcaattttagtatgtagcagtattttcccactttcttcatgtgtagagacttcagaaaataggtgatgaacaaaaagtgacatttattgtacacattttgtgctaaggcatatgagtatttacatctcttcacaatacctttgtactcaaagtttgagacggtaagtctcagaaactgctagatatggtttttagcaaactgtagatctctgctagatacatatattatttccttgcttttatttcttttgtgtttacatcaattagataaagcagactttttatccttagttttaatatacttgaataacaaaaataatgtttgacgctttaaacatcaaaagtgaaatgctttgatgctatcatataaaaggcctatttatagagctgacttcttttgcaatgtcaactgtaaccttacactta

SEQ ID NO: 37562 - DNA, 366 bp, Mus musculus
  source 1..366: mol_type = other DNA
ctgggctgcgcgaacgagctagcagtactgggaaaggttctgcctctccatccaggccgcagaggcgccacaggagagaaaggccaatcagcgtggctgtgttggcgcgggctccctctgtgactctgctgagaggacgtactttggggactgagaagcagcagacacaactcggctgtgccaatctccccacccccatccccgactcgccgtctggggcggcaggaggaggcggatggcccgcgatttctcccatctctggaaaaagtgatggagttcaaaccactttaaaaaaatcatcatcataatcatcatctcataggagaagctgctcttcgccaacaactcgcgcgcgcgcccgggtgc

SEQ ID NO: 37563 - DNA, 398 bp, Mus musculus
  source 1..398: mol_type = other DNA
gaaaggttctgcctctccatccaggccgcagaggcgccacaggagagaaaggccaatcagcgtggctgtgttggcgcgggctccctctgtgactctgctgagaggacgtactttggggactgagaagcagcagacacaactcggctgtgccaatctccccacccccatccccgactcgccgtctggggcggcaggaggaggcggatggcccgcgatttctcccatctctggaaaaagtgatggagttcaaaccactttaaaaaaatcatcatcataatcatcatctcataggagaagctgctcttcgccaacaactcgcgcgcgcgcccgggtgcgcgcgcccgccggtgcacgcacacatacagcgcgcttgtggggggagctgccagcgcgaaagc

SEQ ID NO: 37564 - DNA, 394 bp, Mus musculus
  source 1..394: mol_type = other DNA
gtcacttttagataaacattcctgatgtattattagtaataaccagatgtataaaagttcttaacagcccgttactcaggggtggctctgtgcaactggtttaaccagatcaggaatcctgtctgacagtacttgggacctgtgaacaaggttttaaatacacatttatgtcttcatagtaccaggaaagtcagtgtgtgtgtttgaacacacatgtacattcatcacacaccaagattatttaatagtctaaaccttggtgggcctgggctagggagcctgcatctggcctgtccagctctggcctcctgacccagacagctccctcgcaagggagctcagggccaaacctaggtcgcgccgcccccaacctcggggctgtctgccaagagtt

SEQ ID NO: 37565 - DNA, 521 bp, Mus musculus
  source 1..521: mol_type = other DNA
agtacttgggacctgtgaacaaggttttaaatacacatttatgtcttcatagtaccaggaaagtcagtgtgtgtgtttgaacacacatgtacattcatcacacaccaagattatttaatagtctaaaccttggtgggcctgggctagggagcctgcatctggcctgtccagctctggcctcctgacccagacagctccctcgcaagggagctcagggccaaacctaggtcgcgccgcccccaacctcggggctgtctgccaagagttgtccttcccggaggagaggggctgcccggagggaagggacggagtgcgcggagtcagcgcgggcggctgccactgtcgctgccactcccggggccggagggacgtggtcaggctgccagggcgtgatggggccgcggccagagcctcgctgactacgggggatgccaaggtagtggaggtcccttaggtcgctctgccgccgagtccccgcgcgtcccctcccagcgcgcgcgtcccgttcgcagcgtcccccc

SEQ ID NO: 37566 - DNA, 725 bp, Mus musculus
  source 1..725: mol_type = other DNA
taggcgctaaagtagcagaaactactttatatttgattggctttcttacattttatcagggagttgtccattttgtcatgattaacaataattatatgtttaaatattgttctcttagagtgaatctcttgggactagacacacaaaaatatttgtataattgatgataggttaattacttagttttcagagcatatgaaaagaaaataattaattaatattaaacatgaatataatgttaaatctatttagtatcatgtccttaaagtatcctgaatactttatagttatgcatatagctgaagttagtttctaatatagatttcaaattatttatgactcataaatgtacattgcaacataattttaagaatcagtaaaattaaacaataatttgctggtattgctttttatcttttatatatatgaaagggtagtttgattgaagatttcatataaatataactaataaaataaataagcatatacataaatgttctttgactcccattgaatgccaacatttttctgctagaatgatagttaactagggaaattctgcttaaatttaagtgtagatttttcctttaagacacatcaccagaattatccaaattcaaatgattgagaccgaggaatatgttacaatcacatttcacatcattatccattaaatgactctgaattatataatactcaattgaaatatgcaaacttttgattgt

SEQ ID NO: 37567 - DNA, 477 bp, Mus musculus
  source 1..477: mol_type = other DNA
aagtaggtgggtgaagtaaattaattgagaccgcagtttagctcgcctttttcccacttagtaggtccaaaaagggaaccctgtttcccaaacaaggacaccacttacttctgcagtagttgttttagtgttgagtgctcacaaaacaatatagtgtgcattggagaaatggacatctccaccattcaatagtgaaaccagggcccgtgctcatctctgggatgcccaaggagctccatgacttctttttgtctctgaaatcagccaagaatgggtctgctcttcagctggaggaaaggatggccccacaggtccagtgggtgcatcggtgcgcccagggaactccgcagggccccgcccctcgcggccccgcccctcaccttgctagcggcacgctctggctgcgaaggtgcgtgcggcgcgcgctgattggccgctacccggcactgccccgctgccattggctgccagggcccg

SEQ ID NO: 37568 - DNA, 603 bp, Mus musculus
  source 1..603: mol_type = other DNA
ttattatatgccttacaggaaaagtgtatcaaattctggtatagaaaacatttatgttttgttttgaaaattagattagtgtacttacaaaaagtcatttgtgattcacatcaataatgaggaaagctatttgtatatatatatatatatatatatatataaaatagtagaatatacactatatgtagtatatactatacatgcaataatatagcattaatatatagtatatagaaatatataatatatatgtactcatatatattatatatgtacacacacaagcacacacacatatacatccaaagttcaattttatgtttctgtctaatctaagatatcttggtattatataaaattcatagcacaataacaattctaagtcaaagtgtaattcctaactgaacttacttgttgcaataactgtggggtcttagtccactgagctaataaccacatactgccattgtaaattctggaaaagatttttactgtagtcacaccactggagtagtttttctggaatgctgtttctcaaattagtagcacatttctgataaagaaaggaagtcgccttaacttaaaactgctgtgtcatttctt

SEQ ID NO: 37569 - DNA, 284 bp, Mus musculus
  source 1..284: mol_type = other DNA
tctatatctctttacttagaaagcatatgtacacaatttgaaaagcaggaactttttttatttaacacgtatacatcttaagataattgagaaatctaccaagtatatttcttcaaaagagcaccttttatctagcaggccacttgtgatcttatcactgccgggtgatcgctgttccagccctggacaaacggcttcctttctgctctggacaggaagccctgcctgtgtcagccgcgaatgcctcacgcagtgcctggccaggcagcagctggacctggtgt

SEQ ID NO: 37570 - DNA, 423 bp, Mus musculus
  source 1..423: mol_type = other DNA
catctttggtactatagtttggggtctgggttaccagatggcaagagagatatccatgtaccatgatgtagttatatacggcattagttcctgcagtctttgaacaaaatcctgatttaagggaaaatccaaagtaagtaaaagttaggaattaacatctcattctctcaggatagctctgtgcaagccaagtggcccgggaggtctgctttgcccggcttcaccaagccaggagatgactcatcgagccggttccccgggctccttggggctttggcagaggtgccctccctccccgcaggcccggcggggcggggcggggttcggccagccaaggctgggagcgggaaccggcagcgggaagcggccgccgcccgggcagcccgaggctaggcagggcgaagccaggcggggcggggctga

SEQ ID NO: 37571 - DNA, 316 bp, Mus musculus
  source 1..316: mol_type = other DNA
tgaaactgatattttagttgttaacttaaaaagaaaaactactttgtcaaaaaatatgtttaatctccaggcagaataccaagccctgggttcgaactcgtaagcttgaacctctaagtaaaattttctgcagttgaaaatactcaaagattgcttcgttgtgtttatatttaaaaaaaaaaaaaatgttcctatatctttctctgtgaaacaaggagacagatcctttctgcagagccggatgcccatacgggcatctctgggaaaacgatgaaggctttctctgctgggggatgtgcctagacccggcgcagag

SEQ ID NO: 37572 - DNA, 447 bp, Mus musculus
  source 1..447: mol_type = other DNA
cccactgcggtccagcccgtacctactgggaggcttagggctggggaaggagattcatttggacagtgtccccccaccccaaccccccaggagcctaaagtggctggcttgggcagcgtgtattgcacttagcgaagttctcgagaacttccccctgagaggcccgggcggggggagttccgaggtgggggaagcctccttcctcccttaaacgtggagacctcttggcacatgcctcagcctaaagaagtatggtctgtcagtttggtccagagtgatcttgataatgttgaaagggaccttaggacagtgtcgggaaccccagcccctgggctggggagtcagggccgagagccgtggggagcaggagggcgcatgggacttcgccctgacccctggcggcgggcgcgggaggcaggcgctctctgcctggtacccttaaaaagc

SEQ ID NO: 37573 - DNA, 526 bp, Mus musculus
  source 1..526: mol_type = other DNA
atcaaggctagcctagtctatattttcaagcctcaggccagacaaggctacattgtgatttcctggctcaaaaattaaaacaaagtgaatagctgcaatagctgcaattttagtggttttttttttcaactctaaatgttcaaattacttggaaacttatctttagggaaggtaaagaggatctctgagttagaggccagcctggtctacagagggagttccaggacagccagggcttcacagtgaaaccttgtttcaaaaaacattaaacaaacaaacaattacatctgagctgtcattctatatatactttaaaggatttcttttatcaccacctattgaacacagggaccaaactccttttagttatgagacttcataacactgagagctccagcaagtaattgtgtagttttctgtatttcacttagaaattttaaccaaaaataacagttgtaagggtgcagagccgcagctgagtttctgctgagtttgtgtgtgtgtgtgtgtgtgtgtgcacacgcgc

SEQ ID NO: 37574 - DNA, 582 bp, Mus musculus
  source 1..582: mol_type = other DNA
aaaaggcaatggattccttagtttcaaaattttagaaacgattctaataaacgaatcttcctaagtaaatccttttcaatttcttttaatattcgagatcagaagcctcccctgggttaaactcctggggttcttccagaaatctgagaaattaaaatgaaatcattgggacaattgtctgtgacaatgaggcgggtgagtgcggggccgccacctcgggcgtgagagaggctgcagctccggggtgcgccagatctccctctgcgctggcttcagactccagaactggaggaggggagagggaaacttctccacctagaaagtttcaccttgccgaggaagtgcgaccccccgggcttactggctgcgggaagggcggggacgccaacccccccccccccaaccctccaagggtggtgccagtccccatctcgggccccaggagggaccgttggggagtgctggggcgggtacccgggtctcttcgcctccagcccggacgcgcccgggcgccgctgttgcccggctgagtcacgggccgggcagggcgcggggcggagcagtccgagggcgctcggcggg

SEQ ID NO: 37575 - DNA, 646 bp, Mus musculus
  source 1..646: mol_type = other DNA
ttaacttgaagcttcagtagtagagttgccagatttagcaaatcagtaaaatttgaaaataataaataatggttttagaatgctttaaatccttcatgggacatttaccttaaaaattggttgtatgaaattgaaatttctactggatgacgtctattaatagaggttaaatctacatttcttattcctaagaactagcaaaatagtcttcctatcataaaagaccaataaatgtttttcggatgaataaatgaatatatcaaaagtaatctttcaattatggactatttcaattaaaacagtatttttcctaatacttaaaaatgttttaaattggtacagcttttcacattttgaacaaagtcatgggctcagaatgtactcatcgccaaccgggtccatatggtcatcgttgactggaggcgctgcgcacgcgcacagcggcgctcaggccggcgctcagggggagggaggcggagctccgggggcgcgtgcgcggcggcctaggctgaggaggcggagctcccaggcgtgtgcgcagtggctcggctcccgggaggcggagctccggggcgcgtgcgcggcggcctgggcggcggggcccctcccttggcgggggcgcgcggcgcggaagaccgctcggagg

SEQ ID NO: 37576 - DNA, 546 bp, Mus musculus
  source 1..546: mol_type = other DNA
tttgtacatttcagaattttaaaagcattgagtaggccactctaaagaaagttcacatacttttaatatgcgtgttttaaaaccagatttaggagaataagacacttttatttgctccgtgagtcaagaagcaagttgctattattttcaattctttttgtttgagcagattaagaagaaataggctaacaaattcccatttgcccacaagtgtacacaggtgtgtgagcacagccttacaatacctgagttactctgaaaatgacagaaattttcaaaaggtaaaaatatgtgtagacaaatttgtggttttcgtatttgaataatgtttgccaatatgtgaaagtgtaacctctactatttgagactattatctcaatgtcttttcatctacttgtaattaaataaatgtacagccttctgtctgaaattgcttttaaatgtagatcatttttctcatatataaccgagaaccctgatctgtggcgtcacaggatgaagaaaggaattcccttgagcctctggttcaagcagcgcagtcacgct

SEQ ID NO: 37577 - DNA, 437 bp, Mus musculus
  source 1..437: mol_type = other DNA
cttcagccacaggttggacaccctgcctggagagatgcagtccaagccagggagcagatagatacctggctgcctaggagcccctcggaggagctgtgcgtaaaagccacatcttcccaatcccttcatgtatggcacacaggatcggacactgggtggtcagacatggcaggtcccaattcccatgaccagtgctcaaagcaatgagttggaaatcatcagtttagcagaaactcttagccttgacaaagtgagcgcccccgcccggcgtaggcgcccccttctttagctgcgcctggaggggaggcaagcagagctcggggctgcctgcgctcgcagtgctggcgaggcggccccgggctgccctgagtctcaccactagccgcagacgcgagcggcgggggggcgggggcgcagaggcgccggcagccgtgacg

SEQ ID NO: 37578 - DNA, 485 bp, Mus musculus
  source 1..485: mol_type = other DNA
acaataaaattatttaatggctacttatgagtcataacataaatatctgttttctgatatttcttgaccctctaccagaggtcacaacccaatggtcgagaacaataaaaatcaagaaagaattatacatggttagctttttaagtcattgagataagtactctatttttttaaaccaattaacatcaacatcctatcaatatgatgtagaaacttcaacttttcacctgaaggggcatctaatgagtcacaacagcgtgacatactctagcaaataagagtttgtcttataaggcacttatttctgagcacatgttcttggagagaatgaagttcaagaatgtaatcaaacaatttatcttatttttatttttttaatgaaacaacgtctcttaaagcgtgggcggaggaagtggctgtgagccgctctgcgcctgcgccagaggtcccaggcgcttgcgcaaggccacgctcgctcaagctct

SEQ ID NO: 37579 - DNA, 324 bp, Mus musculus
  source 1..324: mol_type = other DNA
acatatgtgtatgacacacatatacctcataggtatttgtgccactccagctcttgaagggcttactgaggtggacacctcagagtactgtggatctttgatacaaaagagccacattttcatctccttttcaaaatggatcttgaaaagttatctctggccacggtttacccgggcccagggtcgggcccgcagtctgagccggtgtggctgcgtggcgccggcgggcgggcgggcgggcgcggggcgcgctggaggaaggagcgcaaggagcgcgcggggcgggcgcgggcgcggggcgtggagggctaggcagcgctggga

SEQ ID NO: 37580 - DNA, 372 bp, Mus musculus
  source 1..372: mol_type = other DNA
atatagataatcttcagatcaaaattagattgccctatataataagtttcaggccagcctttagtaagtgactgttatagcaaacttactttagactattggtaatgctaaattagtctcaaaactaataatctttgaaatgagcttttcagatatttgtataaattgtagacacagctgcagtactgtgtgtctggtaccagtttcatagatatcaggatagtaggatcttctaaatacatagctgtatcttgagagacagagatgtgctttctatctgggatactaacacagacataaaaaaatgtcctcaagtgaattgagtatcttttgtgttgtacaggaatattaatgatggctaaggcaacctta

SEQ ID NO: 37581 - DNA, 406 bp, Mus musculus
  source 1..406: mol_type = other DNA
agattcttaattgcttgggcctaactcattcatataaactccagccatgcatttccatatgatcatttttgacaaaggaaagtagtaagacattactggatacctggtggtttttcagaacagacctcaggcttttagctgtgagttcagactttcagtttagtggaagtgagggacagttgctcaattttagaaagcaaagattttggccagcccgtcgcctcgagggaggaagcttgccgacaccagcgcgaggccgcgcatctctggtgctactgggctagcgggtgggcggggcgccgcgtctccagcgcgcacaggggggcggccgagctcccgggctgagagcgcggcggccacagccagcagcgggttaagtaccgcccgcgccgagagagctgaaccc

SEQ ID NO: 37582 - DNA, 391 bp, Mus musculus
  source 1..391: mol_type = other DNA
catataacctacatgaaaaaaatggcaagatgggttttttgtttgtttgtcgtgtagaatttctctactgtgattctcaaacaattatgaacttaaaggtcatgttcttgaactgaaaaggaaaaccgacggcatggtggttccctttagtcctttcagagtctcagacatttactgactacatttacatggaagggattttaatgagtggaattcagtgccttagatacattgagctcagtcttttaattttttaagtagacaagttaacccacattgatttggttaaattaacaagcgatttcatccatccttgaaggaaaataggtttctatccaattgtgtatgtggccataaggctgcagctgcgcagtagaagctctgcacagtt

SEQ ID NO: 37583 - DNA, 325 bp, Mus musculus
  source 1..325: mol_type = other DNA
cgatttactctcagagctctacacctttgcacagggtagaggagtcatgtcctatcaaggaacctacgtaactaaggagtacctggttcattttccaggaagcctttatctcaaaaatgttttctagaaaaaagttcatgttcttacaagacattctgtatacagttggattctccgaaaatgcacatcatggagctacaaaacttttctggctcacgcgtgagaaagctagaactccggcagaaagtttggtctcggcgtgcgagcgccgcccagaagcccggcggaaagcccactagtcagtcgccgctgaggcctcagagtc

SEQ ID NO: 37584 - DNA, 377 bp, Mus musculus
  source 1..377: mol_type = other DNA
caattttaatttttaagtgtgaaaatgtcttacttctgaaatagaagatacaggagaaagtttaaaaactttggaaacttgtgaaagaattgcctgatcttttccctatctggatgctaaatctgtatagagatacattgtgggaaagaaatgttattttatatatttatttacctacttggacattaatgacaagtcacgttgggttgggccaccggtggccccccttctcaaacacaaatattttcatataataaaaagcctgcttccattttaaaggggtgtgctaaggactcgcagagccggcagccagcggccgagcatgcgctgagagtttgtgcagctggccctggctgccgctgctgccttgtccggac

SEQ ID NO: 37585 - DNA, 383 bp, Mus musculus
  source 1..383: mol_type = other DNA
tttttatgaaaggcatttttaagaacacttgttataccaccagtgaacatttgctagggttattaaaaaagacccaacataaatttaaatcattgttagtatatgccagcaatgcattaaatcactataatttatggttggttgttgttgttttacaataaacataactgaatactattttgggttcccatttatttatcaggagtgaataatgaagataaattccagcagttctgttctaaacaaatctttgctatttgcctagcacagccgttcctagttgtgtttctgtagttgccactccaagagacacccgcaccggccggttgacgtcatcgctgcagacagccaatagcaacggcgggcggcagtgaggtcaggcg

SEQ ID NO: 37586 - DNA, 243 bp, Mus musculus
  source 1..243: mol_type = other DNA
gcaagagatgtccatcaaaatattagagtgtaatctcgaacatctgcctatagacctaaagtatgcaagaaccagttagaactgtttcctcttcagtggtccagactgtccggatgactctcttgtcgaagccatttgttattctgtattaggaaaacgcagtgacacagaggatcagagatcaagtatatttctaattgggtgccaactgcttttagctccgccccgctcggcctgggtggc

SEQ ID NO: 37587 - DNA, 177 bp, Mus musculus
  source 1..177: mol_type = other DNA
tgttactgatgatcagaattcaattctgaccttataaagataagaagagcagagtgctccgcccccccctttttactcaaagggtaaatctagatggaagtgctcactcagtgacctcctctaaggacattgtgagaggaggaaaggtcgtcggaggctcagcccaggagcgccccc

SEQ ID NO: 37588 - DNA, 416 bp, Mus musculus
  source 1..416: mol_type = other DNA
gtatatgaaaatctcacaaatatttaggtcgatgtatttaggctattaacttgtttcatgtggacctcaacataattcaatattatatttcttttgtgtacccttcaatctagcaattaaaaaaaaaaatctttctacaggaccctgtgcaaagattgacagttccccacagggcggggagagctcagtttacccaggcccccttggggacccagtgggtgaaggagccttaatgaagagaccagcgggttccacctccagccctgggcgggggaggggcgcggggctgggacaggctgggccccgccacgcccctctttctgctgctgcgcgaccccggcccccgcctgcgccctgctcccccgcccccgcgcactgcgcgtgcccagcccggagcgcgtccccgcaattccgcg

SEQ ID NO: 37589 - DNA, 515 bp, Mus musculus
  source 1..515: mol_type = other DNA
atttattacatgtaagtacagtgctcaaatttgatgacataattgttatgattaaaccctattacttcattaagtttaatttttgctaccataaattatcctgatttccaaaaaaagaagttagcagttgcaaattatacagatatggatttgaaactaaaaatattgtattcttagattgtgcatagtaaaatttgtgttaatttcccagttactcataaaatcttgataaaaggtaaactttcctcatactgctaataatttgaaagaagaaattgacatgcagcatgcaaacaatattcttcccctttgaatgtcctagtctgaatcagctctagactaggactggtcatctcaggtcctggctgcggacgcggcagctcccacgtggcaagttcacattgagtcgcagacgcgacccgggatcttggcggctgtggtccgggctcggtcctccaccgccagggggcgtgcgcggctccgcggttgccgggctcattggccgcgtcgggaag

SEQ ID NO: 37590 - DNA, 226 bp, Mus musculus
  source 1..226: mol_type = other DNA
aaattgacacaaactatccagcactttgggcttattttcagaaacttgccttctaacaagagggtcaaacccttctggctatgaccccaagaactcgcatttcagcaatactggaaattgtaatatatcttatctgtaaagtgagatatgcaaatttccttagtacagagatctttacctactgattggtaggagagaaggttgttccttcaaagctaccgttgat

SEQ ID NO: 37591 - DNA, 622 bp, Mus musculus
  source 1..622: mol_type = other DNA
cagggtttctctgtatagccctggctgtcctgaggctgtcctggaactcagaaatctgcctgcctctgcgtcccaagtgctgggattaaaggcacgtgtcaccacttaagatttttttttaattttaatttatttattttgtttaaatcaagttacatttgaaaaagatctgtgtctggctcatgttgtggtgaccccccaaccataaaattactttagttgcaacttaataagtgtaattctgttactgttattaatcataatataggtttggatatatatttaccaatgggctcatgacccacaggttgagaatatattctttatctgcaccttcaaatatgaaaaattagtgttacagatcttactgctatatctcgaacttaaagtcagaagtgtttacttcttagaaaatgtaaaagttccacacggtccattcatttattctgtggtttttaaaaagtcaattgcagaaatgtttgttttcacttttaacttaatgtgctacctataaccattttatatggcagccagagcatctacagcatgctctgagctaattggctgcttggtcttttatgtcacaatggcctcatgcaacagtaagcactaaagttacagc

SEQ ID NO: 37592 - DNA, 560 bp, Mus musculus
  source 1..560: mol_type = other DNA
agtttcttagagaagtttatcttgagcctctaagataacattccatgttatcttcaagtctactctcagtgtataaaatatttgcttagcacatagtaggtattgtacagactcaatgaacaaagatgtatttgctttgtgaaaagaagtatgctgttttctttattcctcatgttaaatcttcaggctgggcatcagaatttaataccagatacagttggtgtgtccagaaacatttattaatgtaaatgaatagtttgtgaaaggtttaaggtatttttcagtatataaaaacaaaattcaccttgtgttatttttaatgtttaccacttttattcattaattttgcaaagtggcatgtatgtatttacatatatatatataatattgacatgtaatctcatgttaatacatggacacatatgtatgaatgtgtacctcttgacttattgcttagtagccttttgaccaataggatctcagtatgcattgtactaatatgatgtcacaatttacccattaggaagtcataagtttcttgaaatcacattgaagtaata

SEQ ID NO: 37593 - DNA, 551 bp, Mus musculus
  source 1..551: mol_type = other DNA
ttgaggccaggaagtccacccaaaacaacctgttttgtttgagtcagttctatctcaacataggaaacaactagtttcatttttcaaacgtaaaatctaatttgctcgggtttgccgaccggaccggccgttggagagtgtcccactgcaacgaagggagagagacttttttcaagtctcctagaaagaataatacttcgaggggcactttacaaatcaggtcccagcactgtccggagctctcacccctacagaaagcctgcaggactactgggtgcatggtggcaaactgcgcgctccggggcgcccggcacacccgccgcccggtccaggcggtggcgggcgcggcggcgcgcgcacgcgcacttcgcgtccccgcgtccgctccgtgttgctcgggaggcgccacaggttcctcacctgcgcgggcggcgggggtcggcggcggggctgggcgcgcgcgcgggctggacgcccgaggctgggcgcgcggtccccgggcgccccgagcgcccccgcgctaactccgcgccgctccgctcgcccgcccc

SEQ ID NO: 37594 - DNA, 457 bp, Mus musculus
  source 1..457: mol_type = other DNA
ccttctgtctgagctcaggacagaagtttgaggccaggaagtccacccaaaacaacctgttttgtttgagtcagttctatctcaacataggaaacaactagtttcatttttcaaacgtaaaatctaatttgctcgggtttgccgaccggaccggccgttggagagtgtcccactgcaacgaagggagagagacttttttcaagtctcctagaaagaataatacttcgaggggcactttacaaatcaggtcccagcactgtccggagctctcacccctacagaaagcctgcaggactactgggtgcatggtggcaaactgcgcgctccggggcgcccggcacacccgccgcccggtccaggcggtggcgggcgcggcggcgcgcgcacgcgcacttcgcgtccccgcgtccgctccgtgttgctcgggaggcgccacaggttcctcacctgcgcgggc

SEQ ID NO: 37595 - DNA, 496 bp, Mus musculus
  source 1..496: mol_type = other DNA
acaattcccttgataattatgtaactaatatcagtacaataatatcatttcaaatgcataaagttcctaaaggagaatgtttatataaggttcactttttgtttagaaaaggtattaagatctctaaaagacacaatgtactttgcttttaaagtaaaaggaaaaattgccatcaatttttcagaatgctggaaatccatgcacttggagctgctattacaccttagacagtgaagtatactttcttagataggactctggacacagtctgtgctgaaatactaacaaagtcagttaatttcattcatgatctgatcagagagagaaagagagagaatctgtattactttttataaatcacataagcaaatggtctttgagtccttaagtactcttgggcttatctctttctttaaattgtgatagtaaaacaataaaactgagatttaattttaactaacattggaatattaatccaggctggttatttaacatc

SEQ ID NO: 37596 - DNA, 557 bp, Mus musculus
  source 1..557: mol_type = other DNA
agcagtggaaagaatatgaatttttctgctgcctcttttgcatactgcccctaacaggagaatcttttataatgaggggaatggactttataacacgttttttaatttcattaagctctttaaatatcaaaggatgttaaacataggttttaaataaatagtatggcagtgctaatagcaatccttcaatagaatcattgcattggctattcgaaatacagatacggtgctatgcttaatgatattactaaacctttgctgttattgtgagataaccacatgaaatttgtgcagggaacatatttgatcctttctctaaaactgattttaagactaaagaacgtggtgatagaaaaagctttgcttctcctgacttataaaagcagagtagttattaattcttcctgttctttctggctgccaggaagctaaaggaaagatcaggtagcacacagttgtgttcctgttcacatttgcatttttaaaagaaggtaacccgtgcccactgcgcgggggcggtgccctggcagaggaagctggcagttgctaggatacgc

SEQ ID NO: 37597 - DNA, 255 bp, Mus musculus
  source 1..255: mol_type = other DNA
ctattcttgcaggttggttcagaaatctacttatttttgtaaacacatgcatcttttataaagccatttcattctagaaaatgacagatgttcttgggatctgtctcaagagaaaacggatgcatcagatggttaattccactttataatttccacttatgagtatgcattcacacacgtggagggaaagctgcgcaggcgcaaatctacctctcctaggtgggcgggagctgcccctacccagcccgagcgcga

SEQ ID NO: 37598 - DNA, 304 bp, Mus musculus
  source 1..304: mol_type = other DNA
tcacagtcttgcttgagaaggacgacacaccaggccagttgtctgtgcagagacaaaacaggaccgtgatgtttaccggagggagacgcggctgcctatcgcgctcgggctgggtaggggcagctcccgcccacctaggagaggtagatttgcgcctgcgcagctttccctccacgtgtgtgaatgcatactcataagtggaaattataaagtggaattaaccatctgatgcatccgttttctcttgagacagatcccaagaacatctgtcattttctagaatgaaatggctttataaaagatg

SEQ ID NO: 37599 - DNA, 499 bp, Mus musculus
  source 1..499: mol_type = other DNA
tcaagaggtaaaaagaaaactcaagtctaacctgtttcttctcccagaatcctacagtaggaaaaggaccccagaagtctggaggctagagatcctgtcaaaaaaatctccaggcaggttgttcccacggaaactggtaaataaaacagcaggttttattagctgtagttaatgccctttaaggatatagccccttaaactaaaatatttttctgttttgtttttgcttgctttacatctgctacatacttgaaaaaaaacccactattccatatatttgcttattgagcttttggtcagaatggatacagctgaaagctctgtatcagatcatgattggtgtaagatcattgcatccaatgtcatttgatttgggtacttccagcacggagcctccctggagctgagtcagcaggttttctgtaaactccaatcagaacacagttatgtttcttttgatgagagtcaatagaaacaaggtcagatcttaatttaacaa

SEQ ID NO: 37600 - DNA, 371 bp, Mus musculus
  source 1..371: mol_type = other DNA
attactacagtcttatacatctgtagtctataattattatgaaatcctacaaactctataaatagtataatatcttcacaagagtgaatacatttgtataattaaaaattatccagataccactttggttaaaaatcagatatgggcaaggataatactccccataagattatgagcattggactgtcctgtgacagtctctgataaattggaataatccagtcagccatttgaagtggagacaactctctcaatctcgattgccaaaatctgtaaatgagtaaatgataaaatcctgtttttttgtggtaagacgttctcaaaacaaagtttatcctccgttgtttgaacacaaagaaaggagaaccatg

SEQ ID NO: 37601 - DNA, 525 bp, Mus musculus
  source 1..525: mol_type = other DNA
gttagtacaacttatgtgatacgttgtatgattaatgttaatagtaggatgtacattttatagaattcctctatattccaatttttttaaattaaagctttttagttttcaaccaatgattttatactaacctttaatattatgaaacacagtaatgaattctcattatttacttctgctgggaattgcaccaggccctaggtccctgcacctagaacattcatcctgaattaaagatccgccaggcgggtggtggatccctccacgccccgttggcggccgggactaagatctccctgacaggcggcctgagagtgacccgacgctccgcaaaggtggcgggctcggcagtcagtgtaggagacccgccagccctgcctcgctctgagtctgcgcacgcgcgcggctgcaacaagacctcaaccgggatgagccttgccgcttccggaaggggcggggcctgggtaggacacgccccggcacgcagcaaccgagggggtgtcccgccttgccgagtggccccgc

SEQ ID NO: 37602 - DNA, 391 bp, Mus musculus
  source 1..391: mol_type = other DNA
agcatttgataggttaaataagaaaagatatatacttagtaatgtataactcctaaaaacagacaaactttaacacttcaaagaaaacctgcaatacatttatgttctgatttaattttgtggaaaacaatgtaggaaacatttatctacggaagtcacagagagaaacaaatgtctgttttcttaatgcttaacccatgaaatggtgcaggctacaatggtttggcttttcctgaaaaatcttcacagatataactactgaccaattttcatgtagatagtagagactctcttaccaggtgattctagattgtgcataacttatttttaaatactacattaaaaagtaactttactagacaagttcagccatattgctttatacaatctg

SEQ ID NO: 37603 - DNA, 553 bp, Mus musculus
  source 1..553: mol_type = other DNA
ttgaaaaatctgtcataagaatttaactcctgtgcttgaattacttactcaacagtattctgtactgcatgggagaagatctctgagatagtccacgtgagtgaaatatccggagaagagtgcaattcccggagagttcaacagtcagtctctcctgctttctgtgctcactagggaatgcttttgtatttggtccaaatcaaaagtagagcaggtcagatatcagtcctgattgacactctacaaattttggcacaaagaggtctggctattctgagatctgtaagcagtatttcaacagatagctctaatatttgtctaacattaggaacagagaataaggaatagttattctgttgttgagaccagcacatgaggatctatttgtaaaaataacacagggtacaccaagtcttagcgaatttaagttggatattttaaaaaagccatgctcattttatactaagatagttttaagggagactgagtttgattataaagagatttactgcaagcctcctgtttagcttggaggactgagtcagccctgtat

SEQ ID NO: 37604 - DNA, 423 bp, Mus musculus
  source 1..423: mol_type = other DNA
ttcagcactttccatgtgtcagatataggggaggagaataagtatttttttaaataccctttttaggttcatctagggaatgtctgatgtatctgcatatttagcagaaacataatacacttgggtcttaatcaagaatttgaaatacagcctgtgaaaccaatcatagggttttaattacattattgtcctgcataatgaaaatagaaaagccaagtctattttccataaaagcaaataaaaatctttcactgtcatcttctgaacaggaaacagacttacagttttaatcaaaccattactgtgagtatctagtagagatgaaagctaatgacataatgtttcatgctacctacatgctgcaattactgcaaggattttgtatgatttttgtgattaattcagaaaacaatacagttaact

SEQ ID NO: 37605 - DNA, 473 bp, Mus musculus
  source 1..473: mol_type = other DNA
taaaactccagtgtaagttatcttaaaggtaaagctgaattacaaattcaatagatttatcttgtagtcttttgaaatgcaaaaaaatagatacttcatgtcatataatccatagtgaaaacagtattttctcacagagacataagcaagaaacattcaataatcttttatggagttttttttttttcccaggaattaggatctcactcacaggaaagattgataatcatatttgtagagactactgtagttaagatttttgatactatctagattatatggcaacaatcagactgatcatgtaatatgacaaaaatctagacaacggttgtatggcagtataataattgtgcttcacttaagaaaaccatcaggctgaaagaggaagatttgtatttttttaaaaaagcattttctttctcaaggaagggagagaagagacaaaatagtgaaggaagtagtttcttgatgtg

SEQ ID NO: 37606 - DNA, 379 bp, Mus musculus
  source 1..379: mol_type = other DNA
ctgtggagtccagaagtctgtggtcacgagacaactcatataattgttgaaacatctctccaggcctcaagctataataagatgaatatatgctttgataagggaaggttacctctctcaggtacagagtgataatggagcatgatccaaaatactatttttttccaataacaacaagccaagcactactttgattgacattttaaaaacattcattctaagatttttaaaagagaaattacatttgcttacacagtaaatgctaatcttttttcccaaaggaaataaaatgtaataaaatgtagacatttatctgtcagttaatcaaaaaatttacaacattcttttcataatatcataaagaaacttctttctttgg

SEQ ID NO: 37607 - DNA, 324 bp, Mus musculus
  source 1..324: mol_type = other DNA
aagcatgctgtctttggtaggggacacgccctgagtaaactagcctacgcgtctccggttaacacgctgtgactgggacacagctccacagtttgggcccgggcccggcctccggctagtggcaccaggccatttgtctccgccagccaaggcctggccctggtttccacgaggaaccccctgcagcacttgcccagggctgcagagatggccaaaggggacccgggcggcgctcttcgcctttcggggcagacccctgtgagacccggcgcgggaggctgggcggggcgggggcccgggggaagggcgatctccgctcgcgta

SEQ ID NO: 37608 - DNA, 285 bp, Mus musculus
  source 1..285: mol_type = other DNA
cagttctgaacaatgttaaaggtaacgggacacctggatccttcctggggagagcggatccccgcctgcaccgggggtcctgagatccagggcaataacccatggagttcacaccaccaggggatcccgtctctccacaaaccagacgcgcagtggctgagccgctgggagaggccgggccacctcccctgtccaccccgccagcagcggttccaggcaccacgctctccacccgggttgcgatggtggtggcagtgacaagctcctgcagcccacagcactgtg

SEQ ID NO: 37609 - DNA, 361 bp, Mus musculus
  source 1..361: mol_type = other DNA
tgaaataagccgttattataattggagttagaaaacttagcggataaatagtatttcacaactgtgtgtcttgaatcggttcttcagttcatcatcaccatcatgtatttataaaaagtcgtatttgaatgtttaacttagaataaaagctttagtcgacagaatggaatctggaaccagcctggtttagaatagagttctcacttgctacaggatttaagactcttatttcctttgggcaaccggaaatccgcgtgagccaaggggcaagcagccttggtggctgagacacagcttgctgtcgggagttcccggccagccacactgcggagtacgcatgcgtgaactaagctgctcgcgc

SEQ ID NO: 37610 - DNA, 229 bp, Mus musculus
  source 1..229: mol_type = other DNA
tgtaaacacatattcacaaatgacagtgcttagcagttctgaacaatgttaaaggtaacgggacacctggatccttcctggggagagcggatccccgcctgcaccgggggtcctgagatccagggcaataacccatggagttcacaccaccaggggatcccgtctctccacaaaccagacgcgcagtggctgagccgctgggagaggccgggccacctcccctgtccac

SEQ ID NO: 37611 - DNA, 546 bp, Mus musculus
  source 1..546: mol_type = other DNA
ctaggccggccagcgcacccctggtgcagggtggtgcggcaaggagttcccgccttctctccgcgtggcgagaacccagtggaactctcgggctttgctcttggagcccagagggtttccagccgctggatgggagggaatccgtggggctatactcctcctccggctccaggggcgaggtagaaggcgttcgctggcaccctctggtgtccgagccccagggcaggacctagggcgaaagcaagtgtcaggacacttgtcatctgtcgtgtctgtcagcggcagccgagctcactgcgccgtggtgcggccgaactcggagttgattcagacttgaatgtgaaggggtcctgtcactggggtgtccctgtcccctctcacttcccggggtgaatggttggtgcgaagctggtgatcccgggcgcgatccccgccgcggctccccgcgccgcgtggggtgaatggccgcgggcggagggtcgggaggcgccgggcgtagaccaatcgcggccgccggtgggagtattatggaagagactcgccggt

SEQ ID NO: 37612 - DNA, 427 bp, Mus musculus
  source 1..427: mol_type = other DNA
cccctctcacttcccggggtgaatggttggtgcgaagctggtgatcccgggcgcgatccccgccgcggctccccgcgccgcgtggggtgaatggccgcgggcggagggtcgggaggcgccgggcgtagaccaatcgcggccgccggtgggagtattatggaagagactcgccggtggctcggccggctcagccccctcagcccggagaccagccacaagtgcggccgtggtgctcgcctctctcggtggccaaggcggcggcagcgctgatatggagctgcgggtcccccgcaggcttcctcacctcgccctctgcggggagcagggtaagacaccgcagctgacagccaggtgtatgctttccaaataacaaggcggccacccctcttgtcttcccatgatggaattcccaagctttggagatgtg

SEQ ID NO: 37613 - DNA, 463 bp, Mus musculus
  source 1..463: mol_type = other DNA
ttttcttttttcagaagctccaaaactggaacttgaaaactggaagttagttaattgtggttttcattcattaaaaaagccacctcagcagctactaaagtcagctggcgagccagcacctgacagctcactctgcctgggtcggatccgccgaagcgcagcagcgcgagcaacagtttggtgcccgagcgagcggcgcgtgcccggggaggggaagacgcgcccgcggttctggttctcacacctccgggcgcacgcagcctccggccgtcgctccgcagccgccggcgggaggacgcacgggcgcgcgccggcgaggcccgccagctacccggccgccctcggcgcccgccaaccccgcaccctcctccgcccgaggccggccccgcgcgtcgcctccccaccggggctgcccgcccagcgcatgcgcgccgcgctgccgggcgtgccggccacactcccc

SEQ ID NO: 37614 - DNA, 360 bp, Mus musculus
  source 1..360: mol_type = other DNA
atatgatttctattggctgcataataccaccacatagaagtggccatttatagcatattgacctataatctgcatttgcgaacagaaaatgagatcataatataatatcctatgtagctgcagaacatttattctattctgctccaaccgtatgcaagtattcgtcctatagtaacaactgcatttgcttacaaacttcctttggaattttgaaaattgattttggtgattgaatcctgatttcagggtcatcctgggcttttcttttttcagaagctccaaaactggaacttgaaaactggaagttagttaattgtggttttcattcattaaaaaagccacctcagcagctactaaagt

SEQ ID NO: 37615 - DNA, 182 bp, Mus musculus
  source 1..182: mol_type = other DNA
agagcagagcagccagtgggtaacctaggttgagttaaaaggcagactacaaacttaaagcttccaagttttgctatacatttaacatgttgtgaaccagctatttcataactgtagttttgccatgcgatttgagtaatttattaaatcttcagatttctagataagcatggaaatctaga

SEQ ID NO: 37616 - DNA, 281 bp, Mus musculus
  source 1..281: mol_type = other DNA
tcttgagatgaaaatcttttcatgtcttgtcacctaaggtaaaatctaaatgcctttaagttgggggcaagttaggctacacactagtgtgaaggcaccttgtaactcttgtgacacagccctgaccccaggccttatggctatataatgccccttttactaatcagaactaagggccaaatgttggacattgccccaaatagtttgacaggcatctccaaaccactgctcagccccacccatctcacgcccacggcggggcggggtctgtggcgtcactt

SEQ ID NO: 37617 - DNA, 335 bp, Mus musculus
  source 1..335: mol_type = other DNA
gccagcatctgtactgagcactggtggaacttccatcactgctccagggctctgggccattctgccaggggcagatctggctttctgcccagccagttcacctgtaacatagctgggcttggtaaagcccagttctggggtttctgagcctttaagggtttaaaaggggcttcatccttaatggttatgtatcaaaataatttcctaaataggaagtaaataggttgattcctatcttgttaataagaaagagaggtgcccaaagcttgggacccacttcctttggcccatgaccactgtgctgggacaaaggtaacttctgggtcacagaggtg

SEQ ID NO: 37618 - DNA, 327 bp, Mus musculus
  source 1..327: mol_type = other DNA
aacctcgtctgcaatagcaacaaggtttcttttgttcaaacaacagtatcagtttttaatctatgtgtgtgtgtccttagaaacatgcatttctagtcatcgtcctgaagttcatttccagggtactcaatttggctacatatcatttatcttttgtaataatacacacatgatctgggggtatcagtactcctggaataaactttggatacataggattgagagagcctgtctgaatgcctctatacttccttcagggtagagccacaaggacacagccggtcactggctgtgggttaccctgcctcagggccagtgtcagccagc

SEQ ID NO: 37619 - DNA, 427 bp, Mus musculus
  source 1..427: mol_type = other DNA
acttaaaggcatttagattttaccttaggtgacaagacatgaaaagattttcatctcaagacttgtggagttctagcccacacggtggaaagagagaacatattcccacaggttgtcctctgagagggagccaggcgtggtggcgcacgcctttggttttaagaaaatatttctgtaataaaaatctactcaagatgccagcagcatctccgtgagttcgagactaggctggtctacatagtgtttcaaaacaaaagacaatgagctactttgagaatcttttaaatgtacttttcgatggtccccaggcaggctgccaggcctcccccgcaaacgcgcctggggggcggggccggggcggacccggaggggcggggccacgtgacgtcgggcggacccggacgcgcggaggtggcggcggcggcgg

SEQ ID NO: 37620 - DNA, 394 bp, Mus musculus
  source 1..394: mol_type = other DNA
actactcaaacttcttaaaacagggtccaggttttattattaaataatacatacaagaaccttcagccctgggatggcaaatcccaaggtttttcctaactgcaggacgagtcatcctctaagagatgcttattgcttccatatactccggaccaccgggagattcgcgtcaaaagtttcctctgctttgcggaggtgaaacgtcagaactctgagccccaggccttgaggggcggggcaggagcagaacctccgctggagggcgaggcccgccccgccttcggggctcccatggctccccgcctggagctccgcacccgttttgggaccaaagggcggagcgctaattggctagagggcggtggcgctctggcacgcttgcgcggcgtgtggc

SEQ ID NO: 37621 - DNA, 481 bp, Mus musculus
  source 1..481: mol_type = other DNA
ttagttaattagaagtcttcctaataccataacaacttaggttatctatttgagtagtcattgttgactctaggccagaatttaaaaaatgacgcccagttcccttcaacttactatagaaagataagaaagtctcttgactttgtagcactgtatatcttggaactcagagcctctgccttctgagtagataattatctaccaggtccagaatgttatcaagttgtgactctcttattcataatttgataaatatgtgtgattgagatcctaggcttatagatagatatgtttacctttgaaggttcagtttaagagaatgttatttttctcctttcatgagaaatattctatgttagttttcctgaagaaagtagatcaaggaagggaaagtgcagggccatgaagtgcctggccacgtttcatctctggtcatgaagaagagaagagtgaatgctggcactcagcttaatttcttctt

SEQ ID NO: 37622 - DNA, 478 bp, Mus musculus
  source 1..478: mol_type = other DNA
ccagccatttaataatgtcttataaaaaaaatcatgctatttctatttttgtaccgggtggtgaactcaataggcctgatccagttgtttcaatccttaacaactagctgaggttttaagacagaaagctgaactgttctgtacccattaggaacccaatgatattcttgccttaatgaaaaaaaaaaaaaacaaacattgtttgatcagggacaggcccttgccacctgcccctgggactggtccagagcgaagcaggtgcattctgtgatgtcacaggatgaaatgagacgactgttcttcgggtaccaaaggaagacaagttgccctgagcttgggaccactgctccctgcggtgctggaagcaccatcccaagggacccgctaccgctgctcagtagctgctggccaaacttgcactcgagggcgcggctgaagttctccctcgaggcggacagttgcgcaagtggcactgggg

SEQ ID NO: 37623 - DNA, 470 bp, Mus musculus
  source 1..470: mol_type = other DNA
ttgtaacttaaaagtaaagactttaaaagtgcctagggtactttttgcagctaggcattctgcagtaagacagacagtgaagcccactgagtgttaaacactgtgggtagcctccagtctgtctgataaacagacataaatgaagatcttctgtctctgggccttgcagagattttgtaagattttaaaaataaacgtctgtctaattttactcctaatatataagtaggagctcaatcagtaagaattgaaaatatgatttcgtacgtagtattatacaatttgtctctgcggccaagtgacagtttgtctcatgttttctgaggacatgtgactagttcaaattatgtatgttacatgcttgaatgaaagattttaagagaattttaagctgttggcggtgctgggactgcacagagaccgtcgttcaagaagctccaagaggacttcctgaatttcccggcaactcg

SEQ ID NO: 37624 - DNA, 479 bp, Mus musculus
  source 1..479: mol_type = other DNA
aatttgtgagtgtgactgatctcaaactttcaatctttctgcccaagtgacagaattaaagccctccctctctccctccctccgtgtgtgtgtgtgtgtgtgtgtgtgcgcgcgcgcgcgcgagcgcccgcatgtgcgcccgcacgcacgtttccagactaacaaacaagccacacttttttttttttttttttttttttagggtttctctgtagtcctgagcgactgctcagtactcttagctagcagtcaaattgtcactattctctcccacagatatttctgaagctgagtattttggagcctgcgaagaagcgtaggaggccttcctcggtggttgtatgtttgcaaaccaccaggtggtgaagcaatcttaagcaatttgataagttctggggacttataataacacatttgttgcttgggatactaacctatgccagactactgttgcatgtgtgcacgtgtgaatgtgtgtg

SEQ ID NO: 37625 - DNA, 326 bp, Mus musculus
  source 1..326: mol_type = other DNA
ttctcctaaagggaaaaactttaaaatcaaaacatctctagatctttcaggagctgagaatgaaggctcttccggaatagcccttccccttctgcatctatgcatgaggagggccaattaatagattgtagaatatatgtgttcatttatgaaaattgcttctcaaatatatttcactcagtggcctctaaggggcccagccaagttaggggtgaaccctgtaaggtccactgctggggttccctggcctggtcgccagagtcgagggcggcagcaggcaggggctggaggagagggcggcgcccggggcctccctccgcagccgc

SEQ ID NO: 37626 - DNA, 315 bp, Mus musculus
  source 1..315: mol_type = other DNA
tgtatatctgtgcagcatgttcatgcagtgcctgtacctgttacaacctgacagttgtaagctgccatatgggtgattatttattcctgagatcgtcagatgttaaaaaaaaaaaaaaagtattcagtgtaagaattgtcagttgtttgtttctttgttgctttatgaaagcaaatgcgagttagtgcgtgtgtgctcagccaggactggaagcactccaatgcaataatagtttttcctctgagagggtcctcttcagttgggtccttgaagaagggcggagccctatggactccagactaccccgctccctcc

SEQ ID NO: 37627 - DNA, 326 bp, Mus musculus
  source 1..326: mol_type = other DNA
gtgtgtctgaatacagtgtacttacatataataataaataaatctttaaaaaaaaaaggaactcctgcggggccttcccaagtactgcatccagcaatgggggagggggtaaaggcgccttttggctccctgaacctcatgctgttcactctggactgcagtgaatcaaccgcgagccgcgtgctttccgtgactccccgagaactctgcggcgacgctgctgacgcagggctggatggccagcggacgtgccccagggcgagctcgtgcaggttcggtacgcgtgcgcagtctccgaggagcctcgcccagaaggggcggggctt

SEQ ID NO: 37628 - DNA, 315 bp, Mus musculus
  source 1..315: mol_type = other DNA
ggagagaaaaagccagcctggtctacagtgtgaattccaggacagccagggctacacaggaagaattaacagtaagatctggttctgtggtagaattcctaacacacccagtcaaaatattttacagtttcttaaattgatcatccactaaaagaagaaaactataaatactttgaagtttctctccaaaaagtttttctagttggaaagaaaatgtaatcaggcttggcagcaagcgtttttaatttgaacttacaaagagcttggcggacctggccagccagctcactgtctgggctgacaggccctcccagc

SEQ ID NO: 37629 - DNA, 268 bp, Mus musculus
  source 1..268: mol_type = other DNA
ttttcatactgtttagaatagtttacactaccgtggtgagatgtcataggagagaatttattttcaagagtatgaactacatcctgcacactcatgaactcaggaggttgggtccctgggtttaatcctcagtaacacacaaacacacacacacacacacacacacgagagagagagagagagagtgaatgctccaagggggccctggcccaggaggaaatgggaggctcctcctcattccctgagctgaccggctgccccttaggcc

SEQ ID NO: 37630 - DNA, 259 bp, Mus musculus
  source 1..259: mol_type = other DNA
tgagtgctcataatcacggagcccagctttaagagactaactcttggtgtcctcagaagagtttcattctcatctgaagcctagtctaagaagcagcctaacctggctggctgcaggtctacctacataagaaggcctccctgcacctaaggcaggatcactgtcccgcagtggctatttaaaatgctcccaagggggctcaggtgagcatctttctcatgaaaggtttaggtgagaactaagagatctctaagtctca

SEQ ID NO: 37631 - DNA, 232 bp, Mus musculus
  source 1..232: mol_type = other DNA
tctgtttactgaccaggaacgggactattccggccccaggggcttgtgcggtcagtgggccaaggtcagcgagccgcgcccagactcagagtccccacgggctgggcaacccgagctgggcgggaatccggtccacgcaactcggcgcgctcgcggggacgtggcgatttccagccaatcccggccacgcgatagacccccgacaagtcggatgggggcggggccattaacc

SEQ ID NO: 37632 - DNA, 432 bp, Mus musculus
  source 1..432: mol_type = other DNA
ttagaaatctctccacgattataactcggggagcagattcctgagatgtcaaatctgagaccaagttcatctcttgaataaatagatgaaaagttgaaaaaaagcttcgtggtttcccacatttcttgttacagggaacatcaatgatgcccacgtaccaccacgcacttggcacatgcaggtctcaactatccgccagccctgcagtagctctggggcgcttgaggtgaggtccctaggcgtggcggacccagggtgggttctgcagccagaaccaagccatgctaggtccgcttttcaggcgcagcagacctgaagctgcctcggacgagcctggggcactttagggcggccacaggcgggcactcgcgtcaggtggccaggccaggccccgccctctcggcccgccctcccctgcgcaccgggctcccg

SEQ ID NO: 37633 - DNA, 219 bp, Mus musculus
  source 1..219: mol_type = other DNA
actcagatgcattaatggcttagcaattgatcactgtctgtccctcttctgacctgaaagggcattgccctcccatgatggacagatctttgagatgagttcagcctgacaactctcaacatcaactgatccttgtggtacccaaaggtgtagaaaaacctcaaaaagatatttgacaacatgcatttgaaagggttccaaaatggatgctatgaaagc

SEQ ID NO: 37634 - DNA, 432 bp, Mus musculus
  source 1..432: mol_type = other DNA
cctgggaagatctgccctgtggctcatgtgggcacattgcccagggggctccctggtactacctgggcagcgggcgcacacaaagtgactcactgggtacccttgttctgagctcagcttcattctgagccagtgagtctaaatgggctgaccagggacactgagtcaggtcttccaaataacggtttaagcatttttttcttgtaaaggcaaaactctctctctctctctcacacacacacacacacacaatcaaccaggctagaagccaggactcctaggctgtgtcaacagccttgtcaccaatgtggaaggagtgcctcagtgcatggggaagctcagggccagcgcccccaccccatccccgctcctgctgaggactgcgtggaggaggggcgggcggaggcggggccgtggggctcagcgcggccc

SEQ ID NO: 37635 - DNA, 537 bp, Mus musculus
  source 1..537: mol_type = other DNA
cctgggaagatctgccctgtggctcatgtgggcacattgcccagggggctccctggtactacctgggcagcgggcgcacacaaagtgactcactgggtacccttgttctgagctcagcttcattctgagccagtgagtctaaatgggctgaccagggacactgagtcaggtcttccaaataacggtttaagcatttttttcttgtaaaggcaaaactctctctctctctctcacacacacacacacacacaatcaaccaggctagaagccaggactcctaggctgtgtcaacagccttgtcaccaatgtggaaggagtgcctcagtgcatggggaagctcagggccagcgcccccaccccatccccgctcctgctgaggactgcgtggaggaggggcgggcggaggcggggccgtggggctcagcgcggcccccacccgcgggccgggcggcattcctgggaggccggcgctctgacgtggaccctggggctgcgggcgcggcgggggggtcggcagcccgggggcttcttaaaccc

SEQ ID NO: 37636 - DNA, 336 bp, Mus musculus
  source 1..336: mol_type = other DNA
gtttggcctaatcctaatatttggataaatctttttataagatttatttatttcatatatgtgggtacactgtcttcagatggttgtgagccaccatgtgggtagagcagtcagtgctctaccagatgaacctcaaggtgactctcatacaaatgtaacaacaaaaagatgttttttttttttaagtcaaacaaatcaagcacacactgggaaagtagaagcaataggatctatcctcttgagatttcccagagagaggcctgtgacgctcagccttctggcagattaagcgagttcctgctaaatgcgcatgcccgggaggcggggaactgcgca

SEQ ID NO: 37637 - DNA, 355 bp, Mus musculus
  source 1..355: mol_type = other DNA
tgccttcagcgatggaggacaaagtttgagcccagtctttctacgggggctaggattgtcattgtcatcaggggtccaagaccatcagagatcactgatatttaaattaatgagtaggaagattacagtcataaagtaacaacaataatgttatggttggggagcctttctaggctgccccagaaaaggtaacctgcaagggcaatggcaggcagaatcctggctttcttagttagtggcagcatccaggcaaaccaggaagccgggagcagactgtttcctccgtggctaggaggaacacactggccctgtgtgaggcaaggcttggttgctaagtgaccatcccagggcagcc

SEQ ID NO: 37638 - DNA, 157 bp, Mus musculus
  source 1..157: mol_type = other DNA
aaagctggcattgcgggtgtatgccacctaacatacatcacatacgtagtcactgggactgtcactcaaccccaaagggcagggacatggttgctcccgcggagccctccctgaacaaagactgggtgggcggcggcttgagtctccgcaccccgcc

SEQ ID NO: 37639 - DNA, 424 bp, Mus musculus
  source 1..424: mol_type = other DNA
ttagtagcacagtgcttgcttagaatgtgcaagttatcagtaaaatacaaatataaaaataaaaattactatagatcatgaaccatgcaagacagggttggttcccaactaagctgaatttcagtggaaattagacgttaaaatcggaagtactgggtgggggtgggaacccgcgccctggagtgtggctccatcgacgcccgcgcgcagcggatctccagctccaggcgggcgcgggggactgggtgatggatgactctgtctccccggattcccaaaggagcccggcgaggggcgccgagctgtctgcggtctcgcggaggccccgggcttccccgcggtgggcggtggcccgggggtggcgaggggcggggcggggcgctgccccgggcgggggcggcgcgatgcggaagtgcggggcggg

SEQ ID NO: 37640 - DNA, 404 bp, Mus musculus
  source 1..404: mol_type = other DNA
agtgatctgactgcccaggcagcctctcctgggactttttccatgccccatcacatgtgggatacttcctgaggtctgacagacatctcagtctgcgttgtgtgtcagcactgctcattcaaaacctccggcaggatctgacttagatctaagctgctcagggcgaggctcctgtgcatctagctgcaggtggtgccttctgcccctagatgaactttctctgatttaatttatcatcatcaggctgagacagaaagaaagctgcagtgttccttggctccttcttggtctccgaagcagggcagtgagtgctctgctcttcctctctctctctctctctctgtgtgtgtgtgtgtgtgatcagagctgctagccgagtgagtcagatctctgagttgtcccat

SEQ ID NO: 37641 - DNA, 279 bp, Mus musculus
  source 1..279: mol_type = other DNA
aacttgctctgtagactaggctggtccaaactcaagagttaggcctgcctctgactccagagtgtgtagaccaggctggcctcggcgtgcggcccttcttaaacactccttggctaggcagggtcacttccgggaggtctacggacggccacttccggcccggggaagccctgcttcggctcgctcggaggtaggcctagaagccagaacccgtgtccggactcgagagtctgcgattcctctccgctgtttccgagggggcaacttccacgaggaacc

SEQ ID NO: 37642 - DNA, 223 bp, Mus musculus
  source 1..223: mol_type = other DNA
cttgctgacatctgtccccacaggtaacagcagctactctgagtgactccgaggttatttccccatatatatctctagggagcccccccccgcgagggtcttctgtagggtgaaggttcccgaatacccccaccccccaaagctggggccgggccctcccccagcctccgcggatgggggggccgggcttggctccgcgaggcccgtgcattccagagagcag

SEQ ID NO: 37643 - DNA, 368 bp, Mus musculus
  source 1..368: mol_type = other DNA
acacattttaaaagaatcttttaaaggagtgaaagacttgtgtagctagtacaatgtacaccacattgtacttcgtaaacaaacgttctgagtgaggcttttaaaacgagcatttaaagtatttgattgaacacacaaagtgcgtagttgaacgtgtgcacaaggaaacattccttagctgcagcctgcaggctttccgtctaggcgggcagaagcggtgtctcccccgcctctcggaggagagggatggctggctgacatgggccgccgaccaatgagaagtcagcctcgggcagcctcaccaatggccgtccggggggcgggcccggtttcctgagagccgggcgggccaagctggtctgcggccg

SEQ ID NO: 37644 - DNA, 301 bp, Mus musculus
  source 1..301: mol_type = other DNA
gacatctgtccccacaggtaacagcagctactctgagtgactccgaggttatttccccatatatatctctagggagcccccccccgcgagggtcttctgtagggtgaaggttcccgaatacccccaccccccaaagctggggccgggccctcccccagcctccgcggatgggggggccgggcttggctccgcgaggcccgtgcattccagagagcagtcagggggctgcggcgcgctcgcgcggaggtggctgctgggccgcgggctggcgtgggggcggagccggggacccactcccgca

SEQ ID NO: 37645 - DNA, 357 bp, Mus musculus
  source 1..357: mol_type = other DNA
ttttagttacttaattcaagagtaaatgacagcaggaaatggcttatttcttttcttctagaaaaaggccgcccacgtgatagcacacatgcgcacactccggaggaaattcacgccgtcaggggagcgagtcattcggcattcctttccggaaaccacaaccgttccctctccatcaaaaactactttccggacaggggactctgcggcctatcccccacccacccccccgcgaggcgagcgcagtgcaagttcgcgtgcaacccggagcaagcgcactacaggttctgtggcgcctcgcgcgtgagtcagacaggggtggggcgaggctcgagaggccgggctggcggcgagcga

SEQ ID NO: 37646 - DNA, 465 bp, Mus musculus
  source 1..465: mol_type = other DNA
attttttcaagttacgttttctttacaaatttcagaaatgtgcagaaatttctaatcagatggtttacataggaaaggatactgtcctgttcgagcagttctgtctagcctctgtaacattccagtcagcattgtttcttgtgccatccctcagggagccagcagagggagctgtgcccacttttttcagcattacaagttttagctttgggaagaaaaaaaccacatctttcctgacttcatctgaactccgatgcaataagaatttaacttggtgccagccccctggtgggagcagaccaggagcttctctagctgcttgaacttgaaagaagcgatggtctagagtgccctataggcactgcagtgcagagctttgcatccgctctgattccgagtagctcagaatcttgatctgaacaggaagcttctgtgaaaagagataagagcttcttttaacccctg

SEQ ID NO: 37647 - DNA, 373 bp, Mus musculus
  source 1..373: mol_type = other DNA
ccaaaacatgccttgccttgtctcttcttcttaagtaaaaagtgaatgggatcactcagtactaaataaaggcagccaggacagcctgagctgcattgtgagactctgtgtataaataaatatacaaataaattttaaggaaataattgagaaaaaaaagaaagttgatttccttggttttttctaatgaggtgaggttaactaaaatcatctgatgagcaagttaattatatcaggaaaaagtgcactggttatataaatgagccattgatgtatgcatgcatgttggatttgtgtaataatgtgttaggaaaaaaataataaaggccgctgagctgctaacagagctgcctcattattaaatccgcttcag

SEQ ID NO: 37648 - DNA, 263 bp, Mus musculus
  source 1..263: mol_type = other DNA
tgcactgtatagtgagctgccttgaacagccctgtgggtgctgagagcccaacctgggtcctgggcactgaattcccatggcaagcgggagtcaggcacgcggatatacaatatccgcttactgaatgttatgcccccaaacgcattccctttctgggagaaatatcagaagaagtgaaagagtttctgaagatttcaagagactgatttagcttacactctctctatggctccgcccagtgcggcatgccccgccccggtgc

SEQ ID NO: 37649 - DNA, 307 bp, Mus musculus
  source 1..307: mol_type = other DNA
ccaatatatttaaatttttcaatttaaatatttatttgtttgtataaaaggacaacaactcaacatcttagacttagattagggcagccctcagggatttcagttaggtccctcttccgaaagcttcctggccaagccctttctgacaaagcgggatgtcacaggcttgcgctcagggttcagaattcgaatcgtggagctggacgtggagtctactagtcccaggctaccccccgcctctggatggctgattagccaatcgcatctcgggagttcagggggcggggcctggtcccgggcgcgcgct

SEQ ID NO: 37650 - DNA, 379 bp, Mus musculus
  source 1..379: mol_type = other DNA
gaaaattcatgcattgaactgtttttcagaaattaggaaacaaagggaggcctgccccagaagcagccaggccacaatgcttccttaatggaaattgagctatcacatgacagtttatttgatttttggtaatttgggagcagctgcagacaaacaattattccagtcaccaagtggttggttaatccgtgcttgccgaccaagctggagccagagtagctagctgtgttggactcagtcaccaacttccatagccttctaaacaaggcatagaaagctttggcgacccatgtttattagctctagctggttggaactcatagagatctacatgcctttgcctcctgagggctggtattaaaggcctgtgctacgcact

SEQ ID NO: 37651 - DNA, 596 bp, Mus musculus
  source 1..596: mol_type = other DNA
tggtctacaaggtatccaattaaaaaaatgtttgcttatttgttaagctgttttatctagtgcacattaaatctcccagaagtgttaaaaatgggggctcctgatgacataacaaaagcagcaagggcaagaacttacttttttatttttattaaatagagccttggtttgctaacaggtgcacttcggagcacccataacagcatccaggggccaacgagagaataaattaccatattgctttgtaccctggttggggctttgaaacagagaaactacgcaaaggcgcgcccgctttggagcggaggtctcagttccccgcgctcggctccgagcggagggctccttccgccgcgtccgcgacttgctcagccggttgccctcctggtccgggccccggccagcgctgccgagccgcaccagaggccgacgaggcggccgggggtctcagagagcgccgccgagagccccctccccggagccgcagagccgtgctggcctcgccatcatggcggtctccgggcggggaagccgagccgtgcgtcgcgtgcgtgcctcctccctcccctccccctcctcggcggcggcggcggcgg

SEQ ID NO: 37652 - DNA, 376 bp, Mus musculus
  source 1..376: mol_type = other DNA
ggtttacagtacttttgagccctgtagagcagtatatctcagacttcactgttcagggaactgtctgagaacttagttcaacagtaggcctaaggggagttcagagggcagaactgtgtctttgttctgcattataacttatttagggtgcttctatcagtcacctttgtgattttaaaaaggacctaaattctgtagaatgaggatgttagtcatagagggtaaatgagggaatttccagatttggacgccagtaacagcctttgcagcactgttgagagggtggtacataaagtatgaatgtaatcatactgccattatttactaccgtcgtttatgtgcccctcagatgacgtcacagaggtgacatcacggc

SEQ ID NO: 37653 - DNA, 518 bp, Mus musculus
  source 1..518: mol_type = other DNA
agaaaggcttccctctcaggaatttcggctccggggaggtgccaaggggccgccgtaggcactggcgcggccagtggcctggagtgccccggagccctcgagtgggcacccccacccccatccgggggatgacatggtgtcgccgctgccgctgcctccccgtcgcctgcgccgccgccgcctgcccgtctgtcacgggctccgggcccagctcgcagggccccgcggcctcgccggctcctcggccgaggtggcaacacccgcgcggtcccgtggggtccgctcagccgccgccccccgcacgggggaacaccgggcactgccccgccgagtgggggcggggaccgaggcgcccgctcgggctgccctccgactgaggctccgccgcggcccgggctgccgctgctccgcgccgtgcgccgctccctcccgcctgcgctagctcgttcgcctgcccgcccgctcgctcacgctctcgcggcgccgtgatgtcacctctgtgacgtcatctgaggggc

SEQ ID NO: 37654 - DNA, 265 bp, Mus musculus
  source 1..265: mol_type = other DNA
ctgagaactgaatctaggctgcaagaacagcagatgctcttttttaaaatgtaacctaggaagccaaatttggtgctcagtggatttttaaatcaatagtgtttccttacctggaaaacaacgtaatttaaagtaattccggaagaatctcttgaattccaggctatatcaaaaaagaaaactctttgttaatctaaatatgctaattcatcttaaacgacgtaaccactcttaaattcttttagataaccaagaaaaggtgggg

SEQ ID NO: 37655 - DNA, 529 bp, Mus musculus
  source 1..529: mol_type = other DNA
tatttggaaacagcaatgtgtatctgacttcaaagccaaattttcggtttaattttgaaacgatgggaatttctgatatttacattttaaaatcacatcgtccgttccattttctatcgttaacatattgtaagacaataagagagtatctacaaggtgtttaaataaagatcttcactgatgcctgaaagattttcttattgaaattttcaagggtcccggcagtgcaatgatgaaagccaggagttttttagatttcatccaacagtccgcagaccggggctcagtttgcagaactgcagacagatgtaccaacaccaagtacatgcattgtgtacctattttctaaatgcagtgcttatgggacagaattccggagtatcgaccatgctgaggcagcgaccctgcttgggagtctcctctggcgtagccggtctgagcccccagcatcccggagaagcgggcgagctccgggaatcgatgcgctctctgaatagctatggcggccagccattggttgctggagagc

SEQ ID NO: 37656 - DNA, 480 bp, Mus musculus
  source 1..480: mol_type = other DNA
agctctttaagagcatacactatgcactaccacaatgaaacttcattttcttctgtttaatcttgatatttagttactatcttgagacaatgtcattatggccagaggcacttgcccccgcctctgccacacttctccaggcactggctacgctggccactagttgggccagttccagagttggacttgcttccctgtcctcacctgcatttcaaagaacattttttgtttgtttgtttgtttttaaccccaaaaccaccactaacttcaatagaacgttccagtttttcttcctaatgctgcatcctcataaggtggatattcattgcgtgtgaattagtaatatccaaacttcagctttactttcagaattcctgccctggcaacgatcgccacccctctccctctcgcgagaagagagggcccggttcttccggtaactgtagcccggctccgccgcgccttagtcttgcctctgcg

SEQ ID NO: 37657 - DNA, 421 bp, Mus musculus
  source 1..421: mol_type = other DNA
cttcgcggagaagctgcccagggtgggttctctgccgccccctggcgagcagcgctggtcctggtcgtgggcaccgcgactagcagcggccggtgcccacgctaactgtgcatctagtgggtacgcaaccggctgggatgccaccggggcacaaccttgtattcaggctgatagcacccggtttaccacctcctggtggcttctggaaggggaggcctgggggtggggagccaaccctggggcagcacctccagaggatgcactggaggccaaactctggccttgaggggggtaccacgggtgtaggaccttctccactaaagcttcgcaggatgaggatcctccctccctccctgccttccacagcccagtgtggcaagaggggcctaggcggaatgatctggttttttttgtcgcaaaa

SEQ ID NO: 37658 - DNA, 433 bp, Mus musculus
  source 1..433: mol_type = other DNA
ccctttaatattagtatatgaaactttaatattagtatacacaaccctgaaccacagaaaaatcagcagggaacttgctggttatttcagagaagctaatggttccaataaattaaaatgttttgctacataatgtaatggtttgttatctctgcttcgagttactacatctagatgaagagacaccccatggagtgatacaggcttagcatctccttttggtgatgaaattgtaaagctttttcctctgcaatcactgagagggcagctcccgggagactgaacctcaggcacaacaggaagcgtggactcgcgccactccctactgcacatgcgcagaggcaagactaaggcgcggcggagccgggctacagttaccggaagaaccgggccctctcttctcgcgagagggagaggggtggcgatcgttgcc

SEQ ID NO: 37659 - DNA, 290 bp, Mus musculus
  source 1..290: mol_type = other DNA
ctaatgtgtatttcttccggggcttaaaaaacagatagttaccattatgtattattagagttatcataaccaaaacacagggtccttgagactacagtaagattaaggctccatcctcatggctcgaggaactaaactcaatattctgcttccacctcgtgggccccaaggatcgaatgcaggccgcatgcctattaaagtttagggaacactcagtgtggtctgttaatttacaatggtgtggtacacttagaggtcctctagatagatctgcccatctaaggcatcta

SEQ ID NO: 37660 - DNA, 411 bp, Mus musculus
  source 1..411: mol_type = other DNA
tccaaaaccagtttggaattcgtgatgcagtaaaacctctccttgaaacacaaactttctcaacaagtgtctttattaatttggtacaaatgcagaattaaatattacaaggcattctgtttaatgaggccgggccgggccacatctccagggaccctgggcagatgtggactgagtggcttcagcgcttcagagtgctttgtctgagacccagaaaggactttaacctttaggtttattaacctgaaaacaactgatttgcccttggtatgcttagcaattttgttttctttccattgaaatctgttatctcaccctaaaaaaccttgagaacttcacaagcggtgagaatttggccatatgggaattcctttgaattcgagctctcagccctgctccctataaagttca

SEQ ID NO: 37661 - DNA, 331 bp, Mus musculus
  source 1..331: mol_type = other DNA
tagtccagcacttggaaaatgagctccccagcatacatatggtggcttagcatgatggagcccggtgctcttcctgcatgtgcatggtatttataaaaagtatcattaagccttctctgtcattcagatctcaaggaaaacttaatttattcagcataacacatcctaaaataggggatattggcatcctgggtaagacattcccagcctgcggagcaagttcctgccttgcaaatggaaaggctgggccttcatcactggaaaggggtgctgaagaaccacattagcatttctgagaacatgaatctgcctcgggttccttataaatact

SEQ ID NO: 37662 - DNA, 340 bp, Mus musculus
  source 1..340: mol_type = other DNA
aatggagactctccctgtggagactctccctggaggagaggtcagggccctgagaacccatgggaaggcttctcagcaggaaataaaagtctttcaacaaaattttgtttaaggatacttctcattgtgaatttacctattcagaactcagtgagtgtttggcacataataagtgttccagtagactgcttattgaatgaatggttaatgaaccattaattatgaatgagaagccagtatgaagtattttttcttaaatgcatacatgccgtctgaaatggtagacattacattcataaaagtgaaaatgcttccattatcgtagagcgttctattggaa

SEQ ID NO: 37663 - DNA, 416 bp, Mus musculus
  source 1..416: mol_type = other DNA
tgtcacctgggtcacctaatcccatcatcagaccatcaggtacagctggtagggtttagcaagatcctcgagccagctcaggaccttgagtgagcttagcacttggcagccctgtgcctgaacagctctgtcacagggtaaaacataatgtgtggccaaactaaagccattggaattgatgtaatgtgtgcatttattgctgtccaatgaatccttacactgtaaaaacacaaatatgcccatccttgtttctgactcccagctgggagacctcagggacagctgaccccatggtcaagggtgaaagcctggctgttccctgatactttatcaggaagagaggaaaggtgccacagtttggaactcctgcctctccctccctccagatgtgaggggaactgtccccagggaccctc

SEQ ID NO: 37664 - DNA, 377 bp, Mus musculus
  source 1..377: mol_type = other DNA
ttgactaggtcatctgcgtagacctgttatttctctattcctggaaaaaaaaactgtaaaatgaaatagtttcataaggtgcttattaaatacttgttaaatgaatgatgaaccactgagctagactaaaagcttttagagcaacaataattactgtgtttacttatgatattttgcataatttgcataataacttaagacctgaacataataatttaggtctgcgcaggcgccggagcccctcccccttccttcccgcgctcaggcaggagctgggcgccaggatccaagctgcgctagcgggcgtcccgtctccccgcccgggccgaagcagtaaacggagcttctattggctggcctgggcagccgagccaatc

SEQ ID NO: 37665 - DNA, 315 bp, Mus musculus
  source 1..315: mol_type = other DNA
gggcttggacattgcaaagccaaagctgcagcaaaccaggctccgaagagaggcctgcagcgcccccgctgggccagcctgcgttcgcagcatccctagcttgcccgtgcctaggctgctagactttgcgaagtaaaaaaaaatctacagttttgtacgctgctccagaagggcgctgcagcagcttctggcatgtggaccaaccggtgccaccgtggacaagaaccccagctttggggtgtcaatacccctggaggcgcccacgggaaaggccccccctctctgcagcggtggggaggggctctgcggcgggag

SEQ ID NO: 37666 - DNA, 213 bp, Mus musculus
  source 1..213: mol_type = other DNA
tggggtcaaacctcacagaagtgtacaatgtagtagggctcctggctgtgcccttgctggctgcagaaattgcagattagctatatagtatttctattttccgtgatttgttatatgtagctgataagattgacttgatgactgctatttaattaccacagatttctttgtcaagagcaataacgaaaaatgtttgtttttcgtaaaccgttt

SEQ ID NO: 37667 - DNA, 465 bp, Mus musculus
  source 1..465: mol_type = other DNA
ttgcccaagaggcaaactgtcattaagatcttaaagtagtcatgtcttcgatgcccaaggcattaaaagcgtgtttttcatactctgagacgaggacaaaaaaaaaagacacatgagtatcccttaaattacttgagtgttatgcagattgaatcatttgaaaatggaatggcagtccccaaatctaccctccaagtattttgggaacccctgacattttcaaagctcctagaaagcttctttcgccatggaagaagccccactcctcactctccaagaaaaccaaataaagttccctgtgtctcaggcctccgggcagattctggccacgcccccgtgcggcagtgggcggagcagggggcgtgcctgcgtccctagggggcaagggcggccgcggaggcccgaggggggcgggccttggccccgagtgacggcccgccggcccaaccggtgcgagaacccagg

SEQ ID NO: 37668 - DNA, 398 bp, Mus musculus
  source 1..398: mol_type = other DNA
gtattactactatcccatgggtctagtaatcctactgttatatcaggaaacatgttagaagtcatagaaatgagctctgattaatttaggctaaaaatgtttatttgaatggatccatgcttcaggaaatgccaggtcttctcattaaggttgagaaacacattgaatttgatgcattatcacatattttaaaataagctttgagggccaaatatacataaatgtcacatttccatttttaaggagcctgactttgcttacatactagatcagtcagtatgtaagcaatgtattccctgtgtgtataacacacttactgtaggacagatcatgcagaatttttttttaattagaacagagtacttcagcattctagattgctagtccttcagaatcta

SEQ ID NO: 37669 - DNA, 346 bp, Mus musculus
  source 1..346: mol_type = other DNA
tctctgagttacacagccagggctacatagtgagaccctgtttaaaactgtaatagtagtagcagtagcagcagtactgatgatagtgataatctgtcatccgaagattcaaagcttcacttctggaggagaatctcactactgcagtatcccaaattggtgtcacgcttatcagctgagccgacatgtcacacccaggaaagcttcttcaggaagctggtttcatatgggtttagatttaaatagtgattgtctagcaccatttgaaacaggctaccagagcctgatagctgattagtaggcctgggccttcccagtgcacatgacctcttgtgacccctagaat

SEQ ID NO: 37670 - DNA, 182 bp, Mus musculus
  source 1..182: mol_type = other DNA
gaacttataagtaaacagaatgggtttatgtttaggaccctcttagggcatcccatccatgtcctaagaagggtccataggcgactgtaagtccacaacagggttcttgccatggctggaaatattcatcaaagcagatctgtgtgcctgtaaaactgttcttttaaaaattaaccacagtg

SEQ ID NO: 37671 - DNA, 446 bp, Mus musculus
  source 1..446: mol_type = other DNA
tttaaacgctaatacttaagttaaataaaatgcacgtttgcgctctgtccacacacacgcatatatatgtatatataatttctagtgtgtaggtatgattaagggataagcatgtttccctgatcatctttgtcaccatttggaagaatgtggtcagaaaagtagtgcccaaactgccactttggtttgtctgtacacaaacaagtttttactgttgtcagcaacagtgagctcactgagagggcaaatctggcttttctttttgactttgtaaaatttaatcaggcctatagctcccggatgcagtggctcccttatctgggctttcgcagcgccacaagccccttcgggatgcttcgaggggctcctggtgggtggtggtacaaatgctgccgccgccgccgccggcggtcctgctgctgttgttgctgctgcagtcaagtttc

SEQ ID NO: 37672 - DNA, 288 bp, Mus musculus
  source 1..288: mol_type = other DNA
aaactaagtttgaagtccttagtcttaatgactttttttatgtaccatggaaaaacatcctataagtaaaatctatgattaaattgctatttttctgttggttcacacttttccgtctttataaggaaaacgggaccaccagcagcagcagcagcaggaagaagcagctggttctcttccgaaccccagcaggacccctggtcctcccaagccctggttgcggcgcttcctctgctgcagctgcggttctgctgtgtcatgcaagaaggaggcggcggcggcggccgg

SEQ ID NO: 37673 - DNA, 567 bp, Mus musculus
  source 1..567: mol_type = other DNA
agtccgcggaggctgactcttcacccgcagcttcaacattttattcgaatagcaacggaaaactgcacccgttggtggtgccctcgggcaagccgcacgcccccagagctgggctcaggaactccggcgctgtccgagccgtccgggaaggaccgggcccccgtcgtcgccctgaccacctccgacggcgggggaggctcgcccgcggcccgggcccggagccccgctccgctccgcctgcaagcccgcctcgccgccgccacccggagctcgctcccgggccctcagcccggcctcggcccgccaggccggagcactcggccgccgcactgagaagctccggaggccgcgcgttccccgtcacaggccccgcctgggcctctccaccgcacgctctggcgggccgcgctctcaccgagcggctccgacagctcgagcgcggggccccgcacttactcgggaaggtagggcagaagccggcactccggcgccacagcaacgtagcggccaccaccgagcgccagccccgccaggaggagggcggggacggggcctgctcttaaaggg

SEQ ID NO: 37674 - DNA, 339 bp, Mus musculus
  source 1..339: mol_type = other DNA
gcatatttataaccctgacaatttaggcccttttgtgataaaaagctggaatgatgcctgctgtcaggcttcatgctgaagaagacgcgatcttttctcaaacatcttctttccaaacatttgggctaaatttatgttaaaattcaaagcaacaaggacatttttaccccaggtcaactgaaagatggaaagatattcccttccgccagcctcacaggaaaggaaagcctccctgggaggcctccaagcagccagtgccggccctgcgcggtcgggttcccggcgcggcccctttaagagcaggccccgtccccgccctcctcctggcggggctggcgc

SEQ ID NO: 37675 - DNA, 462 bp, Mus musculus
  source 1..462: mol_type = other DNA
tttttattcagcaatattatttcttatggctcaattacatttccagattaatctcagaagtaaggctgctaagggatcttaaacaactttttaaactatttttttaactctatttttctgtctgcaaaacgaggcttaaaagaattaagcgctgaaatttttgccttacgagatccaggcacctgctgggcaggggacctgcttcccttgttctgccgcagggatccgggctgatccccatccgcggcatggattgattgtctgacagggtccctggcgcgcgcgcaggcaagtgcccgggaccgccagcccctgctcccccgcccgccgcgctccagggcggagcccagcgcccgcccagccgccgccccgcccgaccccgccgccgctgtgggcgagctcctgggggagggggcggaggccagcgcggacgggacggggcgggagtcttcgcagcaacgt

SEQ ID NO: 37676 - DNA, 406 bp, Mus musculus
  source 1..406: mol_type = other DNA
tctcagagttcacatgagcaattcttttgggagcaaaaacagtctgccaaaatagtctacttgagctcaaagaagtcaattatctggactacaagcgagcaagcaagcaagcaagcaagcaagcaagcaagcaagcaagagagcaggccaagcaagcaagcaagcaagcaagcaagcaagcaagcaagcaagcaacctcccctctaacttatcagaggataaaaagttctttgcggactctcctcagagactggctgactggcatacattgccaggatttcccagaaggccagagggagatcagcttgctcttgcctctttagatgccaagtgggaagatcactctgcacccaggcagcttccctcaggcagccagcagcctgtgtggccaaccttgtattgaacc

SEQ ID NO: 37677 - DNA, 197 bp, Mus musculus
  source 1..197: mol_type = other DNA
gggatgctagtttcacacctggctccctggacttggggccagctgttggagaggctccagagcatctgccagactcccttgcacttagaatgctagcactctggaagttctatctatacattatggccatacaggaaaaacgtattagataactaaatccttttgtacaactttctcatacatttgaaatactctaa

SEQ ID NO: 37678 - DNA, 238 bp, Mus musculus
  source 1..238: mol_type = other DNA
gtctcatgtgtacaaatacacatacacacttgtatacgtatgagagagaagaagttgtgtgcacatgcgggcatatttactgtccagcagggtgaggatccatgtccttaagtcatagctcagaaacttatagactgagtctcttgaatgtgtctattgtgtgattctcatcttgggagaacataaagaattgtgtactcaaagggcttacaaggagtgagggcttgcaatgcctctc

SEQ ID NO: 37679 - DNA, 401 bp, Mus musculus
  source 1..401: mol_type = other DNA
ataaatctaagatcatactgtacttttagcaacagtgtttgacagcaaacaaaaactgaaactgtgtgtgtggttatcctaaaagctagaaactttccaaaacagtcctgtgatctaacttatgtaagtgaataagagacacaaacacgagaagcagtgttctgtctgtatctttttgcatgtagatttgaaagccctacattaaaagttgcatttcataataggcatatgtactttaaaagactaagtggcaaaattggaatatacaagttcctaacttacctaaggttcaacaagctggttgggtgaaccaacttttttgccttcagggcagtttagggagtgagacctgtcacagcttctcgggctaacccgaagcggcctacttctggcacgtgacc

SEQ ID NO: 37680 - DNA, 298 bp, Mus musculus
  source 1..298: mol_type = other DNA
agatattctagatagtgggttatgtttaggacatggcccaggacctagggcttcacaggttacctagtcctaggactagaagaaacctttgttaggaacacccagaagaccgccagggtgactcgaggaaggggtggcgggccagtggcggcagcgtgcggggaagcgccccctgccccctctgccggccgctctagatgtcagtcgcgagctccgagccagctagcgagccagagagggagcggcggcggcggcggcagcggcggcggcggcggcgggccgcgggcggcggggaggg

SEQ ID NO: 37681 - DNA, 449 bp, Mus musculus
  source 1..449: mol_type = other DNA
agaactgcagtggtttttattttaaaagtatggttgaatttctacaaaagattttcctgtatccatttatcagatatcctgcatatcaaatatttacattacaagcaatagcaaaggtacagttatgaagtagctatgaaataattttatagttgggagtcaccacaacatgagaaactatatatatatatgtgacaaaataccaaagaaaaatctctgtgcgtgtacatttttgctaaagatggtatttgaagttaatatttttgcacacacaagcattcttttgggacctttgtttaaatagaagaatctgcaatttatcatcagatacattaagttaaagcgtgtaaaattataaaatgaacttaaggtctgtctgaagagatctaaagagactgcccgggaggagcctcagcctccagctgagtctcagtcgggtcagccgcgga

SEQ ID NO: 37682 - DNA, 267 bp, Mus musculus
  source 1..267: mol_type = other DNA
tgtcaggatctctgttgtcattgctatggcaataatagttgctacacttaaggctataggatttgggtttcataaaattcaagaagaatttgataaaactattcaaaataattacagtcacttgactaattattgatgacctatacactacaataactacaaatcctttggtagtttctcttcattatctacaatgaaaggaaaaggagaggagtcaggtcttttcaatctccccccagagttccttgcagcgccgcgggccatgac

SEQ ID NO: 37683 - DNA, 469 bp, Mus musculus
  source 1..469: mol_type = other DNA
gtaagactagtgctactgctcagtcatacgtgtgattcctggcggagcacaatttttatttgtggtcctgaactttgaattttcaataagctctagtgcattctgaaattgggaatgtctgtctggcaaaaagaatgccttttatcagttaaattcaatatttaatgagcaccttaagctggcaaaaagcacaagacatgtgttcagataaagcaatacatttactgtattagtctattctacaacaactattagtaagacaggcctatcttcccctgtgatgagagtggagtactaagccaatgctctaaacaggcagtttaagccaaggctcaatctcaaaacttttaggttcgagatgttacaggaatttctacattctctcagttgttttcccagaaggcagtgcgacaccgactcacgcgagccttcgggggacagctcctggtctggccgcgtcggtggcagc

SEQ ID NO: 37684 - DNA, 279 bp, Mus musculus
  source 1..279: mol_type = other DNA
gttgcgtaatcagggggcaactggagattttaggaaaagtcttttgtttttctacctaatacaactgatttatttaagagtcttactttccaaaatcacttatgtgtgatccagagatgaaacttgcatcaagtcttgttgaaccagactaaacatgttcagaaaaggtactacaaacgggtatttcgtagttctctgcaaaaccggttgcaatcagtacacctgaaatttaacttttaatctaaaaagacacagacgtcttcttctgggctcgaaagg

SEQ ID NO: 37685 - DNA, 466 bp, Mus musculus
  source 1..466: mol_type = other DNA
atagaatgcaacgttaaaatgtttaacataaaggcaattttgaaatgactcactataaagaaaaggatgtttatgctcgcatctttctttttcatgctgtccttagtgaaacagaatataatcacaaaagtctggtttttaaatgtaagcaaaaaaaatgtaaaagctcactataattatacagttagacaacttgtcaaatttcaaataaatttgcttttcacaatcttccatcaattagatgagtaaaacttttgtgatcagcaacagttagctcaaaataatttatgcaacacactgtggatagcaatatagctcgaaggatctttcaccccatgcgcctaaggcctctacaaagtaatttatattctgcatcagggagatttccctctggtttatgactaatctttactcacactcttaaaagcttacaaaagactgggatgggcgcttgcagtaagagccg

SEQ ID NO: 37686 - DNA, 368 bp, Mus musculus
  source 1..368: mol_type = other DNA
aacttgggatccatctcatggacagacaggagcctgtatgactgtcctctgagaggccctaccagcagctgacagagattccagggagctcccagagacagcagaggtctgcttggtctgggcaccctcaattgaaaaaaaattctgcaaggacatccgtcaattgatttcccaccgatatctcttgttatcaatattgtagctagtgaaatagtggtttcagaaataattgttatcagtactaatcgatatcagaatgattgcacacctgtgcgggcactgctgcgggagccttgcactctgcagcagggaaacttagtattctgcagtgtttactgctggtcaaccctacgtgccagtgcccgccc

SEQ ID NO: 37687 - DNA, 312 bp, Mus musculus
  source 1..312: mol_type = other DNA
tgttttatgaagttagcttccaaaaatatatgtatagtatgtaagaactaagacatatatactacatttcatagtcacaaaagattgttttcaaatcaggcacagtttttttttttttttaatgtcgttataaaacacaattggtcaatttcattaggaaagaacctgtcccagtggtttctagaaaggtgtcctctgtaagttatttcaaagtagttactgtaaaagatgtctcatttttaccagttcatcttggatgacctttgcattgctgactttaatctttgtttacgatgatcagtgtggcacaag

SEQ ID NO: 37688 - DNA, 367 bp, Mus musculus
  source 1..367: mol_type = other DNA
agccacttttgctgcctgcagattaagatgtagaatgctcaattccttcttcagcaccatgtctacctgcatgctgccatgcctcccaccaagatgagcccaattaaataaatgttttctttataatagttacctaggtcatggtgtctttttgcagtaataaaaccataatgaagacaatgcatataatttgtattactatgcatgcacacaaactatatacttagagtatggctgaaatatgtccatgatggccatttctttcaaagaaaatggcccccataggcccatagtgagctttgagatctcagaagctcaaaccaggcccagtggcccatttgttcttcctatctggatgtagaaaatg

SEQ ID NO: 37689 - DNA, 436 bp, Mus musculus
  source 1..436: mol_type = other DNA
ggccatcatgacaccagttcatggtgtaataactgatctgagcacccattagctggtcacaaacttattggacttgtttatagaattaactaggtgagttcagaagacatttccagcttccagctctggtaccagacccgagtgaggtttaatttcagaaactgtagtgtaccatttttcgcttctcttctcttcataatgttaggagaaagtaagaatgaatctgtaaataggacactttaaaggttttcattttaatctctctaccgggttcagcctaggtaggacctgaaactagcagcccacaaacattgccccggcgatgctcaggggtttgggtctctacgactaaagcccgcctgaacctccggctggtcgctggccagagggcggggccgtgaatgagtgacaactctgtctaggctacaaaagagcg

SEQ ID NO: 37690 - DNA, 299 bp, Mus musculus
  source 1..299: mol_type = other DNA
ctttctagaatgttctaggacatctgtgtcacaggtccacaacattatgtactaaaaagactgatacattttatttatactttttgtcagttgtcatagacatactaggctagaactagagatttttaactcgtataataatgtaaatttatttttataatgaaactgctttgcaaagaaatacactattgtgttctacaagacagctatcctgagcatgcctagggaatgacaggcaagacagcatcaccttggctagggtgtcgtcattggcgactgtaaacatagggggtatgtgt

SEQ ID NO: 37691 - DNA, 314 bp, Mus musculus
  source 1..314: mol_type = other DNA
ccttaaatgccagattccaggctagtttaactaaccactgacagctctgtaaacagagcggggacaggagcccgcttcccctttcctctcagcatctgaagagctggaaattcttccagaatcaaagtcatctcaatttttgagctctgaagacagtttgatcaaaacttagctgccttctaaaatattttttttctcccatgatttctgcatacttaaaacaaacaagcattttaaatgtaatctgcactcttacttgttttaatagcttttagaatattctaaggtgtttttcttaaaaataaagaaaagat

SEQ ID NO: 37692 - DNA, 316 bp, Mus musculus
  source 1..316: mol_type = other DNA
ctaggacaattgcttctgctatttacccaaggagtacctggaccctatggggcagggaccaaagatggggtgtcatctctgttggtgaccagcgcttggcgatgagatcaccatcacagaagggcctgctgctctggcaagcgcccaggcagacgactgccctcctctctcaggggacacgtccttttcctggataaaaggggtttgctttggaggcagccgatgaacttttgctgaattctgtcaacaagcaggggccactgtagctgcgcactcacacattagtgattgatttctctgagtcaagcttataaag

SEQ ID NO: 37693 - DNA, 279 bp, Mus musculus
  source 1..279: mol_type = other DNA
aagatggggtgtcatctctgttggtgaccagcgcttggcgatgagatcaccatcacagaagggcctgctgctctggcaagcgcccaggcagacgactgccctcctctctcaggggacacgtccttttcctggataaaaggggtttgctttggaggcagccgatgaacttttgctgaattctgtcaacaagcaggggccactgtagctgcgcactcacacattagtgattgatttctctgagtcaagcttataaagatggcccgtgtgctggcccagccc

SEQ ID NO: 37694 - DNA, 335 bp, Mus musculus
  source 1..335: mol_type = other DNA
tggcatctaactatgaagactagttttcaaacaagtgtgatcaatggcacacttcatttcctcaggccatttacttggaaaactgttccaactgtattatgtcttattgacttaaataagggctttgtgaaagtgttggctaacaaagaatttctaagctgatgaaatttttgagaatttacccttatattttaagtctcacttccagaataagaatgaattataattgtgcaaaatagaactcaaccttttaacttcaaataaattagttcatttttattaataaggttcagttcagaaaattaacttggcgagagtacagccgttgccctggc

SEQ ID NO: 37695 - DNA, 431 bp, Mus musculus
  source 1..431: mol_type = other DNA
gtatgtctagtggcacatatctgttattctagcacacaggaggctgagtcagaggattgctgtttcaaataaacaaaaatcctatatctatactagttttagacaatttcaaaagacatgactatcatagccagatattctgggactatggcaatgtgtcagagcacacgtgaactcagtagacatagctagaaagcatacttgtctgtagtcaaagacagggagtagaactctaataaaatacttgtgattggataaatcaaaagcaatctgtacttatttaaaaactgttattctgttctagatatataactatcatagcaagacaagtagtggtttttcttatagagaagaatgcaaaattttctcccaacttccaaattttaggtctagaaatacattaataacattttaaatgtaaataaatatct

SEQ ID NO: 37696 - DNA, 277 bp, Mus musculus
  source 1..277: mol_type = other DNA
gccgttaacactatactctatccaactttgaacaagtttaagaatagaataaagataacaaaaaacctttggtgtccctcatttctcaatcacctggaatttattctgagtaaaagctttctttctcttttactttgaaatgggaacacagtgtttctgttgctctataactgttagatataactttgctaacggcaaaggttccagaagctaccctcacctggctcaggcagggtgcgccagttgtcaacaagttgtttttcatttctgaaaagtc

SEQ ID NO: 37697 - DNA, 280 bp, Mus musculus
  source 1..280: mol_type = other DNA
caggctctgtatgcagccacacaggtcactttcttgacagctaggggctgccctcccagaaaggtggcagcctggggcagacagaatcagatctgaggtttcctttgctccagcgctccagagaagaacctcccctgtgagggcctccggttgatgcaacaggagcctgcggatgtgacccgcggtctgcagggggcacccggggccctagcggccagccagcgcccgggtccggagcgcgcacgccgggagcgcgcaggagccggaaggggcgggcggt

SEQ ID NO: 37698 - DNA, 405 bp, Mus musculus
  source 1..405: mol_type = other DNA
tcttttttagctgctaattaacaatacattaatgaattaattattgtccagacctgtatttcctcatgtcttccgaggatggcgccttcagcaaagcaacaacccttttctgtgactagagaagagctcctgagtaggcctaggtagctcctgaccatttggtacagggctccaactgatacctgtactgtttccagctgcgaccccctacctgcccttggaaaaggtgaggggctgagagctcagaagagaaaatttcacgcctctgtgtagtgatggcgggaaattccgaattcaaatccacagaacatttgctatttttagatatgtttagataacataaaatattttaattattttcttcttttttgttctcaaggttgaccttgaactcaatatgcaact

SEQ ID NO: 37699 - DNA, 264 bp, Mus musculus
  source 1..264: mol_type = other DNA
gccttgtaaaaacttcaaataattttctaaacaagaaaaataaaatataggttgttttacaattttcctgagtttaaaaactgttcacaaaaccacaaaacccaaaagcagctcagcggtgtgctaagaggtccaagctggacttttatgagttgagttttctccttttgtaagaggaggatagagaaggtcctgggcgtggcgtgacgtacgaggcgcccgagataggctccgccccgtcgctccaagccccgcccctccgcc

SEQ ID NO: 37700 - DNA, 193 bp, Mus musculus
  source 1..193: mol_type = other DNA
ggttctgactggtctgggacattagaatcagggatgcacagaagggtcccttgggaagatcggcgcggcgttcgccaccatccgggatcatcagcgccgtggggatctccaacctgcaggtgaggcacctcagtgaacatcagtgccgcccaccctgagaggggcgtggtcctaagaggcacactgatcctcc

SEQ ID NO: 37701 - DNA, 379 bp, Mus musculus
  source 1..379: mol_type = other DNA
tcccagcatatggcactgaactgggtaaaacacttctgtgcaggctggaagagttctgtgcagccagcaacagtttgcaggtaagtccacatgctttcacatgagaaatgtgcacatggcaattcaggtatttcttcactggcgattttccagtgcccccgtcagatacctatctatggcgggcggggcagaaaaagacacgtcctagcttcctccgaagtttcgtagaattttggtttcctacatttcagctaacattagttccagtaggtgaggaacgagttccccggggcgcggaggactacaactcccagggtgcagtggaccagtccgccgcaaccccccgccccgcccagccggatcggcatgcgcctgcgca

SEQ ID NO: 37702 - DNA, 487 bp, Mus musculus
  source 1..487: mol_type = other DNA
ttagtagttttggttgcttaggtagaaaaaacattatgtcgaatttgactcaacatattttccaaagatttatttatttattatatgtaagtacactgtagttgtcttcagacatccagccaccacatggttactggatttgaactcaggacctttggaagagcactcagtgctcttaagcacaatgtgattatgtctacagaatatacttattaaatagaaattccttaatcacttacttaaggtaagggggatggctattcaaataaaatttaacttgaaatgaaggtcatgagaattttttctcttttttatagcctgtatagccctggtggactcactttgtagaccaggctggccttgaccagagcgggcggggagccttgtgcacacccgctcgagcctcgcatggcgttctcggaggccctggggacgcccttgtgttcaggcgtcgacgcgggcaggccctcgggcccggggtcctccc

SEQ ID NO: 37703 - DNA, 361 bp, Mus musculus
  source 1..361: mol_type = other DNA
acagttcaggtaaccaagtggggctgcatgtgccagccacaccctgtaacaggccgggactgagggatgctgaggccaggtccgcttcagataggttgctggtggctgccagcaatcgctacttggatccagtaggctgcatagcacacttgtgggctgccacgtctgactgtattaatacaattgccagcgtccttgtcacccggaggctttggttcaaagaggcctagggccctcttgcttcccgagatggccgtcagagggcgctgcggctccgcgagtcgcttccgggaatggaggcgtaaaccggaacctggcagcgggttccgccctcgcgccggggaggagtcccggagccgag

SEQ ID NO: 37704 - DNA, 322 bp, Mus musculus
  source 1..322: mol_type = other DNA
ccaaatctgttctttctgaatatgaaaatgaaaaaaataaaggcagaggcaggcagatttctgagttctaggccagcctagccagggctatatagagattagatcatttctccaaatgaaattcccttgttcttttatactctcccagagcagaggggagcctttcccttagaagcaaactttgcctggaaggagagcttaatactgttcagtcctcttcctgagtggtgagcgagctccaagaaagctgtgtcccatgcttggaaggggttctgccaaagcagcaggcccctgctgagaccaatcaagagaagtgggcggt

SEQ ID NO: 37705 - DNA, 162 bp, Mus musculus
  source 1..162: mol_type = other DNA
ctgggcacagtacagctgcttggtccccacgatatgctcttgaccctcaagaagaatatgctaattagaccttgactgtgctcccgcagtcctggctaacaagttccgcgggtctgtttgttaaagaaacccgtgagtcactccagatgtgctcaaaaacag

SEQ ID NO: 37706 - DNA, 380 bp, Mus musculus
  source 1..380: mol_type = other DNA
caaaccagtaggtcccacaagcactgctgcagagatggagcactggctgctctcgcagaggagcccggcttggttcccagcatgtcacataaatgtatatattctgtcaaaactatcatacacgtaaatgaaaatttggtttttggttttttgttttcaggaatgaatttgttcaaaacatactatatgcatagatgaaagtctcaataaaaatgttttgagttttcctcttttactagtttaaagtgggatagtaagagagagagaatctaaacacattattattattattattattattattattattattattattattagttatttttagaattattagaaagtggaactggagtgtcctccttggccggccagga

SEQ ID NO: 37707 - DNA, 488 bp, Mus musculus
  source 1..488: mol_type = other DNA
ggaacaattctagtagcagttaaattggcttgtatatatacttctttatacttcttacattcctgcctcattatgacctactaatagaataaatattttagacttttgacaaaatcattttatcattttgtgataaaatattcctgaataatctcagaatagaatttcaactaaaataagggacatgaataaaaacccttattttatatgatatgattttatatggggtaccaaaactctcagaactgataaatattttcagcactcatgttatgaaaccatcaaaacaatcttatttacagtgcctcaaaattaaaatagcttgcaataaacctaacttaggaaaaactaatatctgtatatcaaatacagtcttcaacaaaacttcaatcatatctttatagaaatcaatctttatagaaaaagaaaaacaaaccatataattcttatgatatgtaatagtaacaaaagcatgttatgctacaaat

SEQ ID NO: 37708 - DNA, 428 bp, Mus musculus
  source 1..428: mol_type = other DNA
aaatagcaatttctctgtctctgcgatcaaaaaagagataggtcctgttctttgttactatgatatttggcaatgaaagcctcattctagcacatatttatgtcatcagatacatcatcaacaccttagaataatcacattatgatattatcaaataagttccatactttcaaacaatgggtataaatctgggaaagaatttctcattaaaataaatgaaggcaaaaattagtccatgctctgaacacaggaagttcacatcttttattttcaaaaaaacagcaaagacagataaatatctgtttctttctaatacattagttagcatcaaagaaagaaataaacaatctgaacaattctccatgactatatatttagtacaaagtacatttattctatgtcacctttgtagcaacctggcacctgct

SEQ ID NO: 37709 - DNA, 442 bp, Mus musculus
  source 1..442: mol_type = other DNA
attcagaatcttgttaccagtaaatggcacatcttattacagtgtctcactttaagtagcctaccatgggaaacctagcagcccctggggcggggtaaatccaggctattttcagatttttttttcaaaatttatctttaagttttagaaagcacctaaaccaaatttttacgtgatttaatacattgaactttcaattaatttgtactcaaagattttaaaaggtttcacttaacccttctcttttgctgctttgtttgaagcttaaaaacagattaaaaaaaagatttacatatctgtactttactgagaataattcataattttccacatcattaaaagtattgtttgggttctaaaaacccattgaatcttataaagtaactccttcagggtttgtgaatgaataaaagagtcggttacttcagtgactctcaaatct

SEQ ID NO: 37710 - DNA, 404 bp, Mus musculus
  source 1..404: mol_type = other DNA
cacttgccataaccaatggctgtaattttacaccctacggaatccataggatcaggagaaaaattccctaaaggaaagtgacatttaattgggaaatttcagagatctgtcactcctagtgacaacccagaaaaaactgctttgcagctttgtgactggaggtgagctgcaactgtcagctgaagttagcagggactccctgcagggaggcctttaggggcggagagcaagggacagctgcctttgcacatggctcccccaacaaaactgtagtttaaaatgctgtcaattttccaattaagatatccagcttgataagaacaaacggtcttataacccatggtctttctacacagatccgtttggggaaagactgcccccagagtagcctgcttttcataagc

SEQ ID NO: 37711 - DNA, 252 bp, Mus musculus
  source 1..252: mol_type = other DNA
gaacagcacgagtgatccgattcaatctaattaacagctgtttagggagcatctttaagcttttagaaggcaccaccctctccttgagaagaagaagcgggagctactggactgagatgtgcccagcagctcatcagtgctgagtagctcctgggtccgggtccgcttcccttgtgcgctaaccagggcgcggcaacccggcttgggcttttgctctggaccacaatgccccggtgcggtgcagccgcggat

SEQ ID NO: 37712 - DNA, 362 bp, Mus musculus
  source 1..362: mol_type = other DNA
tttgcctggtactccattgggaataaaagacagtccctcccagctctccggaggtgaggcagagggatccaagctcagccttagctgcacagtgcagttgaggacagcctgggcttttaactacataaaaagctagcaatgaatgtgtgctagaactgtgataattcagatttctgctcacgtgcgcattttcatatatcgcttggtttctctgaggaaataaactcgctcttagggaggacactgggcgcgcacgccctctcttataaccattgcgacgctccggcaggaggccgaggactaggcggagacttcgcgcgactctccctctgggggagggggtcgcctctggatccaggggc

SEQ ID NO: 37713 - DNA, 394 bp, Mus musculus
  source 1..394: mol_type = other DNA
cagacatctgttgtggaccttggaaacatatctctcatagataaatagactactatactagaaaatctaatttctttatcgtttaaggaaattgagggtaaatctcttatttgccaaccaaactgttttcaacccttcaacaggtttactagtttcaaaaaacactgccgtactggctggtttgtgtgtcaacttgacacagaaggaaatgcctccatgaggctgtgggacattttctcaattagtgatcaagggggaaaggccctttggtgatgaacagcacaatggaagtgtaagctgaataaactcttttttccctaagcctagagttttcagagagattgagaaatctgtttgtctatcatctgcaataggcaccttttcaaataatgtg

SEQ ID NO: 37714 - DNA, 480 bp, Mus musculus
  source 1..480: mol_type = other DNA
aatgaggctcttcttaaattcttttattaatgagactaagaacctcaagaggggactctgatttccctagtaacaggtggcacttcccatgggactccccagaattttacactgactaaaacctagaataactttgaatttgtagtgattttctaatattcaagatcatttatttagtcctcaaaaaaattaactgcttttattcatttaagaagcaaaattaatttcaccagttccgacaaatttgtaattattctcattaattcatcacagagatagccagtagtaaaagcagttttctttcttaattaatcaggctgggtagactgggcagagcccccgccccttgggcggggccatagcggcgggcggaaccagcggccgcggtcctcgcgtccggcggggctagccccgcccactcccaacctcccgcgggggccgtccgagcctcgcgggcttctgcagaccccgccccctggg

SEQ ID NO: 37715 - DNA, 388 bp, Mus musculus
  source 1..388: mol_type = other DNA
aagactaagtcacatttgtaatgctctacagttgactaagtcctttttacataaagagctgattgtattcaaaatttccttttagatgggagtatgcttgcatgtgttagtgtatacaggtgcaggcacatgtcttccatgacacctcgctggcctgtgagcttccagggaagttcctttccatcttgctataggcacagtgagattatagactcacactactggcaatgcccaaatcttctatgaacttggcagggagaataattccatttcttgtccaatgatgtacatgatgactctccacctctctagactatagaagagggaagtgacagctgacagaatagaccagctttaagtgcctttgagaagcccatggctctcctat

SEQ ID NO: 37716 - DNA, 520 bp, Mus musculus
  source 1..520: mol_type = other DNA
tcagagatcctaagttttaaatagtacataatacattgttataattgctgcttaattattagttgtgttagtaatcttactataaccataaattaaacgttaccataggtatgcatttctaggaaagtgcgtacgtgcaatgcatgcgcgtgtattccagcagtattcatggtttcaagcatccactgtcagtcaaacatttaggctaaaagcagcagtcacagattcatcagcagaggtgactggactcttgttgctgatgcccagagtctcaggatcttgggtttctgtaatgccaacacgctaagctggggtgtttgcaggttatagcatagttcagtgcacacagctgcaggtaagcaataaataattgataattactcaaatcaataagtaattgatttagagaatctagcctgcagctgaagcaacagcaagttgtctcagggaaggaggccgggattgcccctcccctcccccagccacagttacagaggcaggtgtgacaggcatttcacct

SEQ ID NO: 37717 - DNA, 218 bp, Mus musculus
  source 1..218: mol_type = other DNA
gataataatcatagttgtaaattatttacaagctgtgactcatctcctctttacaaaattaatttgctcaagatcctgaagggtcccaagagccttctgacagtttctgtccagtttcaaattggcccgggcagtccgggtaggggagccagccgtaccccttcaaattggcaacagggaaggtcctctgggcaggaccaaccctggccaaggaatcc

SEQ ID NO: 37718 - DNA, 206 bp, Mus musculus
  source 1..206: mol_type = other DNA
tcagcagacatgagtcctgacttccaagagattttagaatctaagctggatattcagaagtcaagtccaagtgacttcggtcttaagtacttgagtggtgctaagctgggccttgcagagcttagctttgcaagtgtgcctggaaggcttccagccaaaaccgtgagtgttccagtaaccaagccagtccccaggacactagtcta

SEQ ID NO: 37719 - DNA, 224 bp, Mus musculus
  source 1..224: mol_type = other DNA
agtgtgccctctgtgttcatagagcccaggttctgtgacagtaaattgattaagagcagtagctgctcttccacaggactctgtaactcagtgccaggggctccagtgctcttctggcctctgcaggccccagacgcaagcttgaggaggtggagcctccctctctaatgtagttctgtctgcagccagccacacagagctggcgcaaaacccgagtagagaat

SEQ ID NO: 37720 - DNA, 670 bp, Mus musculus
  source 1..670: mol_type = other DNA
ccagtctggaacaactgtccaaaattgtagtgtgttctaggacatgcacttggctcttagcacagagacacattttctcatatattggtgctactttcttttttaaaaaataaggcctggataggcctaggtcttaccaaaggcccacctttgccaacaaggtggcacagctctggaaaggcaaaggatgggctgagccctgtgtgcctcctccccattcttttccagcgcgcgggctctgggaaagagagccgacttctctcggctttgtccgctcagcagcccggggtctgccagggaccacggccgccccgcacacacacctgctgcccgccccgcgtgggcggctcgggaggagcgtgctccggaatcaccgaccgttcctctagggccccgggggtgcgggtgcggggcggcgccgtcccgggcgccctcctgagaggcgggtcctgtgggagggcggggaccgggtcccgcctcgccctccgccgggccgcccgcaggcaggcgccgggccggccgggaggtggtgctcgcctccccgcgcggggccgtgcgttgcccggcagcggctgcgaggctcgggagggggcggagcggcgcggccggcgtgcagcggccccagtccgcggatccggcccggcccgcccccgcctcgccggcctcgctg

SEQ ID NO: 37721 - DNA, 482 bp, Mus musculus
  source 1..482: mol_type = other DNA
cggcttctctcagaggcaaacagagagctccctggtaagcagataaggattccatgtaaacggaatccactccgtagaggaataatacgctaggaagtttatgtatattgtcaccaatttgacaataggaaaaatgtttatttataagctgacagagaaaaatcaacaatatcatggctcaatcccatctgaggcatggagctgattgatcagtattatggtggttcaataaaccatccctatctgactgaaatcggggtttgtgtaacaacactcatgtagtccaggctagcctccaactcccctttgcaaaggacgctggcagctaacattccaggcgcgcgcccccaggctgggaccctgttatccggtatctgccaggaacccaggagccaggaatgttgcaggggctcaggccctgccttctgaggcccggccccctacagctcgcaggctccggtcggggccgcggcggggaggag

SEQ ID NO: 37722 - DNA, 486 bp, Mus musculus
  source 1..486: mol_type = other DNA
agaatcttccggaaagctccctgggaatggctctttaatttcatcagcctttgctttcctcaaagggaaatctagttattctctacagtaactctacggtaaggtaagggtttaccttaaaaatcaccaaattggagaccctctaagaggggctcggcactgagatctggtgccgcggaatcaggacactcggcggagagtcccgcttacaggaagcgctcaccaggtctgctctttccggggctgggtggggctgatttgaggacgcctctagtgggccccccaggatgcagtcccgagctcgggggacctcacgtctagcctggaaccgagggtaccgcgccgcggcggacctgcccgcctaggctgaactgaccccaggacctcgtcgtcgaggtcgggcctcgcgacaccaccgccggagttggaaagcgaaaccgctctgctctgcgagcggcaccgcccgcgtccgcccctgggaccgcg

SEQ ID NO: 37723 - DNA, 412 bp, Mus musculus
  source 1..412: mol_type = other DNA
caccgtgcctgcagattttaaagaaagggttcccatctgatcggtgagcgctccattcatttcatttctgagtgctgaaaggaaagcccctttacacaattgtgcaaaagaagttttaaagtcaagaatcttccggaaagctccctgggaatggctctttaatttcatcagcctttgctttcctcaaagggaaatctagttattctctacagtaactctacggtaaggtaagggtttaccttaaaaatcaccaaattggagaccctctaagaggggctcggcactgagatctggtgccgcggaatcaggacactcggcggagagtcccgcttacaggaagcgctcaccaggtctgctctttccggggctgggtggggctgatttgaggacgcctctagtgggccccccagga

SEQ ID NO: 37724 - DNA, 351 bp, Mus musculus
  source 1..351: mol_type = other DNA
atagtaaaaacaaactaggttcattcctgcttatgattaaattttatgccaaatcatgacattgtttctaaaagttgtttagaaccatcttgcaactctacctttgtttcaaaaggttttataactacttcaggaggtagttaggactaacttgttattgataaaaaagcttgctttaattaatttggtcatgatgtctcgaggaaatattttcagcaggtaccccttgaaaattaccttcccaagaaacttgcttttgaaatatacttcctagttgtaatagtacttctaaatcgcaagcttaggacattggttttgggtctcagaaggaccagcctcccggcggcgttg

SEQ ID NO: 37725 - DNA, 423 bp, Mus musculus
  source 1..423: mol_type = other DNA
tgactcagctcttcaacatctaatatagttgatgcaattcaattccctttctattgaatagatgaaaagggctagtaattctcgtccgttaaaatgacgttcaagtcttcaagaactgtgtcactctcaccgccatgcgcacctcaggtgacgggacaacagaccggcgggcccggcgccgggccgcgagcccctcacccctgccctgggcccagcgccgagagccagaggccaacgtcgggcgggacccggcgccatgactgtgtcggtcccaggcacatcgcgacgctcaccctaagggatcggcgagcgtgcctcggtttccgggcgagagcgtccccgttgccacggagacaggcctgtctgtgacgtcacttccgtctcctccagactggactgtggacgcgagcgtctcgagtgtgc

SEQ ID NO: 37726 - DNA, 306 bp, Mus musculus
  source 1..306: mol_type = other DNA
gtggcctaatggataaggcattggcctcctaagcctctattttaacatcatctaattagatgattattgcgagtcaattagagacaaggtctctctacctgcagaccataatggtctatgagctggcgtgatggcgcacgcctttagcggatttcgaggccagcctggtctacagagtgagttccaggacagccagggctactcagagactcggcggccatcagcttacggcagaaagggacgcagtcagaagggccgagaggattcggcacctgcggagtgggcgggggaacacctcgcccgagg

SEQ ID NO: 37727 - DNA, 429 bp, Mus musculus
  source 1..429: mol_type = other DNA
tgattttaatatgaagctggcgctatttgaagttttagttcttataatgaaacggcaaaaaatatccataatttcccagttattatctaaagttgcgacgtttcagcttaaaagactcgccagtttttttttccttttcgaaaaccggtaagcatgacatgtcccgaactcgggcactgatgaggggcagtggcctgaggtgtcctccgctcgggctcggggctcccacgggcttgcgattccgcacttactgcgactcgctctaagctcggcactggctaatttgcggctggacgccagggcggcaaacagcaaaggcctaagtgacctgctgcttagacgcccggggccgaagaggcttcgcccttggcgattggccgaacccccacgggaaacgactaggcgcgagctgcgtgcgcgctcccgtcg

SEQ ID NO: 37728 - DNA, 291 bp, Mus musculus
  source 1..291: mol_type = other DNA
ctacaagtaagtctataataacaaaaattgtattcaagccaagtgtagtgcatgcctttaatctcagcatgcttttaactccgtgagttcaggattcatggggtcaggctggtctgaacttgctatgtagaccaggctggcctcaaactcacagagatgtctctgctgccagagtgtacaggcatggaccaaagcgtctggctcattccagttggaaccgggtcctcccagcaaccggtgccacggaaaggccaggctggagttccgagggtgtggccaatccatagccac

SEQ ID NO: 37729 - DNA, 285 bp, Mus musculus
  source 1..285: mol_type = other DNA
cttgaactgcagggcatgccctttctcttctgccatcagtctcaagacattagataggtcttcagtctcctgtctttggctctctagattcctgcgctgcctgctgggcagccctcccatgggacggcttcccctcagccattggcaggcttcctttagcctacatgcaggacatcgtaaacaaggtttttggagtaaagatatgtgtataggtgttttgcatacatgtatgtctatgcatgcctactgcctgtagaagccatgggaagggagctctcatatggg

SEQ ID NO: 37730 - DNA, 465 bp, Mus musculus
  source 1..465: mol_type = other DNA
gacaagtgtcattgctggaggctagcctggtctactgcgagccccaggccagccagagttataagtgagattcagtctcaaaactcggcaaagtgcttgtggcacaggcctaaggactaagttcagccggttgaccagctcactttagttgaattggtgggccccaagttgaatgagggtctatatagcaagttctagggctgcataatatcctatatttaaaaatagccctgtccccttggaccatggcagcgctgatgcggtgggggtgggggtgacaagtcccagcccccatccttcaggagcagccttcccaggtccttgtttgggaaactcccccccagcagctgactctggaggagggtgctgcgagggagccggtggcggggccagtggcctgggctgtctttcctccccgcaaccccgccccgcggtcgcggctccctcgcagcccgggctcctccc

SEQ ID NO: 37731 - DNA, 367 bp, Mus musculus
  source 1..367: mol_type = other DNA
tgagaaccttcacagcactgttctgcagcatcatttgtgagtatggcggatgctgaccccatatactctgtcttcaggatgaaacacgctgatgaataagcaaataaaatcatccagtgtctttcatcatcatgctgagagcgctcacccgaggtaagatctgtggtctgcaatgcactgggaggtggttggctgatgctgtccacctggcccccagaatccatggaaccttgcaggaggtctttctctgaggacggcgtaaatggttaacaaatgataaatgtttattgacaacacagtcatcaagaaaataaagttgctgattcattgccctttcctctttataaagaaaggcacactctaagaa

SEQ ID NO: 37732 - DNA, 619 bp, Mus musculus
  source 1..619: mol_type = other DNA
ggacctatgatttacaggtaggaaatacaatttacatcaggtgtccagtattcatacctgaaaataaagggtttatgagacaaaatattttttgctggatactaatattttgtttatgaactattcatatatcataggtgggaccctcccacccggatgatggaggagagggctctccaaacccgagcagttcagggagctcccccgacattctcccgggaggactacgcgcccgtgtcggctagaacggagcccgcacgcgctggggtgaagacactttgcccggcagcgggactgctgtcggcagcagccgctcgcgctccccggcccggtcggccggcgcgcgcacacccacgcgcgcactcccaaagttgtggccgcctccaccgcggagctccggtcggcggctgcgggccagcgcaccgcgctctcgcccagccccgctcgcacggccgctcggctcccctcgggccgcgctcggcccccgccgacgccccgctctgcgtgccatcggcgctcgattgcgcgcggactccctggggctcttcccggctcgttcgctcgcgcttgcccgcccgcccgctcgcgcccggccgcgccgccccgcccccgccccccc

SEQ ID NO: 37733 - DNA, 311 bp, Mus musculus
  source 1..311: mol_type = other DNA
cattgataggggcagctgtaaattgaaagaaaccctttcctccctaaagtgcttttggtcagggtgcttagcacaccaacaaggatattagttatttttctgttgttgctgctactgtgataaaagaagcaatttatagaagaaagagcttgtttcagctggtgacatacttctcttaggaagatttcacaaaggggaccaagtgttcaaatatctgagcctctggtgtgtgtgtgtgtggggggggtgattctcattcaaaccaccacaaaccttccttccctcaaaacttctaaaagagttcctgagaa

SEQ ID NO: 37734 - DNA, 257 bp, Mus musculus
  source 1..257: mol_type = other DNA
taacaggcatgagacatcacagctggggctctggaacatgagcctgctagaggctcatgtgtctagggtattttgtcactgccacaagaacagtagctaccttctcgccatcttttgaaatgatggaagactgttcattttattctaatacatgtttagacatgaaacactttacctctgactttgactatcaaaaaagagagagagagaatggtatatttgtcctttaaatataagattaaaagcagcagagaccc

SEQ ID NO: 37735 - DNA, 233 bp, Mus musculus
  source 1..233: mol_type = other DNA
tgtgtagtcagctctggaagacgtgactagttacacatacacacacaaaacatgaattgtgtgtatgtgtgtatatatgtatgtattatgcatatatatatatatatatatatatatatatatatatataaattagatgtagagctcatgtgattataacctgtctggatttgttaaaaggaggagggttaactgatgccttcattataaagtcaacgtgagcacaatgggcc

SEQ ID NO: 37736 - DNA, 623 bp, Mus musculus
  source 1..623: mol_type = other DNA
aattaacatgcttgttaaactcttcctgtgaacatgacttactaacgcttttattcccgggagactcctggagaacacacaggagagttctttccggtgaggaatcccccctttaaaggacgctacgcttccgctacaaaagcggagtatcggggtgcggtgggaccgggtccgtcgtccccgcttccgaggcccgcctgctaaagcccgctttggctcgggcgacttctgagcccccctgagcgcgccggccgacgcaccaaccggccgcaaccggccggcgccgtctggaaacttcgctcggcttttccgactgaaccccccgcggcgtccctcgggccaacgcgccactcgcctcacaggacgctgctgcctcgaagggagcggccacgactccctcagacgcgggagtccggccccgtgaggacccgcgccccgcatctccggccgcgcgacgcctcgaggcacgccgggtcgcccagtgcgcgcgcaagcgagcgcgggccgccgtcgagccgcgcggtccccagctggcggccctaagacaagggcgccggctcctcagctgcggcccgagggcgtggcaaggccccacggcttggggcccggcccgtgaaaggcgc

SEQ ID NO: 37737 - DNA, 514 bp, Mus musculus
  source 1..514: mol_type = other DNA
ctggaactagagtgtgagtcaccatggaaccgatgggcagtcactgctcttaactgctgagccgtctctccagttccattttttaaaaaatgatttatttatttttattatatgtaattacactgtagcaagagggagtcagatctcattactgatggtgtgagccaccatgtggggatttgaacttcggaccttcagaagagcagttcttcagttccatttttaaaaatgcacagatgtgggaagagcacccgactgctcttccgaagtgtctgaagacagctacagtgtacttacatataataaataaataaatcttttttaaaaaaaaaaatgcacagatgtatgtatgtacgtacatatgtatgtatttaatcatctttccagctacgctgctggggatcttaatatgcaggagctcagttaaacccaaccagtggactttacagctcgcaggtaaagcggcactggcggactacagctcccggcatgcacctgtccccgaggtcacgtg

SEQ ID NO: 37738 - DNA, 677 bp, Mus musculus
  source 1..677: mol_type = other DNA
tggtagcatctcccttcccagggaaaagacgtttcaaaattttctccccacttcgcagagcagagcacagccaagttgtgttatttataaaaacaccggttcttatttccaagttgctctctgggaatcaaggcgttcctccacctcgggaggcacaactgcttgacgtgtcaccccggtcggggcccacgcaggacgggggtggcatcctcagtgggcggctgctaaggaccctggagggctgaaacttccgagcttctccgagcctgggcttccactcggggagcagtgaggacggcgagacccgctccacgcacgctcctctgcagtcgcgcgcccgccgccgccactgcggcgcgtgccctcacggcgtctccgccccctccccggaccgccagccccgctgcgggtcgccgcgcaggtcgccgcggaaggtgccagggagcgcgcgcggagaccgagaacgtgcgcgggacgcacggccccgcgctgagcgccggaagcagccgacgggcctcgcgcgtcgcgcgcgcgcgcgccgcccccgcccctgagccgcgaccttgctcgctcgcgcgcgcgcactaagacgccgccgccgcagccgccgccgctgctgctgccgccgccgccgccgccggggctgctgctccggctgctgcaggaggcggcgctgg

SEQ ID NO: 37739 - DNA, 788 bp, Mus musculus
  source 1..788: mol_type = other DNA
ctgcagtcgcgcgcccgccgccgccactgcggcgcgtgccctcacggcgtctccgccccctccccggaccgccagccccgctgcgggtcgccgcgcaggtcgccgcggaaggtgccagggagcgcgcgcggagaccgagaacgtgcgcgggacgcacggccccgcgctgagcgccggaagcagccgacgggcctcgcgcgtcgcgcgcgcgcgcgccgcccccgcccctgagccgcgaccttgctcgctcgcgcgcgcgcactaagacgccgccgccgcagccgccgccgctgctgctgccgccgccgccgccgccggggctgctgctccggctgctgcaggaggcggcgctggctggcggctgcgctcgctccagtcagcgagcggaggagcgggccggagcggcggcggcggtggccgcgggagcagcagctggagccgccgcggcagcggggtcggtgtccgctccgggtcgggcctcggcgccccctccgcctccgcccgtgtactgtgtatgccggcagccgtacgacgtgaaccgctcgccgtcgcctgcggtcaccgaccagccgctgccgctgccgcctgcgcctccctcgggctcggctgccgcgtcgctccccacgtcccgactcttaggcaccgagtgtccgggccgggtggaggcgagagcgggggcccccggttgcccggcaggctgcggaacggagccggtgggctcggccggcccgggcgaagaggtggcggaggagcgaaggcaggcccgcagcccgcggtccccccaccgc

SEQ ID NO: 37740 - DNA, 294 bp, Mus musculus
  source 1..294: mol_type = other DNA
ccagcttgacaatctagttcttatgataggctctgaaggtagttaattatcaaagtctagaattgatagagtatttacctcagatctttgctcttactgccagcattctcacacttaaaaatttctgctgtgtggtaaaagttctacataactagggcgatcatgcatggggtcctggagctagaactcaggtcttcaacactggcaggaaagctagctgtctgcgctgggccctgtacctggccagcacctcacctggggcttcaggctccttgcaagtggacttgactccag

SEQ ID NO: 37741 - DNA, 704 bp, Mus musculus
  source 1..704: mol_type = other DNA
gggattctgacagttcctgtgagagaaagaaacaaggttgggatctcactctaggctaggatggctaggaccaggaccatcctagcacacctggctaagcgtgtgatcacgcccctttagggcggagcctaagccaagcgtcgccggaggagggccgcgggtgccctgcggagcccgcagttcctgagacctgagcgctcggagacgcggtgacacggcgcgggactggcgcagagctctcgggctcctcagcgtgatcccggaagttccggggccatttaatggcggaggctgcggctcccggaacaacagccacaacatcaggagcaggagcggcagcggcggcggtggcagcggcctccctcacctctatccccacagtcgctgccccgtccccgggggcgggaggagggggcggcggcagcgacggcagcggcggcggctggacgcctgcaccgagcaagaggcggaggcgggcgtcgcggggtccccgctgcggctgtccgtacagcatcgctgcgtcagcctccgcagaggttggccgcggcatcgctgcgggtttcagactgcgggctcggactgcagggcggtcccgtcacctcgcctcgctcagcggcgccccggtgcgtgcggagaggaccggtgtccccgccctggcctccatcgctacaggttcggggatgcggcgcgagctcgccgactct

SEQ ID NO: 37742 - DNA, 564 bp, Mus musculus
  source 1..564: mol_type = other DNA
aggtataaaaccaaacacttttttcctttagccattgtgatactcaagtcttcacattggtgggcgccagcagggattctgacagttcctgtgagagaaagaaacaaggttgggatctcactctaggctaggatggctaggaccaggaccatcctagcacacctggctaagcgtgtgatcacgcccctttagggcggagcctaagccaagcgtcgccggaggagggccgcgggtgccctgcggagcccgcagttcctgagacctgagcgctcggagacgcggtgacacggcgcgggactggcgcagagctctcgggctcctcagcgtgatcccggaagttccggggccatttaatggcggaggctgcggctcccggaacaacagccacaacatcaggagcaggagcggcagcggcggcggtggcagcggcctccctcacctctatccccacagtcgctgccccgtccccgggggcgggaggagggggcggcggcagcgacggcagcggcggcggctggacgcctgcaccgagcaagaggcggaggcgggcgtcgcggggtcccc

SEQ ID NO: 37743 - DNA, 340 bp, Mus musculus
  source 1..340: mol_type = other DNA
gctcctgtcaggtataaaaccaaacacttttttcctttagccattgtgatactcaagtcttcacattggtgggcgccagcagggattctgacagttcctgtgagagaaagaaacaaggttgggatctcactctaggctaggatggctaggaccaggaccatcctagcacacctggctaagcgtgtgatcacgcccctttagggcggagcctaagccaagcgtcgccggaggagggccgcgggtgccctgcggagcccgcagttcctgagacctgagcgctcggagacgcggtgacacggcgcgggactggcgcagagctctcgggctcctcagcgtgatc

SEQ ID NO: 37744 - DNA, 624 bp, Mus musculus
  source 1..624: mol_type = other DNA
ctccaacgtttatagaattattttttactcctttctcgcaaagaagaccggctccgaacgctcggttcggagacaaagctcgggctgctcccggcggggcgggggtgagcggcatagcccggctcggagccccggggccggccgagctcgccgggacccttggagggtctcagggcgcaccgagggtcgttagagtcggcgagctcgcgccgcatccccgaacctgtagcgatggaggccagggcggggacaccggtcctctccgcacgcaccggggcgccgctgagcgaggcgaggtgacgggaccgccctgcagtccgagcccgcagtctgaaacccgcagcgatgccgcggccaacctctgcggaggctgacgcagcgatgctgtacggacagccgcagcggggaccccgcgacgcccgcctccgcctcttgctcggtgcaggcgtccagccgccgccgctgccgtcgctgccgccgccccctcctcccgcccccggggacggggcagcgactgtggggatagaggtgagggaggccgctgccaccgccgccgctgccgctcctgctcctgatgttgtggctgttgttccgggagccgcagcctccgccattaaatggccc

SEQ ID NO: 37745 - DNA, 427 bp, Mus musculus
  source 1..427: mol_type = other DNA
tcccttaaggcccccacagcattttcaagtggactccaatttggtttttaagatttatttatttattatatgtaagtacactgtagctgtcttcagacactccagaagagggagtcagatcgggtgctctacgtgggaccgtgggaccgtggaaccgtgggaccgtgggaccggtgtgcgtagggaggtgggcccctggatccttatggcccaggctcctgagttgcttaggggcaaatatggacccttgggtcaggcgggggcaaatgtggagcccaattctgcctgaggcgaaccggttcggcgatccgtctcccccacccctcgaaaggcgagggggcgagtgaggctcccctcggcggcgggccctgggagagtggttgctgtggcaaccggccgggcgcccgccagctgcggattagctcag

SEQ ID NO: 37746 - DNA, 308 bp, Mus musculus
  source 1..308: mol_type = other DNA
acaatgtttatatattatataaatatatatattttaaaatagaataaacacatttaaatatataaatatgcattataaaactatatatttagcgagttcgaggccagcctggtctacaaagtgagttccaggacagccagggctatacagagaaaaaaaaaaaaaatatatatatatatatcccaaggcctctaattacaactaactgtgaccattatagttttcaaatactgacagatctatagacagaaggaggtggagaagcgtgctcatctacttccagggcgcatgcgcactcagagttccag

SEQ ID NO: 37747 - DNA, 420 bp, Mus musculus
  source 1..420: mol_type = other DNA
ctacccttggtcagacttttgtgcaaatttctttccacacagggacaaaagctgttgagaagaaattgcaagcccttaaaagtctttcctactttggtttattttgtatgtgggggacacgacttaaaaggaattggtgacatccttcatgtaggttccacggatcgaactcatttatttcgttgggcttgacataaaataatatcgttacctatctagtttagtatatattcttgtgactcaacaaatattaaattaaattcaagaaagacctgatttggctcaataagtcttagttaagtgtataagccattaaggttgtaatattcagtgtagtttaatatttctggaaaagagggctacagagctcgcgtctgcgttttgtggccccttgcggaaccaggtaccggaagctgggag

SEQ ID NO: 37748 - DNA, 437 bp, Mus musculus
  source 1..437: mol_type = other DNA
agtctatccagatttcaacagttcttgaaggaaatctgaagtgagtgaaaaaattagtttttctggaaagatgacagtaggctatcctatagacctagtaactcggaacagatatgtatgtcttgttttatgaggatgagcttgaaaattcatattccctccccactaattatttttctgcttgcttattacattaataacaagaggaaatggctaaggctcgaggcgttaggaactttcagtccaggttctgaaatttaacaccctggctgattagtcattcagaacaatgctgaaacaacgatgctataaaataaacattgcgatgttataaaataaacattggcctagcaccttgccaggctgtgccacgaggcagccagggctcctcctgaaggacgaccagtgcgacgcagtgacgtcacgggccgggactc

SEQ ID NO: 37749 - DNA, 469 bp, Mus musculus
  source 1..469: mol_type = other DNA
tggttaaacgtactttaaccatgtaatttacataaagaaattgggtttaattttctcccaattctttttttcatatacagtttgaagagaatgccttggtcaggatctacaaaatattttaaattattttctttggaataaaaattagctatgatgcataagttagattttccttcaacagatcccagagcttctttgtaacggcagtaataagtactacagaaggaacactcccctggcgacagcggcgcgagggtgctcctcggatgacgtcacgcacccaggtgacgtcacgaccgtgacatgcgggtgacgccgttgccgcggcgactcctcgtcgtctccgccccctccaaatcccctcaggctcggctgcgccggggccgccggcgggttccagaggtggcctccgccccggccgctccgcccacgccccccgcgcctccgcgccccctccccgccccgcggc

SEQ ID NO: 37750 - DNA, 415 bp, Mus musculus
  source 1..415: mol_type = other DNA
aaagaggttggtggcgaccatccccctttccattactcaagagttaaactggaaattcctgaattggttaaacgtactttaaccatgtaatttacataaagaaattgggtttaattttctcccaattctttttttcatatacagtttgaagagaatgccttggtcaggatctacaaaatattttaaattattttctttggaataaaaattagctatgatgcataagttagattttccttcaacagatcccagagcttctttgtaacggcagtaataagtactacagaaggaacactcccctggcgacagcggcgcgagggtgctcctcggatgacgtcacgcacccaggtgacgtcacgaccgtgacatgcgggtgacgccgttgccgcggcgactcctcgtcgtctccgccccc

SEQ ID NO: 37751 - DNA, 418 bp, Mus musculus
  source 1..418: mol_type = other DNA
atcaaatattagtggatccagtcttgggacatctcaggcgagttcccatttgaagatgttcctagaaaaactgttcccatttaagacagcaatgttgtgccctcagggcagacttctaagagtcctctttgcagcaaatgttgacatcttcctcgcagtgaaaggtggcaagataaaaagtttttgtaactgccttggtgtaaggcagctaacaggaagcttctctgcacctgcccttcatatattttaacaagacacatttttctgccagcacacaggcctaagggttctgtgattttgtgcagttccaaatcgtaaaactgttcttattatgtctgctgcgagcccatccctaggtcacgggagggctcgcccccgcctggctcgcgctgctccgcgtcggaacccgagagcagag

SEQ ID NO: 37752 - DNA, 411 bp, Mus musculus
  source 1..411: mol_type = other DNA
cagctgacacagctgcgcagataaagctgcagttttcttgatatctgatttcttttgagattgctcaagatctcatgattgatctcttaagacatcttgcttttaaaaaacaattgagagtttatcataaaagtttgaggtctctgagtttgaggccagcctggtctacagagttttacactagcttatccaaatgtacaaagagaagcagaacttaggctataaggaaaaatactgcatttcattctattatcagcgaggagggactcagctctggctctttcctcgcgggcggaggccctgggctcagagcgagcgcggccgctaggtgtcgcccgaggtcccgcccccagggagtgagccgggttgtccgccgactccgctctctctcctgctctctggagctgggaa

SEQ ID NO: 37753 - DNA, 506 bp, Mus musculus
  source 1..506: mol_type = other DNA
ctagcagcagctgtgggtagtcattgatgatcctcttgggaacaggataacacaaaaattttaccaagtccttgtcagaaacatgaggtgaattctatctaaaaataattgtctcttgctatcttatttttttcataattttaatggatatttcttatgcatacctaagttacaagaactgagaaattcaaatttttatttgtaaatattcagagggaattcattggcaatccttacttaccaaataatgatcactatgtgttatataaatatataatatatgtgctccgctccataatgggatgcgcgtcctgcaccctacactatcccggaccaggccacggggcgctgaacccgtgcgggccaccttccagagctccgggaccaagcaagtgcgctggtgtccgagcaggggcaggtgtggccaagcccagcgggcacccagagagcctccgcaccgcagaaagcggcagggcgggcaggcccggaggggagtgcccgcagcc

SEQ ID NO: 37754 - DNA, 485 bp, Mus musculus
  source 1..485: mol_type = other DNA
agcctttacacagcgagacagtgtcttttttaagcttttccatctagaataactgccaaagataaaaaaaaaaatctaaaaaatactgatcagtttctttctataaaagtaaaatcttaattacactttgctttaaaataaagcaacgttttgacttttaacacttcttcaaaatgttttggaatttcataaacttttaatgttttagggaaaacatatatacaaatacataatataagggcgcatttctcttgtgccttaggcacagtttgggaccggtacttaataaagatgttaaaaattttgctcctcacgtgtttcttgaattttttgacttaacatgttaacatatctagatcaccgtcaaatagggaacatcaaataatctggccagagtttggcctggacagaagttcctggcacttctaaattgaggggtcgtgtttccggcgacatcagccggcggcatttcaacggcatctcgc

SEQ ID NO: 37755 - DNA, 404 bp, Mus musculus
  source 1..404: mol_type = other DNA
tctccaatgaagccttactgggtatattaatcacacttcagggtaggccctatgctcaggagtattaattggccaacagaaaacctttgtagaccttacatgatcaacatatattgtatgaaaatattttccaactaagcactcacagagggagagaatacttggctttgtgtctggaattcattgcatgttcaaagaatgcaatgagagtatgtgctccctaatatcaaatattgaaatcattcattacttcattatgtaaaagtcacttaaagaggcctgtttttttgaattgtcatcaacacattaaatctttatttaatgtcatctagacctaactgtcaaaggtaattaactgttccctgtgagctttcatttcaagtgatgctgatcaggaccaaaat

SEQ ID NO: 37756 - DNA, 325 bp, Mus musculus
  source 1..325: mol_type = other DNA
actgtcatcacagtctacacgaagtggtctgacatctacaatatctttgaaaacaaagacaaccaacttgtctatttggataagttgtgtaattaaaaaaaatcagaccataaatgtttattttatgggtctaataaaaagtccacaaataaaaaaggactgtggctgtgccagggcaagcatgcatagtttcagagtgtggaaattattgtgcacaagcagataagcggaatactccagaattatcttgtcaaagaatatatataaaaaaaatttgtatgcaaggaaaggaaccttcctccttcagaagtagaagttcccttag

SEQ ID NO: 37757 - DNA, 193 bp, Mus musculus
  source 1..193: mol_type = other DNA
agatgtttacattctgtttcccagcagtgtgacaggcaatccaaatgtctgggtggagaatccactagaatctaataactggtaaacaaatgaatgttgaatttgttcaatgcaaaaaccaacttttaatcttaaaggcacttttctagatttactgactgtagactttttgagcctcggattaataggttaa

SEQ ID NO: 37758 - DNA, 428 bp, Mus musculus
  source 1..428: mol_type = other DNA
atagcaaaaaacaatcttaagaatattttcatggtcttaagatcaaagtactttgataacattttcttttttttttcttttaaagatttattcatttatttattatatgtaagtacattgagcagtcgggtgctctaacccattttcaagacaattttcttctatcctgagaagttgataatctctgagagaaaccagagttattcttggattccagaatttagttagctttgttattttaacagacaccttaaaggtttcatggccttgacttcttgccctatcatgttgtgaagacatccaatcataaaattattttttgttgctactgttatgaatcataatataaatacctctgattactgattaactaacagtcaatgaaagcttgcctgtgatttgcactcaaaggtcatttagaaagcagt

SEQ ID NO: 37759 - DNA, 391 bp, Mus musculus
  source 1..391: mol_type = other DNA
gttcagattgaaagactgtctctttagaatgtctttatttctgccaggtcagttatagaaagtggcatgttctttattcaggacaaaactcccattttgattttctgcttgcattcctggagtcagacagaaatggagacattttactctcttgcaagagcttgaaactcaaacttgagagactaattatcaataaatgcctagagcataagctccagctagttctcttttttattgacaggtgatacttaacacatatcacttccaagatgcaggggcccagtcactgcactcagttctgtagtgagtgtcacaggaaagggtgcaaaccttcagtttgaggttttcactttagaggaaagcttagtcagtttcctgaggaagtcataag

SEQ ID NO: 37760 - DNA, 452 bp, Mus musculus
  source 1..452: mol_type = other DNA
atatgtgctagcatttgtttaattaccttgaccattgacttaaataagataaaatctcaaagtaattttaattactcatgactatggatgttgcacattttaaatttgtttctcagcaatttatattttaggaactctctaagtattagattcttgtaagaaaaataatactctattttttgctgtgcatatacatatatgggaaaagccaccaaatttgtcagtaattggagaactgagttacaaactatgtgtgttgctagactatgctatttattttgtcaatccaagaagacaaaacactcatgctcagatcttagatggggtgcatatattttaacagatatgatttacttaatctatatggaaactttaaatatatgggtacccaacaaaaacacatattccagcgtttgcatggttttaaggttactgtcagtcatgtgtgcagc

SEQ ID NO: 37761 - DNA, 455 bp, Mus musculus
  source 1..455: mol_type = other DNA
aggatgagtatgatcatattttattatatacattaataaaattctcaataaaatgtataggtgaacctatttactaattgttacctatgtggcaatcaagaaattgtcacgtcagattttcttatagaaaaagaatatagttcatttggaaaaaaacagtaatcaaaataaaaacttttttaaaaaactggttttatttactattctaaccaaatagtatcattttgccccaaacttttatgagggtgaggatggttttgcaatcaactgagaaaccccagttcattgaatagaaaatgcttaaggatagctaatattaaaaaaataaacttgtatcttaccccactgtttatgaagacctgacccaaatcttagggaagatctgattttcaagttataactctagacttctcagttccaaagataagtgcattgtatacatcaatgttctaaga

SEQ ID NO: 37762 - DNA, 434 bp, Mus musculus
  source 1..434: mol_type = other DNA
tcaaacaataatagtaatcataatatctttaatagtgttttatattttttctttcttactatagaatcacagtacatgtaacgaagaatcaaatcatttgatgaagaatattccttgatttaacatgatttttaagaaaacttactaagaaattcaaacattgacaattttatttatgtgtattataaatttatctttttagcaattctgaactgttcattattgttcctaatgtttattaagtaaatcttaactgaaaatctatttgtaaagtcataaggtaaatgattgttttatttatgtatggcaatccttacctaatgactacctttccttaggtcatcccaaggactcatatctaggcatgggcaattgagatctcaagacaatgtgtctggtcaaacttgatctctagctcagcgtctgctggaatt

SEQ ID NO: 37763 - DNA, 296 bp, Mus musculus
  source 1..296: mol_type = other DNA
tccacttatcagtgagtacatatcatttgaatttcataaattcactctttttaatagctgactagtactccattgtgtaaatgtagatgtaaggaaccgccagactgatttccagagtggttgtacaagcttgtaatccaaacatattagcaccagctgcagttgttccttaaacttggtgctgaatcatcttccaccaatcacagaacagaattgtaagtttggttttgtgtgtgttcaaacctttttttgtttttcaccattgaaaccaaaaactcaaggtataaatagctgta

SEQ ID NO: 37764 - DNA, 474 bp, Mus musculus
  source 1..474: mol_type = other DNA
acagagctaccgaatttgtcttcctaaactcatgattctggtaacatgccaatggacaatattttcaaactacaaaccaaaagaattctctctttttaaagtttctttggtaagttattgtgtcaaagtaatgaaaaaagtaattgagagacacttttagaaaataaaatttaaaatgccaaccatttctcatatttccctggtagagaaatataatttgcattcttttatctcaacccgtagataaatatttgctatagaagagcttacatttgtttcctatgataaattagaaagatcaattgaaattaagaacaaaacataagtacatttctcattattcccggaaacttggtgctgaatcatcttccaccaatcacagaacaaaattgtaagtttggttttgtgtgtgttcattttttgtttgtttgtttttcaccattgaaaccaaaaactcaaggtataaatagctat

SEQ ID NO: 37765 - DNA, 300 bp, Mus musculus
  source 1..300: mol_type = other DNA
tgcagatctttctgacaggaacaattctggggggatggagggacccctgccctcagggcactgctttcattaaagaagagttttcctttccttgaaagagaaggtcttttactaggaaaagttatacatttttaataattacaaaatagacattgtcatttataaaaatgcttacatctggaatgttagagtacctaagacttttgtctgagaacctgaaaacctgaagttttaatatggagaacagtttgatttgaattctaaatttagatttctgagtttccaatgaaagaacttttc

SEQ ID NO: 37766 - DNA, 335 bp, Mus musculus
  source 1..335: mol_type = other DNA
taacattattcactagtgatttttcaacaaactaaggtatcctatttcaaaacagtctgtttgatgtttgcagcccatataatgcctccatagtctatggataatgtgacctcacagaaactcttgaggcatcaaaaaacataaggctctgctcttagacactaggacttccagaacctgtagggtattgtttggggtggaggaggagggtacagcatctcctctccttcctcttaaattactctgatgagcagtgaggctcatcttaggctttcttaggatgaaggagagaaaccctgggtatgcgtatggtctaggtctgggagcctatgccc

SEQ ID NO: 37767 - DNA, 274 bp, Mus musculus
  source 1..274: mol_type = other DNA
gtatggtctaggtctgggagcctatgcccctgtgtgattttacatagaacatccctacaattatcagatgtccagtcgtcaaaaacttctaaagccccacatacttctgtgccagcagccaagcctgcagagcctgagcctggggactcagttcagtagtccacaggactcaagtaaaaataccacctgttaattagatgtcatgatgccagaggctttgacttgagtaaaaaacccctgggtttctactcagtctgcagatgataactgttac

SEQ ID NO: 37768 - DNA, 361 bp, Mus musculus
  source 1..361: mol_type = other DNA
aggctaggtgcagagcttttgtgatagctcctgttccaatcatctgctacatatgtgtgagccccaaaggtccaggttattcttttgtattttgtttgaatcataagaagcagaaagaatttattcactgtgctcacattgggaagagggtcgaaaagtatagtctataacgtgcaaatctctttctgggagaaaagttttccttctgcttgaatcattctgggaggtagataatatacagtgtcttttttgaatgtcaacctcaaccttgaggtggtatatatttgtaaaacaaaaatcatagaaaaaagattaagaatgcttttcattccactggccactggcagaaactttgacttat

SEQ ID NO: 37769 - DNA, 242 bp, Mus musculus
  source 1..242: mol_type = other DNA
tctcaggatgcttcagcccacacttccatacatataaatgaatactgatagtaatactaatttctgatcttctaccattaagaatatctatatagtaagctaccatgcctatctatcttccattgctgtcaggcaaggctactacatatgtatgtggagttggcagctcccccatggggttccctgtcagcaagtgcctcttggcaacagcaaggggcagtccttggatggccctcctttct

SEQ ID NO: 37770 - DNA, 375 bp, Mus musculus
  source 1..375: mol_type = other DNA
cttccattgctgtcaggcaaggctactacatatgtatgtggagttggcagctcccccatggggttccctgtcagcaagtgcctcttggcaacagcaaggggcagtccttggatggccctcctttctttctgttgtcttgacacaacagaaaccaagttattctgcagatggtaagttttgattaactcactgagataacaacaacagtagacactgaacataaaaattactactaaaagaagtgtccaataggtaatttgatatgtaatatttcaggaaatttcatggttttatttttttcttataaaggaacagtgatcacttttgaaaggtgatcctttgagcagtgacggagacagtggtgtcatcacaagc

SEQ ID NO: 37771 - DNA, 391 bp, Mus musculus
  source 1..391: mol_type = other DNA
aagcatgatttaccagtttttatttgattaagttaaaaaatgtctcactgttacaaatatagatattattagacagtgagttttctggtcattcaattctccatgatttaaaaagccacaattggaattcaatatgaataagtaaaagacatttcctttaaacaactggccatttcttgcccatgatgtacaggatttatatgtttaaccacatagaggaaattccatgtgaatcttgaaatttgatcaataatccatgatgtggaacatatcttaataccttgcaggtgtgacctacgataactatgaatgcatttcctaggaattcccgaccaaatttaaaaactttcgcctgtttttgccatagttcttagaaagtctgttgtctctg

SEQ ID NO: 37772 - DNA, 437 bp, Mus musculus
  source 1..437: mol_type = other DNA
tgccatcaggtgctctcttcacctgtcttaagaagtatgtcacatgaatccaagcaccaagctttcagtgccttctttcttttcctgttcatgtcagtagacggaaaaaagagagttgtgttttttattttagaagcgcttgcaatcccagatcttgatagtaaggctttatcttttattaaagacaatattactatccaaatattacacatagcaaaacagaattttgtaatgactttaacttcatccaaagctcaagatcatgcccatattcttactaaggaatgagtttgaggagaacctccaataaggtactgaaagtggcttccatcttcatcatttcactggtgtagacatcagtgtgttttctgcatttaaaagtcaatcaggaagattctggctacttgaggcatgtatgtttcttcaagactgatgga

SEQ ID NO: 37773 - DNA, 532 bp, Mus musculus
  source 1..532: mol_type = other DNA
aagataatgattgctactgtatgaagatcttctttttccattcctggacctatgtagtggaaagggaaaactgactcttggaaattgtcctttgactttctcatatatataaaaataaaaaaataaatgcaagtaatgtaaaatcttttttataaatagatgcacatgcatgcatactcaatgcatactcaatgcacacatacacatgaatacatacatacatacatagtagatcaagacagtctaagaaaggctatattaagaggtactaatatcttgttttctcctagtcactggtttttatcataaaacacagataataacataaatatccagtataataaaatatttaataagacaattgtcttgtaagtgcataatcctgaaatttccaacaactgtggtattttattgtgctatcattataaacacatttataaatatgggatactgtttaacttattggaaagagttacaaaacatttttggaaatctatccttatgaagtaaatttaaatatatgaaatatcag

SEQ ID NO: 37774 - DNA, 448 bp, Mus musculus
  source 1..448: mol_type = other DNA
tacttatatacatagaattacaataactttggagttgaaatatgaagcatatgttctgtgtgtgttttattttacatatgtacatattaccaaatgattattcataattaatgtgtgctccagtcattgtgaaacacacaacaaaaaataataaataaataaataatatcactaatttattaggggacaataacggaagagattttggccaatgatatgatcaaagtaatatgtgcatatataatgagtatgtatataacaaatacagaacatgtactgtaaagcacattttgatctgatattatcatttcatgacttcacaaaaactcaagtgcattggttatgttagtcaaatacacatacaactgtttttgaatgaatataagagtcctctaacaaaggtgaggaaaagctttctttctgatactaagaactttctcattctcac

SEQ ID NO: 37775 - DNA, 364 bp, Mus musculus
  source 1..364: mol_type = other DNA
agaggctctgccagcacctcattaatacagatgcagatacagccaacatggctccagctgcatatgtagcagaggatggccttatctggcataaataatgaattaacactaaaaacaacagattatttgcctataactcatacttttttgcatgagtatacttgtggtgcacgtcaaacttttaaatgatatttacaccattgctgtcaccttagctaattgcatattaaaagacatcaatgaaaattgcctctatctatggattcaaagtatctaaaaatgaatactttctcattccatatacatgtacgtaaaagtgcacatacacagagatattttaatctacatgcaggaagagaggtgt

SEQ ID NO: 37776 - DNA, 483 bp, Mus musculus
  source 1..483: mol_type = other DNA
gactgaaatcctgatttgtattcatgacaacttgataatgtagtaatctctctactgaagtcaattctgtgaacagaaatcagactgtatattattcaagtaatctaattaatattttaacctttaacaaagattattaatatggtttttgttgtatctctggaacatattgcagaaacatctactcaaatacacttcaaaacacttttcatatttaagctttattagaaaggagagccaataaaaaaatttttatttcctcaacaactagatatgaactttctatatgatgaattattgtatagctaatcatcatctcatagttattagatccagatacaatatttttttcaaatttgaggatatttaaggaatatggccattgatcagccttagaaaggctatgatgaatagacagactctatagaagtagagggaaccctccccttagtacctccttctccctgaactggggtataaagg

SEQ ID NO: 37777 - DNA, 447 bp, Mus musculus
  source 1..447: mol_type = other DNA
ctgatataatactgtagttaaaaaatatagaatatcagaatcttcctatatttttcatattgttttgtgttaatgaatccttgttaataaagtaatctctatactgaaggcaattctgtgaacagaaattacaccaagtattcctgaaatcccttctatatggctgtgttgaaatttcaaaacacttttcttgtatgaactttgttagttaaatatgtatatgttatttttatatgataaactattctagagcgaataataataatctcatagttattagatccagataccatgtttcttcaccaggtcttccttaatataaataaaaaagtttcccatgatattagggtatagctaatgaagatgtctattctataccacatgctacgatgcatacatagagtctatgtttctactgttttgcaaaaatcacacagctgtgtttgg

SEQ ID NO: 37778 - DNA, 383 bp, Mus musculus
  source 1..383: mol_type = other DNA
acagcatccagagatgcattatgttcatatatacatatataagtatgaatgtgaatatttctgaatataatctataacttatttatttgtattcaagcctcactggataacctgggaagatcttacatcttctgatattattaaaggagacaatcccttgacccacctaatagtaccaggtcttcgacaaataatttgtatatctaataaattaggccattctttttattaattattttatttacttacattttaaatattgcttggtaagaaggccattctttaagaagaccattttttaattatttttatttttatccttctctgagccaagaagaaaattttccttacaggtgtgctcctgtagtagcagacggaggcaa

SEQ ID NO: 37779 - DNA, 427 bp, Mus musculus
  source 1..427: mol_type = other DNA
ggttgaacattgttcaaactctattcttcaaacttagtaatgacttctagcagagattatttgatctagaatacagggtagttatttttaataaaagcccactgatcatatttgatactccttaagattgttatggtatatgcagtatttagtttgtatactctcaaagttactggctatccatcatgtaacatgagaatgagagtcaaatatcctataatggatctatacaacaaagaaacacatttcctctttcagttttaagatttaagtgctggtgtagagctcctcaacttctatattttattaaatagagtggctaagatctgagtaaaaattccaggaatgactgatagaatctttttgttggttgttcaaagagcccccaaaattgggattcagaagaaaacttttctagacacctgaa

SEQ ID NO: 37780 - DNA, 611 bp, Mus musculus
  source 1..611: mol_type = other DNA
gatataatattgtcactgaaaaaaatagaatattagaatccttgtttatttttaatattaatttctatttttaacattgatccatgaaactcaatttactgaaggtaattctcagacagaaatcagattgaccatcatttctatatcaaactgtgtgtttttgaaagaagggaagtttaatctttagtacagattattaatataaccatgaagatgctgaaaatagacttgtgatattggcctatctctggaacatattgaggaagctcttcctgaaatttcagttttcgatactctccaagtaagatccctgctggaaaggagattcagagaaaagcccacaatagaaatcgtgtctgtttctctcttggatataatctttctatatgatgaattattctagagttaagaatcatcaactcataattagaaacagatacaagacatttcttttcatgaatctctaggtctatctataaatatcatgtcttactcaaagtaaatcaaagaagtttcccatgatgttagggtatatcttaggaatattgttagaagcagtggaggccctctccttagtccctccttctccctgaattggggtataaaggcag

SEQ ID NO: 37781 - DNA, 396 bp, Mus musculus
  source 1..396: mol_type = other DNA
ctagatggtttgtgctatattaaaatggaacctgaaccttaggtttgaagattcaccactgatgaatatccctaatttttttgttcagaagtgagattaaacatgaaaccaggatagttatttttaataaaagcacactgatcatattcgatacttcttaagattattatggtatatgcagtatttaatccatcatgtaatcctataatggatgcaaaaattataaagcccacaaattttaggaactctcaatttctacattttattaaatagagtggctaagatctgagtaaaaattccaggaatgactgatagaattttttgttggtacttcacaattactattttcttcaaagttactaaaagagaagaaaacttttctagacaccgagttct

SEQ ID NO: 37782 - DNA, 626 bp, Mus musculus
  source 1..626: mol_type = other DNA
atataatattgtcactgaaaaaaatagaatattagaatccttgtttatttttaatattaatttctatttttaacattgatccaaatttagttttactgaaggtaattctcagacagaaatcagattgaccatcatttctatatcaaactgtgtgtttttgaaagaagggaagtttaatctttagtacagattattaatataaccatgaagatgctgaaaatagactttgtgatattggcctatctctagaacatattgaggaagctcttcctgaaatttcagttttcacactttgagctactctcctagtaagatccctgctggaaaggagattcagagaaaagcatacaaatcgtgcttggatataatctttctatatgatgaattattctagagttaagaatcatcaactcataattagaaacagatacaagacatttcttttcatgaatctctaggtctcaaaaaatctactcatctataaatatcatgtcttactcaaagtaaatcaaagaagtttcccatgatgttagggtatatcttaggaatacaggtgtgcttgtatagaagcagtgggggccctccccttagtccctacttctccctgaattggggtataaaggcag

SEQ ID NO: 37783 - DNA, 445 bp, Mus musculus
  source 1..445: mol_type = other DNA
cctctttttatgttaaaaatagacatttacagaatccagattaaacactcatatatacttttatctcaggatgcattttcctagaatacgaggtattaatacttagtgtaattttctggagccttgatgacccttaaaagtgacatacctgtaacatatagaggaagtacttatttaagttttatccatcctcttcgtccttgctcaaagttccttaaaacattaatgaagtcaggatgtctaaggatcttagacagtctttgcaagcctaagaaatcccactgtggagacaagggcttgacttcccctggacctgagaaaaaagttcccttgtcacctgtagctcgccatgtgacactgcagctatgtttgtgcagggaaaaaaatgacccctccacttttagccaaggtgccttcctctttgtttagggaactataaagacag

SEQ ID NO: 37784 - DNA, 317 bp, Mus musculus
  source 1..317: mol_type = other DNA
cttaccaccaccttgcacaatgggggtcggggggggatgtcacctccttatcttcaactcccccccagaggagcagcttatctggcctgggtcgaagcctagatgtgttgctaggccaagattgtggagaagtcccaaaggatgcagggaaatcctggtttgttttgttttaaaagatctcagctcttgatgaatatctacctcactttgatggaccttgagagagagttccactggagggaatctaccatgtttgacattgccacaagtctatcgtcaaaatgttcttttgtgcaatacctgtgatgggaagagcc

SEQ ID NO: 37785 - DNA, 389 bp, Mus musculus
  source 1..389: mol_type = other DNA
cttaccaccaccttgcacaatgggggtcggggggggatgtcacctccttatcttcaactcccccccagaggagcagcttatctggcctgggtcgaagcctagatgtgttgctaggccaagattgtggagaagtcccaaaggatgcagggaaatcctggtttgttttgttttaaaagatctcagctcttgatgaatatctacctcactttgatggaccttgagagagagttccactggagggaatctaccatgtttgacattgccacaagtctatcgtcaaaatgttcttttgtgcaatacctgtgatgggaagagccacacagaagtcttctttggtaaaggattgtaggtaagatatctttcaggtaaatttcatattcgagtatctg

SEQ ID NO: 37786 - DNA, 404 bp, Mus musculus
  source 1..404: mol_type = other DNA
gctaggccaagattgtggagaagtcccaaaggatgcagggaaatcctggtttgttttgttttaaaagatctcagctcttgatgaatatctacctcactttgatggaccttgagagagagttccactggagggaatctaccatgtttgacattgccacaagtctatcgtcaaaatgttcttttgtgcaatacctgtgatgggaagagccacacagaagtcttctttggtaaaggattgtaggtaagatatctttcaggtaaatttcatattcgagtatctgtattctgatgtgcaaactccgagaggaaggatgctgctcatggttcctccttgaggaagaggctctctctctaatgaggctggatccacaaaggtggattcatcataggtccaggaatgtttat

SEQ ID NO: 37787 - DNA, 346 bp, Mus musculus
  source 1..346: mol_type = other DNA
acacagaagtcttctttggtaaaggattgtaggtaagatatctttcaggtaaatttcatattcgagtatctgtattctgatgtgcaaactccgagaggaaggatgctgctcatggttcctccttgaggaagaggctctctctctaatgaggctggatccacaaaggtggattcatcataggtccaggaatgtttattacttctatcagactcctctgctcatgcatgcacgaagggatgaatgcccacaggtggctatgcgaagcctcggcatcgctcagaagacaaacgtgattgctaattacattagttaatatcctcaggaatgagggaagctagctgccagg

SEQ ID NO: 37788 - DNA, 314 bp, Mus musculus
  source 1..314: mol_type = other DNA
cagaagacaaacgtgattgctaattacattagttaatatcctcaggaatgagggaagctagctgccaggttgtgtttccaacgaaagattatttttcggtcatggaggcagcctgagaggggaccaaactggtgggaccattgtcctttacctggagtgtctgtaaccccagagctggtggaagggactgggaaatttagttattcctttacacttatgaggagatgcatcagcacctgcttcttggtattactggagtctggaatacttcctgcaggcagagaggtagtcattcaggtctcagggatctaaga

SEQ ID NO: 37789 - DNA, 273 bp, Mus musculus
  source 1..273: mol_type = other DNA
gattttagagtttaatctgtgcaaaaatacacacaaataacagacatgcttcatgtgcattcatatcacacagtgactgtaacctagtaaactgtccacaaaattgtactcagcatcaaaactgtgcactttgtgcactccagagagtgctcatgctcaccagaagttttctctgagaatggactcatttcctggcaagcatagcccactgcatactacggactaagtaagcaaggaatgatgatagtttctgttctcccagagtgagaccac

SEQ ID NO: 37790 - DNA, 225 bp, Mus musculus
  source 1..225: mol_type = other DNA
tgttctcccagagtgagaccacctccctgcccctgcccaggctctggggtaggcacaagaggtgcttttacaaaaagctctacccaaaatgcatttaacatgtgaggaggagtctatgtgagttcatcccacgagtgtgaaaggctatccaacttattaaaaagcattaagtagataatctcattggaggctacctggacaccaacaggaagcctttttcaaatt

SEQ ID NO: 37791 - DNA, 225 bp, Mus musculus; identical to SEQ ID NO: 37790
  source 1..225: mol_type = other DNA

SEQ ID NO: 37792 - DNA, 270 bp, Mus musculus
  source 1..270: mol_type = other DNA
aatgcatttaacatgtgaggaggagtctatgtgagttcatcccacgagtgtgaaaggctatccaacttattaaaaagcattaagtagataatctcattggaggctacctggacaccaacaggaagcctttttcaaattttctgctgtgtaactatgctgagcagttcttcggaccagggacacatatttaactatccaaggccctgtatagatattcagagcaggacagctactcagcatcctcttagcttatctgccagagcagaagga

SEQ ID NO: 37793 - DNA, 274 bp, Mus musculus
  source 1..274: mol_type = other DNA
ctccctgcccctgcccaggctctggggtaggcacaagaggtgcttttacaaaaagctctacccaaaatgcatttaacatgtgaggaggagtctatgtgagttcatcccacgagtgtgaaaggctatccaacttattaaaaagcattaagtagataatctcattggaggctacctggacaccaacaggaagcctttttcaaattttctgctgtgtaactatgctgagcagttcttcggaccagggacacatatttaactatccaaggccctgtat

SEQ ID NO: 37794 - DNA, 283 bp, Mus musculus
  source 1..283: mol_type = other DNA
ctcattggaggctacctggacaccaacaggaagcctttttcaaattttctgctgtgtaactatgctgagcagttcttcggaccagggacacatatttaactatccaaggccctgtatagatattcagagcaggacagctactcagcatcctcttagcttatctgccagagcagaaggaagcctgtgcagaaacgctgtattttggctcaggaaccagactgactcaggctaaggatagccagagccagtttttgtcctgtaccaagatgtccttgtactttgg

SEQ ID NO: 37795 - DNA, 400 bp, Mus musculus
  source 1..400: mol_type = other DNA
atatttaactatccaaggccctgtatagatattcagagcaggacagctactcagcatcctcttagcttatctgccagagcagaaggaagcctgtgcagaaacgctgtattttggctcaggaaccagactgactcaggctaaggatagccagagccagtttttgtcctgtaccaagatgtccttgtactttgggttctggggctgtgaaccaagacacccagtactttgggccaggcactcggctcctcgtgttaggtgagctggggccccacgtgcgcgttctcggcagccgattgaacagcctaccctgagttcccaagccgggcgctggagagggaggctgagtagcagggagattttccctaaatgggagaatacctcgctgaaccccgcgggtttg

SEQ ID NO: 37796 - DNA, 325 bp, Mus musculus
  source 1..325: mol_type = other DNA
gtattatttgtcacatcttaaacacgagacaattgtaatatgttgtttaagtaaaggaacaaataaaatagatctagatgggccttagtaggcacatggaacacaggccagctttgattcctttagtaattaatttaccaaggttgaagaggatgtgcacttctcctgttggactgactaaaataaaatccccttttgttattttactagcaatagttgctctaaagacaccaggatgtctccaggagtaacgaatcattaactatatttacagggagggtggggatgattcaccacctgcttaagaaattccactctggcagcc

SEQ ID NO: 37797 - DNA, 489 bp, Mus musculus
  source 1..489: mol_type = other DNA
aaaccagtactctagtttagaaatggttagggctgggtagaaactcttctccctagtagcaagctcgctctgttccgcccctgcatccaggttcatcactgtgggatggtactctgcggagcgcgcgccagggaggtggcacctagactgggtgcagcgacttgtccaagccaggtctgcgccaggcacagacatcggacttggatttataggagccataggcgcagcgcctgggcttcagcctggccatcagctgccagccagtagcgcgctcgggcgcgagctacagggttttaaacacgcctcgcagcggcgccccacgtcccctccgcccgccaggacctgcgggaggaggccgaccctcctcggcacacgggcgggcccaaggcgcgcccagcgtctccactgcacgccccgctggggatccggcgccgcgcacttgggtcctaggcccagagggcgggctcggctcccggaagaggaagacga

SEQ ID NO: 37798 - DNA, 312 bp, Mus musculus
  source 1..312: mol_type = other DNA
agacacactcaattgttgcgcctagtgccagtggcaatgacccaatgtctaaaatgctctagagcatataaaatatttatatttattgaaaaaaattatctaggcattcttatagctttaatttccagacaaagtttccctgtgtagcacatacagggctggaattacaggttggtgatggatattacatcattaatacatgtagtgtctggtactttacagaaaccagttaaccctgcagctctttaatctctttgaagacctaagagggaggagggagggagtgcccacatagctcctgctcactcccaa

SEQ ID NO: 37799 - DNA, 503 bp, Mus musculus
  source 1..503: mol_type = other DNA
actgtgggatggtactctgcggagcgcgcgccagggaggtggcacctagactgggtgcagcgacttgtccaagccaggtctgcgccaggcacagacatcggacttggatttataggagccataggcgcagcgcctgggcttcagcctggccatcagctgccagccagtagcgcgctcgggcgcgagctacagggttttaaacacgcctcgcagcggcgccccacgtcccctccgcccgccaggacctgcgggaggaggccgaccctcctcggcacacgggcgggcccaaggcgcgcccagcgtctccactgcacgccccgctggggatccggcgccgcgcacttgggtcctaggcccagagggcgggctcggctcccggaagaggaagacgagagggggcgggcccggctgcgttcgcccagctagcgctggggagcagcgggcgtccgaacccgagacccgcacgattccccagggccccgcctagggagcagtccctgctt

SEQ ID NO: 37800 - DNA, 311 bp, Mus musculus
  source 1..311: mol_type = other DNA
gggtaagaacatgatcaggggaggtcctgaggctctccaggagagcgtctcaactgtctgactcaaagattcaagcctatgaattgaaagcctgcttctccagcccaggagatgagagagctcacttcctctcagtgtggcccgttgaaggaatacattcaacaacagtaatgtgtctcactgaaatagtatttgataaaggaacatttgcctttaccagtgctgtctaacatcaggagttacacagaattcctcaggaatgttctaggatgggaaggtcccctctcagcacacatgcatatatatatata

SEQ ID NO: 37801 - DNA, 334 bp, Mus musculus
  source 1..334: mol_type = other DNA
cttagtgaagagagaagataactatctcttttattctatcagccataaaaaaaaaatgtacttttatatgacagggactggcctgaagtcactatgtaacacaggcaagccttttgctgctccctcccctctggagtaatgggaggaaggactgttgccatcatctgtgccaaccactttgcatattgaaaagcatctaagtagtgactatgaattgttgcattagagtataggtagctacagatccaacagtgtaatagatatgatacttagcaacgaccatctcagatgcctctgccatctcccacccttctgtctggcaatggaatggcca

SEQ ID NO: 37802 - DNA, 271 bp, Mus musculus
  source 1..271: mol_type = other DNA
ctgtatcttatgagagccagtgtctctagctgcatatgaatcagaagatggcctcatctacatgctgtgtaaatgaaataaatatccaataggctgataatattaaaactttagtaaaatttttagtggcatctacttttgaattaatagcaaaatcatcaatgaatgtattgtacatctttaacaatcacatatattataacaatttaattgaatgatgacatttttttttcatagaaataacaaacttctccccagattcacgtcataa

SEQ ID NO: 37803 - DNA, 347 bp, Mus musculus
  source 1..347: mol_type = other DNA
tgacacttgtcccaagtgacattagcttgactatcttaatacatctcattttgcctatgatgagaatatagagaactttaaaatttcatccattctgactaacatttatgaaacatctttgtagattaagaagaaaaagaaatactgtacctaccgtattctcaaccgataaggagatgaggatcacattgtcataatattaagggcttcattctactattaccttcattttccagatgataaaactcaagtggcttgtttattgttacaaagctaataattagcagattaagcatgcttgggaacagtgtccctctctcccctgagaaacgtgagacccagagttg

SEQ ID NO: 37804 - DNA, 401 bp, Mus musculus
  source 1..401: mol_type = other DNA
tttcatattatcttgcagcaccatagtgatgatcagaaatttctctctctacacctgattgacaagatcttctttggaaacttctaaattaagccaaagctgaccaggtcttattctctgacgatatggttaaaatgatattaaatatatttgaactccctattcacatgtgacttctttataaatatatgcctttagtttccaataaagttcctctgaatgaaagggaagatcatcatctcagtaataataatatgttggttattactcaactgaagaatatttttgagtattaaattttacatatttcctgacgaaagagaaaatctcattcttattcactagaatccactttgaagatccagctggatagtgaccatcctagcatatgatggtgcctg

SEQ ID NO: 37805 - DNA, 564 bp, Mus musculus
  source 1..564: mol_type = other DNA
gaaaggaaccttccttgaggaaatgcctccatgtggcctagaccactgtgggtggtgccatccctgggctagcagtcttgggttctataagcaagcaagctgagcaagccaggggaagcaagctaataagcagcattcccttcttagtcataatgttttgtgcaggaacatccaagatctttctgataatatggttaaaatcatatcaactatatatgtataccctagtcacatatgacttgtgacttgaatatatgccttgaattttccagaaacattctctgtatgtaaagaatggccatcatttcctgcaaaagatcactatacctaagaaccctaattattggggaattgagtaataacaatatgctgagtcattaatcaactgcagaatatttttgagtttagatcaggttaagaacagatgttgcttaaaataattagaactgggtctatcctaataatccaagaattttctaatctcatactgaaagaggagaaaatcccatttcttattaaatataatccattctgaggatcataacatattatgccattaactga

SEQ ID NO: 37806 - DNA, 423 bp, Mus musculus
  source 1..423: mol_type = other DNA
gaaatcggtctgcacaagatgattattctagtaagctgaaataaactctttcctaataatacaaaataaaatataatagataacacacaaaataattctagtttcggggctggaaagggccctagataaacatgttggttcacaacagcctgtaagacatgcatgtgatatacaaaaagacaaatgtgtgggcatgtgtgtgtgtacaaataataacatgtaagaaatagatatatctacagttagagttgtttaacaaaaagatcagatcttctttagaaaaattggaactggatccattctaataatcttagaacattctaatctcttatggagaaatctgatcttattcactatagtccattttgaagtttcatctgaaaactgacctttatgtacaaagatcatcttagctggatagac

SEQ ID NO: 37807 - DNA, 489 bp, Mus musculus
  source 1..489: mol_type = other DNA
cgaaaagggaatatatttttgtttttccatatcatctataataccaaaacttttaataataaatgataacaatagtatatggttccgtgtgtccacactgtatatcagactgatgaaatacttatgttcaagtaacatttttattataataaggcacaaattttagtgttcatcactaatgtgcctaatttataagttataatttactgtgtgtagaaaaaaaacataatatgtagagtttcatctacagtttcaggcatgggtgtgctgtaatgtatagaatgaagattttttaaaagaccactatgtcaactgtcaaattcattctaaacattgttcttatctctgagaaagtgaatacaataaaagatgcaattcggaacttccatattgccaaagttctagagctggctgcattgagaacccgtgtacacccctgggccagccctatagggcggggcctctcccggagactgcgcactagggccc

SEQ ID NO: 37808 - DNA, 233 bp, Mus musculus
  source 1..233: mol_type = other DNA
ggaaacattctgattacctaccaagataatgagagctactcgaatcaaattccaagcaggcaatccgcattactttatagccttgtcaaccctggccctggaagttcaaggcgaacaaggataacaaagcccctttggtctcttgtagttgctgcggtttccgcgggaatcgatagccaatggctgtgcgagcctcagcgagcagtgtgcgcttgcgcatgtcccggcggggt

SEQ ID NO: 37809 - DNA, 346 bp, Mus musculus
  source 1..346: mol_type = other DNA
aagagaggctcatcttgatggtggatctgaaattcagtttgatattgtcaacacaatgcccgacagagtacttttgtccttcatcaaatttaatttattgactagaaaagaggaaattatttgtccatcttctgtctaatctgccctgataagagctgtcatgggcaccacagtccagctgagagctcagtccctctgtattgatctgcacgtagtatgtctaaagccagcctagaaatttcactaggaaatttttcattctggtcccagaacagtgctgctgcctggcagagggaattccctgttggactgtcccacttcgaccccagaaggatcagatgtggcg

SEQ ID NO: 37810 - DNA, 274 bp, Mus musculus
  source 1..274: mol_type = other DNA
cgactaagaggaaatggtctccggcagggggcagtattctcccttttgcaatagaatttggacaagttctccatcagcatctcccgggagaactcagcggggacagcgcggcgaggggcgcggggagcgcggtgcccggtcgggggcagggcggggaggctctgcgcgcagccaatccccgagcagccccctccccggccgcggagagctgagcggggcgggggagccaggcggtggcggcggcggcagcggcggcgacggaggctgccgtggg

SEQ ID NO: 37811 - DNA, 257 bp, Mus musculus
  source 1..257: mol_type = other DNA
gcccccataactgttcctgaggagggacacagcggagagccttagagcagctatgggagccacagggtgcaatgaaaccctttgctagctctgatcagagcataaacttaagggtgtgctctacccagtgtcaagaatccactttttacagggattccaagaacattgaaaaaaatcacttttcttataatgctcaaagtaaaagaacagtaagaggatatgcaatcagaaggtactttgtgctctctggtcctaag

SEQ ID NO: 37812 - DNA, 359 bp, Mus musculus
  source 1..359: mol_type = other DNA
tagaggctctagctcgtaactctataagaagtttccgtgtgttgtttaaaaaaaaaaaaagaagaagtctcagggctccaccgagctttgtccgcgctgccaaggactagtccccgggggcactggactcttgtccccggggcaatactatggctgcctagctcaggaagttagcattcccccagcttaggaaggccggcctgggagccaagtgcccgcagggccaatcccagtcctgcgttccgggactgaccacaggacaccaggcccggggtgcgcgactttcaggaccgctgggattactagccagcctgctcagcctggagtgcggacagtgagtcagttctccagcactcgcg

SEQ ID NO: 37813 - DNA, 370 bp, Mus musculus
  source 1..370: mol_type = other DNA
agtctcagggctccaccgagctttgtccgcgctgccaaggactagtccccgggggcactggactcttgtccccggggcaatactatggctgcctagctcaggaagttagcattcccccagcttaggaaggccggcctgggagccaagtgcccgcagggccaatcccagtcctgcgttccgggactgaccacaggacaccaggcccggggtgcgcgactttcaggaccgctgggattactagccagcctgctcagcctggagtgcggacagtgagtcagttctccagcactcgcgcggacctttgcagagcctggagcccggggcaggacctgggccccttcctgggggagtttcccccccgcttggctag

SEQ ID NO: 37814 - DNA, 300 bp, Mus musculus
  source 1..300: mol_type = other DNA
gacaagtaatttgtttaggataagtactttactgtctctgagcttaaaacacatacatgagctgccacctctttggctcccaagacaaatgctgtgccccagcagtcaaatttgcatggttgtcatcgaagcctcctaaatttccagtttttaagtcaagctgaattcgattgaaagctggatcctaggcggcgccttcagtctcattccaaccaagacgcctccaggttttaaagtttattacctgtccaggtgaggctgaggccccgcccctcatctggccccgccctccgcccccgc

SEQ ID NO: 37815 - DNA, 473 bp, Mus musculus
  source 1..473: mol_type = other DNA
aataccttggtgtgactctaactaagtgaaagatctgtatgacaagaacttcaagtctctgaagatggaaagatctcccatgctcatggatcgggattaatatagtaaaaatggctatcctgccgaaagcaatctacattcttcactgagttagaaagggcaatttgcaaattcatctggaatactgcatggtacagtcatgttttctgcccagtgaaaatatcctggaccagatttcctggcccctgccagtgatggccactaggcggcaggccctgaagtctggcagagcaactgttaggggatgctcgtacatccggacttctcagatactggaatagtccacagttccctgggtagctcatccaataggacagcctcgcctataactaaccctgccccgggatagccacgccctgcgggctttcctatagccccgccttccgcagccccgcctctagaggccccgccca

SEQ ID NO: 37816 - DNA, 483 bp, Mus musculus
  source 1..483: mol_type = other DNA
atcacacagttttatttatgtctggtactcacttaagaacaagaatcataaatgaggaaaatacctaataaaaaatatttttaaaagtgcagcactaaaaacttcccggaacaatgtacttcagctgtatagtattcttttgaaatgttactttgaatttaccagtcacacacagtgagatcagtaaggttatatacggtcagtgcctttccagattaaacagtatggatagttagaaaggtctctttcctttctcatctaatcatgtgtttactttacatgtaggttctgtgtaagctgaaataagtcacagaatgaacatgccttggtttgtttgtttttatcctttaccttatttgtaagtagaaaagttttaataaaaatgatgagacctcctctaggggtgggcaagcgccgcccctcgggctcctactccagccgggaggaagtggggaggagactgactgggaacccctcctctcc

SEQ ID NO: 37817 - DNA, 719 bp, Mus musculus
  source 1..719: mol_type = other DNA
acactgagtctgggtggtaatacatttgatgaaacaaaaaattattacattttcctggattgtattgataatcctgtgaatatattaccacaaaatagccaaacattggttattgtctaattttcaaggcaatgaaacatattttgaatagatacacacaaatacgtaagcacacaaaatcatgtattattatcaatagatataattttgtatgcatctatagagtatacaatccagtcatttaaaaaaaaagttcatttacgactttctttaagctatgtcaacctctagattttagctgtgagttggacatttaacaaatataaattgtatcaaattaattattttttcttttctgatattattatcattttttaaaagctttttcactacttgatttcagtaactcctttatatctttgcatgtaaaaaactccaagacaaagtatgtttcacaattgttttgtgttccagtgccaattattctaattatgcactggcaatgtagtactcttccaaaagtggatgtcagttaaaactatagtttgtgcacaactttttaataatacaccattaacttattaatgattaaatatatttattgatgtttcctaatagttttgtcatgtttctgaaatctgaggtaagtgataaaaccattttttacaagaattgagtctcagtttttcctctttcatagtgaaatggaggacagagtt

SEQ ID NO: 37818 - DNA, 316 bp, Mus musculus
  source 1..316: mol_type = other DNA
agggccttccacaactgcttagcctcttctgccagggccagtgcagcagcggtgggcagttgtgggccaccccccagaaaatctcagatgttcggagccgggtccggatgagcctcagttggagggggagtctagggccacgccggacaccggcgagtcccgtgcccagtgcccctggacggccacggcctgccggtgctgtgggtagagctcaatcccgcggagctcgctcttcccagctctgcccggagctgcccctcccccgggaaggtgtgttgggagaagccggtccctccctcccgtccggcggcagggg

SEQ ID NO: 37819 - DNA, 430 bp, Mus musculus
  source 1..430: mol_type = other DNA
ggcgccggggcggcctggcctggctggggaccgcggcgggcgcccggacctggaggggactctcgggccagcccggggcagcatgtgactccgaccaggtggctcttctgagccccggactactaggcctcccccgggaccagtcccggccaggtcccggggcgcagactccggaaatggggggctgggccagtgggccgggctccgagtgaggggctgagtacctggtcgggaccgggaagggagctggaaggaatggcctcctggcaaactttgctttccaaccaggatgttcccgggcctgataaagaattcttgagattcagtttctagcctttacatgcctacgtatgtgtgaatctatgtacacacgaaatctgaatcagggatccttgccctgagttccggagagctagccctagccagcgct

SEQ ID NO: 37820 - DNA, 326 bp, Mus musculus
  source 1..326: mol_type = other DNA
actcctgtcagaagtctctaaaatgatctttagacacaggaaaccgggttagaagcggctcttcctcccccagcttggaagaagaagtaagaactgtataattttgctatcttttttcctaacagaaataaacattccatgttatcctgaacctcgtctattccaggcctggcttaggatgtgggttcagggaactgctcccagcccccaccccaggtgtgcggtgcctcgccctgggggtggagttggggggcgccagctccgctgcggctgcgctgcatgacctgtgcagactccacacagccgcgcgcctgtggtaccagggg

SEQ ID NO: 37821 - DNA, 542 bp, Mus musculus
  source 1..542: mol_type = other DNA
gtagcattcctttgcaaagatattgtaatagagaaatggcattcttcagtaataaaaataatgaaataatggaatgttctgctagctagaagctaaaatgttggcatcaaaactggaaagaattgaataatgattgcccaagtttgggaagtgtatctttaaatagatgtttgagttaaaaagaggacttacctattacccgactggggaaggggaagttcaatgaagtcatacctacaggttctcagaatttttgagtcctcatctatgctggcaattttggttctttggctttgctaaaaaaaaaaaaaaaagctgcattcaacgtggtgatttattttaaattcccattggtatgtttacaaagcactgtttccactgtgcagggaactgagcacagcaggctggtactaagcaccccgcggttgctagaagctacgcaggcggcagccaggggcccctccggaagaggcggggctctgtgctcgcgcacgaagccctctcccgcgaacgcgcggcgcgccccaggctccgcagccgag

SEQ ID NO: 37822 - DNA, 330 bp, Mus musculus
  source 1..330: mol_type = other DNA
ccaacgggtgtccatccacaatctaagttacatcaaatacatctttggcccagatgatgactaactgaagttcacagaattaaatggcagatctaagctaggagttgccaaatttacaattgaatattacaaagcacaagatgacagcagctgatttccgttggaatcacatccacgtgggtatgtcaggacaggagacaccatgtcagctcccgggaggtgcatggaggggaggggcaggggagctcaaagcccctctcccacagccgcttccggaagtgtcttcagaggtcagagcccccagcctcggctcggtctccacgagaagtc

SEQ ID NO: 37823 - DNA, 401 bp, Mus musculus
  source 1..401: mol_type = other DNA
tcctgatgggaaacaagctatattcatgctgtttgtagaccaaacaagataaatctcattgttagtatggctttatcatagcttttaatttgataggctaaaaacacctttttaaatgcaattttactgaattttgaaaaaaatctatatatccagttcaaagtattatacataacatatcatacatgcttctcattttgagagtgtctagcatttgcaatctgatttaaactgtattactttgtgggtcctaatccttacagcagtgcatggcagtcactgtgtcctgtccttcctttaagaaagacagaagggcagggagtagatacaggagacatagcccctgctgctgtaccagaggaaggtaggtaatgttatattcagaatacaatcattttaca

SEQ ID NO: 37824 - DNA, 591 bp, Mus musculus
  source 1..591: mol_type = other DNA
gttggaatcacatccacgtgggtatgtcaggacaggagacaccatgtcagctcccgggaggtgcatggaggggaggggcaggggagctcaaagcccctctcccacagccgcttccggaagtgtcttcagaggtcagagcccccagcctcggctcggtctccacgagaagtccgaagtggcgggaagccggcactcgagaggccgccccgacgcgagggcggcgggaaaacctggcggaggattccgctcgtccggcaggacccggctcggcgtttgggaagcagaggccatggctcgcaggtagaaatgcccgcgcgaagcgggtcctggccacgaagcgggtgaccagggcctctgggggggccgtttccgtgcccctcccgcgccgccgcaggcccggcgatggcggcgacggtttcttggctcccccgccccggacgccgatggcggtgcgttccggccctccctcccccacggcttcgccccgcggtcgccagagccggtgaagccgggagggcgtggtgcaggcggcggcggcggcggcgggaggagcgggcgccgtgtcgcacgcagctccaggcggggcagccc

SEQ ID NO: 37825 - DNA, 426 bp, Mus musculus
  source 1..426: mol_type = other DNA
gagaaaacatggggtgagctatttgctctcaaaagttgttaataaacaacttgaaacagaggagcgagggccgccccgcattgaatcccctgtggggccggtcacacgcccctttcagtggcgccaacaaaagtgttggaccccgggcccgttaccaacccgagttttgaactatttcaaacccaagagctggcccgccccccggccggttccccatagcgggcttcgggtcccgccaagtgcccggcgacagcgactgtggtgcttccacgccgcgttcctcagagcgagccctgtcactcgcgcacgcgctggtgagcctcgcgctcccagggctggagctcgctccgaaggctcccagcccgttcggccctctgattggacgggcgccctctcgcatcctccaatcggagaggtggcgctcgg

SEQ ID NO: 37826 - DNA, 563 bp, Mus musculus
  source 1..563: mol_type = other DNA
ggtggaacactcagtgttcttacctagaatacgaacttacttgaattcctttttttaattaagtaatctttcagcctatatcagtatatagttaaagaactggaaggaagttatttttttcctcctccggtacagtacctgtcctctaattgctgagccattgacttctctttagaatagtagttctctatatagtagtactactattccagaagaatgctatgaatatcatataagtaattttagtaaaatgtcaaaagttttgtgtttgttaaacattaacggcaagaaaattcgtactttttctcccccggtagaggtcctatttcagctgctgtactgttgagtcgacaaaattctcaagaaaatgcgggtgatttaaaagattcctgattacccagcatgtcgttgaaatgtaaatagatttttcttctaaattaaatacttttctattattacgtatgaggtatgtatttggaatacacaaacatatttttaacagtttatgctcataatccaccatgacttgtaaagggtgaatattataaaccttatatatctac

SEQ ID NO: 37827 - DNA, 239 bp, Mus musculus
  source 1..239: mol_type = other DNA
cccagggacatttctgggaaaagatgcaatctgacagttttcagccttcttaaatcctcagaagtatcaaagactacccaccatcagcagctactgagccttatttgcaagtctttcccaagatgctcagcaaatatcagcggcttcgagttttgatggctgatagtcatcaaaggtattttatatatgaacacaatatctatgttatgatgtaatttacacatacaatagaaaaatca

SEQ ID NO: 37828 - DNA, 375 bp, Mus musculus
  source 1..375: mol_type = other DNA
atcatatgttttctgacatgcaaacctagtttcttttccaaaacactcagttatttctagatctaaatcaagactctgacttatagacttagtcatggagtccaatttttgcgacaggatatcactaaaagacagactcttttatatgctaacagaggcgggatctctgatctcactttttcgcctccctgtgcagggctattggtggtcgcccaacgcggagctgaggggcgcgcccgcgcggagggctcaggcagcggggcggggcggtgtaggcggggcgccacggctctcgccctgattcgtgcggggattggacgggccgcggcttccttacctccaaccaaccggcctgaacttcctggaggctttggt

SEQ ID NO: 37829 - DNA, 349 bp, Mus musculus
  source 1..349: mol_type = other DNA
ctaccctgatctctggaatgaaatgatattttctaagataaaccattcaattagtaatatatatgtgttcatgtcactattctatgccaaacaggtacatgtacgaaaaaatttgaagttaattgtccagggatattaactgttagaatctaaggcttagatgccatgtgacctgtgacctgctgcagaagcctgctgcatgagggttaaccttatttcctagggcttccccagtcacgggagggaactccacgcatgcgcaggtcagtggcgtgcctggccctggccaggtgtatcccagatggaccctgtgcacccagtgctttgctgctcctcctgcccgcagggg

SEQ ID NO: 37830 - DNA, 448 bp, Mus musculus
  source 1..448: mol_type = other DNA
gtgatgttctagtttagagaacgttaagtagactcaaagtatacacaagatattgctttgtatgtacactatatccctatactgtgggggcactatagacagtctactgttgagggcattgaatggattcatttcatttactgagataaatgtctgagaagactttggttcatacatgtttgaaaaactgtgtgattatctttctgccacacactgttaaacacacaactgtcttttgttggtcatccagcaaatctaaccacaaggagaaacatttatacatataaaattaaaagaaacaaatctttataaaaattctacttctcatctctggtgccaatacaagtcatatttgtaatttctacgaaccttctcagatttctccgggaaggcgctccggatgcgggggccgccagggggcgcgctgtcccgggaggaccgaccggag

SEQ ID NO: 37831 - DNA, 526 bp, Mus musculus
  source 1..526: mol_type = other DNA
agtatacacaagatattgctttgtatgtacactatatccctatactgtgggggcactatagacagtctactgttgagggcattgaatggattcatttcatttactgagataaatgtctgagaagactttggttcatacatgtttgaaaaactgtgtgattatctttctgccacacactgttaaacacacaactgtcttttgttggtcatccagcaaatctaaccacaaggagaaacatttatacatataaaattaaaagaaacaaatctttataaaaattctacttctcatctctggtgccaatacaagtcatatttgtaatttctacgaaccttctcagatttctccgggaaggcgctccggatgcgggggccgccagggggcgcgctgtcccgggaggaccgaccggaggggggcgcgtctaggccggcagagcgcctgcagtactcgctgcccacaaagcgccagctgaggggcggctgcagccggtgcggcgtaggctgctcgctactcagctcctctgcgt

SEQ ID NO: 37832 - DNA, 457 bp, Mus musculus
  source 1..457: mol_type = other DNA
ctcaagtttaagtgtagtagaactcatggcttccaccaggtctgactttccacaaaagataacctacagggatttatctttgatgggtaatatggagaccaggctgtacctccaagtgctaggaataaaagttcctaatttttcaacattaaaataagacatatatagaaagccagtggcaatgttgcatgcctaagcaaaagctgacacatagtaggtgttcagaaaatatttgggtaaaatttttacaaggccactgtccaggccgcagcttgggacgtgaagatcgaccaccccagccagacctagaggccggcggtcgccgtcagatttctttgggggaggcggtggcccccagcctggagtggcccccgtccagccctgcaggcgggcaggagctccgaggccattggctggcgcgccggctgcgaagggcggggagctgtccggccccggc

SEQ ID NO: 37833 - DNA, 459 bp, Mus musculus
  source 1..459: mol_type = other DNA
cattctcactcagcatgtccaggacaatgtaatggaaatttagatatttctggctagtcaaaaacaaacacctgagcgctggggtggtaatgatgtggccagatgtttccaaataccctggcaccctggcatgaggactaggttcaggttctccctggcactctgtaatgagccatcactgcccggtgagcttgaattctgcaatgcaagtgattaccataattaacactctataatggcacagaaaagggtgtacacatttgtacacattttttaaaaattatttttatttttgacaattgcatgcaagtcaacttgcacatatttgaatctcttaaagcatttcgcggagtgcaggactcaaattcagaaaatgctcttgattttgagaatccttccaggagcacagtggcgcaacacgcgcggtaggaggagccgctgccgctcttcttgggggtg

SEQ ID NO: 37834 - DNA, 417 bp, Mus musculus
  source 1..417: mol_type = other DNA
ctggaagtttatgagaccggttttatttttataaataaataaataaaggttaattatggcttttccgagtaaagctttctagtttcagaaattaaatggaataatgtattcaggataattcaggacatgaattggtcctggcagggagagcagggcgctcaatactccgaaagtacatccctcgggttctataccactaaggtacaccccagtcctggacttgtagaccaggctggcctcgaactcagaaatccgcctgcctcccgagtgctgggattaaaggatgagggtgccagcacggagttcagggattgcctgagccagctgcctgctcgcccggggccctgggggtagggttgacgccgcaggccagcggccaccgagtgcgggccttctggctgcagggggcgccgtgcg

SEQ ID NO: 37835 - DNA, 229 bp, Mus musculus
  source 1..229: mol_type = other DNA
gcagactctgtagccactcagaagtcctcattcccagggcaagactgtggcatgcagccatggttctggacgttacttgcctgcacacccaaccgttgtttaggccctggaaaacaagtattcatatttgaagcacaaatcgcttactgcatttaacctgaaattcaataggattttgtaaaacaaatagccctccagggctagccaatggggagtctgccgcgggagc

SEQ ID NO: 37836 - DNA, 697 bp, Mus musculus
  source 1..697: mol_type = other DNA
tggatccacagcccgcgtccctggaacccgggctgcactgcgctggtcacatgaactttgaaagccaacgaccgggttctgggtttgagacgcgcaggcggccgcgggcggaaggctgtcggagcccatcggcccgcctccagacccagcgcgccgcgcgcccgggattccgctccgccgcctccgccgccgccgctgcccgccgctgcccgccgcggcctggcccgagggcgccgggccgccaagacgccaggtgagccgcgagggaccgggagccgcgacgggctcagggcgtgtccggcgccgaggcggcccgcgcctcactggttccggccgcctccgacgagcctccgagacatgcctcccaggatgcagtttgtagcaacatggcagctgcggtgcagctcccctgctgaagaggcgccgggacggccgcgcagctcgcagccgggacccgggccgcagccggggtcgcagcgtcggccgctcggggcgggcgagcgcgccgggggcggccgcagagcgctggggcccagctcgccgcccgggcgcagcccgcacagccgcgctccgacgccgccaccgccgccaccgccgcccgcgcccgcccgccgagcacagccccgagcaggccggggcccgacggccgcgcagccccggcgggtgaggccaggccgcgccgcactgccagcccgcc

SEQ ID NO: 37837 - DNA, 462 bp, Mus musculus
  source 1..462: mol_type = other DNA
gacacccccggggttctatgaagtgaaaaaattattcatccctaactgtaaccagcaaattcagtcgattcactgaacctgtccaggaaagagggttctctctcatgtggatccacagcccgcgtccctggaacccgggctgcactgcgctggtcacatgaactttgaaagccaacgaccgggttctgggtttgagacgcgcaggcggccgcgggcggaaggctgtcggagcccatcggcccgcctccagacccagcgcgccgcgcgcccgggattccgctccgccgcctccgccgccgccgctgcccgccgctgcccgccgcggcctggcccgagggcgccgggccgccaagacgccaggtgagccgcgagggaccgggagccgcgacgggctcagggcgtgtccggcgccgaggcggcccgcgcctcactggttccggccgcctccgacgagcctccgag

SEQ ID NO: 37838 - DNA, 270 bp, Mus musculus
  source 1..270: mol_type = other DNA
agcaccccgaaggatatgaaatactatatgaccaggtagatagacttgtttacacatactgtatccaaaatacaacttattagtgtgcactgcctgtgtatgcacacatgatacgccgaataaatgagatgtcctgacacccccggggttctatgaagtgaaaaaattattcatccctaactgtaaccagcaaattcagtcgattcactgaacctgtccaggaaagagggttctctctcatgtggatccacagcccgcgtccctggaacc

SEQ ID NO: 37839 - DNA, 618 bp, Mus musculus
  source 1..618: mol_type = other DNA
aaaattttgacttttttcttcctttccttgttattaaaaaacaaaaatatgaattgaaaaccttttatatgaacactgtatgaacatgaataatacacatgataacacacatcttgttatacatttgttacgcattttaacgccaaaatgaagtagttccggactactctcgtttgatatatcacaagagggcgacagcttgagccgttggcattcaaaaagattttaaacgatggcattttaacccatttttcatgtcattaaaatgtttattatagtatacatactatagaaaccccacattttttgtgtcattaaaatgtttattataacacacatacataattggaagcattcattccatttcaacggaagtgaccgtgccggggtgcgcactgcctgccgaggccgtacccccccaaaccaggtggcacatcgctggtgagcactggcgccgcggggggcaggtcgggccgaggcggggcctcgtgaggagggcggggccaagcgcggcggcaagcgggtgccggcgctgccgttcgccgctcgagctgcaggtggagctgtgccgccgcgctgcctccaggaagcctcacgggccttcgtcggcctggccgc

SEQ ID NO: 37840 - DNA, 439 bp, Mus musculus
  source 1..439: mol_type = other DNA
gcaactgccctgcaacaactgatgtggctcttctaacaaaaataaatgtcagatttagttgatcggctcactcgagctcaaagtcggcggtgacgcccgggcctgttgccctggggactgcgctgcaccaagaagcccgaccgcggcgttcgtcggtccgcaacggcgtggagcgccatggcggaactcagcttcgcgactccctggcccacccagcttccggtgcggctctggctggaggctgcaccgagaccctcgagaccctcggggacagcggcccagttctgcacgaacaccgagaaccgcagagttggctcgtctgggtcggtctgcatcccgggaggggtggtcccgcttccgcccgcagcccccagcctacacttcccagagggcgccgtgcctggggcgtggcttgggcggcttgcgcatgctcaggtgc

SEQ ID NO: 37841 - DNA, 260 bp, Mus musculus
  source 1..260: mol_type = other DNA
gttctggcatgccagcatacaaagccagtatgccgccaaaaacttctctttgagtttttcccatacaatgaagggaatcaaagtgcagcctaaggagggccgccacagtgtagcggtgagccactgtgccctggccctcagccactcagggtcggagccaacgggagaaactggtccctttttatccatgcggcacctgtacagggcgcactcagaaagcgcacctgagcatgcgcaagccgcccaagccacgccccagg

SEQ ID NO: 37842 - DNA, 143 bp, Mus musculus
  source 1..143: mol_type = other DNA
tcccacaggggggcatggaatatccagcctagattttaattccagggggagagatccacacctaacgccagggccagacagtctcccgcgggaccgcggcgctccgcggcaggtgccccggagcagtgttcccgcttcccggg

SEQ ID NO: 37843 - DNA, 171 bp, Mus musculus
  source 1..171: mol_type = other DNA
tgtgtcagggtgccattgtcagggaccgtgtcctaccaagagggccatttcttggcttctgcccttttccctacaggggggcatggaatatccagcctagattttaattccagggggagagatccacacctaacgccagggccagacagtctcccgcgggaccgcggcgct

SEQ ID NO: 37844 - DNA, 295 bp, Mus musculus
  source 1..295: mol_type = other DNA
aacagtccttacagctcagggtccacagtggagccggtgacaggccttgcaggtagcccggggggcccgtggtctccaagaccctgctcacccggcgtgcagctgtttggctaactgtacagtaggggactcctcacaggaacgtccgtgcaacctgccctcatgtgcaggtatggctctggggccctcctagcagctgctctgagcatccctcagcagcccctgagtcagagatttctgtcctctatgaaggttctggtagctccggacctttctcaccatcagcgctgctccc

SEQ ID NO: 37845 - DNA, 277 bp, Mus musculus
  source 1..277: mol_type = other DNA
tcctggctgtgcagtggattgtcagtgctgacctccagccctacaaagccagagcccctattttcctcagtgaagaaattgaggcctggcatttgcccaatgttccatatgcagcctttaccgactgcatgggtgtgggtcctggctgccccagcccaggtgcagagatcgaggcctgctcgcctttcttacccgcggttgggtcctttgggcacgaaccagggccccagagggctgtgcgcatgcgcaacggaatctcagccgggaaggccttccg

SEQ ID NO: 37846 - DNA, 288 bp, Mus musculus
  source 1..288: mol_type = other DNA
tgggccatcctgttgtggaattttcctgagaggccttccacgacgacgataggcctttatcttaactagataccatggaaacataagatctgtccccaatagcccttcaggagtggctggctaactactgtaggaagctgggcatctccaaggttcagtgaagcagtgagctctgcagaggactgcaagcttcacttcgctgaggggaggctttagctcaggtgtggtccccaccttgggctgcccgagcactgcaagtgacctgccacttcggaaggccttcccggc

SEQ ID NO: 37847 - DNA, 193 bp, Mus musculus
  source 1..193: mol_type = other DNA
aaggaacatttatagcttctaatcttaaaatatccagcccaggctggatggacaatgtcatttacaaagcacacatttatctcaggaaacattctgatgtagttttctaaaaatacggaggggtccttgcatgactgcaccgctgtgtgtttcgttagggttccagcacaaagagctagaagctcctctggtt

SEQ ID NO: 37848 - DNA, 252 bp, Mus musculus
  source 1..252: mol_type = other DNA
ccagcccaggctggatggacaatgtcatttacaaagcacacatttatctcaggaaacattctgatgtagttttctaaaaatacggaggggtccttgcatgactgcaccgctgtgtgtttcgttagggttccagcacaaagagctagaagctcctctggttcctttcgcaggttccgggtcggctgggcctgcgccagaaaccgcccgcggttagtggccacgccctcagccccaggcactgctctgagtgca

SEQ ID NO: 37849 - DNA, 345 bp, Mus musculus
  source 1..345: mol_type = other DNA
cgtagtccttcacccctcagggaaaaggtccacctggcccagatctggaagctttcagctcttctgcacttgctcaagtcctgagagactgagctgggtccagcccagcaagcctatacatggaggcctcttgaagcctctgcaaagactgatgccagccagtcaaagccaggcctacgtgagcaacagacctgctgctaccttggtactgaaggagcctcagttgtcaaaaaacggctccctcaagtgttggcagtcatgtgttgagcagctgcagctaagcatcttgcagttcccaagcctgccctccccctcctttggctcaatgcaagaggaaggtcaggg

SEQ ID NO: 37850 - DNA, 283 bp, Mus musculus
  source 1..283: mol_type = other DNA
ctatattataatttgtcagcaaagcagcagtatatttttaaactcattggttaactattaatttttctgagaactgttctgctaaaactatacagtttggaaagtttacatttgtgactgcccagaactgagtacaaagccctaaacttttaccctggcttcataataaatctgtggccagtctaattcacctttaaaagtgtcaaactgattgggtagcagagcctcgtggctgtgggggcacccacacagaggtattctgtttctttttagcagaatagac

SEQ ID NO: 37851 - DNA, 504 bp, Mus musculus
  source 1..504: mol_type = other DNA
atatatatgttttaatataatatataagagaacaacttaagtgaagagataacccaggcttccccaatataaaatactattcagaacactcgagtatgtcaaacaccgaatgtaattggctttaggaggctaatgattttaaaagtgtttttttttaaaataattgtacaattcaaagcttgtcgaagttccaagatggggttcttttggaaagccaagccacctgctagtgggtggtgagtcatggccacaggcttgcacctgcctccgcagacgccacactggctgctgtgcgtttccaaggctctgagttttgaaaaagacagtaagtgaccacagcctggccacaaggtggcccaggggcgagcatctgaagctcgggccggtgccatggcgatggagccgggggccctccctggccttgtgccggagcggcagtgcagcggggtgacctggcccgccccgcccccaggccgcggccgcctagccgagactgaccctccg

SEQ ID NO: 37852 - DNA, 447 bp, Mus musculus
  source 1..447: mol_type = other DNA
tgttaatatggctctggatattcaaagactttttcttttttttaaagatagagatgcttgtgttacatgaatgtatgaactccattcagctttgagaagatgtctctcatgactgactcagtttctcttgtcacacgtggaaatgtatctttttaaaagagacttaggtttacctatgtgtaggtctatgcaccacatatattctgtgcatggatcagaagagggagtcaggtccagtcccccaggagttacacatgattatccgtcaatgtgagtactggtttgaaactgcagctaatattggaccatattcagtgtttaatttataaatgaaacacagagagagggtcaattaatgattcaatataacagttatgacagtgtactaaaacaaatgtcatgaggttcttagttctctcaaaatatcttattgggtttaagactctc

SEQ ID NO: 37853 - DNA, 353 bp, Mus musculus
  source 1..353: mol_type = other DNA
ggatccttatagcttgggacacagtgagttctgtgagtcaaagctttttctcatctatgagggagcactttattctgggagaaagcaaatggttcctgaggaaagtctgctgggttttactcccttttggtctttgcaaagaatagacctgatctagtttgcttttctgttgctgcgataaacatcaagaccaaaagcgctccaggcaggggaatgctgcttaccttgctctcaggcatggccacaggccagtctctaggtctgtgttacattcatagctgaagcttacttagcagtgtgaatgactgtgctcccacagccacatggtggcacccaagggcatctccagaaga

SEQ ID NO: 37854 - DNA, 360 bp, Mus musculus
  source 1..360: mol_type = other DNA
ctctattctatattatacaggatgccttggatggactgctgggacaatcgttatctttttataaacacatcagtaatctaaaaaaaaaaaaataataataaaaaaatatttagaaacgtttggcattataatacctattaaattacaagaaaatatttctgtttctttaaaagcaaatggtttcttcatctgttgtaagccggcccgcggcctacatgaacggggtgcacctatttctctggagccattctgtcagcacgcgggcaccgcaggtggccccacctccgaggcaacaaggtctgtacccgcccgcttcaggctgggggggggggggggggaagctacaattggctccaccca

SEQ ID NO: 37855 - DNA, 454 bp, Mus musculus
  source 1..454: mol_type = other DNA
tatgatatagatgtgctatttaaatccaactgtatcatgaattatatgacatgtaaaaatacctaaatatccaaatgcacccgactgctcttccgaaggtcgagtgtctgaagacagctacagtgtacttacatataataaataaataaatctttaaaaaaaaaaaagtagattctatttatatgctattaacaatttattgattgattgattgattgattgattgattatatgtaatcttcagacactggaagagcagtcgggtactcttaatatcactgccagccaagtcattgtcattcacatttattatttactatgatggaccatattgcagtcaactaaagtaaaacgtgactattgatttatcacattccaatgctaagtagtgggatgcagaacgttctgcagtgcagcttgctaggaagatgggtgggtcccttgcacactccta

SEQ ID NO: 37856 - DNA, 365 bp, Mus musculus
  source 1..365: mol_type = other DNA
gggactcgttatctttttataaacacatcagtaatctaaaaaaaaaaaaataataataaaaaaatatttagaaacgtttggcattataatacctattaaattacaagaaaatatttctgtttctttaaaagcaaatggtttcttcatctgttgtaagccggcccgcggcctacatgaacggggtgcacctatttctctggagccattctgtcagcacgcgggcaccgcaggtggccccacctccgaggcaacaaggtctgtacccgcccgcttcaggctgggggggggggggggggaagctacaattggctccacccaaagttttacttcatagttcagtagaaaacttgaaccaggtcaaattg

SEQ ID NO: 37857 - DNA, 264 bp, Mus musculus
  source 1..264: mol_type = other DNA
aacactttttctacagggaaagtattcctgcactggtcaaaaaaaaaaaattttttttttaaatgtgactcttccaggaagatccctaacaggctcagcttggcacagctcccctgcttcctagggaacctgcctcttggggaaactatttccccaatgaaatctgcacctacagaaacacaggtcctggttttacagatgaattagagtctaaagagctcctctgaaagttttgagaaattttctaccattgtgctaagaacc

SEQ ID NO: 37858 - DNA, 327 bp, Mus musculus
  source 1..327: mol_type = other DNA
tctagatatatattgcttcacactgggttctgttctcaacacccaaactgtgctgatcacaacagtttcatatacatgaacatgttgcattattagaaaatcaggctgctctctggtgttacatagttttaaaagatagaaagaatgaattattagaccttgttctaagaaaagagatttaagatctccctagggagtgagctcagctccaaaagctgggaccagtgtttcctgttccctctggagtctatggcttccgaagcctctgagccttgttatcctgtgtcaaggtaaaaataaccatgaccatatgctctttttaaaatt

SEQ ID NO: 37859 - DNA, 307 bp, Mus musculus
  source 1..307: mol_type = other DNA
cctcttttaagtctacttctgggtatacactaccataaataaatgttatgtaacatttaaatcagtcacaaatagagccaccttttcaaaagattaatacctagaccaggctgttacatgcagatatgcacttctatggtagctaaggtggaattctagctatatcccaaattggcccctcaggtgagtactcctctcagtttggagattagggccacactcgcagcatgcagtcctgcagcagatgatggagctggctgtgacttgacatcaacaggggactgtttcctctgttagtttctgtgct

SEQ ID NO: 37860 - DNA, 431 bp, Mus musculus
  source 1..431: mol_type = other DNA
tttacacagacacacatacacatgtgcgtgcaagtatacaaacacttacataaatatacttacatagaaacatagtttacaatattaatagatcaaaagaaaatcatgcaattacttcaaccattaaaagacatttttaaagtaactcacatttccaatcaaagcctttatttagtaaaataggaatgaacaaaatatgcatgcactaatttaaagattaatcactaatagccaatatcagtcttagtgatattagatattctatatatcaataagctaaaccctgagcctttggtgtttgttttgggcttcaatttgtcatcctccaatctcaattggaggctattttgtagtaagagaaatccttaaatctagaatagagtcagccaaggaaggctctgttgacatgtaactacatggaaaatgtttct

SEQ ID NO: 37861 - DNA, 247 bp, Mus musculus
  source 1..247: mol_type = other DNA
gctaaggctttttattagactgactcacacagtggcttaggctggcttctaactcaaggcaattgcttaacttcagttatgtcttctcttaaccaagtatactttcctgacaataggggaattctctgagatgagaatcaccaggcttaagtaccgggtctcctgtctgagcttagctgctggagttctgaatgcagagcctgtgacatgcactttccagccacacatgaaaaaacccgaggggact

SEQ ID NO: 37862 - DNA, 446 bp, Mus musculus
  source 1..446: mol_type = other DNA
ggccagcctggtctacagaccgggacagccagggctacaccaggttataggaacaacatctatattcatttcacttgaacattcttttgtttaaaaaaaaaaaaaaatcacccaaatggctcagtagttaaggagccttacaatccaggggatccagcagcctctcctggcttctgcaagcaccaggcatgtgcagagggcacttgcatacatgtaggaggagacctggctcactccggatcctgagtcctgcagggcagcaggcagaggcacagggacttgggattccactaagtgctgttgctttgcctaaaccatactatagactggggtctgcccaggtgagaaaacctcagggtaccttagccaggccagtgggccctggagagagccactttaggctagacttctagattctcttaggcccatagagaatactttgtaca

SEQ ID NO: 37863 - DNA, 294 bp, Mus musculus
  source 1..294: mol_type = other DNA
ggcagtagttgagaacttccacctcaacacttcctggcaggcagcgactgagggcccctttaggggttttccagcaggcagctcctcactgggcactgttgcacagtgctctctctcccagtcagggatagagctttctgccagcagtcctgatggacccccctcaagtggggccctttcctgtcagttgctggctggggtcagctttaagccagcagacaggatggaagagtctagagtctggtgcgttctaagagcagggcctttgagaccacgcagaggtgggacagctgt

SEQ ID NO: 37864 - DNA, 255 bp, Mus musculus
  source 1..255: mol_type = other DNA
ggagcctgatgtttggatcaggtcagaggccaagccctggcacggcagtagttgagaacttccacctcaacacttcctggcaggcagcgactgagggcccctttaggggttttccagcaggcagctcctcactgggcactgttgcacagtgctctctctcccagtcagggatagagctttctgccagcagtcctgatggacccccctcaagtggggccctttcctgtcagttgctggctggggtcagctttaagc

SEQ ID NO: 37865 - DNA, 234 bp, Mus musculus
  source 1..234: mol_type = other DNA
atgctggaatccttagcaatccggtccaccttgccgacgactgcagtctccatgtctgtggacatcgacagaatggctgcccctggctgtggacagggaagcctgatgctggagtaccgcctcaggagcctgatgtttggatcaggtcagaggccaagccctggcacggcagtagttgagaacttccacctcaacacttcctggcaggcagcgactgagggcccctttaggggt

SEQ ID NO: 37866 - DNA, 302 bp, Mus musculus
  source 1..302: mol_type = other DNA
ttcctctgcagagcaggaaacagctgtcccacctctgcgtggtctcaaaggccctgctcttagaacgcaccagactctagactcttccatcctgtctgctggcttaaagctgaccccagccagcaactgacaggaaagggccccacttgaggggggtccatcaggactgctggcagaaagctctatccctgactgggagagagagcactgtgcaacagtgcccagtgaggagctgcctgctggaaaacccctaaaggggccctcagtcgctgcctgccaggaagtgttgaggtggaagttct

SEQ ID NO: 37867 - DNA, 280 bp, Mus musculus
  source 1..280: mol_type = other DNA
gacactgccttcattaagattctgtttgtctgatgatcaaaacaggcaaagccagtctatatcctctaggcctgcatctgtggaggacaaaagccatgtgcagttttcatttacatcattctgttattaaaaagataatgaaaacaatccactgcagtggtgtagtcctcaagttgtgttacagattgtactctgaattgaacattacctaactgtgtatttgaattcaaggctaacctaggcagtgtagtgagatgagttagcacttgctatagcctgc

SEQ ID NO: 37868 - DNA, 307 bp, Mus musculus
  source 1..307: mol_type = other DNA
cacatctgtgcaatctctcctagaaatcccaccctgaaacaaagaattattagttttatagataaccataataattgcttagagtctatcaatttttatgtcactctattttaatttaaagtgtgtgtgtatccataaataaataactgaaaaaagtcttcatagtgtctgaacatgactctatgttaatacattatgatattacacagtatgtaaaagggcacttgtaccttgtccagggaggatccccatgggctataggtccccagctaggttgacccatatctcaccctgtccctccctgtgg

SEQ ID NO: 37869 - DNA, 300 bp, Mus musculus
  source 1..300: mol_type = other DNA
cctcagtgtgctgtggtccagactgcatcaccagagcacccagagtgttcctgggggcccagattcactaagtctttaaaagcatccctgaaagggtcctttatctcagatgatagaacttgccctgcaagtgcaggaacctgcgaagccctggagcttgcaagctggcaagcctagtgaagtcagtttttcagaatttgcgaagagcactggaatttgacttctcccctatgcatgtattgatacatggcatggcacaggcacaggttcaccctctgttccaccaggatacaaggcttt

SEQ ID NO: 37870 - DNA, 300 bp, Mus musculus
  source 1..300: mol_type = other DNA
ttcagtgagatggcaccaggaaagtgcctccttccaggaaccagtagtagagcttgtgacagtgacagtgtctagcacgtgtctctagcattgcaagcaaatagtactttgcaccatgactcactacctgaggctgggcaggacaggactcttcccatcctgaacagccttgtctcattttactctagtgaaacaacaggaacatggactcaaatgcagtcagcttgagtgcagagcctatatttgaaatctacacttcaaaatatatctctctaaaggtgattttacttatccttatat

SEQ ID NO: 37871 - DNA, 249 bp, Mus musculus
  source 1..249: mol_type = other DNA
tcgctcctgtgtaggtgggtacacaggaaagagcttcttgctgggactcagcagtatccagatcaagcatgacaagacatcctttactgctgtaccttgttgaacaataaaatggcccagactcagtccagccagtctgcagtatgcggtcactttaaagagagtaaacaacaggtgaacacagtggggtgcccagagaatttcacagaaattttgctgtcagcccaggcccctgcctttccagaacag

SEQ ID NO: 37872 - DNA, 299 bp, Mus musculus
  source 1..299: mol_type = other DNA
gcagacagagctctgtatatgatttatgttacacaaaagcagttgagctctggtccctgaattacaatggactgtaagtcactgtgaaaacagtcttagggatgtgtcctgacagtgacccacaagtcgcctgaagttacttggagcagctatcttagagaagttaccaaaatcgttctgggcattctgcagagccaggtcgatatgaacttgcaatttctgacatagcatgcaatgtttgtatgcatgcatgcacagcacagtggcattgactggatacgggcaagtgactcatgagc

SEQ ID NO: 37873 - DNA, 327 bp, Mus musculus
  source 1..327: mol_type = other DNA
tttcatttaatgacccatatctttcatttgaaagcaatcagaagagggcatttaataccattgaaattaaattcagtctgtacttttttgttttttggacagtgggaaatggctaaaaatacttaattcctatctgacaggcctttaattccttttaagatgtatttatttatgtatgcctacaagacagaagagggcatcagatcctattataggtggttgtgagccaccatgtggttagtgctcttcttcctttcctttcttttttttaaaaaagagagacaaggtttgtctgtgtatcccacgtagaatcccggagccgcccgg

SEQ ID NO: 37874 - DNA, 479 bp, Mus musculus
  source 1..479: mol_type = other DNA
tagccgagcagccaatgaacggcgaggcggaaggcggaggaggtgtcgcgtagacacccgcccaggacgtcggctcccctcccccacgccggcccgggccgccccgcttgctcggtccccggggccctcgaggggagcggcgctctgcccccgggttctattgttaagtgacccattttttaaaaatcgaatggttacaaactacaaaggatcgttcgtctgaccctcccgaggctcggaccctttggaaactcgccgtgcccatcgcgcctggcgccggctgcagcggctggacgctctccaccccctccccggctccggctccggctccagctcgaagccggacactcggagcggctgcccccgccccgctcccctgggaggcggcgcctgccccacgtagtattttcacagcccgctggccgctgccaaaggggttggggaggaagagacaaaaagtagtttccccccgcgcctcc

SEQ ID NO: 37875 - DNA, 588 bp, Mus musculus
  source 1..588: mol_type = other DNA
atttttctagagcaagaagtatggatactaatgttgccaaacaatatattcccccaatttatacagtgttgaggactaaacccagagcctagtacatgctaggtcaacttggcacagataaggtcacctgagaggagggaacttcaattaaaatgccccccgctgtggtcacttgttctgtgagttccaggccagcctggtctacagagggagttccaggacagccagggttacacagaaactgagaaactcatggcttttcagtataaccccatctgtgtatatattgttatttcaacgtttaaaagggcagatactagccgggcgtgtggctcacgcctttaatcccagcactcggaaggcagaggcaggcagatttctgagttcgaggccagcctggcctacaaagtgagttccaggacagccaaggctatacagagaaaccctgtctctgtgttttgctatgcaagaaagacctgagttccagcgctaggccaggcggacacaaagcctcccggggcggaggcggggttcgcgacgacgtcatcacaggtccgccccttgacgtcaggcgccggggacaccagg

SEQ ID NO: 37876 - DNA, 459 bp, Mus musculus
  source 1..459: mol_type = other DNA
aggggtactgccctgaaaattatgaatggctctcacagtgcggccgccaccttaggctgacgctgaacagggttcccttagagtcccaagttctttaacaaaaattatttaaataaaagtattagccgagcagccaatgaacggcgaggcggaaggcggaggaggtgtcgcgtagacacccgcccaggacgtcggctcccctcccccacgccggcccgggccgccccgcttgctcggtccccggggccctcgaggggagcggcgctctgcccccgggttctattgttaagtgacccattttttaaaaatcgaatggttacaaactacaaaggatcgttcgtctgaccctcccgaggctcggaccctttggaaactcgccgtgcccatcgcgcctggcgccggctgcagcggctggacgctctccaccccctccccggctccggctccggctccagctcg

SEQ ID NO: 37877 - DNA, 488 bp, Mus musculus
  source 1..488: mol_type = other DNA
gttgtgagccaccatgtggattcgagtgctctctaagcacaagggctcagtcacaagtcccgaagtacttgattttttaaaaatgtattaactttgttaaactcttattaattgtaataatttgtctacaagttgttttgtatttgtcatgtgtatacatatttataccatccgtgacaagaatatctttaaaacactttatttgtattcatgtgagctggagttccaagagattatgaacctcttctgaacttttgagctaggtctccagtcctcagaaaaggggggacattggactctccaacacgatgccctctagtgtcagaccactagtggcgaataggtctctagtagcaatgcagctgctgcgcctcttagttgctaagcaaccgcgtcgccctgagcccctgggccaacagcacgtgctgtctctccgcaaggcgggactacattccccacaatgccgcgcgcagtaggccctggccgga

SEQ ID NO: 37878 - DNA, 125 bp, Mus musculus
  source 1..125: mol_type = other DNA
ttctgtcaaactggggtattaagagtctgagatgccaggtatataaaccctgttttgagaacccaacagcatctgttttgcagccttgggcgaagctcaagctaaattaagctcaaggacttggc

SEQ ID NO: 37879 - DNA, 573 bp, Mus musculus
  source 1..573: mol_type = other DNA
agaatctaaagtcaaaacaagtggactagtacctgggaagttacaagctgttgatataacatttgaaagaaggcaaataaaatggtctttatgtgtgattctgtcaacagttttagaaaaaaaaaaaaaataaacaacatgaagaaacttttgaggtttgttttattgacttcagtgatgtataaaaatattaaaatactttacactttaatatctgtagtctatgcaaattatactttaagctttagaaattaaatggttggttttaattcattcctttgcaaaacaaaagaactagatagagatggtttttaaatatgtgtaaagctattgatctataaaatgatattgtcacttattacggtattcttttctttgggaaaagaatatgtttgtcccaattttggcttttaaaaaaaaaaaagtttaaatctcgagactgcacacagggccaggctgctgctttcgggagcagagcggagcgcgtgcgtggaccgtgggcggcctggctgcgctcgaggccttgaggccggccacccacgtgaccagggctgcgctccctccgctatagcg

SEQ ID NO: 37880 - DNA, 576 bp, Mus musculus
  source 1..576: mol_type = other DNA
tagtcaatttagcactatttaaatgacactcaaacgaaatcatttagtttagctttaaaataacgcgtaaattccaccatttaccttgatctggtaaacataacttcaatatcgttcatatttattcaacaagtttaacgacaggggtgcgaatcgccgccactttccactctagtcatggaccgcgggctcccagtggcagcctcggggagtttctggctgaggccgaacccggctaggaccagtagatccaatgggtctatggaagccactgggaccttgcggtcccgcacacctgcaccgggagcggcgggccctaagcggtcccgcttcatctccctagcgggactcgacggtcggggatagagagagggctccgagggtgctcactcttgactgttcccttctccccgcagagcgggccgcttagaattggggtgtgggtggctccagacgccgccactcgagcggcagtggctccagcctcctcccccgccgctgggggcgggaagtggctgtgggagtcacccgggcgtgactgcccccgaggcccctcctgccgcgacaagggcgctc

SEQ ID NO: 37881 - DNA, 597 bp, Mus musculus
  source 1..597: mol_type = other DNA
tgcaggggctgtgcaaggtgctcagtggtcacaggagaagttccacttgcactttctacagctatgcgagagcccacagcacaggtctgagggcttgcagagagatctcagaaaggactggaagctctcgcatgctacattgcaatgctcaattccttttagcttaaaaaaaaaaaaaaaattaaaacactttctgagagggcacccatcagcaatcatcccactccgcgcagggtcgcggctggaggcacggtactccgtcctcctcctcccaggtctgggaaagccagatgtttgggagggtctggctaagcccgctccacgatcccatgaaagaagctagtgtcctttagtccacctctgtaagaagagtggcgggcgcgggctccaggactctcgcgtccccgctcctctcccacagaacgtggaggacgcgcgctgggccagggcgaccctaagggacccgcccgcagggccctctggtggtagcacctggcggccaggccacaaccgaggggcggggccgggctgggcgggggttggcgggggagggggggaatctccgcgcgcacgagtccgcgcgctcgccgcgtccgg

SEQ ID NO: 37882 - DNA, 777 bp, Mus musculus
  source 1..777: mol_type = other DNA
agtccacctctgtaagaagagtggcgggcgcgggctccaggactctcgcgtccccgctcctctcccacagaacgtggaggacgcgcgctgggccagggcgaccctaagggacccgcccgcagggccctctggtggtagcacctggcggccaggccacaaccgaggggcggggccgggctgggcgggggttggcgggggagggggggaatctccgcgcgcacgagtccgcgcgctcgccgcgtccggcgcacgcgcgaggccgggaggagcgcgccccggcggcgacggcgggagcggagcggctgagagaggctggccgcgcgggccggcgggcagcggcagcgcccggagccgggcgaagggcgaggccggcggggacggcggaagtcgcccgcccgaccgcgagcccctgagtcggtagatggggctgcgcggcgcccgcgactgatgagtggagcggcggcgcggaggcggccgagcgagccggtgagtggcggccccacgcggtgcggtaacggccggccccggagccccaagcccggcggcgccacgcgggccccgcccctgccacctgggcgcgggagccgtggcgtgtccctcgcgcgcccctcgccccacgcgtcccccgcgggccgccccttccgggcggggccggccgcctccctctgcggcgcgggcgcctcggcgtggacccgggcgggcgagcgagcgggctggcgctggctcagagatcccgtgggcgagcacacgcctctgcgggggcggtcgccgctcagc

SEQ ID NO: 37883 - DNA, 443 bp, Mus musculus
  source 1..443: mol_type = other DNA
tagctactctgtagagaatattgctgataactaaattgaataggggaatttgtcaacgaccactgcagcaaaggtggtagtggcttattctccagtcatttctgttctgactgaattgaactggaaaatgtagtgctgggacgcctcatttctaagtaaacatgtaaactgtgtgctgcttggaaacagtctactgataagattcatctaatagttttgagatactcattttcaatggcgcaaatgtttaaaaagtaatatttttagtgctcattagatttataaaaattctttcagacagtattgatttaatagtaatactttatatttttttgtactaagtttcgacctgttttgttagttagaactcatatcaaaactttttcaaagaaggttgacaagaacattaggaatagcaatgtttaaatgatatgtttgaacat

SEQ ID NO: 37884 - DNA, 240 bp, Mus musculus
  source 1..240: mol_type = other DNA
gctgagaaggtctgccctgttcatgttcatacatgttcatgtgtatgtgctgacatgtgatgctggcatcgctaccctgaacacgttcctttaggagttgcagcctggaagtaaactatgataagttgaaatcttacagagatcatggacccataatactcctacttttctggagcatgagatttccccgacttcatcagcacaaacaaaacaaaaccacagtgtgttttggatgccaac

SEQ ID NO: 37885 - DNA, 366 bp, Mus musculus
  source 1..366: mol_type = other DNA
aatgggcattttgactgtaattcacaatagatttgctctttacagttatttaaatgggaaggacagaactggattctttagacattttctttaaggctcagttgccagttgagatgtgctcacaaccaggccacatcatggtctgtcaatcaaaggtgaggcctgtggttgacttaactctgagcaatatgcttcctggcctagaggcctgacagggacgcaggtttgtggaacaaacatcccgaagctttgtcaaagctaactttaatgttctatgtagaggtgtcaccacttgggaaagttgtggaacttttaaggtggggcctagctgaaataggtcaattgggcttgggccataagagttat

SEQ ID NO: 37886 - DNA, 355 bp, Mus musculus
  source 1..355: mol_type = other DNA
ttttcctgattattcacatatatatatatatatatactctctttggtctgagagtgtgcctttaccgcaggtgcaggatcacatctgttcctgcccaccgggccacctgcggcgctggactcatgtgcggtttgcaaattgcctcaaattatcagtggctgacatccaagcctggacatctagccagatgctcctgcgtttcgatcgcacaactgcttctgggggccaggtccccaaagtcttggacgtcattcactaaatatttattgaaaaggatgctgggagccgctgccccgcccagccaccgtcacggaagattggtgggagtgggagccactctgctgccccccctcca

SEQ ID NO: 37887 - DNA, 529 bp, Mus musculus
  source 1..529: mol_type = other DNA
tgtcaaggctagacagattcccgggaatcctctactcaggcgaatcgttttctacaaacactaggggaagaaaacagggactctgggtaagatgtgatcctgttgaggctctcactgggagagcaaggcgtccactgcgaggccagtgcagttgcgccagccaggaagccttgaccaagcctgggtaaaggtcgccccggccggcagtctcagcactccccgtgggcggaggccgaaggagtcctagggccgggcgttacgagccacacccggatcccagcatcggccccgctacttgccctcgccatctcgcaggccagagggtgacgtcacgcacgtccacgccttacgtcctaaggcctgtcgttctgaaggaagggcgccctctgggcacatcctaccatgctagctcgcatgcgcgcgcacaaaccgtgcggttacgtcacggcgcagcagacggcgctaccgcacgtcgggccgcggacgggcggaacaagtgtggttgcaccgacaccggtacataggcgcg

SEQ ID NO: 37888 - DNA, 351 bp, Mus musculus
  source 1..351: mol_type = other DNA
ttcttaacatttcagaatgctaaactctctcacgttgagatcccagggtggcccagtcctgaaggaacagcagcttctgctctcagaaggggcggcgggcgagttccttctagaactccgggccccgggtccgggctggtcaacaccacgaacgttcggacgcccgcgcctatgtaccggtgtcggtgcaaccacacttgttccgcccgtccgcggcccgacgtgcggtagcgccgtctgctgcgccgtgacgtaaccgcacggtttgtgcgcgcgcatgcgagctagcatggtaggatgtgcccagagggcgcccttccttcagaacgacaggccttaggacgtaaggcg

SEQ ID NO: 37889 - DNA, 537 bp, Mus musculus
  source 1..537: mol_type = other DNA
ttctatgactagagtcttgaatatcccaatgactttgtaaaggtatttagacatttacttaaaaaaaaaaatgaggtcagcctggtgcaggtgcataaatgccactgtcattagactgcatataagtgcctctacccagcccaaaacatttttaaagtgtgtgtgtgtttgtgttgcacaaataggtgcatgccggaggcaaggcaggaagccagcaagccctagtggtcttcctttcttggcaagcaccaagggctcttgttacaagcatggctgggaccctgtccctagaacctaaattataaactgtggtgttatgggtcaaacccagacactagtcatgtgactgatttatattacatgcagtttaagtatttcaatatggaaatttttgctttcgttaattacctctaattcattttagctcagaatgtttaaggaatacatgtaggacaaaaaaaataattcaaacatgtgacttttttgtgtgtgtgagagtcaataaattttactggcattatttatagtaatataggt

SEQ ID NO: 37890 - DNA, 299 bp, Mus musculus
  source 1..299: mol_type = other DNA
ttatggcaagagctttatccataatttaggaagagagtgagaagctgggtgaaccaccagctagtagaaaagataccccttgggcttttctgtaactctgaacttaagagcacatcacactgcaaactgtaacaatctgtttttttttgtaaacgccgccagagggcgcctgaggtcagcctatggcggggcgtgaggcacgggcctaggttgaagcggaaacgcggcggttccacctttcctgaagggctccccgccacacgtcggccagcgccccacccgcggtcaccgcccaggca

SEQ ID NO: 37891 - DNA, 661 bp, Mus musculus
  source 1..661: mol_type = other DNA
cctcttaccagtcagcctctccaaaagagactcgctgtggtatttcagtaaatacacatttatttctataaatcctcttttaatgccatgatgtcagtatgcctgtggcaaagtgagattacctaaatggctctgggagccacaaactgagcatagtgtgactaactccccctgctagctttcttaacttaaggactttgagcaggaaggtagtctttatagaaataaaatcctagtgatttatacacattttcatcttccacatgacagctgcaacattttacaaaaacaattaattcatggcatttcattgacattttgaaaagactattctgaattttttaaagcccagctagcgtgtatagaatatcttctttcctttttaagcttccctcaaaaactaacaaaagcacaaaacaaaggatttctcgtttaagctctgagaaataaaacatcctgtttgtttagaatcttaatgactgttttttcccaatcttatctaattaggggagacttcataatgaggaaaattcttttcaaagtcaatggatttgcaaacacaaacattagaattaagcacattccttgtgtgcatattttagttacacactctaattattattactacttagaatatgtgtcatttatctgtcacagtata

SEQ ID NO: 37892 - DNA, 490 bp, Mus musculus
  source 1..490: mol_type = other DNA
tttgggagggcggccaggccagacaggccgatgcaacccccggccgcagcttcggagctctggccccgcgttctgtcggccacgcgcaccaaccgggcaggatggggactgcgctctgcggacctgttgcacgcgcgcaacagctgcttgcgcgcagtgtgtggggaggcgtgcgggaccccgcacggtggtccgggctggatgggctaggggcgccgggcgcatgcagatcggctgcggaggcgctgcctcagcaggcagaggcaccgaggggccagggctgcgtggacgcggattcccagactgtgcgcggggaggccgcgaaaagcctggctttcccgggacgtcccataactttccagatggaaaggtaaaaagttaccgcaacttagattgagtgaattagcttcttgtgacattgccaccagagtcttgactgtggcagtaattttccataattatctgagacactccgactctgagtatgata

SEQ ID NO: 37893 - DNA, 677 bp, Mus musculus
  source 1..677: mol_type = other DNA
ccgcggcccacggggctcgcagcctccccgcaagctcggacgcacggagcccgctccgatgctcagggccgcggatcctgcagagtctcccgcctgcgcgcttcggttcagccacatccgaggggagggggcgcgggcagctccgccgggggggagggggagcaccgcccacgccctggccgcgcggggcccgccgggaacgcgtcctgcggggggcggcgcgcgcaatgctcaccgtccgcggcgtggcgcccagggggtctcctggctggaggaccgcggaggcctctctgcgtctcggagcgcgccaaagcggggctccacccacctccttgcccggatcttgaaggccggggagataaacagcggggttctttaagcaccacgcgcgggatcccaaggcttgtggcatccggggagtcccttgggtggagagggccgcacgccccagcgccggcctaagcccctcccgacggccgtttctccgctccctacgcggaggtgggggccggacctagttccggacgtagtaacacgccgagcgcgagccttccgcaattcacggaacacagttgcgcaagtgatgtaaagcagtcccgctgtacctaaagggggagtgagtgtaggcccttcccgccattggcggcggttagggcgtttacgtaacggcgtgacgg

SEQ ID NO: 37894 - DNA, 640 bp, Mus musculus
  source 1..640: mol_type = other DNA
cgatttcccgccctccgcggacggacgcgcacgggactcgtcctgaggagctcctgcacacgggaccggcgccgctgctactgccgctggagccgagaccgcccgtcacgccgttacgtaaacgccctaaccgccgccaatggcgggaagggcctacactcactccccctttaggtacagcgggactgctttacatcacttgcgcaactgtgttccgtgaattgcggaaggctcgcgctcggcgtgttactacgtccggaactaggtccggcccccacctccgcgtagggagcggagaaacggccgtcgggaggggcttaggccggcgctggggcgtgcggccctctccacccaagggactccccggatgccacaagccttgggatcccgcgcgtggtgcttaaagaaccccgctgtttatctccccggccttcaagatccgggcaaggaggtgggtggagccccgctttggcgcgctccgagacgcagagaggcctccgcggtcctccagccaggagaccccctgggcgccacgccgcggacggtgagcattgcgcgcgccgccccccgcaggacgcgttcccggcgggccccgcgcggccagggcgtgggcggtgctccccctcccccccggcggagc

SEQ ID NO: 37895 - DNA, 279 bp, Mus musculus
  source 1..279: mol_type = other DNA
attaatcccatatgctgaatattcagaggatggagctttagggggctaccccttagttcctgcctctccggaaagacacataaagtgaaattttgcctaagttcaacctcacaagtcctctcagcccagtgtagatatgtgcatgtgtctatataatatgattcctgattctccttgttttgccgacaaggaaacagaaacactgccagtagttgcccacctgtgaccacttgtgcttagtgctcaaactgccaggggcatctgggagctccaggggct

SEQ ID NO: 37896 - DNA, 366 bp, Mus musculus
  source 1..366: mol_type = other DNA
gaactcactttgtagaccaggctggccttaaactcaaaaatacaaaaagcaaaacaaacgatggttgcatgtattatagtttgggtgcaattttaggtcattaaataccaatgatgcaaatatagtcatggacaacttttctaggaggatgctggatggtccaactctcagccttgagccatgcacacaggtgggtgagattcatcgtacatgaaaacacattttttaaaaagttacggagatattaaaaatattgttatagcaaacagtatatgggtagggagaaagacccgctagctaggtggcctttcctagggcggcggcgggcgcgcagggcggggcggggcgctgcgtgcgctggacgcg

SEQ ID NO: 37897 - DNA, 364 bp, Mus musculus
  source 1..364: mol_type = other DNA
tccagcgaagcctagaaggattcgttagcagtagctgtttcttcagacagtcctagcctgatcaggcctaagtcacaggacacgtgtgcaggggtctgagcccccggggggcttttgcagcaagtgcctgtatctgctgagccactgggtttgatgtttagcttgaagagccccatgtccagctgtgactcacaaagtcacttaattcataatgagggccatgcatgtttctcattcttagtctaccctagaggcctaatctgttgtgcgatgtatatatatatatgtttgtttgcctgcatgtatgcctgtgagaccagacaaaagaacccagtgtgcctttaggtttttttttttttttttg

SEQ ID NO: 37898 - DNA, 318 bp, Mus musculus
  source 1..318: mol_type = other DNA
gacacgtgtgcaggggtctcccccggggggcttttgcagcaagtgcctgtatctgctgagccactgggtttgatgtttagcttgaagagccccatgtccagctgtgactcacaaagtcacttaattcataatgagggccatgcatgtttctcattcttagtctaccctagaggcctaatctgttgtgcgatgtatatatatatatgtttgtttgcctgcatgtatgcctgtgagaccagacaaaagaacccagtgtgcctttaggtttttttttttttttttgggctcaggcggcttagccagtctgtcatcagactg

SEQ ID NO: 37899 - DNA, 383 bp, Mus musculus
  source 1..383: mol_type = other DNA
tacatgacaaatatgtctacacaaatgtaattatcattaagactaaaggacccagaactttttggattttaagtgtaaacgtgtaatattgaaagactcaacctttgctgactagattgaagtaaattttatattttccctgttctaaccactatttgcaattaaaaaataccatttcaggtgcctgaccctaaaaggatattatctagaactaattccgtctaagaacgggggtttaaaccttggtggaaaagaagccttgcggaggctttattttccggaatcctggaacagtctaaggccggcttcacccatagccccgcccaattctcccgggcggggagggggcagggcccggcgtccagcgaccgctggctggagag

SEQ ID NO: 37900 - DNA, 283 bp, Mus musculus
  source 1..283: mol_type = other DNA
acagtgtaaatgttcactaaagcctattcgctagtaattaatagctatgttctatgagtaactaattccaagcagggtctttgaattcatctaggcattctgtggcccaacgttaaattgaaacaaatattccatctggaatgagattgaaatatttttaagaagaaaaaaatgatttctttaggaaggaacttccctggggcaaatatcaaaactaattatcaacatttacatagtagttgctgttgttgccttctataatttatgcatgcctggctcttcc

SEQ ID NO: 37901 - DNA, 408 bp, Mus musculus
  source 1..408: mol_type = other DNA
cccgaatcccgggaccctggggtctgattccgaggctggcgagccagtgacgcaacctcgccctaggcgccgggattccgggctcacggccgccccgagctgagggcgtggtgtctgttggattcccacccttcccacccccagggtcctctcacctcttgccagttcagctttctgggctgggtggggaaggggccgcggagggggcctcccatccccccacatctggtggcggaggcgcgcaaagccgggcgcgcgcactccctttggtcccagtgctccaagtcagctccgggagcggccgctgctaccgccgcggcccgggctgcctgggggggcgagcgcgcgtcatccatcacggccgcagccggtaaatcgcaggcggctcagctcctatggaggaagtga

SEQ ID NO: 37902 - DNA, 319 bp, Mus musculus
  source 1..319: mol_type = other DNA
cgctggagaagacgtctcagggccagagtctgcctggggcgagcccactgtgcccccagcataaccctggtggtggtggtgatgctgtaaacagcgggagcgcacggggggtacccaccacccataaggcgcactgaagttctgcgcgctccagaagtctggttggtggtggtggggcgagctgatctgcacccccctgcccactaggacgccgccgctattccagaaaggagttcattcttgcacatctgtcactgagtgatcacttcctccataggagctgagccgcctgcgatttaccggctgcggccgtgatgga

SEQ ID NO: 37903 - DNA, 276 bp, Mus musculus
  source 1..276: mol_type = other DNA
agatcagcaggcttcgagagccgcctctcgttttccgctgcccgcaggagcgggccaggggcgcaggtcccgggcgaggaagaggaaaggtgaaccccaatattcattctctctctcccgacagtcccaaacaatgcgcggagtgtgcgggggaggtgccacatatatgtatttttgccctgaaaaaaagtgtaaataaagttcctttctgacttttttggatcaatcaaacagacagtggcttcttttgattaaagcccaaattgtcattgggca

SEQ ID NO: 37904 - DNA, 243 bp, Mus musculus
  source 1..243: mol_type = other DNA
aaaaaaatctatcatagaagatcgctgctggggtgttttttttgcccaatgacaatttgggctttaatcaaaagaagccactgtctgtttgattgatccaaaaaagtcagaaaggaactttatttacactttttttcagggcaaaaatacatatatgtggcacctcccccgcacactccgcgcattgtttgggactgtcgggagagagagaatgaatattggggttcacctttcctcttcctc

SEQ ID NO: 37905 - DNA, 398 bp, Mus musculus
  source 1..398: mol_type = other DNA
cagagggacttcagtcagatttatgtctgagggatcctctcacagtaaccgtatcaccgatgtttctctcctccctgtaatagctagaagtggcttggagcgtggagctggtacaaggccagaggccccacctcccatttacctgaaggcctgggggctgactaggagggccgctcagggtgcgcagacaagcttcgctcagctcattggggtggcccccagcgctcgccatcggtgcccagagcggcggacggcgcgtatcatcgcgatgtttcacgatcgtgatcacactctctgacaagagggagcatggcacgcccccgcggtcacgtgacactccgccgccaatggccgccgcgcgcaaacctgagggaggggggaggtgcagcgcggtgagg

SEQ ID NO: 37906 - DNA, 584 bp, Mus musculus
  source 1..584: mol_type = other DNA
aaagctataacaataaatctatgtagataatgtttaacatttcaaagccctaactatggccatttttgttcttaataatgaacccccttagatttcattaaaaattacagcaacacttatccagaattattgtgtatggtcatttttggaaatatctaggaagtataaagggtaaaataaaatttaagagtgaattacaacttaatgtctacttttctagttcttacactgaaaacagtattactggcagcattaatgtctgtcattataaatttttgaggtaccaagcttaattaaggtaaagaaaattactctagacatttgaacagcaaaatattaggtaaacaaaatgaagttgattttagccattagcacaggctataccagcatacagcttgcttaagcctttttccattgtactgtacatggtcttgtaaaaataacaaaaaatatctttataaaatatgaattcagctcagagatcccattgtttgaggtccgcaaaagtttcaatctagtaaataagttggagatttgccagccaggaaacttagcaagggctgagggtggagggagattccttc

SEQ ID NO: 37907 - DNA, 452 bp, Mus musculus
  source 1..452: mol_type = other DNA
aaggttccaagtctttaaatgaaaaaataatgtacaaattgctccagccctggcttcgcaaagcagggactccctccttcgttttattccagagctaggataaaaagccagggtctgcctcttggtcccagtgcccttccctctcctggagggcctcgaaccctcggaggaccacccgaagcctggttggactggagatcggccgtggcgaccagctgcccacggaacccaagttggggggcccgaggaacccaagctcgcttctcccaccctgaaggctagcagcatccatcacgcatcccccgcgcgtttcctgatccgggtccgcgcgcgcggatttcccattggccggatcgcagcacgtggggcgcgggggcggggcgcgcagggccacggggagcgcgcgcgggcgggggaggagcggcgcggacttcggcggcggcgacggcggg

SEQ ID NO: 37908 - DNA, 296 bp, Mus musculus
  source 1..296: mol_type = other DNA
cccaaggaatcccgccagtgtcggcctaagaaggcccggggctgccattttcacacacgcgcgcgcgcgcgcacacacacgaagccgttctcggccggccacaggcattgtccacaaggctggctctggctttgctaatttaggcaggcagagggaaaagtttgttctcccataatatatgttatgtggtatataatgttggatgtcaactcccaaaaccataaaactatggatgattttacgatctaattcatagacaaaatataaagtttactgttttataacttttaaaagga

SEQ ID NO: 37909 - DNA, 289 bp, Mus musculus
  source 1..289: mol_type = other DNA
caggtccagtaacttacctttctctaagttcaaagacaggatggtgttttcagctttagggcagtaaggcccaacctgtaagcgtgaaggcctggcttcgggtctgactgctcattgacctgggcactagtgcagagatttgcacatctctgcccgggtcgtgcccgcccccattaatctgccgggcgggcggcgggcgggcgggctggggggcctcggtcgccgcggtccccggggagcgggctccggcgctctttcccattggccgccgctgcgtcagctggtgcgt

SEQ ID NO: 37910 - DNA, 330 bp, Mus musculus
  source 1..330: mol_type = other DNA
gcttgtgacacaatcagggcgtttgtgacacaaacccttgagggaggccggccctgggggcgcgcgcgggcggggggctcacatctgttggtcgctagcgtgttccgaaacaataactccttatgaaatatcataaatatagatttaaatacagtaacgcgggacccgcgccttcgatttgatcttttaatcttcgttggccacaattaaaacaaaccctttgcataaaaacatatggcttttgctataaaaatggccattaatagcggccgggcggacacgtgacgcgcgtggccaatgggggcgcgggcgccggcaacttattaggtg

SEQ ID NO: 37911 - DNA, 290 bp, Mus musculus
  source 1..290: mol_type = other DNA
cctatagccctttctttagagagccccagagaggctcgcaggagccgggcaccactagtgccgcggttaagtggacctgggccgagctgtccagggtcaccccctccccctgctccgctaggccacgcgtttcctgctcgccggaggggggggggtcgcgggagcgcgcgcctcagcgggcgggcgcctagaagaggccgcggccagccacaggacccggctcttctttccttggcggcgacagtggcagcagcggaggcggcgaggggcgaggcaaccctacgcccgca

SEQ ID NO: 37912 - DNA, 361 bp, Mus musculus
  source 1..361: mol_type = other DNA
gttttccttccagttctgccagcacagaaagtcctctaaaggtagactaaggcagctcactgcattgatcatcggccgatggattttggaccgtccaaccatagcagacatgggagcacccaaggttggctggggtgttggggggggggggtacaggttcaagagccaggtcccccaacctccactttgaggcagcccccacagttccggcctttgagccataggtgtcaggatttattcgcgggctccgagggcgccctcagagagcggccccgcgcctacgaaaccaggagtggtcgcgtggaaactctggctcgggattggctgcaagcgcccgccgcggtgcgggggggattgcttt

SEQ ID NO: 37913 - DNA, 434 bp, Mus musculus
  source 1..434: mol_type = other DNA
aaaaaccctctgggtgtaccttgtgagtcctttcagcatgagagatctggctctaggtaccaaggcagagctaggagtctctcgggaacctctaagagtgctgggcaaggaaagatacggactcggtcttgaggggcagggcagaaaggacagagccttttgttgcccaccccaccagaccctaggctctgaatgtctttggttgaagattaaccaaagtctctcaagttgccagagtgagtctagccaggagaactgcttgcaggcaggcggcgggcgggcgccggccaatttgcatatttgcgccgctataaacccggctggggttttgcagcaatttcttagatgtaaaaatgagatctcaatcgcaggctggatctccagcctcgcctaggctcgcagccgccacgaggccgccagggagcccggaaccc

SEQ ID NO: 37914 - DNA, 509 bp, Mus musculus
  source 1..509: mol_type = other DNA
cagcatactgccagagggccctccttaagcctccttttgactgatttaaaaacaattgtgaataaggaaaatggcttcctttggacaaaaaggccaaatttaagttaatttgtttcttttaatatattagctaagtgggctactttatctgttaaatgcgctcttagcgccattgaatcccagccgggactggagtcccgccgcaacacggcttttatgctcctgaagcccttgtagggggaatttacaggcgcccacctccggctccccagcctggagctggtctagggaaaaaaggaaaaaggggagttgtatttttttttttttctgcttcataaaccttatatgcttataaaacagcatataaaaatttaacagcgtaaagcgctgggcgctgcctttatacgcaccggagcggccggagacgactcggggctgctgctgctctcgggtcgccgccgtcgcgccgccgcctcctgacagccgccgccaccgccgccgtccgaact

SEQ ID NO: 37915 - DNA, 380 bp, Mus musculus
  source 1..380: mol_type = other DNA
attcgtcagcttcagcagaccaggcagcttgcggaccggtgagcagaagtgcctctggctctgaggagtcactccgaacccctacaggcagcgacagcgcggacaaaccgcggagggaagcggcacatccgtgccggcgaagcctggccccaaatggggtccagccagggtctgaggctggggggcttcccagagcctcccccagagagtatccctcacccaccggggagtggggggaggcgtcacgcccatgagcaaaggagagctgcccgggggcgcaccccagcctttctgcgcgcggggaggccccccagccaaggtgagaacaccgtgttgcttcccctgagggcttgaccagcacctcaaggatggggatagat

SEQ ID NO: 37916 - DNA, 393 bp, Mus musculus
  source 1..393: mol_type = other DNA
gacgactcggggctgctgctgctctcgggtcgccgccgtcgcgccgccgcctcctgacagccgccgccaccgccgccgtccgaacttgaagttgccggcgcgcccgtggccgccgccgccaccgccgcagcggaggtcgcagctgctgcttggggccccgtgccgtaagccgtacgttggccgagctcttggccagcacgtcgccaggcacgccggccgcgctgggcgcctgcagacagtctctgtgcacgagctcctccgcggagtagcagtggggtgccatttagtggcgggctcaatggaagttccgcagtagccgagcttaacatgattctccactgcagctgcctctttgaagcgatctatccccatccttgaggtgctggtcaagcc

SEQ ID NO: 37917 - DNA, 609 bp, Mus musculus
  source 1..609: mol_type = other DNA
atacaagctctctctctctctctctgtgtgtgtgtgtgtgtggtgtgtgtgtgtgcgcgcgcgcgaatatttgcgctcgcgtgcttctgagtccttaggcctaattgaaattgtcctctagagtcccagagaaatgtcctgggacccttgctccacaggaaacaaacgcccttgttccccaggggggggtggggagtgcaatctcggccaggcgaaagctcccacatccttgggagggtctagctgcagaaagatgtatccatccctggaaaacatgccaggacatcctgggccagtccaaggcacctccgcgcgaaacccgggaagggatcggggtccctgtgttcccagcccacccccgcctcctccgtgggtgactgctgcgcggccgcgcggcgggagctagagctggcgcagaggaccgcgcgggcggcggcggggacggcgggcccagcgcggagccgagccggagcctcccgctttgcatacgccgggggcgggccgggggcgggccaatgggcggccgcctggcgcgaccccgcagggcgcgacccgcccccctcgctcgggccccggccccgcgcgccgcgctcggggctttttaaaaca

SEQ ID NO: 37918 - DNA, 202 bp, Mus musculus
  source 1..202: mol_type = other DNA
ctcttttgctccagcaggggcttctaaaatcgaggaacactgtggatatcggtactttaggctcaagctccccagacaactgaggtgtcctttagcggttgtattaatactcagaaaacctgggtttgtaaacagcttccaaagagtagctatggattctttcacaataaaataaaatttcaaaagcatttttcaattacca

SEQ ID NO: 37919 - DNA, 239 bp, Mus musculus
  source 1..239: mol_type = other DNA
ccccagctgggctgctggctggaactccagccacggttctgggacttcctacaaaagagaaaaaggctctttgggatcctttcatggtttttctcctaataggggctcaaccctgcctccttaggatctggttgtgcaagtgttctagtcctagcttgtagacttagccctaagctagagcgtggcattgtaaaactcaacagtgacaaagagctccaattctcggagactctcggaga

SEQ ID NO: 37920 - DNA, 360 bp, Mus musculus
  source 1..360: mol_type = other DNA
aagggaaaggagcatcttgcacctgtactcggcgttcaagggctgtccgcggaggggactgggggtcccgggccaagcatggccgctccagcagaccgtggctcggcgcccagccctgcagcactgcctgctctggcctcccccgccacgctcccgggaagtcggagggccggctcgcgggctcagaggcagcgggctgctcacggctctccatccccggactctccagagggggggagggggaaaagctcctaatcccaggctccctgggatcttggctgagaagaggagctaaggcgacaaggcaggcgccgggtagccccagcgccgtgtcgacggcgaccgcggagatggcagtgg

SEQ ID NO: 37921 - DNA, 587 bp, Mus musculus
  source 1..587: mol_type = other DNA
gcactcaaacatatgagtctatgggggctaaggaaagatcagcaaaatatctgtttttataatatacatatatactacttcctgggtttaaatgtaccattagattttgttcaaaagatgcaggttgtagaaaattttaaacattgacgcatttcttggaactcagtaagttcctagaaattctactcttcaaagagaacagtgctattaaattacttccctactacttttcaaatacgactggaaaaaccattgagttgtatatcacatagatttcagttattacacacatggtagattctgtgattgtgtttcaacagacgctgaaaatatatatgttaaccctgggaggtccatgtatttattactgaagttaaaaatgagtccctatactaggaaacatttcctttaatactgcagtggcagttgctcagtgcaggtgctcggaggaggcggtagtgagcgacagccaccgcctcccacacaccctgggtaaacaagaattctctcacccactcaacacagtgctccgccccgcgctgggcggagtccaagccgagcaaggagagcgcgtgcgcgagctgtcc

SEQ ID NO: 37922 - DNA, 481 bp, Mus musculus
  source 1..481: mol_type = other DNA
aaagatctcaatttcattatattattatagacattgtggtgtggttgttttctagagcagcacaggaagaaagatatggaagtgaaaataatttaaatttctaaaattacttttgccttatatagtttctctgttaaatgtgcagtttgaattggaacttcatggaagcaagtgtattttattcaaatccatcatatcttgtgttggaatattacttatctcatgaatacactaccgtcttaatcataaatatttctttaaaatcaacagtaatttttccttttggaggaccagaatgaaagaacttgaaattagagttttgtatattattgttctgttttgtatatattgaaacatgtattagcttagactgatatttaagacaggtccagttaatttgtttcaaacggactgtgttttgaggccgcagagcatgcgcagcagcagaggcggaagcgagcctccctggggcggaagtgac

SEQ ID NO: 37923 - DNA, 451 bp, Mus musculus
  source 1..451: mol_type = other DNA
taatgaatattttgcccactaaaattggccattaattatgcaataattacatctttcaagtaagctctaattagtataataagaaaacaccctgccaggtgggaagacctacctagctggtttttgtctccagctgcatccagcagctgcctttagactaaagagtgggtcactgtttgtcaggaaatattacttaatggtacataactgtgtggtgttcagtaattagtcctattaccattcactcatttcttgacacatctgtgctaagtacgatgtaattcatcctttcactggatggtgcactaaagcagcttctaccttgtagtccagcagaatgtactggagagaagtccaggtacccaggtacctgaagtactcctgtcatagagaggggtcactgtcatagagagaggtcactgtcatagagaggggtcactgttatagccat

SEQ ID NO: 37924 - DNA, 467 bp, Mus musculus
  source 1..467: mol_type = other DNA
tcatgaatacactaccgtcttaatcataaatatttctttaaaatcaacagtaatttttccttttggaggaccagaatgaaagaacttgaaattagagttttgtatattattgttctgttttgtatatattgaaacatgtattagcttagactgatatttaagacaggtccagttaatttgtttcaaacggactgtgttttgaggccgcagagcatgcgcagcagcagaggcggaagcgagcctccctggggcggaagtgacgcaccgccggctctccgcttagagaaggtgtagccggtcgggcgcggcgtagcgtgcggggcggaggccctgaccggtaaggtttgcggacgggccgcgtgctttcgaggtaaccggcgctcgcgctccgtctcggccctggaacccgggcctggaacggtctccgtggtgacgaagctctctttcccaaggacgagcttcccccg

SEQ ID NO: 37925 - DNA, 482 bp, Mus musculus
  source 1..482: mol_type = other DNA
gtaactgcacttaagaggctatctggtcaacagtatggcttaaatgctcacaggatgatataatatcttctttttaagtgaaaatcgaatttgctttgactttcatgcactgccagacctgagccacaacacgggaaattgagatttttgttttctcagaagaatcagatgcacttgacaaccaagcgctctattttgaaatttaaataaagctaagatttttcttctagggggaaagcttcattaaaatcaattagttcctatgactttttaatttttttttttaaatgagaaagtttaaagaacaaggatgtgtaattaatagatgtgtatctattgctccaagcggactgcaggcagcggaggttggggcccgcacagctgcaggcgcgcgcctgctccctcctccagctcccgccgcctcccgctgcctcccggaggctcggcgctgcgctccacctcgcgccccctcgggctcgcgc

SEQ ID NO: 37926 - DNA, 331 bp, Mus musculus
  source 1..331: mol_type = other DNA
cccccttcccgagagtggagagctaacctttctccttgatggacccagacacaagtgtgtgtttggacttgctgacagggaggtcagatatgagaactcgtggctggcactctgcagcagagtccatgggctgtggaaaccccgtcacctggtttccagctgaaacccttgtctaccatttatttatttgtttctagaagaactatttatttgtttctagaagaacaattcacagacaccgggggtcccacttgagccaagggcgattgcaccgcgaaggccctgagcctggaactgggcctggggcttcagttctgccagatttaaatag

SEQ ID NO: 37927 - DNA, 421 bp, Mus musculus
  source 1..421: mol_type = other DNA
gtcctgtcaacagtccacgcgccctgcctctgcgccgaagccgccggcgaaccgcgtccgggctagggctgaccagacgcggagccacttagttctttctccgcctgcatcccccggggggcagagtgtgggaagaacggtcccttccggacgctgcttgcgcgtcccccaggctgctcactccggctgcactcccaatccccccggatcgcgagcgggcaggcgccggagacgtgggcctagcggccggtactctgcagccaagccgcaccccagcagctcttggaagggatcccgcctgcagcgggggaatccgtttggcggggagaatccgcgccagggaatccagcttcgagcgcccagcgccttctgatttggctccgcgaacttggcctgcggagacccgggcgagggccttttt

SEQ ID NO: 37928 - DNA, 333 bp, Mus musculus
  source 1..333: mol_type = other DNA
ggctactttcaaaatgttgctttgcatgaacaaataataagcaacagctatctcttgcttgttttcattgtgcactattgtgtattaataataaaagttaatatcttggagcctgaagattgtatacaggcctttaacactgcaggagaattaatctagctgaaagtctgtccgtgtcacagtcactgtaacagttccacttcgtttttctccttaaaggactgagcaacagtcctgtcaacagtccacgcgccctgcctctgcgccgaagccgccggcgaaccgcgtccgggctagggctgaccagacgcggagccacttagttctttctcc

SEQ ID NO: 37929 - DNA, 615 bp, Mus musculus
  source 1..615: mol_type = other DNA
tctcagaagcataggcactgtccctgccagtgtaagctctctctgctttaggacttcttgtggcagggcagggaccttcggttcctgaccaactgggaagggcgcttcccagccttggtggcatcctggcctgctgtggctgatccaagggaagcagcactgtacactgctgcccggcccgcctcgcgtccctggcggcgtgcccaacacctcggggcaggctccgagtcctgatggctcctctgcagcctccccctgcagccagggttgcaggagctgtcaagccggccgagcggattcagcccggagcgccggcgttcctctccttcctttgtgtgcgcgcgcgagccgagttggggaggagggagaagggggaggtcgctgtctatctgtctcccccgcctttgcccgggccgctcgaagtgcggcggcgggagagtgccgggagccgaagggcgcccaggttccagtcgcgcgcagggagcgggcccgcggcggggacagcggggacgccgagagaggtggtcccatcctcctggccggccgccttggcctcgctgtgcccctgccacctcgacgcccgcagcggagtgcgcccaggcgccgagagggacg

SEQ ID NO: 37930 - DNA, 272 bp, Mus musculus
  source 1..272: mol_type = other DNA
ggaagcaggttcagtgctcagttgagctagacaaacattattttaggcccactgcccattttggaacctgaggagagaacaggccgcattgatgtctgtcatctgccatctcagtgaaattattttctgaaatctattgattttttttttcaaaaataccttttaaagagaaagaacttttttttttttcaaagttgaactccagacaggaagaatgtttgtccaagactattatactgggcatggtctgcctagatgtttgacaaatggcc

SEQ ID NO: 37931 - DNA, 457 bp, Mus musculus
  source 1..457: mol_type = other DNA
actgataaccaaccatacacctagcagcgtggttttgaagttataaattatatcacaattaaaggtcatgtcatgtcacttggcaccaaggagctccccattgcgttacactgatacaaaatcccagttgtcaggaagtaataaatataatctatcatctatctatctatctatctatctatctatctatctatctatctatctatctacctacctacctacctaccttgatgtctttcttattagcaaggtaggattgatgtcattattgaaccttcatagcctttcccatggaaatccctggattttcagtgttacagatgagttctcctttcctgagagctctttagaataaaaatttctaatacttagaaatgtaactcagcatgctgcaggccttggcttagcctgtattttgtgaaaaatgaatacactcacttttcagaagtgtttttag

SEQ ID NO: 37932 - DNA, 290 bp, Mus musculus
  source 1..290: mol_type = other DNA
ctcagagtctgcacttttgtctctgtagcagtgaagaagtatacatgtgcacacacacacacacagaaatgcatatatctggagatcagatatcttataatattaaccattagaaatgtgtgccacatgagagcactcttaagccttgcttcaggctggcatcctgtgcgaggctgaacgttgtgaagatgagatctgtgcagaaaagaatgctcagagactgaattctgtcgacacatgcacatgtaaaaaacaatcccttttctcttttgcagctatgccggtgccac

SEQ ID NO: 37933 - DNA, 487 bp, Mus musculus
  source 1..487: mol_type = other DNA
aatcaggagttaagcactgatgcctgccataatgggcccaggagccgtggggtctgtaacccacgagccagagcctccctgttttcagtgttagagagctaacaaaattagtcaacaccttctaaggtctttttctggtagtccctaaagccgttctctcaggcagagcttgctgagtctgagatagctcacaccccaagttaaaagaagactcaatttataagtgagtatcatttgcaattcagcaggaatgccaataattttaaagatgaatttgtcaatcaataaaatttccaaaagacccgctggccactggctctcgttccttgtgtaaggaaaggcagtttgcagcacaacactcagtaagtcaaggctggcagccacacaaagaaccccctgcccaggctcagggcattcatgttttcaatacctcctgcctgagctagagaacaaagctgcaaccagttacaggagcacaaatccagcc

SEQ ID NO: 37934 - DNA, 291 bp, Mus musculus
  source 1..291: mol_type = other DNA
tatgttcttatcaccatagagactataaaactttgatttgtgttcatctgataactggaaaatacatgtgatcagcccctgaggcgttgttatcaaaagccttgaggtgggcatcacctctttccctgtcaaaagtttagggttggcgccaggagaaagcaggacctggctccttaaagctctgctcctggtgccctcccctcccaggcggggcgggctctgaggcctcagacgagtcctggggcccagagcaccgggaggcgtctgcggtcgcgtgaccaaaccagctgg

SEQ ID NO: 37935 - DNA, 423 bp, Mus musculus
  source 1..423: mol_type = other DNA
tgagtgactgctaataattcgtcacttattttaacaattatacagcttaaagttctaaacgcatttcagatgtagtccattgctgcaatctgagaaccaactaagtgatatattatttattaaactacactaagggaaaaaatgcctgcactttagcccttgagagcataacacttttcttggataaaaatcctgacaacagtgcattttcatactttcatgtacttagaaattccagagaccaagcttccagtcaagaggccggcagtttgaatccgaggattttgtagacccccatgggtgacctgccacccgcgtgcgcatcggagccccgcccaccggtcagcccctccgcgcagtggccaaaccctggcgtggatttggtagcgtgcgcacagcgcagtgagcatgcgcgagcgcgcc

SEQ ID NO: 37936 - DNA, 215 bp, Mus musculus
  source 1..215: mol_type = other DNA
attcactgagagtggtgccacccaatggactatgatatagaagtgtaataggtaaaaattgcgaaccttaaagcatcctagtaggtccttagagtttctgttctaaattagtaaccatagagatgctgtgtctggtctttccaaaagatgcctgccattggctgggaggcgcctgagggacagcagcgccagccagtggaaggacgcctttccct

SEQ ID NO: 37937 - DNA, 478 bp, Mus musculus
  source 1..478: mol_type = other DNA
ttctgaaataaccacgaataaatgtttatagaatgaatgctatttaatgtgtggaagccaagtgttcagacgaggactcttctactgtgtctgctgggcacgcagcagccagagcattcacgggcaggctccttgctttccaagcaggggttcaattttccagattttaagtcatataatataaattcaagccaaatacgcagcttgatgtgcgtgtacacttccttctgggttcctgggaggaccgaattttggcttctgtagaaagcccctggcaaggaccaagcaatctgtacttctgaggggtccggagccagccccgccccaccccgccgccacctgcagagacgggcgccccgcccaccctgacgtcaccgggctccgggcggcgccgagtagggctccggggattggccagagttcgtgacgtcacgagccggggcggccccggactggcggggccccggggtgcttgggt

SEQ ID NO: 37938 - DNA, 487 bp, Mus musculus
  source 1..487: mol_type = other DNA
tgggaggggaatcctgttaagttccatttagagaaacccacaagattttaaaatttatacagcctgcatgtcaaaatcagtgtatacaataccctagccaggaaaaggtgcacttcacgtgcggcaggaggggccgcctgtctcctggagggcggagccaccggtctgtccatcaccacatgctgggcggggcctgggcgggtcggcctagttgtagggcagagctagagcagcgggacccaatctctgcgctttgcctcgattcggccgccgctcctccagtgccggccgcgaggcgacggttgccggggcgcgcgccgcccgttcctctttcccgttgcaagcggctggcgcgcagggaggcggcccccaatccggccgggcgcctcccactctccgagccgccggggagccggaggatggcggcggtgacagcggccgcccgggaggaggcggtgcggaggccgcgaagcgcggcagcaagcgg

SEQ ID NO: 37939 - DNA, 563 bp, Mus musculus
  source 1..563: mol_type = other DNA
aattgagttacaggtacatgaatctgcattatttcctccagttatttattaatttacaaatatcccaaaataaaaagctgcaggtgcactagaatcattcagtcacttagctgcagcactgcagcacactgcaggaggagggaggccttcacgcatgcaagaactcataaccatgactacatgtggccaaaaatctcaaagcacttttgtttaactgtcaaaaacgtttaaaaatatttattcggacggtttattaacatgttaattcctttacgtaattccttacagtaaaggaaaaggctctagagaaagtagatcaaactgaatcttattttgatcttagtttgcttagggggcgggccttggctctccgcggccgtggcagagctggcacgacgagttcccagggtgtcacccctgggcgaactgcgaggcctgcccactcccactgcgcagtggccgctcgtccgatgcagtgtgcggcggctccttcccgggaaacgagacaggggggcagcgctacggatggtccccgcctccttccccggagcccacccgagccc

SEQ ID NO: 37940 - DNA, 482 bp, Mus musculus
  source 1..482: mol_type = other DNA
tgtgcatcataatatgtatgtactcatacacccaaaatgtaatacagaattttaaaatgttattccaaagtccatctattttaaaagtcttgatacatttctagcaatgcgaacaagttaattgagttacaggtacatgaatctgcattatttcctccagttatttattaatttacaaatatcccaaaataaaaagctgcaggtgcactagaatcattcagtcacttagctgcagcactgcagcacactgcaggaggagggaggccttcacgcatgcaagaactcataaccatgactacatgtggccaaaaatctcaaagcacttttgtttaactgtcaaaaacgtttaaaaatatttattcggacggtttattaacatgttaattcctttacgtaattccttacagtaaaggaaaaggctctagagaaagtagatcaaactgaatcttattttgatcttagtttgcttagggggcgggcct

SEQ ID NO: 37941 - DNA, 401 bp, Mus musculus
  source 1..401: mol_type = other DNA
ttttaaaagtggtttacttcctgaagggaatgacatacatttatttgacctaagattcagtcatttttagattaatttctgagggccaacggcagtcattgctctagaccaagatgttttgtgtcgttctattttaaaaagaggaaatagattcaggtagtgatcctaagaaaacttgtaggatcagccttcccattccaggaaggctgaggcaggagaactgccgcaaggttgacctgggcaatcgccgccgactcgccaatcagcggcgcctcaggcagggcatccgagggaagctcacgccggcaagccggcagccaatcctcagcgcgctctctgtgcggctccgcccgccgctctgcactaccgcgtgggtggcggcgcactgctctttttagcag

SEQ ID NO: 37942 - DNA, 501 bp, Mus musculus
  source 1..501: mol_type = other DNA
cctaaaaaacagctgaaagagggccttgagccaggttcattgccctctagactgtccactgacaacaatagcacaaggataatgatggtcttcttgatattttctcccggttgggcccatcatctggctgactggctgtgaggtgtccacaagtttgggagcatccaacctatataacttctgcaagagctaagtaaaatcacttataaatagtccgaggaacatgtttcttaaagacagaggctcactgtgtattttaccaagtgctgggattacggatgtgcatcaccatgacccactagagttatagtaactctaggttccgattttatgtgactttatatactcttctaacgagctctggacaacagagaacgctcgggcatctactctcagaagctctgccgaatctgcggttgcagacgcggcggctgcgcgcgcctgcgggaagtgcggctgcgcgcgcctgcggcctggctgcgctatttcatcatgcaccgg

SEQ ID NO: 37943 - DNA, 346 bp, Mus musculus
  source 1..346: mol_type = other DNA
agagtttgcttaagcttttaacccctgcacaataggtccacttgtcaggagcaaagcctgtgtgctcccaagccctgcacctgtcacctttcagagcagggatgcgcagccccacctggttctgggactcaggatctgcatcccagcactggagtccaaatccctgttgttgttgttttgatataatttcaaacatacagaagagttgctcaaacaagtggggagtcctggtcccagtagtctcagccaacccccatgaatcctcgggccctcctggctctgaggagctacagccccagcagcggccgactgtggggtggtgtcactgctaccctgggggaggcgg

SEQ ID NO: 37944 - DNA, 178 bp, Mus musculus
  source 1..178: mol_type = other DNA
gggaatcattaactcagttaaactgtagagagatttgaagatctctggtcctcctacttccccagcctggcatgagtgaagcatccctaatgagaccctcaggccctcaatcaaatccagccaggaatctagcattctcttgcttcctagctcctccctgagaagggaggtcttataa

SEQ ID NO: 37945 - DNA, 436 bp, Mus musculus
  source 1..436: mol_type = other DNA
acctttctaattttataaatgttttaaggtttctcagaattgaataatcatacaaacctaagattttgtgagtatcactaattttaagaaaaaaataagaaacattagtttagagaaaataatttgtatgagcataacgttcctaagttgaggtccaacacttaactgtgttcagtgttctaagaagaccctggtgccacctgttcaccagcttgcaggctacatacaggattgcaacggcgttttattatagccccaagggactggcaaagacctgggcttcggcagtttccctctagatgcacactgaagagggtggactgtcagggccctgcttccctgccaggccttcagctgctggcacagcaactggcagagagtagcggcttggaggatgctcctccctcccttctctcccctagaacgcttgtttccc

SEQ ID NO: 37946 - DNA, 370 bp, Mus musculus
  source 1..370: mol_type = other DNA
cctgcaaggctggaaacctctctagctactttatctattagagaaaaaaaaaaagcctaattgtaaagaatgataatgcagctgcttggcccaggccaggacattggaggccagactggcccacagatttctcagcctgagaacttcagattactaactcacctccagggagggcaatgtccgtctggggagtccagacaacttgagctttgcaggctgggcggggacacctggatttctctggcccccctcctgcctccttacgctgggcagggccgagggctgaggcaggcagacagcagagccctgtctgcatccatcgggccaggagcaaggagaggccttcctccctttgtgctccctaaatagg

SEQ ID NO: 37947 - DNA, 367 bp, Mus musculus
  source 1..367: mol_type = other DNA
aaaggtgacattcactttcaagttccaagtggacattgccagtagcctggccaattattttaaagtagaaataatgaaagtgcgtctcttcactttgataatgggatccctctgagagtgcctcagattcccctctggacaggggattatcagaaactctgcctagccccatgtgagagccacacacatgttgacccagtgcgttaccaaaacattggggcagccctgggcacctttgactgtcaggataggtatactcagacatcaaggtggtgtagcagagctcagccaccccctgctgaggacacggagtcccatttagggctccgcccacaccagttgctactgggaagtgaggcagcagaga

SEQ ID NO: 37948 - DNA, 223 bp, Mus musculus
  source 1..223: mol_type = other DNA
aggttcttcagaagtcaaggcctgaacaggtattggcactgtgaccttatttgctcattaagctcctgcttgaatatatgagcctagtacaagtttgctactggcacactggggtgtcacattcgaggacatctagggctgttacctccgcctccgcgcccgcctgcaccccaccccccgcctgcgaggtctgccggggaggcggtggtctatcgcctccctc

SEQ ID NO: 37949 - DNA, 333 bp, Mus musculus
  source 1..333: mol_type = other DNA
aaaaattaaggaaattaaacctttggtttaaaagaataaataaaataaaaacagcagattgaagcgatggttttcctgtttattgtgtctgaaaggagaaagccaaaatctaaccaaagactcactttagctctacgttctgtctgcatacactccgtgtaagggagcatttgaagatgtctttcacagatcttttattctgaaatcctgagaagcaaccctggtacccagatgcaccaggaggagctggtgatccttgtaaaaggctggtgcattgatgcatgaatgctggtacccacttacggatcacatggctctcatgggtaccagctc

SEQ ID NO: 37950 - DNA, 283 bp, Mus musculus
  source 1..283: mol_type = other DNA
tattcaggcaattccttttttaaaaaaaattcctggctacttaaaaaatgcattgattagtgactttctggctgttcaaaaattaggaacaaagtgatgcctgagcacaagctgttccacttggtctccaagaggctgtcctgggggaagtctccactgtactcaggggatgcccccacccttgcagtgtagctgcatgccccttctcctgttcctcttaagagggagaaggcaagccttgttcagggctggctgagagtactggcagccatcagacctcaga

SEQ ID NO: 37951 - DNA, 291 bp, Mus musculus
  source 1..291: mol_type = other DNA
ctctgaacaggtcagtatgtcttgaaggaatacagttttcttgacatccaaacagtgcaaggatcatggggccctgagttccacgagacttcatgtcctcctgaacaaatcacaactgtggtggtgctggcatctcagtttcactctcctgttcagatggagattcgtaaaaggtagtaataggtgccatcattattcctttccaaaaccagtttttaaacctgcctctgaattttcagtaggattctccagggatgaccaagttgttctctctcttgcccgtgcctgaga

SEQ ID NO: 37952 - DNA, 464 bp, Mus musculus
  source 1..464: mol_type = other DNA
catttgtgtttggtaaaggaagctccatccaaatacagagctggctttttggagaccatctatacataactctactgtacaaatatgacacatggtatttaatcatttttctgttgtaattgttgctacaagactgtttatacatagtatattacatgatgttgagcaagaaaaacaagtcactaaaaggtaataacctctagaatgatttttctcattttaaaacatagagaaatattattttatgactacaaatgtaataccatgcacatatgcataagtgctttctcactgaacctggaacttactaactgagctacattttatctcttttaaaatgtttaaaacattgatttcattatatacttttccatgtgtttaaaaaaatgactttatgtaaagctatggctgttttgcaaaaataatcgatcattcatgttgctatcatttcattaaaggactaa

SEQ ID NO: 37953 - DNA, 396 bp, Mus musculus
  source 1..396: mol_type = other DNA
gctgggtgaatgtgaataagtaattatattattcaggtaaatgccctccacactaatatatagcagctgtttaatattacctttgcctagtagcaatgctttaatgcctttatgtacctttaaggatggatgaatatctgtgacaaatgagtatatggccaattactgggaaatgattgctaattacccaattcattgagcaagtgaaaggtatatacccttgttttattcctttgccaaatcatatgaatggaacttgacttgaccaatgaaaagttgttctttatgttattgacattgtgcatgaccaagccgcctagaaggcttgtagcattatttgaagaaactctttagggcggcagccacggggcaggtgtggtactcctgcaaaagact

SEQ ID NO: 37954 - DNA, 347 bp, Mus musculus
  source 1..347: mol_type = other DNA
tgagctccacgttaaaagatacatcttacggttgcctgcaaattggacaagaagaaattaaataatagtagaagttttttgtttgtttgtttgtttgtttgttttttctaaaaaaaaaaaagcttgtgaaaaatgctgctttatagactttcagtcctctggccttaaaagtaccagattccttaaaatttatagtaggaaatataaattgattttattgctctgaagaaagatgcaaattatctctgaagtttagcaaaacttgggatagagatccgaacctctctatcgaatctggatccattgggatccctggatctcaaggcggaagcgcgcaattttaaagt

SEQ ID NO: 37955 - DNA, 286 bp, Mus musculus
  source 1..286: mol_type = other DNA
aacccacagttggcttgaaatttgcaaacccgccctgagttcgaggctagcctggtctaaaaaaattttgtcaacgttgaatacatgagtcatgaatatgtcttcttgctaaacatttaaaaatcaagactgagactccgccccgccccaccggtcgtgtaggccgcgccttcagctgggggggccagctctcgagcaggctcaggctccgcccatgccgcctcagacccagccgggacaggggcctcagggtaccgccccgcgctgccggaggcggctgtagcgt

SEQ ID NO: 37956 - DNA, 334 bp, Mus musculus
  source 1..334: mol_type = other DNA
accagcacttttaaatgaactcactatttagcgaaggacagccgggaattcctgatatcctttattttcaaaactggacttgttctaacagttgaagttaggaagtagtttcgttttcgttacatgtatctttaggcaaatctataacatttttgcttgccaacaagcaaggcttccaaggccttagcaagcggaacttctgaccggggtgcagtgctggcccccactctggcccagtgaggatgggtggccggcgcgaccccgctctgctacgcgcacgcgccttagcagcccgggaagcccggacccagacgccagcgggcggggtccagcc

SEQ ID NO: 37957 - DNA, 524 bp, Mus musculus
  source 1..524: mol_type = other DNA
aacttgaagtgtttttgtttttttccaagtaggaaaactgatcactaaatcgttggattctaatcataggctctatactaatttttaaaaaccagctcactcagtgctcaagttttatttagcatctttgctaaaaaaaaaaaaaaaaaaaaaaagaacttgtttggtgccaactgcttatttttctatttggtagcttcccaaaacaaattgagaaagctctgttgatttacttttaatactccaaagctttaataaatcgaggattcatttaactattattgtgtatgtacaagtaactaagtttttaaaaaagactcttaagttccttcctttcccagagcagcaaggggaaactggatccgctgccacgtggcgcggggcctggccgatcctctcccggcttctggaggcggggaaggcagaggaattcccaggccggtggacgcccctcgggctgggcgcggctcctcccctcggcccggcacggggcggacgcgggcggcggggggcgggcgctgcgg

SEQ ID NO: 37958 - DNA, 467 bp, Mus musculus
  source 1..467: mol_type = other DNA
gaaaaatttatttacatgtaaactgcttaactaaagagcctgcttctgtttttaaataagaacattttatctcattaccttctttattaataacaacagcagaaactttcatgttgtgtctaaatgatttctgcctcaaatccttaacactgttatacctgcatattacagttttattctgttttggcgtggttttattaaaatttaccaaaagctgctggaaaatataaataaaatgtaaaagttccttcaagtaaaatttggtttggtgacactaataaatacatgtacattactgtgcacagtttttatttaaaaattggaactctgcccgcttggctgagctacctgccctcagcaggcatgttttcccagctggttaaattctgtaaactgaatggtatcaacactgttccgcgtgcgtcacggggctgtttgcataaggcttagtcaaggctttgggaacc

SEQ ID NO: 37959 - DNA, 470 bp, Mus musculus
  source 1..470: mol_type = other DNA
ctcctgcctgaggatcctacatgcaggaatcagaagcatgctccatcatttctgtttgcacaatgaattgttctactcaagataatgtctatgtcaatttgctttagaccagctaataaaaacctaaaacagaaaaataattctttctctcgcagagagagacagtcacagaatcgggggcgactctcctgagattctctccgttaagtttctctgcacacgctcctaaggaaagtaatgctactgcgcaggtcagacgcagcgccgctgagcctgctgggtgtcgtagtccatgaaggaagccgggtcaccaggattctgggttacagatgcactacttgcatttagtagctaattacgaagtcccgcccccactataagggcgggattccggacgcggacctctcttctgggcggggcctcctcggtttcccccgcgcggggcggggctccggggaagtgtgcggctt

SEQ ID NO: 37960 - DNA, 418 bp, Mus musculus
  source 1..418: mol_type = other DNA
gtgtacagtgtataaataaataaataaatgaatatttttaaaaagacttaaaaagtatcaaaacaccagtattcctgtgcatgaaacctgcccgggagtgtaaaggcagttatctgattatttgaatcagttcttccttcaaaagacggactttttttgtgatttgtcaaagcaaagcgtggctgttgggtcagagttaagataactttggcagaagtgaaactccaggtccctggtgcctgattcgaggccgccaggcccatcaggagggcggggcgccaacgtcgaacagctactggcccactttgacgtcgctccggcgtttaattggcaatctgagaggtcaaattgcctgtgcaggaggctcttcctatctaaatcgctcagattgagggcagagtctttcagagcaccaact

SEQ ID NO: 37961 - DNA, 461 bp, Mus musculus
  source 1..461: mol_type = other DNA
gtttagctctttacaactgctaagattttataacagagaaggggcaagataaaccactttcttttttaaattgtttatttctgtgaagccttggctgttctgagatttgctgcatctgactcccgaatttgcttatttttaaaattatatgtctatatgcatatttgaatgtgggtttgtgcacttaagtacccaaatctagtatgcaagataagtcattttctttaacaaatgtgattgggtagtttaaactaagaaaaattaattaaatgtattatatatgttttatgtatgtatggtattcttcctttcaagggggaggtgtctgagaaacactttcagctactttcccaaagctaagtgtttccaaacatgcttgaaacagttgtgtagagacagagtgccatgaggtgagacctctgtgacatcacagggtaaaaccctgccttagtaagcagagt

SEQ ID NO: 37962 - DNA, 364 bp, Mus musculus
  source 1..364: mol_type = other DNA
caaccctttcagtgctgtggaacacacagctctaaagatgtctcccttaaacagagctcagcaaacctgcaaaagagtgttcactttttttctgattcagttggacagcagctttaggcctctttgaaattctcaaaaaagttctgtatactccataatctatttattatacatataggtttaccatgtggtgcttaatgtgtgatctgaaaattaataatcaagattgccaaggaaagcagattccctgggaactggttgccactgaaattgctacaacttgtggtcacttaataaatatttcacagacctagaaatttgtccagagcatcaggactcacaagtgtgaactcagtactgaaaa

SEQ ID NO: 37963 - DNA, 456 bp, Mus musculus
  source 1..456: mol_type = other DNA
gttgtgattggtaaatttccaaaccactgggatttaaatcaaatttgattgaagagtgtcactcttggctatatagtgagaccctatctcaaattacatataagattgtgtatgtggcatttgaaacaattttctgtggcattaattgcattcataatgccattaagtatcatcactgtttctcaaacattttagcacttgatatctattaaataataatttatttctataagtttgccatactttatatatggaatcataaaatgtctcctattttttaattgattaatacacctacattatattatagtatcactttcaatgctgagtaatatttcactgcatattatattatcacattgaaaatgcattcatctgttgatcgattaagatgaatattgatttataagcacctatctgtctctcttgcattattacactttttaaaatccagac

SEQ ID NO: 37964 - DNA, 463 bp, Mus musculus
  source 1..463: mol_type = other DNA
cagaagttcagcgtcacatatagtggcaaagctttgaggcagaacatgtgtacttgcctctgtttgactttcagacattcaaagcagtgaccctttaatacaggatgctgtaatgactcccaaccataatattatcttcattgctacttcataactgtaattttgatatttatgaattgtaaatatgtaaacgtggatcctcctgccccccaaaggggtttgtaaaagccttcacagcttacggaaaaggagaaaaaagccattttcttcaggctcttatatacttactgtatgattaatattaaaatatgcttgtgttgaagagacttggagtccggttgattagccctactgaaaagttggacacctgaatgagtactgctttgtggcagcagcgcaccgggggcggggccgggggcgggaccgggcgccgggggcggggccgggccagggtgacctccgc

SEQ ID NO: 37965 - DNA, 337 bp, Mus musculus
  source 1..337: mol_type = other DNA
tctgtaatttaacgaactctagttgctaaaaaaaaaaaaaattaattcatttgtgtgcgtgatatgccatgtcatgtgaccagggagaagctcaaatcttcagcctttcctggcaagcctacctcaaaggtgaggtgcactgtggagtgttggcataaacctacatcaggaagacccagtgatgggtccatccgtatccatatggtctcttccgagagaggagacatcaggccgtcttctcacccagccccgctgtctccgcgtcccgcagcgcgctccacagactttgcaggctccgagcccacgagcgcgcgcccgtgaggtggatcgggggcgc

SEQ ID NO: 37966 - DNA, 449 bp, Mus musculus
  source 1..449: mol_type = other DNA
tagggcttccaggagatagagtctgactcttgtaactctgatctacactttcaagatcatgcaggacaggataaaaacctaacccttttccactttaccaaaggcaggaatgcctgaaatcctggctgtttgatattgttccattatgtcaccactaaccagatatgtccagagggcagaaacattttgtcaccaagtaccaatatttactaaatgaaaggactgcaatacaatatttccttttaaatcattacacagatttggttctagtaaggctgtgactttatatattgtgataatagaaatgcaaagatctatttgcttgtatcctctctataaaatatttagctgatttaataattattcttctatattatttatcattattaaatatgtgtacttactcaaaacaataagaacctcccagtggtgatgaatgggagggactg

SEQ ID NO: 37967 - DNA, 357 bp, Mus musculus
  source 1..357: mol_type = other DNA
catttctttttttcttttctcctgaaaaaaaatcacatggatatgtcttctacatgtttgtacatatataaggatgtgaatttaactttagcagctgtctgtgtctgaattaatgccctgtgactaagagatataaacattttagagtttattaatatagcaaaccacgcttctaaggcttatagacaatgtattttaaatggttagggtttccatttctgtaaagagacactatgaccaaagtagtgtggcagaatccaggcagacatggtgctggagaagaagctgagagttctgcatcttgacctgcctgcatccaggagaaactgtctcccaggcagctaggaggagggtctc

SEQ ID NO: 37968 - DNA, 298 bp, Mus musculus
  source 1..298: mol_type = other DNA
tctgtgtctgaattaatgccctgtgactaagagatataaacattttagagtttattaatatagcaaaccacgcttctaaggcttatagacaatgtattttaaatggttagggtttccatttctgtaaagagacactatgaccaaagtagtgtggcagaatccaggcagacatggtgctggagaagaagctgagagttctgcatcttgacctgcctgcatccaggagaaactgtctcccaggcagctaggaggagggtctcttgctaggctcccaggaggagcctagtggaattgtctc

SEQ ID NO: 37969 - DNA, 309 bp, Mus musculus
  source 1..309: mol_type = other DNA
ttcatctcagatgacaccagaacgttaggtttttaaatatagagttcctaagaatggaccatcagtgccgaggctctggccctaactgtgataacaatgtgaggccagattaagcagcttcctgttgtatagctttttgtaccgctgctataaaacattctgtttattctctgaaaagaaaccgttattctgaggtatgtatgtaacttcagacatttcagaattctgtcatcgcagtctgaccagctgttcagagtggcagtgaaacctaactctggttttaaggcagcgcctgcaaaaggagaaccc

SEQ ID NO: 37970 - DNA, 426 bp, Mus musculus
  source 1..426: mol_type = other DNA
ttcaatgattgaccatggtgtcaatcattgaatcttttattaacaagaccaatttcctaaggagagaaactcatgatcagtacttttttcttgtaacatgacccgagtagaagttgatcatgcatttatttttctcgattaaaaatttaaaataattgaaggatagaaaccctaagactgtagccatagctattttgggcagctgcctggtaaagttcccaaacaagtagggaatcagatcattttaggagcagctctcttcctttgcctattgcatcttgggtatcttgtcaggttcacagggtgaaggtactctgagtataggtcagcgccttgcctccgccatgacccgggtcagctgctcctgggaccggcttctcctgccggcgagctgcggggcggcgcgagctgacgtcacggcggtcg

SEQ ID NO: 37971 - DNA, 238 bp, Mus musculus
  source 1..238: mol_type = other DNA
cagctcggggccccagggattttaacaaataggaagctatttctagaacctttcatttgataatttgataaagtgaactgatttttagcgaggcaaatgacagtgttcttcttcttttttttattcctttccacggatataaatcagaaaaacaaaatgtccaaaaatgttctaaactgtgttgtagaagtcattcaaaataaagtgatagtttcctaattgaaagggattctcttac

SEQ ID NO: 37972 - DNA, 267 bp, Mus musculus
  source 1..267: mol_type = other DNA
acaacagatggttaactgtgaagtgtttggtgacaaatatcaaacacgcatttcaagatgtgcagatacaggcacgcactgtgggtctgcaaaggtgaaggaaaatggttctcctgcatttctgttctctgaaagtgaatttaagacgcagtacccataaccaaggcttaccctattgcagtgtgtgcgcacaaccatcagctgatagtgagcagccattcacttgccgcgagccgcgaagcggccgcgcggacgtcaccacagccg

SEQ ID NO: 37973 - DNA, 463 bp, Mus musculus
  source 1..463: mol_type = other DNA
ctgcaccactgcgggcccgcagttcttggcccctgagtgacagggacgctggcgaaaagcaattggttgtgggtccctcagcacccgccgcgccccgccccgctgccgccgccaccattggccaggcgggaagtcggtctcccagctcattctgcgcccgcgggagtgcgggggaagggaggcccgagctgcctgagggctgcgaccgcggggtcggcgctgcggacccgggtgcaggtgcgggcggggcggggatctcagggcaccgagcccgccgcacccgcggaggagggggctgggctgtccgcagctccctgtcgccgaggcgcctcccggctctgcttagccgcttagccgcgggcggcgggtgacctccctgcgtgaagagcatcgcggcgccgcggcaggggaattcgcgttgcggctggccgcgggctcctcccacccagctggcgggcggggc

SEQ ID NO: 37974 - DNA, 450 bp, Mus musculus
  source 1..450: mol_type = other DNA
gctgctcttctggaggacccaggtttggttcctggcccagaggtacaaaataataaaagatcatttacaagcacttagaaaatcttattggaaaaattggttttgtaaaatataagaatatataataagaaacaaatctgacattaacaaacagaagggccacaccagtagatgttttgatctcctgaagaccttgatgtcaccaggaactgctcacaaccaaaagcctagaacaatctggaaaagctttctctggcgtagtttttatttgtttatttattttagaaaaaaacaaggtgcagtccaacttgggcctcaaagaaacgggaccttaagggacgctgtctcttgtctggaacctctcagaggaaagtttcaggttgctggggcttgccaagcccactaagcagcgaggagcagcctttcacactccactgctccgcccagctg

SEQ ID NO: 37975 - DNA, 561 bp, Mus musculus
  source 1..561: mol_type = other DNA
cagcattaaggtcatcagtgccgaccgtccggctctgtgttgccgcagccgcagaagagggcaaagaggctctgtgcactccctgggcctttttatttttacatttgataactagatttaagaaaaataacaagtatcaagtacaacctttaatctcttaaatttcacagtaggtattccaaatatttgatttttggcttttggtaattatataatttttcaaaaaacaaaacaaaacaaaacagtggatttaagactattcatttaataatttaacttcataaaacatcaatactaaattgtaacattgtaaacatgattaaaatatatcttaagctactagggaagattcctggaaggttacagctgtaaactcattagggccttaaaagccctctgctggtctcagccgtgagccacacgctgggtgtccggaggcggagcattggccaagccccgcccctcccccagaagccgcgcccccgtcagcgggctcgcccgcgcatcccgcccctcgccgacaacacgttcctgcgggggcgcgcgcgcgcacctaatccc

SEQ ID NO: 37976 - DNA, 381 bp, Mus musculus
  source 1..381: mol_type = other DNA
agaacccaaatttgaaacatggattctatttaatgtgtattgacaataagaactatctagtcatttggttattgtcagaatttgtagacatgtacttctaaaaggagtgaatataactgtgtgtaaattgttttcattattaaaaacaatcaaacccactaagatggcaccatgttactactctggtgagcacatgtatgaacatcatgatcagtgatgcctggtctacaggcactcatgaaaaaaaaaatatgtgctttgtgtcctaaaggctaaatcttctaagcctgtaacaaggttgccttgccacttcccaaaaacctaaatttcagtaattctaagctctttaagaaatgattacacatacccagtctctgtgtg

SEQ ID NO: 37977 - DNA, 562 bp, Mus musculus
  source 1..562: mol_type = other DNA
gacttaatatcaatactcttcaaactaaagtcacacacacacacacacacatatatatatatatatatatatatatatatatatatatatacctaagtcacactaatgaaagagaacttcagattcagaattgcatatgaatatcaatgcaaatacacaataaaattctagaaaaccgactgcaagaatacattaaaatagtttttaaaagttgttatgtcatttgttcgatttatagtcactgttcagtggaccaatgcccagttttctgttatttaaaaggaataaatcatgataaatagccagtaatttaataaatcagttctttaggtaaaatacctaaatgaaggtcatgagcttaagaaggtaagtgaattgatttgttatctaaaataatggaagcaccattatgtttgtttttgtaaatgagcagtaagacaaaagcaacacactattctttgtctcttggagaaggaccttccttttctgccaaatattctgaaaaatgaaatgaggttcatttaaaagcataaatagtttcattgcacattgtacaaactga

SEQ ID NO: 37978 - DNA, 316 bp, Mus musculus
  source 1..316: mol_type = other DNA
tccactctgctataaaacagtggtcagaaattgtctcaaagcctgtgcagcctgtgatggtcccagagggtgaatcctatagtaagccactttctcaagtgcaaaaaagccttgagtttattccttgctccacagatggggaaaaaaaaatcacccttttagactcctccggggtaaaagctccctctccattgcctggcacacagagtcctggaggaagctcaagttcagccacgataaaactgagggccctctgaactcgaggggaggctcaggccgtcctacccgtcccctccctaggaagaggagcgaaggc

SEQ ID NO: 37979 - DNA, 567 bp, Mus musculus
  source 1..567: mol_type = other DNA
atgatatctctgagaggtttgacaggctgtaacacccccttaataagtagttgtgtgaattatagctgcaatttttgcaaacaaatactcagttataatagttcttgtggtgttgtttagcaccatctacagcagctcagtagacttcacagtgttgcagcagcagctcaaaggattttgcagtgacaactctaaatacttaatacattgtccatttcacaacatagtcacctactctatacagagacagaggggagtgagggccagacttcctgctgagtctctctgtcactggttcccttgcaccagaggcacagtcagccagtcccctaagctcccccagggcgctaggctccctgagctgtgggcctcgagggctggctgaggagctcgcagggaggctgctgcctgtctgggtgcaggcgggactcagccactggggcctggtcacagcggaggggcgcgcctagctggcgtggatctgcccgcacgtgaactccacctccttgctggctcaccgcccagcgtagaagctgctggtctccgccccgctgcagcgccgcctca

SEQ ID NO: 37980 - DNA, 364 bp, Mus musculus
  source 1..364: mol_type = other DNA
acattatcccgaggaaacgtttgtgtggaagtcctccaggaatttgctgagggagaaaaggctgaagcctctcccaggaagaaatatcagatatcagatacttagtaaacaagatgaacttggttgaggacaggtgtcctaacccaccttttcctttaatttcaagtaaacatataagaattgaaggcgttgcttaaacagttaatttctcatgccaaacaagctgcttgtcccttgtttcaaattttagacttcaatttatttatttatttatttatttatttatttatttttcaggattcagaagtcaactgacttcaaggggaggagcttggcactcaaatccactctgctataaaacagt

SEQ ID NO: 37981 - DNA, 602 bp, Mus musculus
  source 1..602: mol_type = other DNA
taccagctccctaatagctaagttctcagagacttactggaaaatgaactcctattttataaagtgtttctccctagaaaacaactttagaaaacgttttctattaccttggtttatagctatagtgtagcattaactatgatcctatttaaactgattatatactgtcattcacatatcagagctaaaaagtacagacaaactactgataataatataagtacattattatctataactatgtattattactaaatatcactactctttgaaaaaaaaaaccttttaagatcaaaactttaaatagacttttgtgtggctttaaagtttcaatttttagaattcttgtttttagttattattgagattaattttaagtaataatccaaccaagacatattgataaaatatattcttccagcttaaattgtgacaaaatcttttcttgatttcctgatgcaataggacaaaacactaaactctttcatcgagcataatgaaattccactgtccactgccaatgggaagtttccttctaaaggggttcctgagtgcactgcaaacacagaaacctgtttcctttgcgcacatcaaattgtcaa

SEQ ID NO: 37982 - DNA, 813 bp, Mus musculus
  source 1..813: mol_type = other DNA
tcgcgcacgctccctaggcgctggcaccgtgtgcgcgagtccctaagattcaagcccaaaggtgaggggcctgacagccacctgctgtcagcgcggggttcactttccggccgggtgacccggcgcgagaacacacgcaggagcaccccacgcccgcatcccgcgatcccggggtgcgccaccactctacgtggcgggctccggaggcaggggcggtcggcgtggagctcccgcctgccccaccgcaccgcccccgcccccgctccgcaaccggagctcgcgccaactctgcgaccgagacccccggattgcaggagcgggccacgccgcgcagtgcccacgcccgccaggcgagtcccccccaaccccccgctgggccgacggccgagccggggagagtcacctggtcgcgctcagtccaggccccacgcgagtcctctgcaccgcgtcgctaccttggagctgcgggctggtcccgacgcggcgtccactccggctcggccgctgtcccgctcccgcctgcgccaccgcggctgctccgccagagcttcgcagtcagagcgggcggggcgcgcggcggccgcgggtgggcggcggtgtgcgcagcggggccgcggggcggctgcagcgagcgcctcccgggcaggccgcgctcccggcggcaggaggcggcgccgcggcctcggagcgggtgacagtgtcgggccgggcgggggcagcccgagggcggcgtcggccaaccgcgtcgctggcttccgcgcacgcagcctggcgcggcgacacgcgcacacccgcggccgaatcgggggaggg

SEQ ID NO: 37983 - DNA, 397 bp, Mus musculus
  source 1..397: mol_type = other DNA
gcatgctggctgcttccaaaatgtatgaccttaggaacatattatgtacctcgaaatggtcctatattctagcagaatgggtgtcccagtacaaccttagaaatatttccatctctgaagagatacattttcttcaagagggaaggaggccgggtccttgttaccttgttagctacagagttgtcaagacatctctgtcacagagagcccaggcgcagcgctgtcccattcttcagcgtcccaccgcgcgtgtgccctggcgactcgcagggcgcggggatctggcgctcggcgggctccgctccctcccccgattcggccgcgggtgtgcgcgtgtcgccgcgccaggctgcgtgcgcggaagccagcgacgcggttggccgacgccgccctcggg

SEQ ID NO: 37984 - DNA, 403 bp, Mus musculus
  source 1..403: mol_type = other DNA
gggaggaggtggttattagaagctcttccggagcttgccaggctgctgttggcttcccgcatcccgccaggcgagcggctcgggagcatcctgcagccgcggctccgcgcgccggcctggcccgctgctcgctcccgccggactcccccgccaccgcgcccgccgcgccagctccggggcccgtctcgcgccgaaggggtggcactgagagctggccgcgaggcgccacgaccgcgcacggccccgggtggaggggctcggcggcgggggagggcgcgggcacatccggcgcgggggtgcccaagttgcggcggagctgggacccgccaccgcggcccccgtgcggccacggccaccgtctgagcgccagcctcgccccccgtctttaaatctgtgaccagaa

SEQ ID NO: 37985 - DNA, 416 bp, Mus musculus
  source 1..416: mol_type = other DNA
atggggttgaaaaccccttcccaatcctttcagcatacaccaagctttgatgactgtaaactatatctctataaattgctaaacttattatcatacaacttgattttgtttatgtaaaaacatcatggcagtttaattatctaataattacagtattctatgtgagaatgttttattatcttgaagatgaaaaaaaatcatgttgcatcttttctatttttaatcataccaaatttgctttatcaaaaggcttatagttattctcattctgagattgactttaagtttaaaagatcttaaaagtagagaataatatgtcaaatatccttccactgagaccgaacaagatgtctcatcttaaaggttttcaaggaggtcacatatgtgactggtaatgtgaccacactcacatgaga

SEQ ID NO: 37986 - DNA, 327 bp, Mus musculus
  source 1..327: mol_type = other DNA
tctagtatagtatggtccagacaagggattaatgttgttctcctttaagtagattaatctcagagaaggataaagtatcagatattgtctcttactaattactgtgtatgtgtgtgcgcgctctgtctcacagaacagaagccagagaacaacgttcagaattggttttttgaacaaaaagcttattttgtaaaactgtcttgtaatgattgagattacacaattaaaacaacataaatttagtgaaaaattatattgcatattgacattgtggaacataaccgacaagctccgaattaacatttttctgaccacgcgacgcttgga

SEQ ID NO: 37987 - DNA, 400 bp, Mus musculus
  source 1..400: mol_type = other DNA
aagctcagcgtagcgcgatatcctccgcgaagggctgcagctttactttccattaaaaaaaaaaaagcacttaacacttctacaaattaaatgtgcaataggtaagagctatatacacacctctctatatgtatttctgtcacgatccaggcttggagggatctcaggccaggcgttggtgccccgaaggctctaggcgcgtccagcttggccgggagccgcctaccctgggtctcatctgagctggggccgctaggacaccagccgggagcccgccactcaggtcgcctgggaggtgacacacacagtaacttttcactgggtgtaaaaactctttctgcccgcccccttctttgactgggcagacacgcgactggcgcgcgtgccgctttttaaaggg

SEQ ID NO: 37988 - DNA, 354 bp, Mus musculus
  source 1..354: mol_type = other DNA
taaaattaaattatattttattggacattttcagtaagctgtgctaatattatcactgaaattaaacttgtgttataatttaaagctgatagatatgagttcctactagaaaaaggtactctcatggagtatttgaatcttgtacactagactctaaatgctaagagttcagccatcagataagatcagggtctatgtgacatgtccacaacactgcttgtgttgttttctcattccccagaagtctgtggtgtaagactaagaataagcttgaatctgtacacacaagcaccctaatgtagagagcttgtgaaatgatgacaaaagctacccagagctctgctgtcttgtgac

SEQ ID NO: 37989 - DNA, 524 bp, Mus musculus
  source 1..524: mol_type = other DNA
cctggttagatttacaaaacatctcacaacctggataggtttacagcatattgtgtcaaggtggaggagatcacatacacacaaagtatatagattctgattctgtttatattattatactcttgacagatgtgcagagactgggagcgcggtcatggtcatgaaaatgtcccagagtacacacacacacacacacacactctctctctctctctggtttgtactttgtcatacacagttatgacaaaacggagaaagtcagagtatgcctggaaccctcttctgtaattattatttcaaagctgaaaagacttgaactccactttgccatggccaaacctcaacaacagtttttgttttagccagcaaggcagggcactcctaggggtggacactgagcctcgcgtggcgctgcgaggtttctgaggaccgcagcgccaactctcgcgccgctcgcacggcacggcagggcacggcacggcacggcacggctcgactgccccacgcgcggacgagacgcctcc

SEQ ID NO: 37990 - DNA, 383 bp, Mus musculus
  source 1..383: mol_type = other DNA
catgtgactgaacttaaagaagttttttttttttcatttcaaattgatctaatgatttaagcaaatgccttggtaaaaaatttgaactcagcttatgagtattcaatatgaaagccaggcttggtgtataagcaacatacattttattttgttaagaattattattattattattattattattatttatttttgcgcactcacaggtgcatgtgactcaccactcatgtttaggacctaactacttgggtaaatatgataaatttctggcagttaggccagaagaaaagctaggttagccccaggcattctgtgggtagaaacttcctcctctagtaggagaaactgctctaaaggaagacctgggaaatcccagttaatgg

SEQ ID NO: 37991 - DNA, 300 bp, Mus musculus
  source 1..300: mol_type = other DNA
gacttgctagtctagattctcagtcacgaaaatgagatttctcaggttgctaattaagcaagttcttaccataattacctagtcagcaattgttaaaacagctgctgagtttcaagccccagaggctgaatttgcagaggcaaacgctccagagtgggcaggcggtctgcgagagtcggcgtctagtcgtgcatcattgttgggggtctcaaaggcgccctccccagactgcaaccccacgagggtcttgtgtgaggttgcacgctggcgcgcagcgggagagagggctcaagctctgca

SEQ ID NO: 37992 - DNA, 516 bp, Mus musculus
  source 1..516: mol_type = other DNA
aaaacattctggccaaaaggaacttggggaggaaaatgtttcccatcttggtccatcattgaaaaatgtaaacactgcttgctccctatggcttgctcagcttgcctttttaaaagacaacctagggtgcttgtgtcaagtccaggataactggtctattaaggactggtaacccagtcttgttgaatgaatgcaaggcccggggtctgacttgaacaaatcaggacttggtagtcacaagccttggaaagtaataatcactacttaaatccttagttcaaccctggaacactcatccagtaagactcaaaggtttcccttttgaaacgatgtggctacaggctcatcctcatctcggagctggaagctccatggcctggggtttgaggcttccagccggcgccacaaactttgggccaatcagcgcggcccggtggcctgggctccccaccgctccggccgcgcctgccccggccgaggaggggcctggccgcggggagccgaggagggaggtgg

SEQ ID NO: 37993 - DNA, 230 bp, Mus musculus
  source 1..230: mol_type = other DNA
taatcaagattgataaagcatgcttacatttttaaaatggaaaatctcgcacagcagttctgcccaggcctgagggattccctgtttaactcattctatgaactgaagtagtacattggtggacaaagcatttgaataagatctttgactaaatttagcacttgtataatatcttatgtgttttgagaattcccatcacgcctacgtaggtgctcgagccaagctgggca

SEQ ID NO: 37994 - DNA, 288 bp, Mus musculus
  source 1..288: mol_type = other DNA
taaacaggttgatggtatctcctatcacatttagcataatgaaaaaacaacctgtccaattaatttattatgcagtactctgtcggcctcgcgtggttgcccgggcccaccgcaccgcagcgagctgcaccaacccagccgcgggcacgcgtgtcctgacccccgacggccgcagttgggcgcggcgaccacgtcccatgcccgtgggccagagcggagggggtggcggcgacagccccgcccaccgggccgtgcgccccgcccacgcgcgaggggaggagctggagc

SEQ ID NO: 37995 - DNA, 505 bp, Mus musculus
  source 1..505: mol_type = other DNA
aaacgtgccctggcacatgggcacagatctcccctccagctcaagcgtggggctgcgtccttcccacttgtttgtgcacagccacgccttaaagtttaacaagaatcacggctccctttgtgaaagttaagtcaagttgcaatggcgtcttaaaatgaagtttaattgacaggccctaatttttaaaccctgggtcctcgtgggagatcggaggaggggcgtgcgtggcggctccgaccggctcctcccgcaccaccgcgacctggcggcttttcccgggccttcctccggcggggcgaggccgagcgaggcagctacggagacccagcctcaggggccactcgcgccccagcgggctctcgcgtctgtgggccccggctggcctccggcccagagcgcccgcagcacgcgcttccttcccgctccctagctccagcccgctgccagcccgcgggacccacaggcggccccgaagtagcggcgaccgccccgccccgtccggtcc

SEQ ID NO: 37996 - DNA, 439 bp, Mus musculus
  source 1..439: mol_type = other DNA
tgatattggtttcaaaatgcagtcatagttggaagatgtgccatctcctggacacaatactactgtacaatattaaaactgtagcattacatgtctggtataggccttaaacaaaaaaaaaggaaatcaagtgtctctatcatttaaatcctttgtggacttataaaatctatgtagtatagaaaaataaagacattactaaatgattattagtgtaaactatcctcgaagctgagaccatgcttcagggatgctcagaccacgaggtcctgcacagtacggaccttgtaggtcaccgcgcttgctcattcggtcagccagcgagggcggagccaggcggggctttaacccgtggtgcaactgggcatagggaggcggccttagggaggccggggcttagggctcattacgcctgcgcaccgagcaaccggcgggctgc

SEQ ID NO: 37997 - DNA, 333 bp, Mus musculus
  source 1..333: mol_type = other DNA
aaaatgctccgcaacagagtgctgctgccgcagcccacaggctatgaggtgtcgtggatgagctggccaggtcacccccatgcattaataaagtaaaaggatgtgatttttgttttctattttatgcagcagatgccagattctgcgtttttaagtatgaagttaactttggtatcatgaaagctgattttgataattaatgcttataattaaaatgaaaggaaatgttccagttcacttgagcgtagttttgctacagccctctgaaggccgcagacaagggcacacttccacaaaaagtgcctattttggcagctggggaaatgtctcagt

SEQ ID NO: 37998 - DNA, 242 bp, Mus musculus
  source 1..242: mol_type = other DNA
gtgaaatttgagcacatggctaaaatgtactacagttacagcttcatgattcagcttcagtaattgagcacctcgaatttccatgatggcaccgatcagaaggagccttcttcaggaaggattggcagaaatttcaccaactttttgtggaaaagattccaacttggtaccaccactacacacaaatgcgattttttcaggtttacctgaaacttgcatatagggctagccccatattccgg

SEQ ID NO: 37999 - DNA, 336 bp, Mus musculus
  source 1..336: mol_type = other DNA
atgacttaaggcaggatctgggttctgtgaacagattttgaaaaaattacttccccggaaaataatcagcttcttgttgctacacagagttttgcatattaactaccccattctgggctgcagggcaggcagctgctgaatcttatcttccctgacattttactggcagggttctttacccaccacacatttttaagcggtggggagactcggtacacttcagagtatctatctatatccagggaattaatctttagctttgacagcaaatgaagaatgaagcagcagctgggcagcttgctgaggatatcttccgccgctggaggccacccacga

SEQ ID NO: 38000 - DNA, 237 bp, Mus musculus
  source 1..237: mol_type = other DNA
taagagaggtatttatgtcctccttaaggtcctctatcatcttcatgagcaggagcctggagctggagcacccgatctgtccctgggcacagttgcagaacagaagaacaatgtgtctcctgcagagcagatattgggctccatggtagtgtggtctcacctgtgagcccggttgtgacagacctcctaacaatctgcctcaaaccatgaaccttcatgtatgaagaaaaaaaatct

SEQ ID NO: 38001 - DNA, 410 bp, Mus musculus
  source 1..410: mol_type = other DNA
atgtacactgtcaaaaggaatatataatgcgataaccactgtggaaaacagtatagctgtcctctgaaagttaaaaacagaactgcggtacaattcagcaatttcacttccgagcatattctcaaaagaagtgaaatttgtgctcatttttatagatgcatcatttcaatgatggagcattcgagtgtggttaaggatcttaagctacgtccagaatatatctagatcatatctataatctgttttccatatataatatagtaaatacacacatgctgtgacagcagatgaagatacctgtgttgtgtcaaacaaaattgtgaatacctcatgttttaggagtggcttcaaagcagagagtgaggccccacttgggtgcctctaccacacacaggtgcctagttgctacc

SEQ ID NO: 38002 - DNA, 376 bp, Mus musculus
  source 1..376: mol_type = other DNA
aaaacatttcctcttgagcacactctgcctcctaagtgttcagattaaaggctgattctagaaagcgtttccacaaacactgttttagatgtgcagtcaggacttaacagctcttaaagcatggttttcaaccctggaactccgttccacattaaaccgaattgccttgattcgcgtgcggtcgcaacctaccggaggctactgtggcaccccccaccggtctgggagtcaccttgaccctcccagctcacgtttcggcagaactccgccccgtactcgcccgcctctcaggcgcgcgcgaggcctacaggccccatggtgccgtgcggcgcaggccgctcccggatgtgtgcttggcgccggaagagaaggcggc

SEQ ID NO: 38003 - DNA, 590 bp, Mus musculus
  source 1..590: mol_type = other DNA
aaacccataaatttgggcttttaaatattttgcagaaaaaaattaagtagcatattgtgaataatcttatattacagaaaaatcgcaaatttgaaatatttgttactctaaaaataattagtgacttaatcctaatctgatttacattatttacttttgactaagacaattcagctaactttgctataccaaggatttccacagctctgagccatcttgttacaaaaaattttaaagctttttgtagttcttgcataataacttattagcgaatgtaaattacatgtggcacaatctatttgcaagttgtgtattctacatatgcacttttccacattttaacgcctggcaaattaggaggctaatgaaattgtattatgtttatctgcttataatgaggaaaaggtttattaatcagtgtgaacacagataaaaaatagtttctccagtgtgttttgtttatatgtccttaaagtcacctttaaataactgagatgctagttaatgagttggtaagtgagagaaccgcactaagcacgctgggtgctggcagtggcgggcgtgggagagcgcagaagggacttccccga

SEQ ID NO: 38004 - DNA, 463 bp, Mus musculus
  source 1..463: mol_type = other DNA
ctcaacaacctccttagttaccggttaaccatgacctccagagacgctggatggagtagagggttgcaggtacaaaaatcaactgcttcatagactgacattttctttttaaagactaccaggtctcactatgtagctctacctaggtgacttagttaaagtttcaaattagactggcttacagtttcaatgattcagtccattatcatcatggcgggaagcatggcagccttcaggcagacatgactctgctctgggtgaagcttgacaccaagcaggttgaccttgaactcaaagatcttctgttttcactgacaaggcagctcactttcagtaatctgggtttttccaaatagtgacatgacaactagtcattatgaaatggacacgagttcctcttcaagaaatgaaaatgtaggtcagggctctgctgacatttccatttgcctcataggtaaaagcc

SEQ ID NO: 38005 - DNA, 434 bp, Mus musculus
  source 1..434: mol_type = other DNA
tggaaataattatagtttgttaattattgttaattttaccacctctagattctaaaagagagtgtcgctccttcatcctattaaagaagttatatcattcaatacagggaaagaaaataaaaaattgcctctcttagaatcaaattgatatgcatgtcaataggacttttcatatgtggcacaccatgacaactggattgtgctgtgcaggtgatgtttgtttttgtaaatactcatttatagcgacttcaggtctgatcaggtttatgtcagtgaactgtttaactgtgttctctggagaaactcctgaggggcaggagcaatctcccctgcctgattctatctcaggcagctcagggctgccggcttcttccgcgggacctgggaatagggagcgccacccaaattccattgagtgagtcactagctaacct

SEQ ID NO: 38006 - DNA, 660 bp, Mus musculus
  source 1..660: mol_type = other DNA
aagaccccaaggattccttggcttaaggaaaaagtatgtggtcataataaagacatagatgtgtgtgatcttaaatatgctataaggatgcacaaatatttctgaattgtatgcttcctgaatcaggataatatctcgaacaaaatgtgaaaatagcagtgttttccattatagtactctattttatcatcactagtcatcactttatggggactctatgcatgaaagtacctccattttcacatgtagtgagaacttttgacatatgttgctcagatcaaggttcctctttgatttgtagttagcaaagttaaaactgtgtaatcttatgtattcagggaatatgattattataaattgtcttttaatttcaagatatgtctactgtaaacacttcatagggaacacatactatttttttaaccaatcagaattatttaagtgagttaatatctaatagtttctatattccctgacagcaggatattctatattacagcattatatctttgaaatatattactcaaaatagactacctacattaaaaatgccatctataattataatctttgatatgaaattcaatacaagtggtttgacctcaggtatcttgtgctaagttctcagatcagtaagccttgcagctgtgaccaatccta

SEQ ID NO: 38007 - DNA, 514 bp, Mus musculus
  source 1..514: mol_type = other DNA
tatagcacatattttaatcgtgatttataaaagaaaaatcacaagcgacttcagtgatgcgttaaattcaatggaccacaattcgcttattgtagtgcacagaaaacactgttgaactgtgagttgtgtctgttcataacatccatgaaagattctgtattaagagaaaaatagattttagtagacctctcaaaaaatattatatgtgcaatcttgtgagttctgggtatcaaactcagcaagggccttagccacttgagcatcataagaaattctaaagactctgattaatagtaatattgttgcacagaattttcatacctatatttttgaaaaaaaaatttctcccatgcttacctttcctttaagaagggcattaattttatgtcattacaggatatagttactaacttctcactaaaatgattatttcaagatattctataggcaatagaaattctatctgtttctttaaaaacacatgagagggtccacttctctctgcaagtacaag

SEQ ID NO: 38008 - DNA, 699 bp, Mus musculus
  source 1..699: mol_type = other DNA
aaaagaaaaatgtgttccttaaaactcattatattaaaagtcactcacagttgacaatgagagtttcatagacatgaataactgaaactctctcaccttaaagtaaatccttttcacaatgtcaccacctgataacaattcaaaaaatgttggacagggttagagaaatcaaagacagtgttttcttttttttaattaggtatttatttcatttacattcccagacttcacttcgtgacatatgttgctcagatcaaggtgttataagggcacacactgtgtatttttcctctttgacctgtagttagcaaagttaaaactgtgaaatcttatgtattaattcagggaatatggttattataaattgtctttttaattttaagagatgtctactgtaaacacttcataggtaacacatactatttttttttaaccaaacagaattatttaagtgagttaatatttaatagtttcttctctgctgtatattccctgacagcaggatattctatattacagcattatatctttgaagtatattattcaaaatagagagtacctacattagaaatgccatctataattataaatctttgatatgcaattcattggagacatacaagtggtttgacctcaggtgtctggggacatgtgctaagttctcagatcagtaagccttgcagctgtgaccaatcctaa

SEQ ID NO: 38009 - DNA, 279 bp, Mus musculus
  source 1..279: mol_type = other DNA
cacagtgctgttgcagagtggcactatgtgtacatatgcagtaaagttttttgcaaagacactgcctggcccaggcattgggtgtgagacacgcctctcctaggcctataaaagcgtgcagaaggatcctgttgcagcgtcgttctttgtttcattgactctggaaatcagtttggcagttcctcagaaaattggacatagtactaccacttttttgaccagtcatatatactatttagatttacaaaataaacagctaggacttatctgtttagtctt

SEQ ID NO: 38010 - DNA, 668 bp, Mus musculus
  source 1..668: mol_type = other DNA
aagtttttgaatgcttttagaaggattttagaatgcttgctagtgtacaatcaacacatactttcagaggaagctataatccaaagctaaaactatttattacttcatgcaacccctgattttatagatttttataaaagttgaaaatttctggaattcccttcatatttgcacttatcataaaaggagttgccttcccttatgagagtaggcatttcatatgtagatatattctatcttaactagagcaaaagttgtacccatttagtttgtaagtaagaaagtacctccattttcacatggaatcagaacttcaagtgacacaagttcttgagatcaatgactgtagttagcaaaagcagtagaaccttatgtttttaattcggtgaaaatgtttatgataaattctccttttaatttcatattattttagacaaccaaagtaattctattcgagtgagttaaagatataatagttttttctttgttcttctatattaccttagtatatctttgaaatatattattcaaaatagagactacctacaatagaaatgacatctataattataaatctttgaaaagaaattcattttctggagatattcaagtgacctcagtcatctggggacactgcgacaagcaaataactggttcccaatgatttg

SEQ ID NO: 38011 - DNA, 433 bp, Mus musculus
  source 1..433: mol_type = other DNA
aagaaatttgttgtgaggttgtgtctcctactaacaatataagcaatatctataaattgttgatatcatggctactctgtcagcagaagaggcgcacctccttatagaagaagcctaccaggtttgatatatcagccttgaaaacctacatagtatttacattatatcgagtctatgagacatatttagtaatgcatatgtatgtgtgtgtgtgcatgtatgtgtgtaaatacatatgttcatagaaaaatgtgtaaaaagataattactctacatagactatgatagaaatcaaaataaggtgtaagacatagaacattagttttgtttgttgttcaaagagactcacattcccacaaaaaaatctgtgggattttacaggtctgcaataagctgctgacctgatgatttctgcagctgttgcatgtaccaa

SEQ ID NO: 38012 - DNA, 250 bp, Mus musculus
  source 1..250: mol_type = other DNA
cacagacccagcagtactcttctgtatgtgtttgagacagttggacttcctacaggcaacaacaggagtcagctgcttctgtccattggttgggtgcaaatacctgctagcctcaatgatagtgtcaggccttgtggctgccacttgagctgtaattctttcagacaggaacaattatgggtcagagttgtaactgtgctggaggtgggctctagaaggggtcctcccaacttttgatggaagcctatca

SEQ ID NO: 38013 - DNA, 386 bp, Mus musculus
  source 1..386: mol_type = other DNA
aaaaggacttccagacctatttggtgatgtaatcccataccaggccagcctggactgaactctacagtgagttcaggctccttgggtttgtgaaggtctagcacagacatcagaagacctgggagtcccaagtgtgtcggaaagtactgacgagtcagataacggacttctgcaagttgttctttggccacaacctaaataatacaatgtaattaaaagattttttttaaaaaaaggccgttgtgttggtagaaccaaatacgcgtacaggtgtaaacacttgaccccaaggtagggagttattagcttcctagacagcagttacccggaccttccggacagaaagtctggagtcaggacttgtagtcccgaatgcagaagggcct

SEQ ID NO: 38014 - DNA, 246 bp, Mus musculus
  source 1..246: mol_type = other DNA
ttcgcaactactttaagagaattttaaacgctttggtcaaacatttgaacacttaataaatttttaaacaggctgttctacagatcactgtcatctctatcaaagctgtaattgtaattggacacatgacctgttaagtcagcgcctcactttgaggggcgaggccaatcagggaatggaccaatccgttccagaagtggcattacgcgccgtcgttcccggaaaagggccgtggctcggagtggc

SEQ ID NO: 38015 - DNA, 243 bp, Mus musculus
  source 1..243: mol_type = other DNA
actttgttcctttgtggcactgagtgacacgcctgctgctatgcacagtagcacccagtcatactataggactataagtgttttcaaaacaattatttatatctgtattttcatgtgagatactatcaccaacggtgtatgagattctcgtttgtttttaaatagctttgttagtacaagtaaaagagaaaaagcttttgacaattgagccaggttctaagatgcatgggtttggttaaacct

SEQ ID NO: 38016 - DNA, 436 bp, Mus musculus
  source 1..436: mol_type = other DNA
acacacttctccagcagcaatgcatttcatgtgtgtgagtttgtacactatttttttcaaataattttctagatccatctgaatgacttaaaaatcaagtcactgcataatttcagtgtctgcatttatatctgaatccacatctgtcacacaggaggctgaggcgctgctgtgactagggtgttcctgcagcaggacactgctggagtccaccacagtcttggtaccagcacgcgtgttacacagtgacaaggttaagtacaccagctctctgggctagcctagctccaggttcaatgagagatgctgctcacagaatgggaccctcctctattgctctctcagaaatcacagacagacagacaaataataagatgcaatacatttttttaaatttttaagttattttttatggaatgctgactaaccagctttg

SEQ ID NO: 38017 - DNA, 271 bp, Mus musculus
  source 1..271: mol_type = other DNA
gtttggagaaaaaaataccccaaattcttgcttttttccctccctgaaagatcgggacttcaagatcatcctttactgtataaccagtgagtcagacttacgcttctatagatagtattgttctattaagaattttttagctaaatgagctcttggatttatgtaaaccagaatcctgaaaaagacaggcagatctctttgtgagtttagagacaggtctctctaaaaacagaacaaaatgtcaccgtcttttattctatcggttctcaga

SEQ ID NO: 38018 - DNA, 617 bp, Mus musculus
  source 1..617: mol_type = other DNA
gagatctttggaagcatccttaggcctcttccccaagcaggtaatgccatctttcttggctctagcagataaaataatctaagttttcagactgctgcttgtaaggggaggcttgtctggactaaggcttgcctggactgagacttgcctggattgaggcattgaagaagaattctcaaaatacaaaacagctttaaggactgataaaatgtatgtaaaattatgtttgtataataataaaaaatgagaaataaacataaggttatatgaaaaaggttttgagttcaaaggtatcacacacacacacacacacacacacacgtatgtgtgtttatgtatgtacatatggatatgtagtgacatgtatataaatatatgcatacatacaagtgtacacatgtacaaacacatacatatgtgcacttaggtatatatgcatatgtgcattgctggagatgtgattcacatgtttctaaattatttctaaatgtatgtatgttgcacatacatacatttgtcaacatatagggttaccataaaggcaacattgtttgctgaattagaacaaactggccataaataaatcgacaatcactgacctatggcctatatctgag

SEQ ID NO: 38019 - DNA, 371 bp, Mus musculus
  source 1..371: mol_type = other DNA
cttagtaagataggcaccgggattttagaaccatgcctctaatatcgcccctcctgagtgagaggagggacacagctgacatggacaatgtcccttgagtcctatacatatgtggcaaaaggctcattgggtggggcaaggggcccacctcacttgggtcgcatctgacagctgaagtgattgtcagaggcacctggaggctaaaaatagcctactgaccaagtgctcttgatttcatctcaagctgaatatgaccgcagttggttttcaaatcctgtctgtcaggatccatgtcaggaggccttttccctcctgacacagtggtggagggggagtatagtcctgctctttgggacgatgaaggagctaaa

SEQ ID NO: 38020 - DNA, 275 bp, Mus musculus
  source 1..275: mol_type = other DNA
aacagaactgatctttaatcagaactgaagggctgcagtctctcagggaagtgagaatctccttatcagaagcttcagcagtcaacaatccatgcttgggaccagcctgagctaaagtaaaagaaaactaaaatatactttagtagtaccacgaacgtgatgctagctagcaacgtaccagtgcttaatatttagtcttaatataagagcacaaggtttctttcctccaatggcaagaaggccacacggacagagccggttagtccgccgagggc

SEQ ID NO: 38021 - DNA, 334 bp, Mus musculus
  source 1..334: mol_type = other DNA
atctccttatcagaagcttcagcagtcaacaatccatgcttgggaccagcctgagctaaagtaaaagaaaactaaaatatactttagtagtaccacgaacgtgatgctagctagcaacgtaccagtgcttaatatttagtcttaatataagagcacaaggtttctttcctccaatggcaagaaggccacacggacagagccggttagtccgccgagggctcggccgccctgctgcgcacgcgcacctgcgcgcccccgccgccatggcgctggcgctgtccagtcagccgcgggtggtggcggcgacttcccctcaggaagtcaggtctccgcc

SEQ ID NO: 38022 - DNA, 445 bp, Mus musculus
  source 1..445: mol_type = other DNA
ggcccaagcttgtggtggtcttttggggttcatcaaccagacacaacaagcagttttgagatcagagtctcaacacagccaagattggatcagattatgatacatgcgtaaatgacaatatgaaagccactagttttaaatagttggtaattataattcaaacgatgaatttttaaaaattagctgtaagtttaattgctgaattagataatattttttaaatattagggattgtagctcaattggtaagaatgcttatcccaatacccaataagtggaatttctgagttcgaggccagcctggtctacagagtgagttccagaacagccagggctatacagagaaactctgtcttttaccttttttcgcaggcagtgaactcaattgagggcgttccccttatctccctggcgagctagaactcctggttgagaaaggaagggg

SEQ ID NO: 38023 - DNA, 184 bp, Mus musculus
  source 1..184: mol_type = other DNA
tacagacaccccagtccgtagggctctaggtcccaggcaaggtctgagcccctctgagggccaagcttcacaaaaccatgaggcctggcgcatgctggcctcgagctcccccctggggcaagaggcatcacacaggtgcaaccccttggcatgactgagtctgagatctatcacttcctctcac

SEQ ID NO: 38024 - DNA, 244 bp, Mus musculus
  source 1..244: mol_type = other DNA
accctgtatggggttccaagtggaaaaccccactactggcagctttcaggactgcagtggcaggggcccagcggtggcttgggtggagccagcacctatccaagggctatgctccctgggtgcagctaagagtgccactcaaggctcccattgaactgcccccttgcaagtccccttgatgggaggtgcaaggccaaccttaagaaaagggagagtgggcactcctctcccttcatgttaagat

SEQ ID NO: 38025 - DNA, 381 bp, Mus musculus
  source 1..381: mol_type = other DNA
aacattatttccctgtgtatagatatagtgatagtatagctatacaaatctttttgtcatgagagcacatagtgtatgtatgcttggtgagataaccccagtgcaagggaccccagtgctctcctgtggcctttggggaaccttgagaaatatctatggttgcaggtaaaggtgcctgcaccaagccttgcttgagtgtaatttaaaaagtaaggggctcccttcagaattttggctaatttacaaatatgcttgcttaataggaagtgaatctcaaggcttacactccagagtgtggaatatcactgtaataccttagtgaagaagtaattatcatctaatataatttcctttgtgtttctcctaatggttgatattacc

SEQ ID NO: 38026 - DNA, 315 bp, Mus musculus
  source 1..315: mol_type = other DNA
ggtggcttgggtggagccagcacctatccaagggctatgctccctgggtgcagctaagagtgccactcaaggctcccattgaactgcccccttgcaagtccccttgatgggaggtgcaaggccaaccttaagaaaagggagagtgggcactcctctcccttcatgttaagatttaatctttatcttctcttgcagaagaacaattcctaagggtcccttccaactctgagttcccaggcccctaaaaggtggttgacactctttggtggggaggtgacatcatatcctcacataggaaatcagctctgtctgcag

SEQ ID NO: 38027 - DNA, 289 bp, Mus musculus
  source 1..289: mol_type = other DNA
ggcggactctcccaggcccaggctgtgaggcagggacttaggttgctcagctcgcccacgcgtgttcgtgaccgccgccaagatgcccagcacgtggacccaacgctgggcgcgggccaccctgggttagtgaccccgcccgggccctccgccactaggcggccagacagacatcctttggccccggaggtgggcctctcagtcgaaactccggccagccgcagctgcgcgggccaattgcgtcgctcgccccgccctcgccccgccctcgccgcgcacggcctcccgc

SEQ ID NO: 38028 - DNA, 402 bp, Mus musculus
  source 1..402: mol_type = other DNA
ggcggactctcccaggcccaggctgtgaggcagggacttaggttgctcagctcgcccacgcgtgttcgtgaccgccgccaagatgcccagcacgtggacccaacgctgggcgcgggccaccctgggttagtgaccccgcccgggccctccgccactaggcggccagacagacatcctttggccccggaggtgggcctctcagtcgaaactccggccagccgcagctgcgcgggccaattgcgtcgctcgccccgccctcgccccgccctcgccgcgcacggcctcccgcgtggtacggcccacaccttcagaacgcccgcgcgccctccgcccgtgctcgccccgccgagtccgcgattggtacggcccgcgccgcctcctccgctcgtgagggaggctcga

SEQ ID NO: 38029 - DNA, 229 bp, Mus musculus
  source 1..229: mol_type = other DNA
gtagaaaaacatctgttttcagagtttcacagattctgatgtttctctgtgtagccgtgctgggaggcgtgcgccaccacgcccggcggtgcacggttttaatcccagcacttccatgcctggcaggcaatctctgaattctgaggccccatcttttacagcctttatttttgcacaaaggtgcacagtgtcgcagggtccaatgtccaatcctgggactttgactggg

SEQ ID NO: 38030 - DNA, 358 bp, Mus musculus
  source 1..358: mol_type = other DNA
aacacagacctaaagtatctgggatattttacagctttattcaagaaatggaaaaatgttggaaaagagttcatggtcaagagaattactaatgactctttagaagtaacagaaaggaaaagaacacttactttgctgctgggtattacaatgtacttttagataagaaaaaggtgagatcatgtattttcattaaatgcagtatcaaaaccatttacttaattctctaatttgtgtacatgtattaagtatccaatgtatgttacaatgtgttacataaacatgcatgtctccataagtgttacgtatgtaggagttacttactctggtagcacagaaaggaaacttcatttttcag

SEQ ID NO: 38031 - DNA, 475 bp, Mus musculus
  source 1..475: mol_type = other DNA
gttcctttgtgttttaaaagagattaggaaacaaaaacatatcacattcatgaatgaaattctccaacaataacattttaaaaataataaagaaaatatttatagaaagctatgatatgaaagcccttcccagagggaataatggacccattagagaatatttatgtttatcattaaagtttcagtaaagaaaatagggttttttttaaaaaagatttccccggtgtttgttttttaaattaaaagttagtttcagctgactcgtgcaggtctgtttaaccttaatcttacaagcgaaacaaatgttataatctgttgaatcatctacttttaagactatccacaaatatctgggaagtggttgtaaatatgcgtgacagcgttgagatatatatttctgggctagctgactaaatatcttaagagttacttctgcgcctgcgccgcgcgcgtgcgtactagccctgctgccgcc

SEQ ID NO: 38032 - DNA, 393 bp, Mus musculus
  source 1..393: mol_type = other DNA
gcctcaaagtcgaggcagccaaggaattgttttttttcctcaccccagaatttcctaggctccgcgactcaaccaatcatcggtggcagcggctccgagggggccgccgtcgtgggtgactcagggaggcgggaggcggggtaagcgctccgcgggcctcggctgcgggtgaaggacccgcgcgggcggtcgccgcgtcttctcggcgggcgggggtgcgcccgagtcggcggcccggaagcggggggcgggggcgcggcaagtgtcgagtcgcgagcgagtccacggcggctccgaggccgctcggggcggggatcggtcgctgagacgggccctaaaagcactggcgccgcggctttgaaagcggagtccacctgcgggggtgtcactcca

SEQ ID NO: 38033 - DNA, 311 bp, Mus musculus
  source 1..311: mol_type = other DNA
ttcattttttgattcaaccaagaatcctctggtccaaaccattgtttcaaaaatcttatatccactttacattttctttttaaaaaacctacatcccacatagttttgaatagatgaacaagagtccgccccttctggcgcgtgcgcaggagcccccagagcctgtcctcccccgcaggctgtgcaccggtccctacgcgcttcaagtggcctcaaagtcgaggcagccaaggaattgttttttttcctcaccccagaatttcctaggctccgcgactcaaccaatcatcggtggcagcggctccgagggg

SEQ ID NO: 38034 - DNA, 333 bp, Mus musculus
  source 1..333: mol_type = other DNA
agagtccgccccttctggcgcgtgcgcaggagcccccagagcctgtcctcccccgcaggctgtgcaccggtccctacgcgcttcaagtggcctcaaagtcgaggcagccaaggaattgttttttttcctcaccccagaatttcctaggctccgcgactcaaccaatcatcggtggcagcggctccgagggggccgccgtcgtgggtgactcagggaggcgggaggcggggtaagcgctccgcgggcctcggctgcgggtgaaggacccgcgcgggcggtcgccgcgtcttctcggcgggcgggggtgcgcccgagtcggcggcccggaagcgg

SEQ ID NO: 38035 - DNA, 473 bp, Mus musculus
  source 1..473: mol_type = other DNA
aatttaaagggacccataaaattaatcctatatgatgcaatattttaaaaatgcattgaaagatgccacatggcttgggtcatgatgtattcggctctcatagccctccgagcttgatgatggcccgagctatcaccgtgtgtgtgtgtgtgtgtgagagagagagagagagagaaggcttcaggtttctcctgatgtaggcaggatttcaaagtccacctcagtttccccacttcacctagtgaaggtgaggcagccctccctgggggttcggaggcccagtgcactgagccaccgcagcggaggaggacccgccctggctgcagctctggggctgggacgatcggagcaggggcgggtcgcgctggtgccctcaccgctagccgcccaatcgccgtgggcccgcggagcccctgggggctggggcagcgggcggaacgtgccgcggctgcgccaacgcgcgagcgcggggc

SEQ ID NO: 38036 - DNA, 255 bp, Mus musculus
  source 1..255: mol_type = other DNA
gtgctcttaaaagttgagatttttcccaattttaagttttagtataacaaataccagtagatataaccatataagttaaagctctttgaattttcaataattttctgaggtcttcaagggtgtagccaccactactagtcactctctaaatgagatttgctgtaatcatatctatactggcagtaaggtcacttggagtacaggagtcccaagtcaccttcgggatcttggaagaccatagagctagttccaggt

SEQ ID NO: 38037 - DNA, 470 bp, Mus musculus
  source 1..470: mol_type = other DNA
atatattcagctggctgtcctggaactctgtagatcaagctggccttgaactcaaaaacagattttgaaaattatttttctatgttattatggtaagagaaccacataatcatagtggaatttacatagaatattaacgacagtcaatttttaacacattgttaaactcagaacgcttggaagagtcttccaaagtaaaaacctgaacttagaatttgggttccaggatgccttcttattcttcagcaacccttggacaactaattggaatcgattctattgccaccagagaggtcgcaaatttcaggtcgtcaggactgggagcaggcgtccctaccggatcagagtctaattctaatttaatttcacctagtaacccggtcatgccggggtgagtcccaccctcagggagccgcctcggctgtagcaggggaggaggcggcgcgtgcgcagtggtgccggtggccctt

SEQ ID NO: 38038 - DNA, 324 bp, Mus musculus
  source 1..324: mol_type = other DNA
ggcaggatagaatgttatcctctatcttttgtccaaagttaatgagaatttgattaatatattctgaatctcgtctataaatatttgactaaaagttattaagtttggtacacttcagcactggcctctgtggacatatggtacacctacgtacatgaagactcttggatatataagtctgcagtagaaaagacagttcagttttgccttcttttatacagaaatgaattgctggaggaattcatggacacagatccggtagcactgccctattggggagagccttgcccaaagcaaagccagggtttctgtgtataatcaaag

SEQ ID NO: 38039 - DNA, 242 bp, Mus musculus
  source 1..242: mol_type = other DNA
gcgccaccactgcccggcaatgctgtccagatttaaaagttccgtgtgatgtaatgtgattataaatgacataaaactagttgattaatgtccgcccccggactggctcgggctcttcggccgaatacattccgaaggaaatgccctgaagccgcctccatggtgtgtgcttgcgcccactccgcggcttggcaaattggctccacgccagccccgcccctcgaccctggaggcggaggtcg

SEQ ID NO: 38040 - DNA, 296 bp, Mus musculus
  source 1..296: mol_type = other DNA
aaggatgtacaaaattacataagtatttgcaagcttttactaaagtcttagcttattcttagctgaaggttctcataacgttcagtccatactggtaatattccctttcttttttgcagggttaaaatgaataattttggctatacatagtattcgactgagagggccgggcctcgaaaatgcaagaccaaaatgactctgggtcttccgccgccgccgcggagcacgtcgggaacgacctccgcctccagggtcgaggggcggggctggcgtggagccaatttgccaagccgcgg

SEQ ID NO: 38041 - DNA, 386 bp, Mus musculus
  source 1..386: mol_type = other DNA
cttttctagaagatcatggggaaaaatatcctaaaagcctttttaatgcaccaattttgggatttattaaatgtgtttttaaaaatcgtatggcatttcctttccaaaataaggtgtgagaggccagggccggtaactgaccataaaaagtattttcgttgatacttcataactgtaattccactactgttgtgaatcgtaaatgtaaataactcttgggtctcaggaacccaggaccagtaagagttgaagagatccccgagcgcggggcaccctcatcctaggctgcctggcgcctcccgctccccctcgcactagcagtcggagggggcggggggacagtccgctcgcaggcggggcctcggcgcactcacccccacccccct

SEQ ID NO: 38042 - DNA, 391 bp, Mus musculus
  source 1..391: mol_type = other DNA
ggtaactgaccataaaaagtattttcgttgatacttcataactgtaattccactactgttgtgaatcgtaaatgtaaataactcttgggtctcaggaacccaggaccagtaagagttgaagagatccccgagcgcggggcaccctcatcctaggctgcctggcgcctcccgctccccctcgcactagcagtcggagggggcggggggacagtccgctcgcaggcggggcctcggcgcactcacccccacccccctcagcatccgcgcgggggagcggactgtccggggctgaattggcgcgagcgcggcgccgggggctggctggggcgcggggccccgggctggcggcttgccagcgctccctccctagcatgcacacagaggcggtggg

SEQ ID NO: 38043 - DNA, 486 bp, Mus musculus
  source 1..486: mol_type = other DNA
tcattttgacttaagatcttcaccgacgttacatctgctaaaccagacatttgcatctctcaagtgagcaaataggggaaggccttctgttggatgagatgggaaaggtcggcgctgcgtcacccccacccccaccccgccacagcgattagcagccacgtgctcgggactgtagtggacagtcgcccccaatcagcccagctgttttgaaaaatgcttcctgtttctttaaaggcgctcgctgctcgggcggcctgggctcgggaggcggcagcggcggcggcgggagctgcctcctctccgggcgggcggcgctcttctgtgtaaactgaggctaaacaaacacagatggagcgcagcgggcgttctgcagaaatgctggcagggcggcagcggacactctgagctctcccggggaaccggcagcctccaaggcttcacggagccggaggcgcagctgccccgggagcgcggcgacaaggcggc

SEQ ID NO: 38044 - DNA, 271 bp, Mus musculus
  source 1..271: mol_type = other DNA
gggccaattggcatcaggcttcacagccaggctgttcattttgacttaagatcttcaccgacgttacatctgctaaaccagacatttgcatctctcaagtgagcaaataggggaaggccttctgttggatgagatgggaaaggtcggcgctgcgtcacccccacccccaccccgccacagcgattagcagccacgtgctcgggactgtagtggacagtcgcccccaatcagcccagctgttttgaaaaatgcttcctgtttctttaaaggc

SEQ ID NO: 38045 - DNA, 316 bp, Mus musculus
  source 1..316: mol_type = other DNA
agctcccaccccatacagcctgtgagtgctggaggactttctagggagccagtagtggcctaatgcactcagacagcaccggcgctgcagctgccacaggggacacagaaatctcagcctcacagggcactttggtggccccaggagcaccctaagtgtgcccttccggcacttaccctgcgtcaagaggggctagagaggctcattctgaccccactcagcatcccttgcacagtccagagcgtggggatcaaacgagacccccttgtttgacggtgaacaaagtcagcaaacactgaggtcagcctgttcccat

SEQ ID NO: 38046 - DNA, 448 bp, Mus musculus
  source 1..448: mol_type = other DNA
atagctttccaagttttcagtttaaaatgtaaacatcagaaacttatagaatcaagtgcatctgcttgatgtaaaattctaggtcttctctgaatctgtaagtgttcatacatcgcaatttagcaaattagacacatcaaacgtgtactatcttgtatatcaattatatgttttattagctaaacaataaatgcgccttagcagagtatttgcaaactcatttcaagagccctttaaatatgatactaattgaagttcccaggtacaagcctgaatgaaggagttaatttgggaataagtccctgatcaggggcttccttttccctaaaatgaaagtagcctgttatgttcgaaactatcggccagcagcgcttataacgttttataagcctgagtccctcacagcgactcgtagcgcgctgcgtttctatgatgctgcccgtgctcg

SEQ ID NO: 38047 - DNA, 395 bp, Mus musculus
  source 1..395: mol_type = other DNA
aattggtgactcatgcctatagtcctagccatgtggggtcagctagatatattaacatgtcttctttaattctgccataaagaaatgtcatttgtagggagaaagagtaatcaccaatattgcatgtttttcccatatgtaggacctagattaaaatatttctcatgagcagaatcgtgaagtttattatactaaaagtcaacatagactaatagaatgcattttcagtattcgtggatgactcgaatttttaaaaataatttcctggtattagctatatatactcctaggtgataccacaaagtaagaggacctccagctctacgggcgctcacagatgaaggttctcaaatttcgatgctccgctgcgcctggccctacgcaaccggcatcgg

SEQ ID NO: 38048 - DNA, 479 bp, Mus musculus
  source 1..479: mol_type = other DNA
tccccttgggataatgattcgctgtctcatgggggtcccactgcttatagggagaaccaggaacaggatggatatcctttaggaccctataccatatgggtagcagaacccagccagctttgggtttcccaagccaagcctaggctcggtgcttggcttctcacccaccagcctcatgcctgttcagacagtggcaggcttggggcgccacactgggcacaggcagagctgccgggctagcccgcccgcactccctccgcaggtcagaggtgtccgggtcatagcctcgggcgcccaggtcccttagacttggggcaccgcccatgtttcccccgtgacattgccgcgggggctcgggagttgtagtctcgggcggggctctggcacccgggcccgggctgcgcggactccacgtcccggcgggcggcgcggcgggcctggggccgccaggggcggggccgttcggccctttaaacctt

SEQ ID NO: 38049 - DNA, 240 bp, Mus musculus
  source 1..240: mol_type = other DNA
tatggaatgctcttttcctgaatatttttttaaagacagcttttcaaaaatttcaaaaaaatttattttataactatgtgtgctattgagacaaggtctcaactttttagccttgccagacttaaagacatgcaccatcgattgctttatttatttataatacgcagagcatcagaccctctggaaacatttttatgcataaaacataatcaatgcgtgggaattttcctttcagacact

SEQ ID NO: 38050 - DNA, 419 bp, Mus musculus
  source 1..419: mol_type = other DNA
aaactcttcaagacagtctgtgtagttcttatccaaaagagatggtcgagtaccactttggaagctggctcccatttagctcacagaaatgtctgcaacactttagcattttaaaaatcgcgagtccattttttaaaaagatttatttatttattatatgtaagtacactgtagctgtcttcagacgaccttcggaagagcagtcgggtgctcgacatacaatgtattcagaatactgcctgttccgtgtgagacgcactcaccaatgggctaactcctgatgcagccccagagacgcctgtggcccggtaggaggcgccccacgggtcctgtcccgggacgggcacctctgagaaggcgcgcccccctccctcttgggctgcgggcccgccccgccccacggcttcctcccgggccgc

SEQ ID NO: 38051 - DNA, 279 bp, Mus musculus
  source 1..279: mol_type = other DNA
ggagctaagatagaagagctctctgagattttaataattatgtgtatgtgtgtgtatgtatgcacacgtatgttcacatacccacagaggccagaagagggcatctggaccgcccctgcccccccccccgcagatacaggtgtctgtgagcagccaggggtgtcttagagctctctggatggcccttggggacaaaggcaaggcataatgtagaaaaactagaattacttctttgaagcataaaagaagtttctgaaaacttaggagcagagggcagcc

SEQ ID NO: 38052 - DNA, 367 bp, Mus musculus
  source 1..367: mol_type = other DNA
agacagctacagtgtagttacatataataaataaataaatcttttaaaaaattatttattttatgtatataagtatactgtagcatggttgtgagccaccatgtcaatggaagagcaatcagtgctcttaaatgcctacccttttgcacctcgcgaaaattaggaaagtataattcttagtttttaaatcctaaaatgtttgttctgaaaactgtgatttagcaagcgcctgcgcggtctctgagctcagggctcggctcaggatcgccccgcccacactcctagcccacgccccctatgcttcagtgcggggccgggggttccggccttcacgacagtgcgggcgctttccggccgtccgcgcgag

SEQ ID NO: 38053 - DNA, 481 bp, Mus musculus
  source 1..481: mol_type = other DNA
tgtcataaaatcgaggccatttgaccttgacaagctcatctgaagcacatttgattggaacgtccatttcttcctaggaagccgtctcagactacgggggtccacgaggctcggcaaaacaatacagcattcctgctagttggtactcgaggcatgcctattagcctccgctggccagtcaacatggccaccttcacatggcagagggccacccggcgctggtgcacgaacggccgccaccgccacggccgccgctgggaggcgcgcgcgccggcagacctccgtgggcaacggtcggagggatgtacccccgtatggggatgggcgtaaaccccaacgccccccccatcggtagaatggttcagccggagctcggctcggcggacctccctgccaacccccatccgcccgcccgcggcgcattggcgcgcgacgccgaggggcggagcccgagccgggcgcgcgcgaccccctgctctat

SEQ ID NO: 38054 - DNA, 325 bp, Mus musculus
  source 1..325: mol_type = other DNA
ggcagggagagtcccagcactctgcccctgctctttctaggacaggttcagtggcagcaagatgagtgtgcaatgtcaccctgacagcactcagggtctctttgggcagagctgagtagagtctgcttacaccactccagaccagggtcctccacagtaaggcttagcacctaagcttggcacatctgccgagatccccgtgtttcaccacacctgtcttcactgctaaaaaggccccttttatgggttcctttagttctatagttaagtctatctatccagatacccaagtttggagagaaagcatctttcctgtctggcccag

SEQ ID NO: 38055 - DNA, 304 bp, Mus musculus
  source 1..304: mol_type = other DNA
ttcagaagcagtcagtggacctcagagaattgaattctgcttggactttgcaaagctgcttctcaaaagacaaagcggctttgtggactgagtcctgggccccagcggagactgatgcaggtcaggccagcctggattacattcctgaaaaattacacgtatttatttacttcgggattacaagcaagtactggccagcacgtgtggtgctgggaatcaaaccctgcagcttcctgcaccagactggtgtgggtgctgagctttaccggccctggggtccctacaaggctcccagtgctaggtc

SEQ ID NO: 38056 - DNA, 415 bp, Mus musculus
  source 1..415: mol_type = other DNA
ccccagggtaaggctttcctggggccagcaagttagatcagactgattctccaccatgcctagctaaggggcatagagagacttcatgtttcaagacaccttgtgtggtgcctcattacatgtaaatcactagattgaagccaatctgggctacagatttaggctgtctcaacagttggtcacgatggtgcacttttgtgatcccagcatccgggaatcagaagggtcaagtgttcaagaccagtttgagctgcctttagaggctagcctgcacacacacacacacacacagagagagaatgtgtcagggcctcaaacactctcttggaactttgcttcaaaaacagactggtttacagagagatttcagccacagcagggcctgagcagactcaggcctctgccggggctagtg

SEQ ID NO: 38057 - DNA, 393 bp, Mus musculus
  source 1..393: mol_type = other DNA
tctaaggggcatagagagacttcatgtttcaagacaccttgtgtggtgcctcattacatgtaaatcactagattgaagccaatctgggctacagatttaggctgtctcaacagttggtcacgatggtgcacttttgtgatcccagcatccgggaatcagaagggtcaagtgttcaagaccagtttgagctgcctttagaggctagcctgcacacacacacacacacacagagagagaatgtgtcagggcctcaaacactctcttggaactttgcttcaaaaacagactggtttacagagagatttcagccacagcagggcctgagcagactcaggcctctgccggggctagtgtgcttctgagtactgagcctccccatgggtggggcaggtg

SEQ ID NO: 38058 - DNA, 283 bp, Mus musculus
  source 1..283: mol_type = other DNA
acgttgaaaggcagacatgctggtgcatagtactgaaattccgaagtttcaagcttcagtcctgtgcccccgagcatgcacagaagtccaactggcggggctggaatttggcgtgccaagggtaatgtttcccagcactttactaatggggggtcgcttgacatcctcggcgaaggggttcggggaaccccacgtgagcagcacggccagcagcagagcagtgatccacatgttgctgccagggtcaaaactgatgaagattgtccattatggacctcagttc

SEQ ID NO: 38059 - DNA, 281 bp, Mus musculus
  source 1..281: mol_type = other DNA
aagtacgtatttcagacctactttcataaacacaggatgatccttctgccagtcctgggctgacacaggtttaggagagctcctgtgcaggtctcaacaaggtctcaactcagatacccagacagaggctgtgtgggcacagaaactttgtgcctcccagacattgctcaccggacgcgtccccagcgttccggtaagggggggatcccacatcccccttttccatttcccattaggcaattgaactgaggtccataatggacaatcttcatcagttttga

SEQ ID NO: 38060 - DNA, 283 bp, Mus musculus
  source 1..283: mol_type = other DNA
ttgattgctagtaccacagaaactcaaggtcttcctgtttgagtaacaaagtaccttacttcccacagagtttgaaacgcttgaagctctagctctagggcatctgatgccctcatctaatacacaaataaaaatagtaaatctttgatattttatttcttaaataaataaatagcccaacaggtatggctggacttgacttccggcactctaccggaacacacagacaacggctgctgtcgcccggtagccccacccctaaggcggggctgcgccggtctcg

SEQ ID NO: 38061 - DNA, 259 bp, Mus musculus
  source 1..259: mol_type = other DNA
tcactggggggccccagcaaaggggcccagaatttcaagttacttttgttttgaaacagtcactaaaaagatctgatggcggaggcccattggacttgcaaactttatatgccccaaatgtaaatgagctaaatactaataaaaaaagatctgggttttgttaggcatgaatacatgcctgcagtcttgatgctgaggcaggaggattgcgcaagtcaagtgtcccaggactctgaccccggtcaggaccccgacctga

SEQ ID NO: 38062 - DNA, 404 bp, Mus musculus
  source 1..404: mol_type = other DNA
tatgaagctagttaggtaatttgcttaggcagcttcctaatcagcgagtgagtattgaatttcacatctccagctttagagagaaagcgtgatcttcaaggttgcgcgagtcctcggctgtcccgcagggggcagtgctgcctgccagtgcggtcccagggtagccatggagttcacgtgcgtgcgcgcgctgcagaggcgcgggtgtcagcttgcagccggggctcctccctccggcccccctgccccgccgggcggtcccttccccatcgcccctccccggcgggccaggcgctgggacgcccgggccgagaaggcagcggcggtggcggcgggagccgagtgtctcttgccccggctgggcggtgctgggcccgcttcccacagagccacgccctgtcaaa

SEQ ID NO: 38063 - DNA, 810 bp, Mus musculus
  source 1..810: mol_type = other DNA
gtccccgggacgtctgcgatggcccggccgccgcgcgcccaggcgctggggagccacgtcgggggcgtttcgcgtcctcgtcctccccacgcgcagcgtggcgggccgcggctgggctcgggtgcctgcgggaccgcggcaggaccgccgccaagcacggtcgcccgccggccgcggggcctcagggcggcgagaggcggggcggggccggcgggatttgcggacgccgcgccgctgccgggagccggcgggggcccgagagtgaccgagtcacggcgggcgccggcggagccgcggccgcgtcggacccgcctcctggaggagctcagccccggccaggcccggccccattcccgccccgcgccgcctccccgccgccgccgccgccgccgccgcgggagcgctcccctgcccaccccgcccccgcggccgagcccgggagtcgagtgggagtcggccggccgggcgcgggcagcgccgggagcccgcggtgggggcacactgcagccgggagcccgggaggggccgcgccgccagcgaggtgagagccgagcccccgcccccaccgcttgggcctcggcctaccccgcccgaagtccgggcgccgccgagggcagcggggcaccggcggggacgcgggccgggcccgagtcgcggggctggggaacccgaggccaccgcggcccgaagagcgagcgggagcggcggccgcaaccgtggcttgcggccgcggccctgagctgggcctggagccggaggcggggcggccgggcggccggaggcttggggaagcggcggggcccgttaccg

SEQ ID NO: 38064 - DNA, 521 bp, Mus musculus
  source 1..521: mol_type = other DNA
tgaactgacacgtggtgcgcattcgagcgggcggccgagccggctcgctaggcctcggcctccccctgggtctggggacccgcgagccccggaggcccgactgccattcccttctgggtccccggctgtccccgggacgtctgcgatggcccggccgccgcgcgcccaggcgctggggagccacgtcgggggcgtttcgcgtcctcgtcctccccacgcgcagcgtggcgggccgcggctgggctcgggtgcctgcgggaccgcggcaggaccgccgccaagcacggtcgcccgccggccgcggggcctcagggcggcgagaggcggggcggggccggcgggatttgcggacgccgcgccgctgccgggagccggcgggggcccgagagtgaccgagtcacggcgggcgccggcggagccgcggccgcgtcggacccgcctcctggaggagctcagccccggccaggcccggccccattcccgccccgcgccgcctccccgccgccgccgccgccgccgcc

SEQ ID NO: 38065 - DNA, 575 bp, Mus musculus
  source 1..575: mol_type = other DNA
tgcaggcacaggagctttttcccctctttttccttctaaaaaccacattgaaggttaactgaaggaaaacagcttgttttaacgcgggtggggtgtctcccgcgagcagggctgcagcagagcgcgcgtgctcgcccgcacacccaccccccccccccacgcccttcccgcggggtgagcagcaggctcctggctggtgcctgccaccctccacgcgggatcgcaacgggttaggaacgcgggccagggcggagccccaggcagcctggagatgctgagcgccccccagcccccgcgcgcgctggccacgccctccgcgcgggctggccacgccctcgttgcggcgggcgagaggcggggcggggcgcatataagacgaggggcgggcgccgctcttttgtctcttgctgcagcaacgagagtgggagcacctggagcgcgagaggcacagcgccggccttggggcctaccctgggtggggtcgggccagcgttccccttcggttgcaacaggcgacccggcggtcaggccacgccctggggcttcggtggtggacgagtctaggatcctcggcc

SEQ ID NO: 38066 - DNA, 439 bp, Mus musculus
  source 1..439: mol_type = other DNA
caaagttttcttctatcagtagaatatgctctatattcaacagatataataatcccactcctgcaggcacaggagctttttcccctctttttccttctaaaaaccacattgaaggttaactgaaggaaaacagcttgttttaacgcgggtggggtgtctcccgcgagcagggctgcagcagagcgcgcgtgctcgcccgcacacccaccccccccccccacgcccttcccgcggggtgagcagcaggctcctggctggtgcctgccaccctccacgcgggatcgcaacgggttaggaacgcgggccagggcggagccccaggcagcctggagatgctgagcgccccccagcccccgcgcgcgctggccacgccctccgcgcgggctggccacgccctcgttgcggcgggcgagaggcggggcggggcgcatataagacg

SEQ ID NO: 38067 - DNA, 208 bp, Mus musculus
  source 1..208: mol_type = other DNA
gttttcagagccctcatgaacatcatcctagctatgaggtctccaggagcctagctgatacctgcatgagttttgcatgtgcgcgtgggcgcacacatgcacgtgcgcgcacacacacacacacatgagatggtcagagcgtccaggtctggctgcacagaacaggcctcaagcatccctgggtgacccagggctttcaataatcagg

SEQ ID NO: 38068 - DNA, 331 bp, Mus musculus
  source 1..331: mol_type = other DNA
aaggcacctgctgccagggcgcgcacaaaataaaatgttttgtgaaaactgtaatgtgttccctgaaaacttcacatgacaagtaatctatactccagctcgctatccaacccgggaagcagttccccaaggtaggtgaaaggcacctcagcattttaagatgtgggtcaagtatgcctgcttgcccaagctgcctgagatttccattctaaagcaggaatcctccgggtggggcctgctcccaattacttggcgcgctccaggagagcgagagcagctcctcgagactggctggcagcgactggctaagcaacgggaaacattttctcct

SEQ ID NO: 38069 - DNA, 420 bp, Mus musculus
  source 1..420: mol_type = other DNA
gtcaccagagtagaatatgtactctaaatatagggaatgtagttgaatatctctctctctctctctctctctctctcgtgtgtgtgtgtgtgtgtgtgttctaatatataaaagaacttgttcaggtttgctgcatttttttctcctttctcaagagcaaaggggagagttgaattacaatacatgaatttacatgagaaatcatttttttatcaaacatgaatgcttaagatgaaagattaagacattatgcacccaaagaaagctaagcttctttaaaataatcctgttagaatgcgaatttttaggatctgataaatttatgagtgtcacgagacactggcctgtcacctgtatctctgaaatacactccaagggcctgtgttagttctttgggcgcaaaagccccaatgggggcgg

SEQ ID NO: 38070 - DNA, 400 bp, Mus musculus
  source 1..400: mol_type = other DNA
agcacatgtcagtggtaggctctcccatgtcatgcaaccccaggagcagcttcagcagtctctgagtacacagactagatggcttttccaacagagtgggcttgcactgaaagagactgagactgtcagaatcaaacaagttgtttttggaaagcaaagaaacaaatgttgattgctctacagagtcctacgtttctgttacacgtacgcagctttttttttttttttttccgcccgcaaatagatacaagaaaaaaaaaagctgagagtgtttttcatttcatcaaagaacatatattactttagcggctcggtttaaaaaaaaaatgttggttttcttcccaccccttgtgttggaggtgctcggagaaggcacaatcgcgagcactcagtgagcagt

SEQ ID NO: 38071 - DNA, 536 bp, Mus musculus
  source 1..536: mol_type = other DNA
ctttttctttgatgtagtacagacaaagccaaagttgtcaaactgtgatcgaacaaagacaattgtaactaaatattttggatacaatgtctttcacggaaattgctttcacggaggtttgtttaacagacacagccctggtccacctgggctgcaccgggccctggcctcctgctgccactccctgcagggcccgcaacagctcctggtccccgcccagagggtaacgccattgccatggagacggcacctgcgcccttccctcccctccggcgctcccgggcggcgctcccgggcggcgcgcccgcgtgcccatcctttagcagcccgggcgagtcgcgggcacgagcgaacgagcaagcaagtgagcggccgcgcgtgcgcactggccacctcccctagcggcgatccgggccgctgccgctcgcttgggcaggacgcggggcgggcggggtgaggcggagacccgggcggagcgggcggcaccgcacctcggccagaagcagctgcagcagctgccctagtccccaccgccg

SEQ ID NO: 38072 - DNA, 451 bp, Mus musculus
  source 1..451: mol_type = other DNA
cattagcaatgcatgtatccagtgatacagggtcatttaagggaatccagatggaataaagtgtaggtattccaagttgctttttctttgatgtagtacagacaaagccaaagttgtcaaactgtgatcgaacaaagacaattgtaactaaatattttggatacaatgtctttcacggaaattgctttcacggaggtttgtttaacagacacagccctggtccacctgggctgcaccgggccctggcctcctgctgccactccctgcagggcccgcaacagctcctggtccccgcccagagggtaacgccattgccatggagacggcacctgcgcccttccctcccctccggcgctcccgggcggcgctcccgggcggcgcgcccgcgtgcccatcctttagcagcccgggcgagtcgcgggcacgagcgaacgagcaagcaagtgagcgg

SEQ ID NO: 38073 - DNA, 367 bp, Mus musculus
  source 1..367: mol_type = other DNA
ttttgccaaattgatttccaaagtgattatacaaatttgcaaaataatacgaagcaacaattacttttccttaatatctcttaatatcaatggactcaattccccaataaaaagaatttatcacttttaatcaattaacttatacaatttttaatcagttcttactaatttttagacttccagatgaatattaagaaatctctatacaagtgaggtttttccaaattgattctaagtacactcatatttatttttcttaactaaatagttttatctgatgggtaataatactttacaaactatgtcatagcataatttgtgccccaaatgtttatgagaattcttagttcttatcagaagagtatcc

SEQ ID NO: 38074 - DNA, 537 bp, Mus musculus
  source 1..537: mol_type = other DNA
ggaacatgtatgttcttaaatacacatagacacatgcatgggcatatttaaaaagaaattataaaagaaaaaagcttgaatcatttctgaaagaagactcttggaatccttatgagctccgatggaagagtaaccagctaagtatgctattctgaaatatctctctctctgtttatacatggagttagctaagaagcaaatctattcagttccttaaaatcctggctatacactttatgtactgctatcaaaatgttgaagtagccattgaacaggtaattttactttgtattgtacacttgttctacaccactcaaaaaatcaaattcagcacttttgatatacctaaaatcttatgagatgatgttcatgtatctacagaagtaagttcttcagtacaactaaagacgcattcttggttttacacaaatagagacaattcttttaaaaataaagactgtaagttttataaattgtaattatttttataaaactgcatattcggtaaaacctaatcagcacctgaggtcagagcta

SEQ ID NO: 38075 - DNA, 559 bp, Mus musculus
  source 1..559: mol_type = other DNA
ccaagagtcttctttcagaaatgattcaagcttttttcttttataatttctttttaaatatgcccatgcatgtgtctatgtgtatttagagaacatacatgttcctaggtggttgctgttctcattgtgcttacatttgtacccatagaggcaaaaaaatgaattctttaatgttaaatcatcagcatgtgtcaattacatatttgcatttgcatttggcagaattcgatggaataaataattgaagtaaagacttgcctttaagcacatcttatcacagtctgtatggctgtgtgcgaagtttaaatttgaaactcagtggtcacaataagtcacaattttcatgcatttaaaaaattgagaagacaaagaaacttggttcatctataggaaatatggtcatatattccaaagaaataatgcctgtgaaggagaaaatattttaaatgttgccattttactatcaacattgcagaatttcatgtttgctaataggaaatagccccaatgtgaggaagtgtcctgcaagttttgctgggaagttttctgaatgtatgcc

SEQ ID NO: 38076 - DNA, 512 bp, Mus musculus
  source 1..512: mol_type = other DNA
tacatttgtacccatagagaaaaatgaattctttaatgttaaatcatcagcatgtgtcaattacatatttgcatttgcatttggcagaattcgatggaataaataattgaagtaaagacttgcctttaagcacatcttatcacagtctgtatggctgtgtgcgaagtttaaatttgaaactcagtggtcacaataagtcacaattttcatgcatttaaaaaattgagaagacaaagaaacttggttcatctataggaaatatggtcatatattccaaagaaataatgcctgtgaaggagaaaatattttaaatgttgccattttactatcaacattgcagaatttcatgtttgctaataggaaatagccccaatgtgaggaagtgtcctgcaagttttgctgggaagttttctgaatgtatgccctatagagcgaagatacagaagaatctctgtcttttccccagtcattttctgggcaaggaaaaacattggattcttcatttcattcca

SEQ ID NO: 38077 - DNA, 395 bp, Mus musculus
  source 1..395: mol_type = other DNA
taggaaaagaagaaggatactttttcttggtgtattctttaacttaaaaagaaaaatatatattactactgaaaactatattgtataagatgaattataatatttttttggccataaagctcactgacaagaagtagcatggactttctgtttgtgagacagatgaagtgtttctaacctgaatattaatctgtaagtgaaaaacaaaaaaaaacgtgtttacccctttcttatatagtaccattgtagagacagcacctaaattgtctagattgtaaactactttgcttgctgtatgctgttatgcaacaaaataattttttcttcattgagaagttcccaactgaagagttcatcacctgtgatcgtgccaaaaggaagtcttttgaattcct

SEQ ID NO: 38078 - DNA, 328 bp, Mus musculus
  source 1..328: mol_type = other DNA
aaaatgtgaatggaagatatttcttttctcttctcttcttatttcttagctaaacactgattttgctatatgccaatcttattgcttaagaaatttaaaaaaatggaggaagattctccctgttttagtctttgattgaaaagaaaaatatacccagagttgagacttagcacttttggaacatggctatgtaatctaaagttcacactgttttctccagctggagaatgataaaaattgatctttaacctgggaaatctgtgactgttccctactgccaggttttgtgagtcagggacccatgccagccctgatgtatataaaaggc

SEQ ID NO: 38079 - DNA, 396 bp, Mus musculus
  source 1..396: mol_type = other DNA
aattacagtaaatcaaggccttgttctaaaatattgactcaaaagattattatcaaggttcctgtaagtcttgattgttataacttatcaaaaatctaatcactgatataaataagaaatatacatatgaatctacagttataaggtcttctttgcattgtgacaaaaataccctgttaatgtctgatttcttcagtaaactcaaggttgcaatattttaaaaatgttagcacagcattatctatagcataactattatttctataagttttccggaacatagtatctgggaaaagatggccatacctgacaattcagcagggctgctataccggggaagggaacaaaatgtattcttctcattccagaatcaaaagaagagactggtctgctcaa

SEQ ID NO: 38080 - DNA, 479 bp, Mus musculus
  source 1..479: mol_type = other DNA
taaagcacacatcatttaggtacaatttccttaacctcatgaacacaagtgttggtaccaagatttagcatagttatgaaaactacgtcaaagccattctaagggattttaaaagacctcacaaatgtctgatcaaagtttgaaattcagaattacagtaaatcaaggccttgttctaaaatattgactcaaaagattattatcaaggttcctgtaagtcttgattgttataacttatcaaaaatctaatcactgatataaataagaaatatacatatgaatctacagttataaggtcttctttgcattgtgacaaaaataccctgttaatgtctgatttcttcagtaaactcaaggttgcaatattttaaaaatgttagcacagcattatctatagcataactattatttctataagttttccggaacatagtatctgggaaaagatggccatacctgacaattcagcagggctgcta

SEQ ID NO: 38081 - DNA, 207 bp, Mus musculus
  source 1..207: mol_type = other DNA
ttaaagactttttagagttcaatgaaaactcatagctctgaggagaaaaattaggtattgctacatatgcagctgcagccatgtatccctccatagtgctcacaaagagtcttgtacaaatccttgcttggttttgacaaagacttcctcaggaagggtcatatgagtaacaagaatcttaattctccaaacatacatgtattagtt

SEQ ID NO: 38082 - DNA, 452 bp, Mus musculus
  source 1..452: mol_type = other DNA
acttatgcacataaaatgtgtaggtgtctgatacaaattcagtgagaaatataaatttttgaaaatcactcatttcagattttttttttaatttcatcagtactaatttcaggatagtctgcaaattttagaaaagggccaggataatataggagaatgctcttgtttcttaatattgacaagctttagttcagttattgtctgacatcagcccaaaagcacttaagttaaatatataaacttttacaaagtcatattataaatcacttgataaatgtacagagtaagaatggatgatcagacttaaaattttcatgatgaactatctttaaaatggttgttttttgaaaacgaaaatatagacaaacaataaaaaaattattcctgccattaaaaaaacagctgctgcagttataatctgagcagggaaggctgcacagccctgacaagct

SEQ ID NO: 38083 - DNA, 363 bp, Mus musculus
  source 1..363: mol_type = other DNA
agagggagatgtatccatcacctgcaaggcctgcctacaactgtcccacagtgccacaatctggggaccaggctagtcccaacaacaggtcacatgaaatgttttgatggtaactgaagtcttcgttaaagcctggagcccaaaggttgcaggcatggaacctgatgcctgagaaagggaatacaattttggagccaaatatgtgcccatggcctataaacagatttctgcagccaaagcattttaaatacatttgtggaaaccgatgtgcaggtaatctcccgggcttcgaacataaactgcgagaatgtttggccagttattatctgcacgcatgcgcatctcgagacgcgcgactgcgca

SEQ ID NO: 38084 - DNA, 584 bp, Mus musculus
  source 1..584: mol_type = other DNA
tattggctaaaacagacagccatgctgtccacagctgtgaagacacccggtgtgtgggatagtgtttctgaaaaaaaaaagttcatttctttcactctaggaattccatatttagcaatttagatatagtcatagaaacctctaaattaggtataggtatgtcaatattgtacaggttaaactatagcacctttaggtatgttgattatagttagcaaagtgttctgtggcttttaaaactaaagtgaataaaagtatacacatatacacacacatatggagaaatgtgtatatgtatgtatatatatatatatatatatatatatatatatatatatatatatatatatacatatacacacacacggaaaaatatggagaaatgtaagggtacacatgtgtagaataaatacttatggacaatatataaaattgatgatgactggggtggaaggagaattgaactaccccctccacttcccctatattgagtaattagagctatatctgccgtccttgagctacagatggtgctatggaaccaaaggtttgctgacccgcgttatagccagcgctatagcgag

SEQ ID NO: 38085 - DNA, 336 bp, Mus musculus
  source 1..336: mol_type = other DNA
ctgattaactaattaaattgtggtgctgcagatccagagcccaactggtaatttattcccaacttacttgtactccattttgatatagcattcctaaactctgatactatggaatgccatggaattgttacatgtaattggaacatgtcattaatacttgactctagaataaactataggacccatgttcaatttccagcatccacatagggtcccttgctgcctgtaactagctccaggggatcatataatgagatcacagtacttagtgaaatgtacaaacttgtaactttgcaaagaggaaaattatatacatttacaggtataatccggagt

SEQ ID NO: 38086 - DNA, 210 bp, Mus musculus
  source 1..210: mol_type = other DNA
agcagctgtttctagagtatgcttctgatagcagttctcgaggacacctgggattctgatgacagggctgggctgcacagcctgcctgtctgcctgtctagactgtcaagactggtccactcctatctttgccccagttacctgtgctgaatttaacaaagtaagtggttatttcgcgtctcgcggcgcccacgtggggaagggggcggg

SEQ ID NO: 38087 - DNA, 266 bp, Mus musculus
  source 1..266: mol_type = other DNA
gctttccaaacccctgtccaggtgttagcaccggactcgtgaattccaaatcgctgctccaatccctggagcttggctgagcgggcgaagtacttagttaactcttctcagagccccagatccccgagattggagtggaccgtggcgttctaaggctgttggcgccccctaaagctttaaatgtgacgctgaagccggcgagacggacccgctggcagtctgagcaagaaatctgctacctccaaaacatcgcgattccgttcaaa

SEQ ID NO: 38088 - DNA, 485 bp, Mus musculus
  source 1..485: mol_type = other DNA
gaatccggtggagacccttcccatgcctctccaactggacaggcgcagaaaaggaggctgccaggttgccgcaggcggcttctgcactcaccaagctttgcagagagctgcgcacagtccccagtgtctgcagctgagagggtagtcgcggggctcccttggagagcaccggatagctgctccttaccagaaggaaagttgacttccggacttctgaagcctgtcacttctaggtagcaaccagagtgtagcagtgaggtagaggttgcggtccccggctgagcctcagagcagcatccctggtatgaccgcgaccagctggattcgtccggcctgcagaacgcccacagcaggtcacgagcagcagaaggcgtggtggctgcggtggtggagcgacacagctgccaacaactggcgcagctgctgcgctgtgcttcgggaccagcgagtagacagtccaggtacagccccttccccgtgacgtc

SEQ ID NO: 38089 - DNA, 492 bp, Mus musculus
  source 1..492: mol_type = other DNA
atcaaattgttttctaaaggagacattaatttttttctcatcaattttgccctggctgtcctcgaactcactttgtggaccaggctggcctcgaactcagaattttgaaaagttacttgtcatgataatgttttgccaacactacatactagtattttaaaacataaaccctatgcaattaatgttcctagagaacacagttttcacagacaaccccggcgctggcccgggtctgtcgctgcgcggggcagcgttgtggggacacccacgggttcccctcctgttggcctagaaaactcagcacctactgaggctctagagaagcatccggacttccggctcagctaggccacgcccggccgcttccaggctgtggccgcccggaagagtccccggagtcagagggggcggttctggcgcgccacgcctagtgagggtggggccacgcccacacggagaggcgtggtctctacccggcgcgggaaaggggcc

SEQ ID NO: 38090 - DNA, 419 bp, Mus musculus
  source 1..419: mol_type = other DNA
aggtgctatttcaatattgatggcgtctactcataaataggcatgagctgaggtcgaggcgggctcttaaagtttctctccagcctttgctggcttcccttgggcaaaactctgtcacagggcagtggcagcccctcacatgatccccagataccagattatggcgtgtgctgcttcacgcgccccccacccgaagctgagcctgacgcggcggtggctcatgcgccctggagtcccgagctctagccacggaacacagtccctggcgcccagctccgcccctagcctcgggcgcgtctctcccgccgcctgcttgggtgctggagcagccgcgcccgcgggctctaggcgctgattggctgtggaccgcgggcggacagccgaagagcgcacacagtccggggcggcccaaagagccg

SEQ ID NO: 38091 - DNA, 225 bp, Mus musculus
  source 1..225: mol_type = other DNA
cctggggtacctgagactctgtctcacgaagactcgttggactggtcattctgagcaataatagcatttgtggtgtaggagttcatcaacaggaaacgttcttttcagaatgagtcctccctccaggcccgatggcccagtcggctgcattgaggccaacgcgcgagggcgctcggggagtaacttgagcatcagaatactgagtcagaaacttgtgatacaaag

SEQ ID NO: 38092 - DNA, 271 bp, Mus musculus
  source 1..271: mol_type = other DNA
accagaaaagggcatcagggagtctctcggacccaccctgactaggatgcaatgtgatggcagataaacccttccttaagttggaccttagcaatgagaaaagtaactaatatattcataagtatatttgcattttaatttatttattgtcagaggaccatctgagctggtgctcttagtagcacagatatggatatttggggatttggagcaactgctacaaattcactggtgacttaggaacgtttccatccttctgaggataggaaga

SEQ ID NO: 38093 - DNA, 324 bp, Mus musculus
  source 1..324: mol_type = other DNA
cgaagcaatgaggccatctttttttaacagactctaaatctttaatagtattttccttaattatttcatgaaagattaagagaagtaaaaataattctagtattcctacagtccaaatacattactttaacaaatacattagcaatgcattaacaaatgccattggatcagaaaaaaaaaaaaaaaaggcaattttcttttacgaggccattgtttgtgcacttccagagaaagttatcttcactattcccgaggtccggagctcgcgggtgaggggccttgtgcagtgagatggcctgatgcctcacaccctggggccacaag

SEQ ID NO: 38094 - DNA, 380 bp, Mus musculus
  source 1..380: mol_type = other DNA
gcatctgtatgcatgtgtagcacacgtgtaccctgtatacatgtgttgtccacacacaaacacataaaccttttaggagagtcctttcaagttaggcttgcaactataattctatacagtagggaacaaatatcaaaaattaaatgttaatttataaccagatgtcacaaactcagggtcctcctgtgtcagcctcctgaattgaatggaggtgatcatcttactgtcaacacattactattaagaatgattgtgggaccaaagagatagctaaatcagtttgcagtgccagcatggggtttgatgaccagctaacctcaaaggccttttttcaaataacaaaaggtgactcctgaacacacacacacacacacaaagaa

SEQ ID NO: 38095 - DNA, 327 bp, Mus musculus
  source 1..327: mol_type = other DNA
gggagactggacccccggagctggctgcagggaggcccggcagccgtattcagggtgcttgacttgcatgtggcaacgggaagctttccaggtgatgtcacggccttcacccaggcactagggcccctggttggtgatcaccgcccctgagtggtgccactgtgtgcaccactataaaggctttagtgagctctccctgccctccgctcccccatcaccgccgcaggggccggggaggggcgggcacgcctccggcaccctgcagcctcgccccgccccgccccgcccccagccctccgggccaggaagcgcggaaggaaacccctc

SEQ ID NO: 38096 - DNA, 330 bp, Mus musculus
  source 1..330: mol_type = other DNA
gagagagtcctggtcctggagattactttcaggacttccggccaggggagactggacccccccttcctctccggagctggctgcagggaggcccggcagccgtattcagggtgcttgacttgcatgtggcaacgggaagctttccaggtgatgtcacggccttcacccaggcactagggcccctggttggtgatcaccgcccctgagtggtgccactgtgtgcaccactataaaggctttagtgagctctccctgccctccgctcccccatcaccgccgcaggggccggggaggggcgggcacgcctccggcaccctgcagcctcgcccc

SEQ ID NO: 38097 - DNA, 339 bp, Mus musculus
  source 1..339: mol_type = other DNA
gaggggtttccttccgcgcttcctggcccggagggctgggggcggggcggggcggggcgaggctgcagggtgccggaggcgtgcccgcccctccccggcccctgcggcggtgatgggggagcggagggcagggagagctcactaaagcctttatagtggtgcacacagtggcaccactcaggggcggtgatcaccaaccaggggccctagtgcctgggtgaaggccgtgacatcacctggaaagcttcccgttgccacatgcaagtcaagcaccctgaatacggctgccgggcctccctgcagccagctccggagaggaagggggggtccagtctcccc

SEQ ID NO: 38098 - DNA, 308 bp, Mus musculus
  source 1..308: mol_type = other DNA
atgggtgctgctctggccaggagccctcccttgatgcccgtccaagactgcccacagccaggatgcgggtgtccggtgcaacctcccctacactggggtggagactacagatccgactcagtgggggccgcggaggccatggtggcctgtaggcaacttggtcacttttggttgtcaccaaagtctgtgttttgggcaaggactgtggaaacacatcccttgacatccccaggagacctggtactgggactcagggagctgtccctgaacgacgggaacccgcttcactgcgagggagatggaggcgc

SEQ ID NO: 38099 - DNA, 466 bp, Mus musculus
  source 1..466: mol_type = other DNA
gggccgctgtcgccgccatcttcgcagggccgcgggggcccctgggaaggcggagtctttgggcatccgccgagacgccagaacctgaggcccggaggcgccccggaagggctagcgttcccagcatgcctcgcggccccggggtcctgacgggactacgtttcccggcatgcgctgaacgaggacggggggcatcttctggaggaagcctcccctgttagctcctgacctccgggctctgctgacgtcaggaactcctgactctcagagggacccccagtctcccggcccaggtgcctgaggggagatctgacgtggacccctggggacttcaggctccagtgaccaggaggcccgcaggagccctggaagccgtcggcgcgaatggctggcggtggagcctcatcgcagatgtggtggctgtggtctagttgaccagacagtgtaatgggtactttccccatcc

SEQ ID NO: 38100 - DNA, 602 bp, Mus musculus
  source 1..602: mol_type = other DNA
cggtgttccccaagagaatcccaatgggtaaggcctggggagccacccggtggcgctctcggcctcgccccccactcacacgcggtgatcgcggagtccggagtcctcctgccgggccacgagccccaggaccgcacacatggttcgtaccacgaacctgggggtgaccgtgcggtccagagcccagcccagccccgatgctcccccgggcgccgcggtccgcacctgcggaggacgctgtcgggcagagcgccgtcactcgggagcctgtggcgagaggcgacgcgatcaggcgccgaagctgacaggacgcgctgaccggtctcttccctccgcagcgcttaccggtgcgagtcaaagagccgctccggccccggagctgggggaggttccatcgcagccgcttcaggagagcggggccgctgtcgccgccatcttcgcagggccgcgggggcccctgggaaggcggagtctttgggcatccgccgagacgccagaacctgaggcccggaggcgccccggaagggctagcgttcccagcatgcctcgcggccccggggtcctgacgggactacgtttcccggcatgcgctgaacgaggac

SEQ ID NO: 38101 - DNA, 433 bp, Mus musculus
  source 1..433: mol_type = other DNA
gaatcctgatccgtttgagaggatggggaaagtacccattacactgtctggtcaactagaccacagccaccacatctgcgatgaggctccaccgccagccattcgcgccgacggcttccagggctcctgcgggcctcctggtcactggagcctgaagtccccaggggtccacgtcagatctcccctcaggcacctgggccgggagactgggggtccctctgagagtcaggagttcctgacgtcagcagagcccggaggtcaggagctaacaggggaggcttcctccagaagatgccccccgtcctcgttcagcgcatgccgggaaacgtagtcccgtcaggaccccggggccgcgaggcatgctgggaacgctagcccttccggggcgcctccgggcctcaggttctggcgtctcggcggatgcccaaagact

SEQ ID NO: 38102 - DNA, 510 bp, Mus musculus
  source 1..510: mol_type = other DNA
acgcttcagagtaaatttattcttttaaaatgacccagtgatgacagtgtaccagacccgggaacccctgtgtcctccccaagtgcgggcccgggcctatgctactgcaggcactctccgcaggcgccgatgattaaatcatcatcattatccccatcctcggcagcagggagagagtggggagtaagagctcccggttccccggggggtctctccctcggcgcagacgggagaaggcccgcggctgggacgcagctccgcaacgcggacgccgcagcggagcaggactgcactgtagagaggaccccgggtcggaggcgaggtcgggtcccaggactcccacactccggagctgtagcggcgggcgatagcccggcttcggggtcccaggccgttggaaggacgcccgtgggagcgtgcaccgcagagaacccccctccataacgaccaccgattgttgggggggcagcgggcttgagcacaaagtcccgccccgcaggcggtaccgga

SEQ ID NO: 38103 - DNA, 294 bp, Mus musculus
  source 1..294: mol_type = other DNA
caaggccaagacttaagggcaggtctgggcatgcctctcttgcaaaatgatgacttcgcaagccctctgacattgtgatcacctcacccagctcgggcctggcgaccccaggagagcctgcaggagcgcatgacaaagcctatacactctctcccccatgtcccacaggagattcagagagagcaggacggagactgggggcagccctcacccagctaacaacaggtaaaaagggagggatggggctcccccaatctcacattaaatagtgtagactagaacctgagtttgagc

SEQ ID NO: 38104 - DNA, 488 bp, Mus musculus
  source 1..488: mol_type = other DNA
tccgcaggcgccgatgattaaatcatcatcattatccccatcctcggcagcagggagagagtggggagtaagagctcccggttccccggggggtctctccctcggcgcagacgggagaaggcccgcggctgggacgcagctccgcaacgcggacgccgcagcggagcaggactgcactgtagagaggaccccgggtcggaggcgaggtcgggtcccaggactcccacactccggagctgtagcggcgggcgatagcccggcttcggggtcccaggccgttggaaggacgcccgtgggagcgtgcaccgcagagaacccccctccataacgaccaccgattgttgggggggcagcgggcttgagcacaaagtcccgccccgcaggcggtaccggaagtggcaggggggccagattgcgatcgcgatgaggcttcggagggatgggcgcccagtgcgcttgcgcagccacggggtgcgcgatacgcacgc

SEQ ID NO: 38105 - DNA, 338 bp, Mus musculus
  source 1..338: mol_type = other DNA
aaccactctcagaggctgggtctcacactgtagcctaggctaacttgaaagtatgttggccaagtgtcgactagtgctgggcagtaataatattagcattgcagcagcagcagcagcccgaggaccccttgctgttcctttggagtagggtccgaaccagctgcttcccaaaactctcagaggcaggctgacaactctgagttcgagacctgcctggtctacaaagcaaaagcaaactgaggtctcgctttcctcttttctgccgcaggacccccagagggcagactgcagacctcccgttaacggtgacaggaaagtctagctagaatttgatagtc

SEQ ID NO: 38106 - DNA, 421 bp, Mus musculus
  source 1..421: mol_type = other DNA
agcaatgagaggcttgctctttgggagtagccagtctatacctataagctgtaaagctttcagctatctgaggaagattgcccaaccttactgacccagctttgttaagccagagttgccttatttcagctcaagatgatcatcttccctgggagtgagtgatcctacaggctggccctctggagtccagtcctcactagccaggagccctctgagcaagtagtaccagccgagcctccaggctacagtgtggcctgccccattccttgtggtatcatggccagggaaagcaattttattgccctagagagtacatccagtttgaatgtgcacctcaaaatcagaagccatgggcttctttctactctatagaagaaataaggctgccagacacctatgggcacccgattcactgaggccc

SEQ ID NO: 38107 - DNA, 390 bp, Mus musculus
  source 1..390: mol_type = other DNA
ctaagtttcaggtgcattcatttggcaataaatatttaattaaaatgtacttggttgacagatccaacaatttgttctagaccattagattcactcgtacccggggcgaccttgtctgcgcccggtgcagatgctgccgcggcgttcaggtggcatctcctggatgagtttgcagggctatggcggcgatctgccccacgcagggctcagagccgtcgtgcctcacgtcggcgatcacactgctcaccgtctggaggaaggtcctgcggccggagggcagcgtgagcgcgtccgggggaccagggagccgggacgagggtgcgcgcgcacgcgtggggaacacggacgcctcccctccacgttcttctcagccgccatggttacctccac

SEQ ID NO: 38108 - DNA, 375 bp, Mus musculus
  source 1..375: mol_type = other DNA
gttatgaggtccagaccactgaactgcccacacctgctaagcaccctgggggggagggggaggaccaggacctagtcctgaggcttacctggtgggaaaccagcaagcctggcttgccctgagctacagcctgaaatctggatggtctacagggctagcgctcaggagacagaccttgctttctcgcctggacatttaagccgggcagggcttgccttctgctgggtggacagtccccgcagtgacatcctttccaagacctagatctcgcaggcaggaccccgagggagagggcgcttatgctgtgtggcacagatcgcgggtggccccggaggtcagccgcgcgaagtaccgcggagccgccggaagcggtcc

SEQ ID NO: 38109 - DNA, 305 bp, Mus musculus
  source 1..305: mol_type = other DNA
ctaacagtccctagctcctgacactctggaggctgaggcaggaggctgtatacaaagcaagactgtcttaaccaacataattttacatagcaagtttaggacccaaagaggccatcagatcctccggacgtatgaaaagacatggtctcactgtgtatcccagggcggcctatttatttatttatttatttatttatcaatcattttattaggtcgtcagcctcgcgagccagcgggcttcggggccggacctgacgtgaaagcgggatttccggtggggcggggcgctcggggaggcgcgcggc

SEQ ID NO: 38110 - DNA, 428 bp, Mus musculus
  source 1..428: mol_type = other DNA
ctccagaaggcgcggagccagccgtccccgactctgcctctgccagtgggtgggggctgccctgcccctgccctcaccgaactgaagcgcgtgcacggaagcggcggctgcaggccaccaagacggccgctcctagcgggcgtggagggcgcggggcggcgcggggcgagcggcgcggaggacgggctgctgccccggcccctgcacccatggtgcgctactgcagcggggcacagggccgttcccacacccacggcggtggcacagcggcctgccccatcgggccccgctccctgcagctacggctgggagggcccgagggcccggggtccccactcctggccacccagccaatcggcgaaaatttttgtgctgaacggccgttcattggccgataagtcaaagcgccgctgcgaccggttctctgg

SEQ ID NO: 38111 - DNA, 271 bp, Mus musculus
  source 1..271: mol_type = other DNA
atctcagccctaggatttgacaccagtctgggtacatacggagtaccattaactagcttcctaacttcgcagtacagggatgtagtaaattcatttagatccctcattagagggatcttgtattctttatattatttcacaacttttcttagttgagaagcttagtgtttacaaataaagatgcaccgcaacgacgttgcccctcattgccaaccaatgagaatgcctttttggctgtaaggcgtaccacgcacaaacgcggggcggaaaa

SEQ ID NO: 38112 - DNA, 393 bp, Mus musculus
  source 1..393: mol_type = other DNA
aagggattttaagtccactttctaaaaggctattgagtcacttgctgtatagcacagtgcttctgagctgccttctgctcacctgctctagtccagcggagaagcttgctgctgagggcccagtgctctgggatctgctcctctcagtggttagaccaaagttctgtggtcccatagggaagtaagtggaatgtcaagttcctcccccttaagtgagacttggggccatggaagctctcaggcactgctggagtgctttagggtggacccaaactggcttggcacccgagtacgggccgggactttagcgggggtggaagaggagggtgccgcgccctgcccagcccaggtgtcgtctccgggggcggggtttgggaaccgggcagctggggg

SEQ ID NO: 38113 - DNA, 333 bp, Mus musculus
  source 1..333: mol_type = other DNA
gaggtgagaggccgcgtccctgccttcccctcccagctctggcaggtagccctggccaccccgactcctgggcgcgccaggatctgggtctacaataagccatgccttgcctggttgaggtaatcaggtccctctagtatcctgggccaaggacattgggcagccatctctctctctctctctgtgtgtgtgtgtgtgtgtgtgtggtcacacccaactaagaagagtctctagcctctagcctaccagcagcagcagcagcagcagcagcagagtatccccgggaagcccgcctgggattccaggcctggcttaggctgcccagaacaaagg

SEQ ID NO: 38114 - DNA, 521 bp, Mus musculus
  source 1..521: mol_type = other DNA
tagcacccatgtgatggctccaaactgtaactccagttccaggagatctgatcctctctcctggcctctgcaggcatcagaaaacacccatatacataaaatttttttttgacttaaaggtaattggtttgtgagttctagaccagccagggctacacattgagaccttgtctcaaaataaaaggcaagccatggttgctgattaatatggtctatataatcagactgtctcgatttaaaaaaaaaaaaagtaataatgataataaagtaagttttaaggtcaccctcagtttacccaccaacacgttcctggtcagaaaggaattactatttgcactagttccctcagggaccgaggtacaggcatgccaccgagccttcgtgagtgacagtcactccgttgtagctgcagtggccgcgaccctcctcggcaaccaggccccgctgagggtccctggcgtggtccacggttgcttggtaaccgcgtagctgcgcgccgcaagttccagccacaggccacg

SEQ ID NO: 38115 - DNA, 361 bp, Mus musculus
  source 1..361: mol_type = other DNA
cgggaagcccgcctgggattccaggcctggcttaggctgcccagaacaaaggtgagtcagaggacccaaggaacccgcgcgtggccagcgtcggggagtcgctcgtgttcctgagccttgcaaggatatgccaggccttgggagccatagctgaggagtcggggcggagctgctgggccaggcctgccgccgggttgaccacggtcccggagtaggggggtgggggacagccctgcagctggctgggacccggggctggtttcctgtctggaagggaaggggccggattcgcacattctcgatcggccaggccagaaatgggaatgaaagggcctttttcttccacagctgggagaacagc

SEQ ID NO: 38116 - DNA, 154 bp, Mus musculus
  source 1..154: mol_type = other DNA
gggactcactccagcaccctctttaacgtggagctggcgctgggccaagggcacaccctcaggggcagcactgatgagatcacgggctggcagctgcaagagacgacgcaccgacgcacggcctctgggcgtggcctgtggctggaacttgcgg

SEQ ID NO: 38117 - DNA, 334 bp, Mus musculus
  source 1..334: mol_type = other DNA
atgcattgtatgttcagaataaatagaaatatttctttctagatcctgtcactgacagtcattttacaaataaggaaacctaactcctcctcctgtggagcgctagttttaacaagccagttaactatgctgctgacagcaatggttcaaaaagggaatggacatcttaatttatttctcccgtttttgaacgtagtgcgcgtgcgcatgcacacatgcacgcatcctgccgcaggtgtgcctcgcttggcgagaccttgtcagctaggggctcacagaaatctagagttttctgggacccgagggcgggcggcgcgcagggcagtccgtgggg

SEQ ID NO: 38118 - DNA, 431 bp, Mus musculus
  source 1..431: mol_type = other DNA
atcacctaacagaactgctttgtggcattatgcaagtgtgcagagtggcaaagtgtattcagggactaggtccacattacagccaggggatccagtggttagaccccaggccctttgcttaaggggtaagaccttaggcattgacctgtgaatactagaataagtagtttcattaaattaacaccatctgttttaaaattatgaaggtaatataacaagcttgtgaagtacacaactataaaaaataagttggcttgttgactacctttaataatcccattgaatgtgatgtttatctggcccagtgtaagacagagatcgagaccctcgtcgtgtggagtccagacatgaagcctcactcactgggactgggggcagtgatagtaagtgtcacctccagaaccccatccctgggttcgtgtgaaggaggg

SEQ ID NO: 38119 - DNA, 334 bp, Mus musculus
  source 1..334: mol_type = other DNA
ggagagggcagccctccgtggggctccttgcgcttctcggcccagctggaggctgggcgaacacccaggctatttgttgggtgtccatccaaaggtagaaggaggaggagagaaggcagtcttcccccactcatgcagtccagaggaggagagtaggcactcatgctcttcctgtcagctgtcagcaagcagctctccgcttttctccttcagacggtgggatcatggctccaagcataagctctgaaaccttaggtaacctcagttacttcaatctgtactcagatagaggtcctcaggatgagctcttctgcgcagatgagtcacgtgtcca

SEQ ID NO: 38120 - DNA, 280 bp, Mus musculus
  source 1..280: mol_type = other DNA
ttcttctaagacttcggaaccgagtttgtagtgctgcctctgagcctctgtgacccccatggggttaagtaccagttcctgctgtccatgggctcccaactcccagcggttggtgaggctgtcctggccagggcaccaggcctgccaggctattacgccctaggggggttgtgtacaaatgctacctcccagcccctctactggagcctccaggtctgtccggaagggctcgtcctcagctgccaccaccctgctgctgaggagcacacaggtgtttgag

SEQ ID NO: 38121 - DNA, 480 bp, Mus musculus
  source 1..480: mol_type = other DNA
ccacaaaatgtttgtcccatgaatggtaatgttaacttgatttttaagagaacctgctgttcttttcagtatacgtatacacatgaatatatatatatatgtatacacacacacacacacacacattaactttttataaaagcttcgttttaatttatatgtacatcctccagagggtaagtaatcttaactgttgagtcatcttactggcctcgcaaaactacaagtagatcaatttttagtatgattttgccaaatgatgatttctccttttaaaaaaaaatttttttttagtgcctatttttgtttgatgaatgaatgaatgaaccccagattcagttggcctagctgagggaccactgctgcctctcctcagtcagcaatcaggacctgctcctggaccagcgctcctacgccggctcaggggccaatgggcgcgcgggaggcggggctttcgtgggcccggggtatagcttcgtg

SEQ ID NO: 38122 - DNA, 264 bp, Mus musculus
  source 1..264: mol_type = other DNA
aaatcacatacaaatttacagtaataaatacaaatgtataaaaggtggttctgtaattcccgacgcaggacggtccagggtcatccttttgataaaataaaattgatgacattaatgtgacaggtggcattcaaatggttttaaaccaccggcaaaatactggatctttgccacttttttctggcagacgtccctcggccacggaacagttgacagcggcgcctagttggccccatttccctcccgtgcggctgagcgaagccc

SEQ ID NO: 38123 - DNA, 370 bp, Mus musculus
  source 1..370: mol_type = other DNA
ctgggcctataaataagcctactttaattggtcactttaaagaacaactacaccagaacagttactactgcagaagacagggtctcactgtgtagccctggctgacctgccacattttagttttgagataggaactaaaaactggttttgaacacaaaacaaccctgggatgtggccattgcagcagtctgccccggtggcttagagcactgactgggatgttcggggtgagggcaacctgttctgtgcaccccagggttctgcagtggcagccagcggccggttccgggtggcgaccgtggtgcgggtgcggcctccggacggcagggggcgggctcggcctgggcggcgactctggacacagtgcccg

SEQ ID NO: 38124 - DNA, 382 bp, Mus musculus
  source 1..382: mol_type = other DNA
ttccccttccgagagggggatggggtatgcctatagttagatctggtggatcttctccagaagagaaacttgtttaagaaaattgcatttcaggttatatgggctatagccagtccttggagaaccagagctccagctctgctctggctgagagtggccggtatgggatacccacatcgctagaactgcagggggccaggggtaggagggtgccccgggatccccggcctgcctgggaagcagcccttgtggcgatggctccctccaccaaggcccctgcctggctgctgggcaggtccttggcggggagggccgggcgcgggattggctggcgcgcgcgccgcccccttgcacaccagcctggcggggcgggagcagccgg

SEQ ID NO: 38125 - DNA, 306 bp, Mus musculus
  source 1..306: mol_type = other DNA
atgtctcctctccaggattcagtgaacatttacctatttaaaggtcaaaataaatgcgaaacattacttgtgtaagttactcagcaggtaaaaacactagctgccaagactgatagcctgagtttgagcagactcttataagtcgtccagaaaatatcaaaataaataagtataacaagatttttgttgttctgtttttctaatatgcaatatacacatattaattaaatcgcgagaacagagcagctcctgcggcctcatgacggccctctgacgtcaaaggtgcgctggcgtcgcttgatcgca

SEQ ID NO: 38126 - DNA, 666 bp, Mus musculus
  source 1..666: mol_type = other DNA
actttttcaaagacgcgccccttccctctcctctgggaggcagggcgggggtctcggatggcagagccgtagggtcggccagggcagggcgctgccatgcggatgccgtgcagcgggcgctcggtctctgccctcgggcacccttgtcctgcctcggcctgagaggcagccgaggaggagaaggtcgggctccggggcagtcgggcgagcgtggggccgtcccgagctcgcaacacccaggcggctgggccaagggcctagctggggaggtccgcgccccgccccgcccctcctcgacagcttgggctgcgggccccgccggagggcagggaaagggccagcccgcggggacagccgcgtctcaggagggcccctccgtgaggcctggggaggcgctgcaggtgcaaaacccgggcggcccgcgcgcgcctcgctccctccccgggaactccgctcttgcgcggtcccgggcctagcggccagcctcggcgggaccgcacgtgcgcgccctcccgggcgggggagtccccgggcgagcacgtgccgcggcgcgcggggggcggggagtcccgcggccgccttcattgctcctgctgctgctgccgccgccgcggccgccgccgctgcttccttcctcctgcgccgtcccctgctcggccagggctg

SEQ ID NO: 38127 - DNA, 296 bp, Mus musculus
  source 1..296: mol_type = other DNA
gggcctttaaaaacagaaacttgttttctaacagctcctcctcaggaccgtaaagatctatctctaaatccagtcaatgtgtgttctagaacagaaccccagttgtagagacatctttgagaattctggaaattttaggtttctttaaaaaaacacacagagaaatattgtaagtacttttattttaatacatggttttgccacaatttctgcaattgtgtgatgtttggaattctgagaacttttcagagggtacaaaacaagaggaaagacatttgattcaaggttctctttcc

SEQ ID NO: 38128 - DNA, 311 bp, Mus musculus
  source 1..311: mol_type = other DNA
accttgaactacatgaacagagacaggactcagaggacttatgtgttacctagttaactggggcctttaaaaacagaaacttgttttctaacagctcctcctcaggaccgtaaagatctatctctaaatccagtcaatgtgtgttctagaacagaaccccagttgtagagacatctttgagaattctggaaattttaggtttctttaaaaaaacacacagagaaatattgtaagtacttttattttaatacatggttttgccacaatttctgcaattgtgtgatgtttggaattctgagaacttttcagag

SEQ ID NO: 38129 - DNA, 421 bp, Mus musculus
  source 1..421: mol_type = other DNA
ctttcttgcttgaaggacccacatgcagctcacatgtcaggtacgaagtgtgaagttgagactatctgccacagagctagtgttagacaccccaaccctgggggacgggcagagcgactccccgtgctgttctgcgtttgccccagacaaagcaaagcacaatggcactgtgggcatgaatgtctcaggcagaccctgaggcagcaggcggagggcctcagaggaggccactgccattcttggtatggctctctctcccagagcacagccctgtcaggcctcatttgtttatgcaagtatggcctaaaaggaacaaatccatggtccagagtctgttaccactgaaaggctggtttattaaaaaaaaaacaccttatatggtaatattgctaccacactgccttctgtttaaagaagatcc

SEQ ID NO: 38130 - DNA, 335 bp, Mus musculus
  source 1..335: mol_type = other DNA
cttgatcactaattgagaaaatgccttacaattgcatctcatggaggcatttcctcatgtgataactccagctgtgtcaagttgacactgtgaatgacaagctagatagcgatcccccttgaaatattaatttccgatggaggagccattggcaggaaactcctgcttcagaatgggacccttggaggctctcagagacacacatatgtagcaaatgtgcagctttcatgtgggtcccccaacaactggagtgggggctccttctccggcctcagcgggagaggggagagcctttaccaaaaggagcgctgcagcgctccctctcattggtggaa

SEQ ID NO: 38131 - DNA, 347 bp, Mus musculus
  source 1..347: mol_type = other DNA
gaaaggacctgagagggaattcattatgataaccaaggattatcctgaggtttggactggccaggctcccgaactcagatcccacctttattaaaaaagagctaattgattcagtgaggcagcctggctagaaagctgtaaggatcttcctctgtgactacaggcacatgctgctgtgagcgcttcatgcttcaagcgcttcaagttgacagtccccttcttaggggcagattgcagaccctgcgtggctctgaggcagaggctggcatggagccaggggcagagggggaaagggctgttgggctcttggcctctgtaactccaagaggaggagtcctgacctcagg

SEQ ID NO: 38132 - DNA, 315 bp, Mus musculus
  source 1..315: mol_type = other DNA
aagtccttatcttttgaaaataggtgctggagatctgaacagctcctgtttatggagataaagctccttaagatgcttcaaaaggaccctttacacatgtatacaggactggagctatctacctgtatgtactttgacagtgcatattcattctcaagctgctgagtgagaagactgagaagttcatctctgggcctgggttgagctcttagaaggcactcaatgtaaatagaagagtcttcagataaggaggcttcctcatccaagaacagggaacttgggcatgacaaagtggcctctttctggataaaaagg

SEQ ID NO: 38133 - DNA, 358 bp, Mus musculus
  source 1..358: mol_type = other DNA
cctgctttgtgtcccgcacatggcccagggaatcagagctgcggctgtccccttacctcgtaccaggcaggcgagccgtcgctgtcccctccgctctccctggagcccgcagggctggaggcggaggtcccagcaatctccctcgccgcggtgctctccgtgacgcccgctgcggccaccaggctcctcccggcgcttggggccgcggtcccgctccgcgcccccatcgcccatgcccgccgccactgctgcttgggccacagcagccgctagtcccccctacaggccccgcccccgtcggcgattgggcgcgagctggggttcttcgcgcctcctcgcgtggggcggtgtttagagc

SEQ ID NO: 38134 - DNA, 402 bp, Mus musculus
  source 1..402: mol_type = other DNA
tcctgacactgtctaaacagaagcgggacacacaggctcctgtccagagatccgtctggagcaggcactgaacaagggagcccgtgctcagtctcattctctagggtgacaacctcagagctgcgggagagcccagcgtttgctcttggcagtacaacctggcggtctgccggtccagctccgcacctcaccctggctggggacagcatccgcctcccgggcttgtctggcgaaactcgcgggatccccaccttggttgggggacgcgtgccctgaaccccagacctctcgagctctgagttttccatcaagcggagccgctctaaacaccgccccacgcgaggaggcgcgaagaaccccagctcgcgcccaatcgccgacgggggcggggcctgtaggggg

SEQ ID NO: 38135 - DNA, 395 bp, Mus musculus
  source 1..395: mol_type = other DNA
aagcagcctcttttcatctggctgttgccaggtaacctgtcaatttggcagccaacatcacatgtaattacccacaatggtagcattttaaatatctagcataatttgcagactcatggaagcaaacaggagactgctcctctgactcaaggaacatggtagcttcctgcaggaggtggcctgaagctggcagggacctgttttttttttttttaaaaaaaaaaaggaaaaactgaagctgagggacctctgggcacagaggttagaagaggtgctatgcaccttgctccgcattgcaagctttcaggactgagtgggggcagccactacaggctctgctcagcccatgcataccagcttccctgtttacagtcaactggctgctggcacaggct

SEQ ID NO: 38136 - DNA, 291 bp, Mus musculus
  source 1..291: mol_type = other DNA
aaaggtcactttggcgctccccagcggcacgggcttctacgattcggggcccagtcctggggaacgacgccgcgaggggcgtcgcatgccacccgcccacgcctttggccccagccaggactcaagggagggacgaagtttgcaaccctggtttagcctctattggaatcacagagattttgtatatgaagttgtattaactagctccctctgcaattccacatactaaattatgacgtcctccacggagctccactctgcttcttttcctgggaaacggaaggatagaga

SEQ ID NO: 38137 - DNA, 293 bp, Mus musculus
  source 1..293: mol_type = other DNA
tattcattatatagcaagcgagatggtcagcgattgagctttccctccgtggatgagcttccccgtagctgggataaataatagtaacatctgttggaaatagttcacctttagctaacgactcagagttattattttttggatttaaataaaatgatgttggagataggcaagcctctggagtgcagtctctatccttccgtttcccaggaaaagaagcagagtggagctccgtggaggacgtcataatttagtatgtggaattgcagagggagctagttaatacaacttca

SEQ ID NO: 38138 - DNA, 277 bp, Mus musculus
  source 1..277: mol_type = other DNA
tcctcctggctattgaagctgcctcttaagtggtttagagttgagcatttagcatgctgagccagcattgcattccatgccagtctgggttattcactgagacctgctcagcgtactcagcacaaggtagagtgtgcgctcatgagccagggtggggtggtctggacgttggctcccgcccttgcgcaccgcgtctgccagctacttccggctggcccttggcagccctcacacaccctcccaggagcctcagctggggtgccgcctcctcgcctac

SEQ ID NO: 38139 - DNA, 484 bp, Mus musculus
  source 1..484: mol_type = other DNA
tagaaagtttcctagtaacagtagaaacatgagcaagtttccttataatgaggctggccaggtaacatataatacttagtgtcaccaaggccagcctggtaaaaaaagaaaagatctttgcatgatgtttctacacctttaatcccaggatttgggataaagcagagccaaaaccaaagttatattttgccctagcaattgagagctggttacagttcaaaggccagccgagaccctccctttctgaaaataacaaacaaaaagtttgtttgagataagaggcttgtccacaagagaagggaatcttcctctcccagaaggatccaaggctgtgcggagcaggcttgagccaggattggttccgctccgtaccgggtgcagcgcgatcgatcctccgagccggttagcggcgctcgcgggcttggcgggggcgcaggggccgcggcgctccgccctgctcctctcggcgtcctctgggcgggga

SEQ ID NO: 38140 - DNA, 164 bp, Mus musculus
  source 1..164: mol_type = other DNA
tgctttcttacagaacccaggactactagcctaggtgatctcatggaggcatttcctcaagtgactccagcttgtgtcaagttgacacataaaactatcagtaaaaatccagcttagccaatggatgaagcgccggcagccaagggcgagacgcgcgtgtgagg

SEQ ID NO: 38141 - DNA, 333 bp, Mus musculus
  source 1..333: mol_type = other DNA
ctgaaatgatataaaaatttttcaatattagtcttttgacttaaactttttttttagaattatttatttattttatgtatatgagtacactgtagctgtcttcagacacaccgagcagctagtgctcttaacagctgagccatcaatcagttcctgcacggtgtgggtgtggagcacacacttataattctcaaagttccagaccttttctttaaaaaggccgctgcaggtgtaggaccagccatagctggcgatcgcccccttctggcagagggcggccttgtcccccgacagcgtctctggagaacgcggagcctgaggcacgcaggcgca

SEQ ID NO: 38142 - DNA, 366 bp, Mus musculus
  source 1..366: mol_type = other DNA
agctggtggtgtgttaagatttgaaagcagaggctctttcaaaagctgtctgaccgctaagcatgttggttgtctgccctgaaaagggccgggaccatgcccccgccccacccccatttacctgctggagtgtgtgggggtggagttcctctgttacaggatcgtcgtgactttagcaactttctcaaccttggagggtgaagagtgcaaagattgacatgtccgggtcactgggcacacagtgcgcacttattcggcgtttattctctggagaccctcagaacaaggcaccagtgcctggtccagactcctccttggccaccgccctgagggcggacccaggccgggatggggatccgccccctg

SEQ ID NO: 38143 - DNA, 440 bp, Mus musculus
  source 1..440: mol_type = other DNA
ctggcgagttgggggcgcgcgctcgagaggcagtcaatgcaaattgtcagttacacacatttataacggattggtaaatatccgaatcttaacagtttttgttttgatttgttttaaagaaccacatcatatatcttgcatatcagttatttacattacaactcataacagtagcaaaattacagttatgaagtagcaacgaaaataattttatgattagggggtcaccacaacatggttattatcattattattattaattttattattagtattaaagggccagaaccactgtgttaaagcatttgttacttttacagtcagggaaggaagcaaactttttaaatctcagtgaaagcgccagaggtgcttctgctcctagcgtccccgtggccactgcaagcgccacgcgtagccaagagcccaactttcttctgtcc

SEQ ID NO: 38144 - DNA, 394 bp, Mus musculus
  source 1..394: mol_type = other DNA
cacggaattccgcgagatggagttgggagacttctggcaactcccaatctcaagagggtgcgcaccgtgtgcgctcctggtgtgtgtgtgtgcgcgcgcgcgcgcattagtgtgtgcatgcgcgctcgggcaccgtgggtccccggcgggcggcgggcggggcggctgggcgggaggccggcgggagctcacacgctcggcagccggccggcctctcaccacgcctcccgctttgtgagcgcgcccagggggggtgctggacgcgcgcccacggcgctgctcccgcctctatataagccgagagactgcgtcccgggacagactgccttttctccccgccgccgccgccccagagcccgcccggggctctgtcgccggctgcgtcccttccccg

SEQ ID NO: 38145 - DNA, 411 bp, Mus musculus
  source 1..411: mol_type = other DNA
atgtttacttattcacacatatctgagaacatgtgtacaggactcccgcggcctctgggtacaggaccactgcacatgtgtctcaggtgctggacactttccaggaccagcactacacggaattccgcgagatggagttgggagacttctggcaactcccaatctcaagagggtgcgcaccgtgtgcgctcctggtgtgtgtgtgtgcgcgcgcgcgcgcattagtgtgtgcatgcgcgctcgggcaccgtgggtccccggcgggcggcgggcggggcggctgggcgggaggccggcgggagctcacacgctcggcagccggccggcctctcaccacgcctcccgctttgtgagcgcgcccagggggggtgctggacgcgcgcccacggcgctgctcccgcctctatataa

SEQ ID NO: 38146 - DNA, 476 bp, Mus musculus
  source 1..476: mol_type = other DNA
gtagaaaaacgatgtaattttattttaataataaaaaaaggccaaatgcataatgaatttcaattctatctaggattttctcaagagatcaagttacattatacaaactgaacatatttaggtatatatttatatgcatatatgcatacaataacaaaatcttataattatattataatctaaaaaaaaaaaaaaaagaagatgatcatgagtgcaaggccagcctgggcttcatattgaacacctgagtcccaggtgattgggtaccatgcatacatgtagtgcacagatatacatacaagcaaaatacacataaacgattttaaaaaaatgtgctgggttacctatatcaaagtagaggcaatttgcgcagattcagtgtgtgtgaatgggcagaatccagttcagcctgacccagagaactacgaatcccagtgggctgcgcgcgacgctcgcggcccggctgacgccagggg

SEQ ID NO: 38147 - DNA, 283 bp, Mus musculus
  source 1..283: mol_type = other DNA
atcagcctttactacatatgaaatcaaaagccagcctgggcttcattggtatatagacaaatggtattttaaaatacttttaagtaggatttttaaatagactatcatttgtttattctttgacaacatgacatacaaacagtgtatcttgatcacgaagacagtttatcagtgtggtcaacagaaaacttaaaacaaataaattaccttttttacttaattcatttattttttaaagatatatcttatttttatgtatcggtatagttaagcccacatcaat

SEQ ID NO: 38148 - DNA, 295 bp, Mus musculus
  source 1..295: mol_type = other DNA
aaagaggagctagccgctagcctgcttgcctgtaattcctctccagagagttttcactgacagtgatgagtcctggggaagctgctgtgcttttccagagaaggcctgctgagccatggctccctggccaaggataggctccgcgccctggccccgcagctagcccggttgcagttaccgggttcggtgatgctcctaaacgcacgctgtgagttcgtgctgtggcaactgaaggaggagctgggctcgcagcagccgggcctgcacccgctccacacaccactctggcagctgc

SEQ ID NO: 38149 - DNA, 405 bp, Mus musculus
  source 1..405: mol_type = other DNA
agtataagttctactgtcaacagccctttcaggtagcaggagggtcgacctgtttgttcccaggtcgcatgtccaagaggccaggttgcctctgccagccatggaccactggcctgtcctctatatttgctgcatggagcaccaccagtgcaaacctggcccctgggaaaagaatgcacatcctgtttgaagcagtgttcccctaaatatccattaaacgcgaaatttcaggtctggagaatctaggctggactccaggatccaagttctctaagaactgagacatctgtgccccctcagactcgatggccgctgaggctaaaccctctttggggcagcagagaggcggccaaccggcgagccgagcgttgggcaggtgccgcatctctcagtagcacgcacagc

SEQ ID NO: 38150 - DNA, 321 bp, Mus musculus
  source 1..321: mol_type = other DNA
taggcttggaccaaacctccttagatcaaaagaagtagggtctcaggatgcttaagctctggatatttaagtcacccaaagcatttgagaatcctgggacttgggaggcagaggaatcaggccagcctgtgctacatagttccaggctagcctgagttatccggaagcggattttgcctacacgtatatccgcacatgcatttgcatacattctcaggactgcaaacgcctgctgctttagcggtaggaacagtctgaggttgtcaggctcagagcagcagaagcccctgcgcgcccggttcgctgcggttgctcacggcc

SEQ ID NO: 38151 - DNA, 512 bp, Mus musculus
  source 1..512: mol_type = other DNA
tgtgaaatttcagaaacatccagcttcagaaaacagctccggagcgaacgtagaccaggttctctgaagttctctaagaactgaaacgacatcccagttcctcaagcccaggctttgcgccccgccccgccccccaccttggggcaggtgagcggtggccaatgggggagcgcggggcaggtgcccgctaactctctcctcgcagagctgcagcccaggcctggcccggcagagctagggtcggtctctcagtgcacaggcagcccgcgcccgggcgtttgagaggagctgcctgctgggccgcggggaccacgctccaggcggtgcgcagtggcccaactcggtgttaggcctcgccgccccgctcctggctggtccgcaagggccgagcgcgggcggggccaggcttggtgcacaccccgcacggcggcagcgccggggcaccgagcgttccccagagccccgctacctctccgcttcggcggccgcgacgatgttccagcccgcggcta

SEQ ID NO: 38152 - DNA, 299 bp, Mus musculus
  source 1..299: mol_type = other DNA
ttgatttggcacaagacagtgttttttaaaaacctatagagagacattctctcatataggcctacaggatttgcatcgctctaggtcccctatttcgttggcctaggacaaaaattcaatttaaaaaaaaaaaaaagaggagctagccgctggcctgcctgcctgttcagacatctccagagagctcctggggaagctgctgtgcttttccagagaaggctggataaagacaaaccttaaccctggaggaggaagctgatcctggaacaggcctctcagaaaggggctgaggatttcct

SEQ ID NO: 38153 - DNA, 410 bp, Mus musculus
  source 1..410: mol_type = other DNA
tcctcctctgcctcccaagtggaagtgctgggattgttttaaaaccagtccagcactcagtggaggcaggaattggtcatcacatatatgagactaccctcaaatccacgccgagcagaatggatcttcgacagagacggggcggggccatggtggtaaccacgcccacctctctgcagaggctgcaagcggcagttccgcactgtgcacaagcgaatccggtcgtgattaaggcatggccagatctcacggtcaccttttagaagagcagcgggagcgaggttcccccagaggggctgggccagtgagaaagccccgcccggggcggggcctggcctgggcctaggcggggcgtgacgtcgcggggcggccggccgcccgggaggcggggcggcggggaggcggcggcc

SEQ ID NO: 38154 - DNA, 285 bp, Mus musculus
  source 1..285: mol_type = other DNA
ctccttcagcaatccctgggccagcaggaaggacctttctaacaagaccctgtgttacacactttaaaattccagtccttaagtagatctactcagggcttctgctctaagagggcccagctgctgagatcattcaccagcaggggagactggcatcacagatcctagtacttgggaggctagctgtagtaaattcaaagtactttccccaaagcactggagtggaggagacccccttctccgccctggtgggatgcaacctgcctggcctcaatcagcgatgat

SEQ ID NO: 38155 - DNA, 234 bp, Mus musculus
  source 1..234: mol_type = other DNA
gttatttatagaaaaaggaaatcattttttcttctttttcttttttaaaaccagtattggaaaccaaaccgcactacgtagttgagggttgaccttgaaccctgccctcacctcctgaatgcagaggttagttctgcactcatgtgttcatgttgccaccaggggaaaaatccaggatggagcctgggtgagaccctgtaagggagcgctcgctggctctgtgggcggggcctc

SEQ ID NO: 38156 - DNA, 526 bp, Mus musculus
  source 1..526: mol_type = other DNA
aaggccgcctccggccggggagcggaaaccatggcgggccagggccgcagggtcgtggggtccgcctcggggccgcccacccaagcccactccgcgccggagaaatgcccagaagcttctggcgggagaggaaggggccggaccacttccgccactctctcccgaggtagccggcgcctcagcccgcaccttaggtgagtgatctcactgcacctgctcagctccgtggcgagggagctccgtgagtttcacaggtagcttgggaagttgggaacagtgtcccgggtcacaggtgcgcggcccgctcgggcgcaggaaatttggcgccccttatcggccgaggcggcgccgtgccgcctgccccttcgcgcgaggcccgtctctgcctggggaggagagccgtggatcccgcgcaaccccgcgagccgcccaccgcaggttccgggaggcgcgtctccacttctcctggccaataggaagtggcctagggcgtggcggcccgctggcctccgttctgtgctccaac

SEQ ID NO: 38157 - DNA, 496 bp, Mus musculus
  source 1..496: mol_type = other DNA
tataattgatcctgtctatggtccaaattacagctcagacaggcatttgatgtgcttatctaataagcttcgggtatatgcatgtgttcacttaacgcgtaggtgtgtagcccatatgtgtgttcctgcctataagaacgctcaccccatccacccgctgcagccgtctagtccctggatctgggcggcccaaactcgcggggtccccaaggtgacccgtggcccccagcccgggaagcgcgcacgctggattcccgccccgcccgcctgtccgtcgccgctcaccgtgggccgcgacgcacgtgggcagccagcggcgccacggctcatctccagggcccgtcccgccgccgccgccgccgccgtcccgccgcgatcctgacagctgccacggcctccctcaggcccgctctccgcgccggttggagcacagaacggaggccagcgggccgccacgccctaggccacttcctattggccaggagaagtggagacg

SEQ ID NO: 38158 - DNA, 257 bp, Mus musculus
  source 1..257: mol_type = other DNA
ttggacaacttggtactgtgtacaggaacgaaggattctgtctttccacatgcgggtcccaagcaccatgagatccatggtttccaggcccagcggcatcgcgagccccattcggctctcgctcaaggccgcctccggccggggagcggaaaccatggcgggccagggccgcagggtcgtggggtccgcctcggggccgcccacccaagcccactccgcgccggagaaatgcccagaagcttctggcgggagaggaa

SEQ ID NO: 38159 - DNA, 621 bp, Mus musculus
  source 1..621: mol_type = other DNA
ggggtccccaaggtgacccgtggcccccagcccgggaagcgcgcacgctggattcccgccccgcccgcctgtccgtcgccgctcaccgtgggccgcgacgcacgtgggcagccagcggcgccacggctcatctccagggcccgtcccgccgccgccgccgccgccgtcccgccgcgatcctgacagctgccacggcctccctcaggcccgctctccgcgccggttggagcacagaacggaggccagcgggccgccacgccctaggccacttcctattggccaggagaagtggagacgcgcctcccggaacctgcggtgggcggctcgcggggttgcgcgggatccacggctctcctccccaggcagagacgggcctcgcgcgaaggggcaggcggcacggcgccgcctcggccgataaggggcgccaaatttcctgcgcccgagcgggccgcgcacctgtgacccgggacactgttcccaacttcccaagctacctgtgaaactcacggagctccctcgccacggagctgagcaggtgcagtgagatcactcacctaaggtgcgggctgaggcgccggctacctcgggagagagtggcggaagtggtccggccccttcctc

SEQ ID NO: 38160 - DNA, 435 bp, Mus musculus
  source 1..435: mol_type = other DNA
gcttctgccctctcatgtgtgggatggggccagtggaagccacccaaagcctccaggggagtcctggaactatgctggctggatttctgctctgctgcaggccctgggtgcagtccagcagaggtggagcccaggccttgcttgttccctagcgcaagacagccaggctgtgcctatctgctccttttcattgtcttcccaaagactacgtgtctgacctgaagtcactgagggcaagacctgcacttgggctcgaagctccaaagcacaggaatgccttggtggtggtgcctggtgaggggaaggttgcacccccatccccgcaccagcttctgcggaaaacgtggggaccaggcgcagccgctcctggctgcaagtgccgctcccctcttgctggagagcccgccccggaggaggggccggctccgccccacc

SEQ ID NO: 38161 - DNA, 289 bp, Mus musculus
  source 1..289: mol_type = other DNA
caaactccagtttttcttttcgttttttaaaaaaaagatttatttattttattatttatttatttattaatatttcttagaaagctcaggaattgaatccgtagactggcactaaccttaaaatttgtaacttgcgaacgtgactattattggtttattctagggcaagagataaaaaagctttcccgcgctccccgcggggcgtccctagcaacgcgcgggctggttctcagctccgccccgcgtgaggcagtgagggcaggtgcgcctgcgcgcagccgcaaccgcc

SEQ ID NO: 38162 - DNA, 548 bp, Mus musculus
  source 1..548: mol_type = other DNA
aacctttaattttcagaatgtactctcaacttggcatgatgacataccaaggatatcatcttctctctaagtacagggtcatcctggtctacacagtgagttccaggtcatccagagctgcatgtgaggccctgtctcaaaaaagaaaggaatattcttgtatactagttgaatcatcaaatttttcattatgacgatttttatataattttttcaaagcacagtaaaatgttaaaaaataaaggcaatctttaaggaactgcttatctccaggactcaggtctgttatttctctccttagcaagctcacaggtgaaaaaaaaaaacggcaggttcgaaccagtcccgggtgctcacacggagctcagcccctgcggggcgcacccgtggcccaacgcacacgaggctccacgctctggggactcgcgcgcacgcagcggcgcgagcccggcggcggcagcaacgtcacggcgccagggccggggcctcccgaaatggcagtggcccggggagtcggaagcccggagccagcgccgccgcagctatat

SEQ ID NO: 38163 - DNA, 172 bp, Mus musculus
  source 1..172: mol_type = other DNA
agagagtaaggatgttacatatctcggtaacacaattgcaggattgtatttggagaataagccttcaccctaggcagaaagccgaagactaatgcaccatggtattttcatcctgcttgtgaccatcatgagattaaggacccctgagccaggtttataattatcaaacatc

SEQ ID NO: 38164 - DNA, 243 bp, Mus musculus
  source 1..243: mol_type = other DNA
aaatcaatctccctgcctgaacactggcagggtacctgtcagccacccttgaaggctttggtcacggtgttcatttctcaatgattgagatcaaatgccttccagaagctcatgggcacagcttcttcacttgggtccatttttatatgtatatgtacatcttgtgaaaaaccagcagatgtgcataggggagcacagggcacctcagcaaggctagcaaatgagcaacattttggtttatga

SEQ ID NO: 38165 - DNA, 347 bp, Mus musculus
  source 1..347: mol_type = other DNA
tttctgtgtggatggaagcctcacacacatgctcccattttttccacatctggcatagtcaaggtgaaatgcacatttgcctggcttttgtttcgcattattaacgacagaaaataaacaaaatggttaatttaacatttttcaagtgaatacacctaatcacatgggtagatgaacatatgtatgcagatgcttaagcatgtgtatgtgtctgtgtgtgtgtgtgcgcgcacacgcatggggagcaggggcctttggaacgattagcacaagctcctgccagtagcgcccttagcaattgcttttgcctactattttagtcttaacgattattcctcatctggaaa

SEQ ID NO: 38166 - DNA, 208 bp, Mus musculus
  source 1..208: mol_type = other DNA
tgattctcacatatgtatcaagtcatattgttccttataagggatggcgagaggctaaggaagctctcctagagccttcatttattattgatttttataaagttctaaaggctataatatgtcatgatcttgccagcagatccagcttcctctaggagagataatagatatgggttccctcccatgtcaaggctagatctatgctcta

SEQ ID NO: 38167 - DNA, 427 bp, Mus musculus
  source 1..427: mol_type = other DNA
ggttggtatctatttccagttacaaccaaaaatatcatctacggatgagaaaatcttttgatcacctcagttaagcgtggctttattaaacttaattaatagctaactactcaggtattcagtaaaaaaatttcaactaggaaattacctattcagtactaattaacattataaagtcagagcctacagctcagggctattctgttagttgtttactaggacagaaaggacagtcttatttttttctttagccctaaaaattcaggcagaactattaaacatagataaattttttgcctcaggccagccttttcttatttttattaacaacagggaggagatgtaacctccccggtgggctcaatcattcagtaaaattgagctttgatcaggatgactagactagcagacatgtgatctgctggcc

SEQ ID NO: 38168 - DNA, 438 bp, Mus musculus
  source 1..438: mol_type = other DNA
agtggggatggtgtgcagtgctccaccactgagcaacccttagagctcacagaggtaccctttgtcctggccaccaggacagcaggtccctgaggaccacccgcaccctcaacactgaggctctggagcccacagacctgggttcttgcttgtgacaagtgaggtttcctcctagcaggtgcatgcagagacatcccagatgcccctcccagatgcccctcccagatgcccctcccagatgcccctccaaacacctaggtgctcgccaaggagacctctacccaggggagcccagggtaagttgcactgtcccaaggttcacctaacacgtgatcttgggcgtggagcttgcttctccacgttagtcttgtggggatcacaaagcgaacagacaaaagctctctcctctgtcaacttctggtttatgattatccagga

SEQ ID NO: 38169 - DNA, 161 bp, Mus musculus
  source 1..161: mol_type = other DNA
ttagtgaattaaccataagtcatgcctgattctcacatatgtatcaagtcatattgttccttataagggatggcgagaggctaaggaagctctcctagagccttcatttattattgatttttataaagttctaaaggctataatatgtcatgatcttgcca

SEQ ID NO: 38170 - DNA, 470 bp, Mus musculus
  source 1..470: mol_type = other DNA
cgggtgtggggttctatcccagtgctcatgcgagtccagcaagagcattactcggaagaatgtttagacaaacgagatgttaggtaacatttgtttcctcttcaatgatatcagaattgaagtgacatttgctaagatatctttcaaaaccactagtagctaaaaaatacaaggaactagtgttttctctgtctgagactcgtgggaaatctgatggtggccaccaaattggccatcataagaattattcagagcctgaagcatcctcacaaaaatgtgctctgcacacaggtctctgtgggtgagtaacactgaaggtatgttgtatacacaagattattaaagtagtgaaatgagtgtttttttttttaattagaaacatcgtgattgaaggcaaagtctgagtacctactgagcatgaaagcctcggatcctgccgccagggggcgccgcgcgtccagagcagcgct

SEQ ID NO: 38171 - DNA, 358 bp, Mus musculus
  source 1..358: mol_type = other DNA
atctctgagtttaaggccagcctgcttcagccggatggcatggcctgccctcggcttaggctggtcaggctttccaatcctgccaaggccgctcgctggcccgggtaaagcctggggtggaggcgactccgctctccgccgcgcctccctcccagcgctgggcctggctgtggctgtgcggtccgcacgcggctcctccagcctcagcctcgggcatcgcctgcagggggcgccccggcgcgcgcagccgagcggccttccgtcccgagccgcgctcctgagaccatgtcgctctccaccggggctcgcgacaaacacgggcaaaggcacgcgtacttcgccaggaaaccgaggcgcc

SEQ ID NO: 38172 - DNA, 246 bp, Mus musculus
  source 1..246: mol_type = other DNA
agaaattaattagattctgagtgtcctcatgttgaccatctggccagagaggcaaaacaaaacaataaactaattttaagattcaagctctttattcattggtagcaaggactaaaatccggactcactatctttggggacttgatcctctgtcacagctgactgagtctggatgactcccatcctggtgaatatttttctttttcacaggaaaagagtgttcaacacccttctagcggcgcctcg

SEQ ID NO: 38173 - DNA, 406 bp, Mus musculus
  source 1..406: mol_type = other DNA
aaagttggtatttttaattatgttggttataataagtgtcctgtgtcattcaaaattaggaagaatatgtatgtttccctgcctgtgacactatacacacatatatggatggagaaatatgttaaatatatcaaataaggagaaatatgttgtataaaacttttgatttatttctttttggcggaaaaaaaagatacacccgtatcatgtatatacaaaatgtaaacaattcaacttagagcgtttctccctggaaggtaaagcccctggcttgttttccctgatctttaaaaatacagctagaaagaagctctttgttctctatagccagcaaaaagcctttttgtttctatactgtacatgtctgataataaaacctcttgcagtttgcatcaggtcggcgggg

SEQ ID NO: 38174 - DNA, 489 bp, Mus musculus
  source 1..489: mol_type = other DNA
gttctactggttgaccagtcagcctagccaagatggcaatttccataatcaatgaaagatttctcgcttctgtacatgcatgtactcatgtgcacatgcacacatgcccccaccaatgtgtacacacatgtccattcctggaccactttcagagatttgggtactgtctataggagagcagggctcttctctcagagctttgggagttaaggccctgactgcctgcaacatcctgctttccaagggctttgaagaatcctgtcccaaccattagtgaagatgaatcctgattccctactcagccactggggtctctccaggggagaattagaatcaggatcaatctatctcaccccgagtgtaaactcagagcagagtgtgtcttacggacaggtcctgcctttggcccaggctgctgcagggcgcgggcggggacgctgcagcaagccgggctctggagggggcgctgcgcactcgcccggccctttg

SEQ ID NO: 38175 - DNA, 278 bp, Mus musculus
  source 1..278: mol_type = other DNA
gtaggacccacccaggggaccatggtagcccttcatgtgctccgtcactcacccagagcttaaggtgtgacagagagagtcgatcctcgccgcccaccatgggggctccgggagggcattcaggccttgcaggccagagtgtaagacccttcccacctcgcactcaggtgcgtcaagtgtgtcacagttaagctccttgcgcatgccccgccccctccgaggcttggaacacctgaggcgcccaggtgcctctgctgcccgtggtcttgaccaccatg

SEQ ID NO: 38176 - DNA, 518 bp, Mus musculus
  source 1..518: mol_type = other DNA
ccaggacacctgccaagggtggatcaattagcaattattaaatggctcagatatgtctacatttgtgccatgttgacaactgaagctaattatgacacagtatgttagtaaatggttagtctcaaaccaaagcaaccactatggtcacggttattcacattgcagaacttgctttaaaggaaatcattctcttcataaaatccttgcaaatatataaaaaatgatttgatttaggagttactatggccacattgtatcttgagagtgtatgtgccttatttctaagtacagacacatatttaaaagtttcagatggacacattaagctagtatgccaagttacagtggttctaaaacttcaattttttgctaaggatttgtttgcatatcctgggacattgggacacattggttgaacactgttcccctgacccgtctctgccattctgctatagcagacacagctaagggagacctgtgtctgcttagctaaggaacagaaactcagccaccgagcc

SEQ ID NO: 38177 - DNA, 416 bp, Mus musculus
  source 1..416: mol_type = other DNA
ccacacattagggccaatcgcttgggccttcttttggaattcttacaataaactggaattttcaactctgaaactttgagcatccaacgccccacctgctaggagagtgggtcttctctcgagcagcttgtgcacacactcactgaatgggccatgcttccccgaagcagtacacagagattccctgatcttcacaatgtatctggagactcagccaggtaactggccaagctcctggacaggtgactggatcctgagcgactccgctccgccgcctacagcctggacgcggctactacgcaggggactcgggcggcgaccctgggcgcaagcactgcagggaggtgtctgaagccaggcgcttcctgcctggcccttggcccagggtggtgactggctgtcgcgatcggggcgca

SEQ ID NO: 38178 - DNA, 516 bp, Mus musculus
  source 1..516: mol_type = other DNA
tgtgcacacactcactgaatgggccatgcttccccgaagcagtacacagagattccctgatcttcacaatgtatctggagactcagccaggtaactggccaagctcctggacaggtgactggatcctgagcgactccgctccgccgcctacagcctggacgcggctactacgcaggggactcgggcggcgaccctgggcgcaagcactgcagggaggtgtctgaagccaggcgcttcctgcctggcccttggcccagggtggtgactggctgtcgcgatcggggcgcaggtccccgcccccggcttccagtccccacccctgcgccttcgggggcgccccatcgcgggagggtggtccgcctctccccggtcgcctaaggcagagaggtggcgggaacctccacctctttcccgtttccgccgcgggcagcgcgccggccagtgccaccgggaggcgcggtcgtccctccgcccgcgcgccggggggccggccctgtcgcctgcgcctttttcccc

SEQ ID NO: 38179 - DNA, 272 bp, Mus musculus
  source 1..272: mol_type = other DNA
ccgagagagatttcccgaaacactcgcatcggcccatgggaagacgtaccctttactcgcagtaactagtaacaaagcaaattgtggtatgtacatttaatgaaattctgttgtacaagagctgctaattacattcgcttttttaaaattgggggaagaaccagcggcgcgcccgctgtctccggccagggcgagcggggcgcagccgagggcggggcgaagccggaggccgcacgggcgcagggggcggggcgcagcgggtgcacacgcgg

SEQ ID NO: 38180 - DNA, 406 bp, Mus musculus
  source 1..406: mol_type = other DNA
acatgtctgtgggtcattaatgactaccatgagagagcccagtgcactgagggcagtgccaccaccctgggggcgaagctcaatacctcaggacttgtgtggtactcctcaaggagccctcggcttcgcctggatgtgcttaggaaattaagggcagctgacgttgactacacagtgaatggagagacgcttcagcagttaaaaccactggctgttctcccagagctctggagttcaattccagcacccacatgctatctgaggtcctcaaatataaatgaaggggtctgtttttaaagtgacctgccacttcaatttttgtcactggcgacgcaaccggaagcgtggctctggtcgcgattggctcgcgcggcggtgacgtcagacaccagcgccaagcctgcct

SEQ ID NO: 38181 - DNA, 298 bp, Mus musculus
  source 1..298: mol_type = other DNA
aatggcttcctaggaattttacttaagatgtctaaaattagggaggggtgacagttcccctggcactgctggcacaggcagttctcttagccactgagtcatttctcagcaaggaaagtagacagcgtgtcttctctagtgtcttcaacttggaaacagacgagtccctggaacaaagtgctcacttgcattctctacaagctcgcgattttggggactgtagagggtggccctcaacctcgctgggaagtgtacttcgggggcacaggcgaaagcgcgcagacgcatagagcagggt

SEQ ID NO: 38182 - DNA, 638 bp, Mus musculus
  source 1..638: mol_type = other DNA
tactgttatggttggggtcactacaatgccaggaactgtattaaaaggtcgcaacattaggaatcttgaggaccactgataaaaactttcacgtctttaataaatgctttacataatatgtatagtgtaataagaactctgaaccctaagcaagggctgactgttgagattcttctcaccaatttgcaacagtaactctgttaacagcttttcgattacattgggtatacaaaagaacgcaaagtattgcttattgtcaagtagaccttattttcttaccacaactcttacttctaaataataagcaaaaatgaaagtcgatttcgttaaagtgcaagtatcaattcgttctaattttcatttacataaatcaagaatccaagtgcccaaatcctcaacagcgccgctggtgtagtggtatcatgcaagattcccattcttgcgacccgggttcgattccgtcttttctctctttaaatagtgtgcaaaaagaaaattttcctgctagaaaaacacctgctattttatggatttttaatttcactatataattcacaaatgaaaggcagcgcggctgcgcacacccggctgccaggagggtgagcatgctagctggctgtgcgcatgcgcggcacggg

SEQ ID NO: 38183 - DNA, 344 bp, Mus musculus
  source 1..344: mol_type = other DNA
ggagagaaacagcatccagaaagatgttgtctgcatgtctctctacagttgctaggaactaacatgcttttgaacttaacagcaaataaaaattgtgaaacatctctttttttagttccttcagtttctgaaacaatattagaaaaatctgatcccaacacatttctgaagaacaaatatacataaagtctatttcggctctttgtaaaactgttttcagcacagacccttgcctgtacgtttaggtaaagccacaaagtgtcagcaccctgagccttctctgtagttttccaaaagagagcactcccccacttcagcggaggtgagcgggcccttggcgcacg

SEQ ID NO: 38184 - DNA, 255 bp, Mus musculus
  source 1..255: mol_type = other DNA
tagttccttcagtttctgaaacaatattagaaaaatctgatcccaacacatttctgaagaacaaatatacataaagtctatttcggctctttgtaaaactgttttcagcacagacccttgcctgtacgtttaggtaaagccacaaagtgtcagcaccctgagccttctctgtagttttccaaaagagagcactcccccacttcagcggaggtgagcgggcccttggcgcacgtgggctgatcatgggaagtgcgt

SEQ ID NO: 38185 - DNA, 418 bp, Mus musculus
  source 1..418: mol_type = other DNA
gatctggttccatgggcaccagaggtgcaattggtgcacagctatagacgaaatccgaaacactgactcaaaaaataagtttttcaatgcaaaaataataaaatataaggcactaaaaacattatgttttaccattaggtaaagggaatgggttactactttcttgttgaaagtctaaatgtgaaatttccacagcaatatctgacagctatttctcaaatgtcagaatttcagacatagaccccatggggcctttgctggccccggggacttcccatggactaagcagtcgtcagctaatgagctagcccagttcctactctgcctgtttctaagtagaaagatccatctttgccatatgacaactgtcctcttgttttgctataggctgccaagagctctacctagttacatcaga

SEQ ID NO: 38186 - DNA, 457 bp, Mus musculus
  source 1..457: mol_type = other DNA
taaggcattagactcctttcttctaagcagagaatattgcttggctgatagaaaaactggaattctatcctaggcttggaagttcaaggtcaccccccagctacctgtcaagttcaaggttaacctgggctacaaaaaggttagcctgtacctttcattccagtactgaggttagcctgtattacacagtgaattctgctggacacaattgttttaattacaacatccaggctggctaaataatacacaaaaatctttctcagagttatttttgaaacacagcatgcttccctgtataaccattccttaaattttgagtcgtgtaaacaaattactgattcaaagatggaaatatatacaaatgtttaaaagcaaagctagtgcaagctcttgctttgcctagaggacagcccacacctgaaggtccacgagcagctgcttttcttccctgacttgg

SEQ ID NO: 38187 - DNA, 332 bp, Mus musculus
  source 1..332: mol_type = other DNA
agacagagtttctctgtatatccctggctgtcctggaactcactttgtagaccaggctggcctcaaactcactggcccggcctaaaattatttatttttaaactggggccaggacagcctggtctacagagtgaattccaggtcagccagggctaaacaccacatggtggctcacaaccgtcatctgtaaagtgatcagatactcaatacagctacaatgtactgatatacaaataataataataataaataaataattcttttaaaaatatgaagaactcagaaatgctcaacaaccaatgttgacctggcaaggtgacaagtggtgctgc

SEQ ID NO: 38188 - DNA, 653 bp, Mus musculus
  source 1..653: mol_type = other DNA
gcccccgttcctaacgccactagcccgagcggcactcgccggggcgggtgactctcgctcgagtctctctgcgtcgcggacgcagccgccggacggaggccaaggtgggggctgggaccaggcgcccggacgccggggacgaaggggccccacgtgcccagcagagcgcgtgcacagccgccgggccgcgcctcgcctcgccgcccctccccccacggaagccaacgcgggccgctcgcgccccccctcgctgccgcgcatgcgccctgggcggcggcctagctcccgcctgcagcggcctccgccgatgcctgtatcgctccgccatcgaatccttgggcggaccgggaaacaattatctgtccccggcacaacgccggagtttcaacccgacggcggtgccaccggctaaaaaagccggtcctcttttttttctccacgcggggttgaaagcgggcttcccgccccgcccagaccgccgaggctgccgccggagtcgccaccgccgcgccctcgcccacccgcccgtcgaccgctcccggtcccgctcgcccccgtcgccgccgccgccagtcctgcgacgccgccgcggcctcccgcccgcgcccgcccgctcctgcggccccccgctcgcctcgcgccggcagttcggg

SEQ ID NO: 38189 - DNA, 651 bp, Mus musculus
  source 1..651: mol_type = other DNA
aaggcgctctccagcgtctcgagggccatttcccggcgggaggcctcggtcagggcgacctcccaagatggcggcggcgcccaggcttggccgcctcccgaaagcgtggtccaggcggcgggcgagccagcgcggacatgcggggggccatgccggcacgccgtcagtgcgcaccgtagcgcctccgagggcttccctagcccccgttcctaacgccactagcccgagcggcactcgccggggcgggtgactctcgctcgagtctctctgcgtcgcggacgcagccgccggacggaggccaaggtgggggctgggaccaggcgcccggacgccggggacgaaggggccccacgtgcccagcagagcgcgtgcacagccgccgggccgcgcctcgcctcgccgcccctccccccacggaagccaacgcgggccgctcgcgccccccctcgctgccgcgcatgcgccctgggcggcggcctagctcccgcctgcagcggcctccgccgatgcctgtatcgctccgccatcgaatccttgggcggaccgggaaacaattatctgtccccggcacaacgccggagtttcaacccgacggcggtgccaccggctaaaaaagccggtcctcttttttttctccacgcggggttgaaa

SEQ ID NO: 38190 - DNA, 659 bp, Mus musculus
  source 1..659: mol_type = other DNA
gcaccgccgtcgggctccggcgttgtgccggggacagataattgtttcccggtccgcccaaggattcgatggcggagcgatacaggcatcggcggaggccgctgcaggcgggagctaggccgccgcccagggcgcatgcgcggcagcgagggggggcgcgagcggcccgcgttggcttccgtggggggaggggcggcgaggcgaggcgcggcccggcggctgtgcacgcgctctgctgggcacgtggggccccttcgtccccggcgtccgggcgcctggtcccagcccccaccttggcctccgtccggcggctgcgtccgcgacgcagagagactcgagcgagagtcacccgccccggcgagtgccgctcgggctagtggcgttaggaacgggggctagggaagccctcggaggcgctacggtgcgcactgacggcgtgccggcatggccccccgcatgtccgcgctggctcgcccgccgcctggaccacgctttcgggaggcggccaagcctgggcgccgccgccatcttgggaggtcgccctgaccgaggcctcccgccgggaaatggccctcgagacgctggagagcgccttgtgctgccggctcctcgtgccgccgccatagtcagcctcaccccaccgccaccccacccccgag

SEQ ID NO: 38191 - DNA, 344 bp, Mus musculus
  source 1..344: mol_type = other DNA
aaaatatgcttatataaaagtgctatgtatgaggtcctaactcacttagaaggctagcacatgcagatagctagatagatagtagatagatacatgattgatagatcttagagacaggtaaataaatatataacaggttctctttgccccaagcagtgatggggtgaggccaaaggggtcccctcttctgaaacaggtagagacctgctttcaatgataaacatctgaatgtcatcacatctagggcataggctggggagggtcccgaggctccatcccctgacccgggctggtccaatcctgctagtcaggcaagatgctccctgggggcccaggttgggcat

SEQ ID NO: 38192 - DNA, 533 bp, Mus musculus
  source 1..533: mol_type = other DNA
aaccctcacaggttgtcctgagggatgggaaccctctaggtggattacaaaactgtatactgacaacactgccatttaaattgaatatgttgacattacactgtaaggtggtataggagccggctgttttcccccaacccctggggtgggagctaggtgccaccatctgctgaggtccccagctaggcctgaagttctccccggagacagtgggcaacaggtcggcggccagtgggcggggacccgccctgccctcctgccttgtagccaatcagcagcacgggagtgggcagcggcattcccccaatacccggagagcccaaggggcccggctatcggcgtagagttgcgagtcctgcagccagggcgtggggggcggagcccgggccttgtcaagcccggccaaccggcgggggaagcgggcttctggggcggggccgcgggcacttccccaatcgcggagggccgggggcgggccgggccgcgggcggcccaatgaggcacgccgccgccgcgggcctgtcaagggacgg

SEQ ID NO: 38193 - DNA, 293 bp, Mus musculus
  source 1..293: mol_type = other DNA
agctgttgcccgtcaaaggctggcaagagcactggttccatcagtagaggctgcacgcctagcagctcgattagaattcgtgtggcctgacgttgtaacactctttcaatcctaggctgatctctgagttcgaggccagcctggtctacagcacaacaagaaaggattgcagttctcccgcccagttcttccaggaacttcaggccctggggcgacttccagggcaagacttcggaaccctcgccacgcgctctgctagtttccagccggcctgcaaaaatcaacttccagct

SEQ ID NO: 38194 - DNA, 571 bp, Mus musculus
  source 1..571: mol_type = other DNA
ccccactatatatcaataaagctaaaggggagtgaatcaagtgtgtacttgtattgctctgtttgaaacattctattataaacattttactttgaaaggtataaaaggcagctcagtgcctcaactcctagcacttagaggctgagataggcggacttctgagagttccagggaagccttgggcttcagagtgacacttttccttgaagaaaatttaaaaaaaaaaaaaaatagcattcaagaagccctgcatctgatactcagcatttcaggtccacgaaggtgatgtgacacatacatggctgtaatcccagcgtgagtcgaagtatgtagtacgagacactgacttaattgaggctccagactgaacccggtcaacacagctgggtgacggtcatctatctaaccgggccagtcgggtcctagagccctggaagcaaaggccatttggcaccgtagacacgcaccggggctgagcgccgcagggacgggccagcagcctgcgcatgcgcaacctgcagcgcaggctccgtcctgctcgccttgcgcctgcgccctgcggcgcgcgctt

SEQ ID NO: 38195 - DNA, 504 bp, Mus musculus
  source 1..504: mol_type = other DNA
tttgtaacaagttcccaaatattctaaccactgggaatgttgagatgccatgtccagatcagatatttgcactcatcctgtcacgttgcagggacaaaagagccaatgctgggtgggctgtcaagacacacacagtactattgcaatacattttatatgttatcctagctgatggggcttaacaattgttaaaaaatattccataataaggtataaaacaatgtataaaatgtactttaaacaatgtataaaagcacactcacttttaaataaacacttcatggagcttttggtttctggcttaaaaaaaaaaaaagacacacacagacagatatctgcacatatgtatgcagacctacatgcagacacatgcatgtacacagatgcaggtacacaatgcacaccggtatggatacacacacaggtgtatgcacacatcaatgcacacatccatacacacattggcacatgtgcacgaatctgggcaggtgccttttgatgaat

SEQ ID NO: 38196 - DNA, 420 bp, Mus musculus
  source 1..420: mol_type = other DNA
ctgtcgactggcagccagtcattcagtttttatatccagtttgctaaagaaaagcaaataaaaatgtaaagttttgggtttttaaaaaaagattcattttttaaaacattttaattgtgtcaggctgttgtaaactcttagctgctgagccacctaacaacttaaaatttgtattccattattattttaaaagcttctatcatcaaaatctgcctttagacttaatttacatgtgtgcacactcatgtattggcatggtaccacatagagaacatgggatctgaatgaagaccttttgctcccatgataaaatatctgatatactgcaacttaatattcatttaaaaatgaactcccttttgcattttcaaaggccttcaggatttttgctttaatgatagattactcttgaacagataa

SEQ ID NO: 38197 - DNA, 335 bp, Mus musculus
  source 1..335: mol_type = other DNA
attacttttaaaaggatacaatagtcttgaattcttcccttgtggaagcttagctacagttgctgatacaatttaaaccacctaggttttggttggctatccttgtagcaagaggcatgtgcctccgtgtccagcaaggagccagaaccaggctggcgaggacatggactgtgtcctcagatgtcacgttcgctgagaccctgggagtctggttgtgcagggtcagtgatctgcctcaggcccctcctggtgctgggggcggagggactttcctgtgggcaaagggacaagtctccaccccgagactgggcgggtcctatcggccgggacgaggg

SEQ ID NO: 38198 - DNA, 555 bp, Mus musculus
  source 1..555: mol_type = other DNA
cccagtctgagttttaattctctcatgacctgctgtgcccaggcctgagctgctgccccctcctccgctggagcctgaacccaggccagagctcccctgttttccaatatgaaatgccaaggcaataagaaaagagatctaaggatttcttctccggtttcagccctgagcagagccccgggaatccggccgtggggtggaatagactgtcaatcgcgcggcgggtcccctcctcctcggggagcgatcgtagtttaaaaggccgtcatccagaggaaacgctgcgtgcattttcttcgggaaagccctggaaacgcaccggacccctgcccggacccccgccccgggccccggacacccactagcggccgctcggcggcgagcccagctaccagccccgcgacatggccacggccgccggcctgcgacacgaaggaggcggcgctgccgcagagccggggccgcttcggcgcccgcccgcccgccagctgatccccgagcgccgcgctgaggccgcccctcccccgcgcgcgcgcccgtcggctccgaccaccc

SEQ ID NO: 38199 - DNA, 350 bp, Mus musculus
  source 1..350: mol_type = other DNA
ccttagcatttgacaggtttagtaaacacagcatcttcttgcgaaagattctgaagagaaaggaccggaagacacctgctttgtcgtcggggaactcccaaacccaactggggcgaggcagctaaaccgcgtccttcaggtgtcagtccggactcctccagtccctggagacggcgtccgaaggtgcgctcgctcccggggcatcttgggaattgtagtccagatgccagattcagcggcaggactacctgtagctatagctggtgcacctgagacggcccctgagaaggggctgtgcggccctgagaagcacttccggtggcagggtggtcggagccgacgggcgcgcg

SEQ ID NO: 38200 - DNA, 272 bp, Mus musculus
  source 1..272: mol_type = other DNA
tttatttaattacacatttttgtttacattacattgtttttgttttttattttatgtatacatatattttacaatccaccttaatttgtaaaataaaaaactaggtgcacatatgtattcatattggagatttaccgcaacattccagctttgtattttcacgggactcttgcatatgtgaacaagtgtgtatgttaggttttgttatatcatatatcatatattcccttagaagcctgacttttggcgtccccggaccgtctctgcagggc

SEQ ID NO: 38201 - DNA, 438 bp, Mus musculus
  source 1..438: mol_type = other DNA
tcgaggccagcctggtctacagagtgagttccaggacagccagggctaaaccaaagaagtctgttattgtatgagacctaaagatgtcacacttaaaagtggcaaggagagcttccctgagcgcaggcgcagtgctgggactactgaggagtggggcgctgagcaccttgcctacagctcaggtcgtcaccggaatggctgcccgagggcgtcctgcaggctcccgcacctctgcgccagcagcgcagttccggccaccgtggctctgaggctcggctcgccctcagcgggcggctccaggaacctaaagcggatgctggtcgagcccctgccacgtcgctacccgcagctctgcgtctgcgcgctgggcgggcgatgcctgcgcgtgagcggcgcgggcgcggcccaatgggagagccgcggcggcgcgcgtggccg

SEQ ID NO: 38202 - DNA, 360 bp, Mus musculus
  source 1..360: mol_type = other DNA
ccttatgaagtgcctcatatcgtactgttcatgtgcaacgtggtccataagtcctgagagggagtgaattcagtaagttaataatctgatatttagatcaagtttggcttaaagttcccttcacttaaatataaatgcatagagtatgcttaataaagccttagaaagtcaattttaagtactgttactggaagtctaaacaatattggaagcagcccagtagatttttccaacagctgtaatacttctggtcacagattcggaataatattatgtcttggcataaggaccaggacaagaatgggccccaggccactggaactgactcagctcccgtgtcatcagacagacctatctgtc

SEQ ID NO: 38203 - DNA, 377 bp, Mus musculus
  source 1..377: mol_type = other DNA
caattttatgaacaagcatgcctggaaaactgttaaatcaactttcttcctacagaaattctccagtgtttaaattaataacaggcatgtattagttacctgactgctgcctgctttccaagcagaggctgcagtcacctgaaggcttagcaggcactggagaattagcagtgaacagttaatccgattttcagagccctttgtgatctgcagtaaaactatgtaagatcaagccttgtgcttcatttgcacaaaggcttgtttgcaaagtcgggactgtatccgcacctcacctgaaaactcttaagggtctaggggaccccaacattttcgccgcccttactctttagactttttccaaaaaaaaaaaaaaaaaa

SEQ ID NO: 38204 - DNA, 248 bp, Mus musculus
  source 1..248: mol_type = other DNA
tttctcatggacttttccatattctaggggtaatagatggcaagatggtgctgccaacagctggaaagctgcactggcttcgaggccagacaattttgttaaaaagttttcagtctcctgaatctcagaggatgagtcagaggcctcctgcctaagggccctactgagcaggcagctaaaggcttccgggcctctgcagctccacagatacagcctgagcacacctagcttgagcaaagctggtcagg

SEQ ID NO: 38205 - DNA, 238 bp, Mus musculus
  source 1..238: mol_type = other DNA
tgctttcttgggtcaatggagccatggatgggagagcagatgttctgaaccagagttctctgactacaattgacatcattatcccctcacaatgctaattaaaaaaaccaaaacaccgaagctctgttcttctctcaatctttttaaaatctgacactttcttaaggtaagtggagtttcaccagaagtcttgaggacttcagtacaaactaacagacttcactgatacctgggatgt

SEQ ID NO: 38206 - DNA, 289 bp, Mus musculus
  source 1..289: mol_type = other DNA
agctatttgcttgcaccgagcccagtcagggctgagctgcctgcctgccatcacgttgatgcccagggtcatctctgtaatcctcctcttgaaagaaatgtctgactctagggaattgaatttcatccagacgtctgtgcagcaatttggtttggtagaaaaactacgacaagactgtttgccaatcaataatcttgtaaatcaggaaaagaatacttttcagaaatcaagaaggatttcttataagtccttacacagtggctctgagaggctgaagtctatataaact

SEQ ID NO: 38207 - DNA, 434 bp, Mus musculus
  source 1..434: mol_type = other DNA
cctgtacaggtggacaaagtctggaagtttgactgcacaggtcagtggcttctgaccagccatgggactatcagacaaagcacattagatggtttctgaaaagttcttcaataaactgactgtagtcgaccaatgaccgtgacattcattctttcctgtttcgaaaaacaaatgcctcgaaacttgtttatgagtcattgatgtctacttaacttggagttattggctatttagtccatctttgaatcaacacacatcactaatgatttgcattctgttgagtcttaacatctgtcatacacacgtgcaaaactgaagcctttgcaaagacaaaattgtcctatctctcgccagtgtcagaatgtagaaatgtttacaatgaaatctggtgtacaagtttacaccttgtgtcgtgtccagtgacacaagacacc

SEQ ID NO: 38208 - DNA, 331 bp, Mus musculus
  source 1..331: mol_type = other DNA
ctcaaccgctagctcaaggtgacctatttgaagatgtaaaagtctgccacagtcaagagtctgtcccaccagcttctgcaacgactccttagcagtggaatttttaaagatgctgcccattcttgggcagaatgctggctgcctgcctggcctcttttagccgccaaaatctggagtcaaggaggtggcgagagccttgggagtctctttccatttaattaaaatttacaaagatttctaaataacatcttctgaagacagtgtgctcaaaaaaaagcagttgtttatcacaacttctgcccagcagggctctgcttcccaagaggcagcc

SEQ ID NO: 38209 - DNA, 223 bp, Mus musculus
  source 1..223: mol_type = other DNA
attttaaggaattatagtaaactgcgaagattctcttaacaatgctctcagctgagggctgcagagataagcccaggggtgaggtctgagcgctcccagctgtcctttgaaggcgccaagctcccgtgaccagtccgcccactcgggcggcaatgggccagtgaactcgaggtaccatgcagggtcagttcactcgacttagggacctgtccccgtgggcggg

SEQ ID NO: 38210 - DNA, 349 bp, Mus musculus
  source 1..349: mol_type = other DNA
agaagaccttgtctcctggaggcatctgcagagtcctgtagtacaggctttaatatccagacacaggcctagctgaggctgtcctcagccacgtgccaaactctgggccaggcttcctccaaagagaaagttccctctagctgggagccctgagcttagcaactggcttatgcctcttttatagagaaggaagattctccggccccgtgggccaagtgtctgcagatccatccccaaatgagtatggggcgcctgcacaggtgaccctcttgaggctgaacccacatacagtcacagggccacgggccagctaggcgagatgaagacccagcgttccatgagtcctgtg

SEQ ID NO: 38211 - DNA, 340 bp, Mus musculus
  source 1..340: mol_type = other DNA
agatggcccaggccccaggcatgtgcggtgtgagtctgttaagtgctacacttacagactcaaccgctagctcaaggtgacctatttgaagatgtaaaagtctgccacagtcaagagtctgtcccaccagcttctgcaacgactccttagcagtggaatttttaaagatgctgcccattcttgggcagaatgctggctgcctgcctggcctcttttagccgccaaaatctggagtcaaggaggtggcgagagccttgggagtctctttccatttaattaaaatttacaaagatttctaaataacatcttctgaagacagtgtgctcaaaaaaaagcagtt

SEQ ID NO: 38212 - DNA, 413 bp, Mus musculus
  source 1..413: mol_type = other DNA
aattttgattgtcaatgtaatgaatcagggatgcttatgaggatctttccaaaaagaattcactgagcaaacatttgccctgaatgtgggtagcaccaccccttaggggtgggagagaaagcttgtaccagagttcattcctttctgcctcgctgcagaaaaaatgaacccttcacttgcaagttgcttcttgttaggtatttgataacagcaacaagaaaagtgactacagccaccaactaattcaggaatatcctcagacttaggggtcctgggtccactgcaggccaacctaggtgtggcccattgctacccatggggctcaggaggtagcaagctctgggctggcaagagctgtgattaagatctacctgctcagaaaaaacactcagtgcatattgtgggcactaatt

SEQ ID NO: 38213 - DNA, 307 bp, Mus musculus
  source 1..307: mol_type = other DNA
cattataatcaataatgtggtcaatgaacatgctgtgcatgcaaggtatggtattgtacattattccgttaaattgccattggttttataattaacatatatatgtacacatgtatatccaaaatgcttaaaacaagatctgcttatctaatagtcaaggggcaccaaagaaaatagtggccaaacaatgtttcctcctcggttctagttacgaggagggacggccgagggctgacagcaggcgcaggcgctccagcctctggtgacaatagcggacggtcccgtgcctctctggcctgaccgtggc

SEQ ID NO: 38214 - DNA, 401 bp, Mus musculus
  source 1..401: mol_type = other DNA
aaggagccaggtattgtgtctgttgatcttggccaacaccagccgtgaccacaggcaggagccccagctcctggacatgtaaaaatccattgatttggttaatattcacaactgtgggggttttatgatttgtttaaaaaaatgcagatttgaattttaattgcataatgattctatttcaccattttgattaatagcttgtaataccaaaaccattcattaaacctgtctcaaaggagcctccctcagcatctttagagagagggaggactattccaagtcctccccgcttgaggtacagaggtacccctcccttaaggtggggtttccaaggccctaggactctgggtgcctcctggccctgacaggccctcggggctgtcctgtcaggcagcagccac

SEQ ID NO: 38215 - DNA, 358 bp, Mus musculus
  source 1..358: mol_type = other DNA
agcaggatgtggttgtcacaatgtcctggcaatgatttgataaataatatttgtgatgaatgaaatcaagtttcttaacggacacagcgctcttcaagacagctttaaagatagaaaaaaaaaaaaaaagcaagtcaacaatcattgtttttatgaccactagaaacgttttaagaccattcctaggtggccaggatagtcagcattcaaagccccagcatccctgtgctggatccctgtgctgactggccagggacggggcagtattcctgttacctgtgaagataacctgtcacctagtgcagccctggatggactgtgcacttgagcttaggttatgcaatacactatggtgcag

SEQ ID NO: 38216 - DNA, 323 bp, Mus musculus
  source 1..323: mol_type = other DNA
aaatgctgggattgaaggcattagctctgtattttattttaattaattaattaatttgttttttcgagacagggtttctctgtgtagccctggctgtcctggaactcactttgtagaccaggctggcctcgaactcagaaatcgccttctgtcagtttcatggaaacagccacctttaataaagaataatgataattatacacgtttcttaaaaggaggacgatcatagtctggtgcctgcgcctggcgggtccaggcaggttccctaggggctatgaacactcagtgcctgctgtcgcgtcggcgggaagccgcctaccgaa

SEQ ID NO: 38217 - DNA, 164 bp, Mus musculus
  source 1..164: mol_type = other DNA
aactttccattctccgaagagggaacattgagctcttgcctgttccccactgggtgcaggccaggctaacgagttgttgacctaataggggccaaagcctgatcagggaggctcgccccgccctgaaggcggcgcacgagcgggcctgaggtagccgtgggccg

SEQ ID NO: 38218 - DNA, 403 bp, Mus musculus
  source 1..403: mol_type = other DNA
taaaatctagacaaattttagtactttttagaactcaagagacttgagatttccagattcttcatgtttgtattaaaaaaatcattaaaacgggacagagttctagaatgctttagtttggacttacaggaaaaatttatcttctgctttgggcagcccaggcaataactttcttggccttatgggtcacaagaagtgttgtgacacaaatcacctgttcttctgagccccaccaggcttaggggaggccgggcagggggagattggctcccgcaagctgcgaccactgcccggatgaaggccgcgagcgctgcgggccggaagaggctgggcgtggagcagtccgccccgcccctgccgccctcgcgcgaggccgcgctcccagcgggcgattctggcctgg

SEQ ID NO: 38219 - DNA, 382 bp, Mus musculus
  source 1..382: mol_type = other DNA
ctatcaagtcagagcaaaccacaagttttatagtatttggtagaaaagactcatttaataattttcacattagcggctgagccatatgtccagttatatctcaatgttaaagcacaaatgtacataactctattcattgccttacaaagctagactcggatggaatcggttccttggctagcaacagtgaacttgtttgagagcagcttcccaataaatttgcccttaaaatattctaactgaattggctcattttactggcggaaaaataacctattagtgagacttacttccggtcagcgtgctgcatgcaaccagcggagcacccgcaaccgcaggtctaggctccgcctccgttgtgcgcaggcgcagacaacagagt

SEQ ID NO: 38220 - DNA, 459 bp, Mus musculus
  source 1..459: mol_type = other DNA
cctgtatactgtatgcacatgcacatgtacacattagaacaatcaggctacacttgagcatcgttaagctgttttagctatgtcctggctccaccatgtacttggtcaggcatgcagtggtgaactaagtaacgtggtgtgaaacttcctaacaggttataaagagatttaagtaggtgacctgaaggctgctccctaaagagaaggcctctccaggctttaaaggaaagcctgaccttcaaggccacacccaggcctggtcatagcctggaagccattccattcaaataaacttcattaaagaaattggtgtcagcctccttttgtgaagattacaatcagattccggcctgggaagggggaccctgaggcctcctggggtgcctgtgccacacccccacctgtggggagggaaccccgacggcgcgacgtcacgtcgggggcggggcggggttaccg

SEQ ID NO: 38221 - DNA, 283 bp, Mus musculus
  source 1..283: mol_type = other DNA
agggtggtctttgcaggtgcactagatcctgaggtttaatttccaacatgtagaaatcttttatcttttatatgcgccggcagcgggcggagcacgcctggtggccatcagcgggcacagtaggcaggcgccaccaggccattggcgccgccgggccggtaaccatggcgacggccgttgccaagggtgagagcggacctgggccaggcggaaccctacggaaccggtacaccgagggtggatgtcgccagaccgtaggggcgtcacttgcggcccttgggca

SEQ ID NO: 38222 - DNA, 584 bp, Mus musculus
  source 1..584: mol_type = other DNA
ccccatctaattctgaggggtccagggacgccaggcgtgcaacctcagggcaattcccttctgttggttcccctggccccagcacgctctcgggctttgttcctgcgggcagggctgtggtcccctgggcccagaaccaactcaggtgcctgaggacgcccggggcccgtgctgagccgctccgctgagcccgtcctaggcgcaggccgcctctgcgcagcgcagcgggctcggatgctgtccagggcacactgctgagggtgcagccgcgcccgggagccgcgggcggaggagccagtggccgcggaagctgggcccaggctgttgttgttctcaacgtggtccgccacgagcggagcggggcgcgctctccgccagagcgtagcgcgcacgcccagagctccggagcccgcgcagtgctgccgcgctccccgcagccccagccccgccgcggccggcccggcccccgcccgcacctcagccctgccgcctggtcccaggcccggccgcggccgctcccgcctggagccgccgcgcgcccccagtcccccggcgccgccgcggcccctcgccttcctcttccc

SEQ ID NO: 38223 - DNA, 345 bp, Mus musculus
  source 1..345: mol_type = other DNA
tagaacatgtactagtgttgtggggtattcaccagaaaagacaataccccaggacaacctgagtctttctcagggtgagcttttaagcacacaaaaaaacatgttctgggttgacatgtgacactaaaatcgggacactgtaactgagcgtgttccagagggggacactctggaaagaccaagtgactctccctcggtgcgctccagcttctgcacagccttcaaagatggcagcccccatctagaaacgggggcctgacacgtgacgcaaggtggaggtggggctcctccctccaaccctggcgacagacacttccgctcggggcggcggcggtggcggaagtg

SEQ ID NO: 38224 - DNA, 720 bp, Mus musculus
  source 1..720: mol_type = other DNA
gatgtcgccagaccgtaggggcgtcacttgcggcccttgggcagctggcagcagccgccgccttcgtgcgcgcgccgctccggctgcggcctggcgggcgttctgtccgccgccgccgtgcgcgccttgggcgcggggctgctggccgccgaagctccgcgccgctccgcgccgccctccagcttcttgcggttcagcttgaaggatccgttggcgccggtgcccttcacctgcagtagcgtatctagatgcgcgccagagacgagccgccgcgctcccccagcttgcggatggtctccaccaccagctggctgtacgggctgcgtgggcgccgcagagccgccggccttggccgtcttgcgggccgtcccgtcggcgctcgttggcggcagggcctcctcaagctccaccgacatggtggccagcgggttggcggcaggcggcgcgcggtagccggggggccgcgccgggaagaggaaggcgaggggccgcggcggcgccgggggactgggggcgcgcggcggctccaggcgggagcggccgcggccgggcctgggaccaggcggcagggctgaggtgcgggcgggggccgggccggccgcggcggggctggggctgcggggagcgcggcagcactgcgcgggctccggagctctgggcgtgcgcgctacgctctggcggagagcgcgccccgctccgctcgtggcggaccacgttgag

SEQ ID NO: 38225 - DNA, 509 bp, Mus musculus
  source 1..509: mol_type = other DNA
gcaaagttttatctgtagattttttcatatatatatatatacatatatacatacatatatatatgtatatatgtatatatatatatatatatatatatatatatatatatggtttcaaggcccaaaaaatgccattggatcagtacactgactacagttagaggaatccatctgcaagatgcctttgtaaaagggcttgcctcagagagaccctgtcatatgacgatatgcaatgccttccttagaaggcatgcaatgtcaaagtgccaccttggaactgtgataaatgtcaacaggtatctgaggttaatatcatcaaccttggttagtcttaaggtttctgccatcactcacattaatggttgaactaaatattagaggagattctggaaatttccttagcattcgtatcactatagagaaggcaaagttagttccttagactaagctatagtatactgtttttcgatcgcccggttgccctggagacggggtcctttctgaccggg

SEQ ID NO: 38226 - DNA, 405 bp, Mus musculus
  source 1..405: mol_type = other DNA
agtcttggactcacaagcttctcacttgtctctccagaatggaggtgttgtggagaaaaactccgggacccttagaaagaaaaaatatatatggttaataccccgggagtctctctggcgccagtttcccgctccacggcctcgccccaggcagttcagcctggtggaaggccccttgcacagctatccctgataggaaggtgcacgtctcggctcctgggaagtcagggaccctatgccggaggggtgcagggtctgcccacggcgaaggtcccctggggggggggggcgttggcattggtagggggccaggcagcctaggaggccagcttgcggagccaatgggggggcggaggctgggcggcgcgcggcgctgattggctggcgccggcttcataggcgtgc

SEQ ID NO: 38227 - DNA, 188 bp, Mus musculus
  source 1..188: mol_type = other DNA
accacaaatctggagggcctggaggcttttcagggatgcttgacagccaggccaggagagactctgtccccatgaacttcaagtctcaagagatgaatctgggacccagggagcccaccacagtgatcagcctcaccacagctctgtgatgtgtggtgtcacaaagggccctggccccagcttggaag

SEQ ID NO: 38228 - DNA, 255 bp, Mus musculus
  source 1..255: mol_type = other DNA
agcctagacttcaaagtgaggagtgtatacagtctgcacttaataaaggcttcaaggccagcctggtctacaaagtggtgagatggatggatggatgcatggatggatgaatggatggaaggaggaatccctaatctcagactgtcccgccctgtgtgcgctctgccatagggctgtgggcgcccgagggcggaagcttccgtgccggaaccggtgcgctcagcgcgggttgcgggggggtgcggcttagcaggc

SEQ ID NO: 38229 - DNA, 353 bp, Mus musculus
  source 1..353: mol_type = other DNA
agagccgttgattattcaaatgaaggaccatagtttcacagggtttctctgtatagccctggctgtcctggaactcactctgtagaccaggctggcctcgaactcagaaatctgcctgcctcattgggcatatgatgaccagaattatggcatgaatttaacatctgtcagtgaagaagttaactcacaaatatgttattctaaagaaaaaaaataggcattaaaagaggcatttataattaaaaacctgtcattcacattaatagtgcttaagtacttaagcagttgggcaggaaatgtttgccctgggggaacttatcctctcgcctcccccaatgacatattgatagggg

SEQ ID NO: 38230 - DNA, 604 bp, Mus musculus
  source 1..604: mol_type = other DNA
tcttaggtgacccctgtgaaagggtcatttgaccgtgtattactacactaaagctctggctcgttttaagctagctgacttaatactgagtctttaatcacaaaatagatgatgctctatgacacagaattaatcttttcctgagtgctgaaattcagttgccagctgtaataaataaaaatacagaattctatgttctgtattgaaaccaaaacctgtttttggtttcaaaacaatgagttgcttctaaatgtaaaaagaaaagaaataccacttgtatgtctgaattgtatatttgagctttgcaacgtttaaagattaaatgaaagacgtgtccccttaaaagatccgatttccaaattctcttttcaaaggtgtcgcgcgcggtgtggcgcgggaagaccccgcgcaggcgcacttgccggtgagggacctctggggtctgtgtggaacaggcgcgggaagaccccgcgcaggcgcacactgcagcgcgtgtcccggccgcttcccgcgcggaggccgagcacctgttacctctgggtggccgccagcgccctcctcgtcctcgctgggacgcgtcagtcaggcctgccccgccgcgccc

SEQ ID NO: 38231 - DNA, 421 bp, Mus musculus
  source 1..421: mol_type = other DNA
acattgtgctaagtatattgacttagtgctttcccctaaacccatctatatttgtgtacgcacatgcaacttaatgccaaattaaatataaatgtcctatcaagacgtggccacagcactccgttgaagtcaggacttggctgcatgaaactcagcactgagatcagagcttggaatgcgctgcgccaaagcccacccctttgccgggcagcctacagcacactgctgctctgtcgtgcgtgacgagcagcagctgagatttggccctcacttccgggagagtctgcgcagctgcacacgcccagttccggctctgctcctgctgcatgccgggagttgtggtcttggcgcaggcggcgcggcgggcgcgcgtggcaggaagcggaagcggccggtggcccatccccggccccgcctcgcc

SEQ ID NO: 38232 - DNA, 385 bp, Mus musculus
  source 1..385: mol_type = other DNA
aatagatgaacactgtttaactattgatttaacacgatagttagcttctacaaatccaaaagttagcaatgctatcagatagcattttgagcctataggaacactttctttatctgttctgtaaaactattttaaaaacaaaacaaaacaggaattaggggtaacttaaatctacactcactgtgtcgcacgtgtgcaactgtaaacatgtgcatgcgtgccccgtgaaggtcccccacgcggccaggaaaagcgcgaggcaggtcggcgggcgatgccccgctcctccccgggggccgggcacacgtggggccccggcgccgcctccccgcgcgtccccacccagcgggccgcccccgccgccgagcggctggggataaagtgg

SEQ ID NO: 38233 - DNA, 509 bp, Mus musculus
  source 1..509: mol_type = other DNA
ctttatctgttctgtaaaactattttaaaaacaaaacaaaacaggaattaggggtaacttaaatctacactcactgtgtcgcacgtgtgcaactgtaaacatgtgcatgcgtgccccgtgaaggtcccccacgcggccaggaaaagcgcgaggcaggtcggcgggcgatgccccgctcctccccgggggccgggcacacgtggggccccggcgccgcctccccgcgcgtccccacccagcgggccgcccccgccgccgagcggctggggataaagtggcggcgcagacgccgcgccctatcgctgcgcagccggccgcgcgcagtagtctggctctagcccgccgcagacccggacccgcgtggtgctcggggaacgtgacagcggcgctcgtggcccgggtaactgcctcccgcccctgcctcaggataggagccgccgccaggggtcccctgcgcgcgtgtgcgtgcgcacgagtgtgcgcgcgtgtcagcgtgtgcgcgtgaacgc

SEQ ID NO: 38234 - DNA, 423 bp, Mus musculus
  source 1..423: mol_type = other DNA
cggcccgagcagctggagcgcgctcaaggacactcacctgtgagcgccgggccacgggcgcgagactgcccgacgccacggccccgcgcccctcccggtccgcagcaggcgaccgcggcgcagctcccaccccgccctgcccggccccgagcgcttgcccgaggccagcgcgctccccgcgccaggaaagccgctaagacgcgcgggccgctccgcctccacgcctgtgctgcactcaggcctccaggactgacaagcgttagcctgtgggaggtgctgttttcagactgcagcgaactgctcttccggtgaagctcttctgaggagagggcggggttcgggccggacggtcctccgggcggcaggcgccgctgcggagtcgcaggcgggcatagctaggccgtgccgcgaggggcggggcgg

SEQ ID NO: 38235 - DNA, 410 bp, Mus musculus
  source 1..410: mol_type = other DNA
tgtgcccggccggccgccccgcccctcgcggcacggcctagctatgcccgcctgcgactccgcagcggcgcctgccgcccggaggaccgtccggcccgaaccccgccctctcctcagaagagcttcaccggaagagcagttcgctgcagtctgaaaacagcacctcccacaggctaacgcttgtcagtcctggaggcctgagtgcagcacaggcgtggaggcggagcggcccgcgcgtcttagcggctttcctggcgcggggagcgcgctggcctcgggcaagcgctcggggccgggcagggcggggtgggagctgcgccgcggtcgcctgctgcggaccgggaggggcgcggggccgtggcgtcgggcagtctcgcgcccgtggcccggcgctcacaggtgagtgtcct

SEQ ID NO: 38236 - DNA, 405 bp, Mus musculus
  source 1..405: mol_type = other DNA
tgggacagtcacgcttcagtcagtgttttcactgtcacttaaagaagtgagacatctttctatctgagaattctgaggaatgttcctgccctcctgacacttaggaagagcacatggtggctcaacaaccatcagtggacttcaaacacgcacgtggtgcacatatgtacatgtagggaaaacattcagctcggccacgtgccccacaggctggggcccggtctgctgcacaaaaggttcgggacccgcttcccagggaggtccccccccccgggtggcgaagtgctcgaggcccgaggtgcaggtgcgaagccggactccgcaatagggtcccgcccccgatccctccgctgcatcgattgggcggatgagcgcgtgagtggcgggtacgcaggccaacggggc

SEQ ID NO: 38237 - DNA, 375 bp, Mus musculus
  source 1..375: mol_type = other DNA
cagtagcaggcctctcactggatgatcaggtggtatccctcaggtgacctcatgtcaggacatgctaatctgcagggagtataaaagcccacagcagcctgggtgcttgaaggattgaacctcagtgctttgaggcaggcagatttctgagttcgaggccagcctggtctagtggccataccgacacttagatacgattggtcctcagagccactagtgaccccgctgaagggttaagcctaggtgtgcaggaggcgagggctcagccttttgaaagccccaaacattctagccctccttccgctctagattgacgaggacgtagtgacgtctgagtcctcccggcgcttcccgggcatgggcgggtcacgtggt

SEQ ID NO: 38238 - DNA, 425 bp, Mus musculus
  source 1..425: mol_type = other DNA
tctttaaccagcactgaggcacctctaaggtgttgctgagacacactgcccccccccccaatgcctgaggaaggggtaggcaagttactcttgagggagagcccaggaagctctctgtgaagaggtgcacaggtaagcagatgacctgaaggcctccaagttgccctgggggtgtcccacagggagggtcccttgcttaagcaagagatctttcagggtgactgagaccaggactggggcaagcacagggcgtccgaggaagggatgcccttccttccctccttccttatggggcgccggtcccttaggcactggagctgtccgcagaaagatgcggggcaaaggcacagcgtgctcagtacgcttcccgaaacgctttaggggtaagcttaagagctccgcgggccgcctcgcccatctgagga

SEQ ID NO: 38239 - DNA, 242 bp, Mus musculus
  source 1..242: mol_type = other DNA
tgtgcctctgggcacacaccaactgaaccggcaccagggcgggactttcccggttccatgatggtccatccatctgagatccgagcagcagggctggaaccccgggtgtgaaggcagtcagactcaggctgcttgagagcccacagccatgactccagggctctagtcagcctacaggtgcccaccaggctgcttctttccccaactccgcggcaacattgaggtgggggaacaatcacagt

SEQ ID NO: 38240 - DNA, 191 bp, Mus musculus
  source 1..191: mol_type = other DNA
aacaagatcatcctcatgattttgagccaagtttgaagcaagcttgactttattggggtgcacccagtagtcaccacataattatgaagagtggttagggggtggttaaagtgttcttaaacacaattacagtaaatggaaatttattttttaacaatatttacctggggtggaaaaataaatgattatta

SEQ ID NO: 38241 - DNA, 255 bp, Mus musculus
  source 1..255: mol_type = other DNA
gactggcctcaaactcacaggcctggagtcacccatggtgtctcttcatagcaatagaaacactaagaaacattttcacaagaggttaagactaactagttatattttgtgtctctatgtacaagaattaaaagtttgttttaattaactttttaggtcttaaaggcaatttgtttgaaatttgtttctttcatgactcaagcaggcatgaaagagctttttaatggcgccagaatgcccccagcagccaataga

SEQ ID NO: 38242 - DNA, 495 bp, Mus musculus
  source 1..495: mol_type = other DNA
tcagagagggtcccccaggctgtgcccagtcagctgcgcacagctgcgcaatccagctctgcaggccagccccgcgcccgcgatcgacccggcgaggtctctatcctgctggggtagttctaacacgccccgctgcaggaccgcgtaccggacaggacagtcgtcctctggcatcccggcacgcgccacctcctggggcctgcggggtgcagtgccggttgcgcaggcagggcaagtgcttcctccggactcagtttacccttccgtgcacgaaagctgtactgagttttaaggctgaggtggccatcgccctttgaaggcaagcggtggggcccgccgcgcgcgctctcgccgcggggccgagcgccccctgcaggccatcgcgggtcccgccccgcccccgcccccgcccccggccccgccccccggcttcggccggcgcatgcgcgcggcacggcgctccgcggggcggcgagagcgaggccggtccgcagc

SEQ ID NO: 38243 - DNA, 475 bp, Mus musculus
  source 1..475: mol_type = other DNA
ttcctgttgctgtgataacaacactaaccaaagggtttatttgggaaagtcaagaaggagcagaagctgactgctgctcgtgggcttgctctcgatagctcactcagcatgccctaggaccacctgcccaagggtggcaccccctccccagtgggcctgatgcctacaggccaatctgaaggaagcatttcctcagttgagtctctttccaggtagtacactgtcacagtgaattgctacctcatattgaaactgaattgcaatagtaatttttattcagcttcagtagtgcaaattaaaaaagaatcagtatttcctagacaaggtttttgtcacattttctgaaataaagtggagacatctacccttcctgaaaagcacctataagtgactgccactgtgccactgggtggtgctcaccaggctgagctaagggggcgtagcttagccggcgggccctctccgtgggtcgcgc

SEQ ID NO: 38244 - DNA, 425 bp, Mus musculus
  source 1..425: mol_type = other DNA
gtatctgtttttttctctaggaaaacaagtagatctatggccacaaattttgtgccaatttgcaccagtctgtttgtagatgtatgaagctgaaaattgtcctttcaatttctgtacatcacttttgataggatgatcattttcactatattaatcctacaatgaacatgggattttccatcttccaatatcttcattcttattaataaaaaaatgagacataatttgcttaaaataagattcagcactttggttaactattttgagttaagaaaagagttatgaaactaccattagttcacaactaccataaccattatgacttaagtgatactgtggctgccactggaaaaacagttcctagaagattcctcaatgatgcttatttcttcttaatcactgataatttctcagattcatagtgt

SEQ ID NO: 38245 - DNA, 324 bp, Mus musculus
  source 1..324: mol_type = other DNA
gttattgatgtggactatccagaacaacttacagtggtaagtacctaccataaaatcatgaattcattagtgggttgaccctctgattatttcagaggagaaaccacccagctgtaagaaattctactggggtagggactcttctggcccagaggagagaagaaagaaagcctaaatctaggcttaaggatttgagctgtctgcggattcagtctcctgtacaaccctggtttggtcacctgctgtgctggtagacctgcccctcagaggcttctgacctcagaatgggcctatgggccctgttggtccagagccatggaatta

SEQ ID NO: 38246 - DNA, 428 bp, Mus musculus
  source 1..428: mol_type = other DNA
gaagctgagtttctgatttcagctgctggatctcgaagctccggactcctggtctcagtcactgctgtttcaaacagtttgtgcaggatgcaggacttcaggaagggccgtgtcctgactggtgcacacacttccattcagaatcagcttgtgatcacttgtttttcagccttaatggcagggggtcccaggacccttggacttacaagcagtactgagggtcaagagtccgaaagcttggggaccagagctgtcattcctaggcttccagtagctgccctgtactaggggttaaagcctaggcctcagctgcagcttctagctccggggttacagctttacccattaagcagtcaggcgcgtctatctctagcctggagcactggacgctgcttctgggcgggccctaaactaagggcagaactggg

SEQ ID NO: 38247 - DNA, 374 bp, Mus musculus
  source 1..374: mol_type = other DNA
aacaaagattactataagcatgcaagtagtttttgtgtagacatatttccatccctcttcaaagttttaatagtatttgaactttcagaagactaaatagtggtttatagccatcaggacctgctacagtattttcaattaagaaacgcaatcagttttcattcctttgcgagtaggagcccaaatctgaagaccctctttttccaagttgggactccaaacaagttggaggctccgcccctgctccagcccctgggcttcctcgtgactacagtcccgacagccctcgcgcgccacgcccacgcccacggctcctgcgcacgcgcagctcgagatgcgactctgggctgtagtctaagctcagctttgacgag

SEQ ID NO: 38248 - DNA, 386 bp, Mus musculus
  source 1..386: mol_type = other DNA
ggtgtccccagacgcaggactgcagacagagacagatgccatttcagtggaggacttcaggaagtctcctttttcagtgacatgggactggagttctgagggccagcacaagtgccagccacggccgggtgacatgacctttttctgcagatggaggagtaggtcaccacccacctgtgtacaacctagcattggcctttggtccaaggccaggatgtggagaaagggttgctgggggcatggaaagctgtaaccacacctaccttccccttcttgctcaagtgtcagggaaaatctaacttgggtatgaccccaaggagtttctcttatgccctctctggacccaatgaggggctggaggaggtggccctggggctgtccccacc

SEQ ID NO: 38249 - DNA, 248 bp, Mus musculus
  source 1..248: mol_type = other DNA
tgcccagcgctggactgccctgcgggatactgtccctttggtgattcaagggtccctgacccattcctccacccactgggtggcgccagcgaccctgagtagcgccaggagcgctgggcaaacgtaccctgtccccgggttgcagggttgcaacaacccgggtactccgcgcccgccggcccgccagcccgcccagtgtgcccgggcccgcctccggggctttatgacatcacagctcctgtgagaat

SEQ ID NO: 38250 - DNA, 368 bp, Mus musculus
  source 1..368: mol_type = other DNA
agcacagactccttcccctaagactcggagaatcctcagatccttatttaagggtcctggcaggggaaagacaagacagacctggctgtgcctggccctctatctgcttggctaagaaggcctcacgccgcccgggtttgaagccaggcagtgtaggctaaagtgcacagcagggtacccagcactctggcagcaaacctccgcattacaattggtcgacacggtccctactagacccgaggtcccacgtggtctgcacttcgggacgccgaggcggggcgggggcgcgtgacgcgcggcgctagccaatggggcgcgcgcccgaggccgagcctcctgcgagccttcgcggcgcccgcggcgtcacg

SEQ ID NO: 38251 - DNA, 261 bp, Mus musculus
  source 1..261: mol_type = other DNA
gggattcagaacctgtctcagtcaccagcattgtgctccttgcttatcacgcttgaaggccgggactaggccagctagggcttgcccttcccttcccaagtctcgggactgaggctccagcggctggctctgggccctgggcgaccagttaggttccggctagggactagggaaagcatatctgggggcctggccggagggcctcctatgattggagagatctaggctgggcgggccctagagcccgcctcttctctgcct

SEQ ID NO: 38252 - DNA, 411 bp, Mus musculus
  source 1..411: mol_type = other DNA
tcctgagaggactccagtcgcattgtgactgcaccctgtgttgacaaattttgacaatgtaagtgttgtattcttcaaaactactgcacatccggtttctgcaggtgcagttggcagctagccagggctcaggattcttgaatcagccaaaagttttcatgacacatacacaagtgttcaaaggtgaaatattcagaaatgtcagattctggcccttgcagtgtgctactggaggctactccgtcgcccagccccgcccccgcccgtggccccgcccgtgaccccgcccccaagcggcaccgcctctgaggcgtgtcattgggtccttcggcacccagggagcatccctgcacaccccactgctcgatcagagagcgccccgcccctctgtctggacgcctaggcagggcg

SEQ ID NO: 38253 - DNA, 487 bp, Mus musculus
  source 1..487: mol_type = other DNA
ccagagactcaggacccgggtttctgtgtcagtgggctagtccttcactggactacagcatgtgcagtacaatggcacgcaccacaagctattgtggttaccattgctactaccagtgttcacatgtgggagtcacacaattactgggataaggtccaagagctttgctgtcaggcaatgtcactgtgcacgtcacagtggtcaaggtcactcactgaacatgatctactagggacatcctggtacctgcgtgcacgtgcacataaacacaaacacagagacaaaaaaaataataaaataaatattttttaaaaaaccatatacaccgattggacacatggccagtgacagtgtcactgtgaccactgtggtggggtttacacggccccatcacgtattttatgtcacatcgcttgtgacatcatacatcacatcagttgtgacgtcataggtggtaggaattctcagatttgctactctggaatca

SEQ ID NO: 38254 - DNA, 354 bp, Mus musculus
  source 1..354: mol_type = other DNA
ccgtccctcccagaatcatgggagagccaggctgtcttctgagcatgcagcagagggccccctagggacattctataatagtgattcactgtttctcagtgttctggggtactgggcaaatctcagccccaggagggcctgttggggtcactggctggccctcatccccgcttgtgaggccctttgtgacacacagcccttagacactgcctgtctttctagccatgggctgccttcagaagcataggggagcgtcttcagggtgtgcacactccctgccagttctgttccgtgagttctttaaacatgttaacagacccaccttgcttctgaagtcattgaacaccattctgt

SEQ ID NO: 38255 - DNA, 313 bp, Mus musculus
  source 1..313: mol_type = other DNA
tgaaaatcagccttctaactgatgagcaagagtcagatctgatatgcaacacctaggatctgatattacacagacttgtgtgcctgtgtatttttaacattgatgggtacaagatgcccactgggcacatcacctgccctctgtgttatgagcaacacacccctcagcttcagtctcctcatcagtgaatgaggcccggagtaacactttacagtgttgcccactgcgctccagagccctggaacttgttgctccatacagcaagcctgggattctgggattctgatgttatgggaacaagagcagaatctgc

SEQ ID NO: 38256 - DNA, 353 bp, Mus musculus
  source 1..353: mol_type = other DNA
cttctccaccctgagctgccagctaagcaatcaggagaggtagggctggccaccaaggtgaaccctgggtttctggcccgtggcatatacaaagggggcagcttcccggccgggccccttccctctggtgggatcagcagggcctgttctgatctttctgagcagaagggccccagttgtgcacagctttacatggtggctgtgagcccccacgcactggcactggctggtctcccggcccttctcggccagagcaaagcagcccatggcacgtgtgcagaggacgagccaggcccatgtgggtggtgtccctgcccagtctggctagcgtgggctggactactggacactgt

SEQ ID NO: 38257 - DNA, 479 bp, Mus musculus
  source 1..479: mol_type = other DNA
gggtggggctccagctgggccccagtatgaaaagaccccaggggcacagccctaccatgggttcactccccagaggggtctagcctcatgctcagtccccttaacaggcctgtgcctggttgttgacaaagcgattgaaatccatttatggaaatggttgctcatacccattgggtgcaccaggctcctagagctcttgtatgttaggagaaactctcagggtccagtggagtccttgggagcagacctggtggaggatgtgggcccgcccttgcctccacagccgtcccaccctggcctctggatgcacagggcggcccctgggctcccagagctcccacccaccccctgtctcttggcaggcggcaggggacgctcagccgccagggtctggagcaacagtaggtcctccagaagcaacggaggccagcccggcatagctccgccaggaacctgctgtggcctgggagagtcagggt

SEQ ID NO: 38258 - DNA, 386 bp, Mus musculus
  source 1..386: mol_type = other DNA
tacagaggtggcacagcccacagtgatctgggccctccctcatcaggtctacaggccaatctgatgggggtattttcccaatgttggtgtcaatgaaattcagcttcaagtctttgtttatgcatgacatcacttggagcatccatggggctgtttaacaggaagttcgatcccggaatatctcaagaccttcttggccccttccacacgctatgtcctggctccaccgccagaggctccagcctgctggaaggctgccaccagagacgggcgcgcggcagaggccttaggccacgcgctacgggctcaggattcggcgcgctctaggggctcagcaccaggcgcgtgcctcgccccgccccacgcggccacctgctacccagcgc

SEQ ID NO: 38259 - DNA, 392 bp, Mus musculus
  source 1..392: mol_type = other DNA
tctgagatccattttctctgtaataaaagaacagaaccctcttcccccaacttcagtgggttgagaggcagctttgcaagtgaagactcaggccaaagtgctggctgggccaccctgtagtcctaaatgaatgaggacattttacagtatcacatctgaaattcccaggagcctaactccaggacacaagatctcctgagttcttatgtttccatgccagggacgggaaagctgccctggaaagcaatgccatcattacagcagccgcacccacagggcggccctgtttgatgctgcagttgccatggcaacgagccactgctcctggaaggagggggcgctcctgcactcctgtccctcctccgcactgccaccccggatgtgcgggaggg

SEQ ID NO: 38260 - DNA, 381 bp, Mus musculus
  source 1..381: mol_type = other DNA
ccactacccatggctggggcagtaactcttatgtcctgttttctgaaaattacctagcagtaggcacatcagaacgatcagacttggctggcagatacatattgttggtagggaaaaacttgtctgaccagagctgacttttgatcttcactgtgacatctgtggcccctgggctcccagctggacagctgggtcaacaggggcctattgtcgggctggtatgcccagaacagaccagggaatgcgggcggagctgcgcatgaccacgccctccaggcggcactccattgggtgcttctccttggccggcgccggtccggtcgtctgtgacgcagctgcaggccagagctccacctccagctcccagcgccatggaggcgt

SEQ ID NO: 38261 - DNA, 301 bp, Mus musculus
  source 1..301: mol_type = other DNA
gctcctaggatgcctggatctcagacagtgaagctcactgttgactttctaccatgcacaggccctgggcctgctgagagtggacagtggtgaccagacacctctgtcacactgtgctgtggatgacagtgttctccacagcgattggcatgcccatgcctgcagaccgtccctgagtactgagacatctgagtctcaatgacccggacaggagagcgccggctcctgggctcctagcaaaatcgaggccccgccctgaggcgggacctgtggggcggggtctcaaggcctggctagtccc

SEQ ID NO: 38262 - DNA, 369 bp, Mus musculus
  source 1..369: mol_type = other DNA
ttggcattgcattgatcttgagaaatatccaaaaggtctgtgtcaataattgtcacttggcaaagactctttagagaaaccagcagccatctctcttggctggcatctctgtacagctgtgttggcagctggagcctgtcagtcactgcagcagccagggctggagagctggcacttactcagccatcacatgtgtggctacatatgcatacatgaccctggaattaatcttcatgtttaccccagggcaggtgagagcctgacccagcccccgaggggctctccctccgaaaagccatctcattctctaggaagagaggggctggcccttctcagcctggcagtacggagccgtcatctgaggcctta

SEQ ID NO: 38263 - DNA, 381 bp, Mus musculus
  source 1..381: mol_type = other DNA
aaactaaaagaacacagatcatgtgttttgagccagctatccacagttgctttcactgtctaaaaccactgtgaggctctctagattccgtgccatggttggtgcgtcctgagaaggtctgagatgtcacaggccatctgacttgtcttctgctagaaggattctagttacaaaaacaccaggaattcatttatactttgataaaaataataataataaacaaccataggcttctggaggaggggcaagccgggctttccatcaccttgttgccgctcagggttcagctgcatcaacacagtgggctcctacacctgtcagaggaacccactgtggagcctcccccaagaggccccatagaggggctgtccggacctcagg

SEQ ID NO: 38264 - DNA, 420 bp, Mus musculus
  source 1..420: mol_type = other DNA
cacggttgtcagcatggctggcgccagtagcccgtggacgcatgcgtgaacagcggctgtacatgaaggtatgcatgaagaactgcagtttctccaaacttgggctgcgtgtctctgatcagcctgccgcacccagcaggtgtcgccgtgagagcgctctgagctttcacctccggtagcaagattccggaggatcctgtcacgtctcccctgcccgtgtgacagagctctaacaaggcgcccttgggcacctgctggtctcaacctgcgagttgcgaagggcccccgcctcccaccgccgcgagctcggaggagcgccgcgggagcgcgctcggggcagacatcctcgacccgcgggcgcttgggcgcggggcgggcgctccgggaggcggggaggggcgggggcgggaggcagcagcg

SEQ ID NO: 38265 - DNA, 321 bp, Mus musculus
  source 1..321: mol_type = other DNA
gctggagccctcaggccacagggactcaggacacatgtgactcctgacagtcaggaccttcctgaccctttcagctgcttcctgagatgaacaggaatcaacccatgtgaactcaagttggtctggtgtcccctgggtctgctccctcccatgcaagacaggggcagcgggcgatcgcggcgatcagggaggcacattcccgcagtgacttgtttagcacagtccctgcgcactgtaagaaacgtgctttctgccatggcagaaatagtaccatgatgttgatgacgtcatgtaaccgcgccgtcgccgctactgcactgg

SEQ ID NO: 38266 - DNA, 266 bp, Mus musculus
  source 1..266: mol_type = other DNA
agccaggctagtccagctacagtatagggagctggacagttccacctgggcaggatcacctcccccagggcagagagctgagggcagctgcacccactggggtagcacccggatgatggtgtcacccgggcaaccggaatgtctgaagacttctcgtggaatccaggacctgggtccgacgtctgacacgttcgccacaaaattacaaaccactgtatttcactggtgcgcgcggaggcaggcgcgcggcgggcaggcctggaggg

SEQ ID NO: 38267 - DNA, 507 bp, Mus musculus
  source 1..507: mol_type = other DNA
aatgagaaaattttcttcttagggtactttttaaaacatttttgagacctgtataattagtttttttcaataagatgactttccttaacaggcaaaaaagcagtactcatctttattattgatttgagatagtatatatatattcaggaaagttgtcttaatttcacattaattacatttatctttatacataaaataggctgttgatatatcttgaagaattttaaaggatattaaatgtttgattaaaaaaaaaaaaggagttcgtgctgaatacctgttctctcagcgaacactcactcaatgtcagtgtttcttctggaaaaaatcttatccaaagtttacaatcaaaaatactaaaagatgtatcatagatgtaaaaccaactgttttacagtttggttccacatactctggttccaggagttagtgttcaagtagctgggaccttccctgggcggagcctccagtgcagtagcggcgacggcgcggttacatgacgtcatc

SEQ ID NO: 38268 - DNA, 440 bp, Mus musculus
  source 1..440: mol_type = other DNA
gcgggtcccggtttcgtgacctgatgtgggttcctggatcgagtaattaccacactggccaggcccacgtgaggccctccgaggcccgggttcgggcttcaccttgaccttggaccaaaccgccgcgtgaggcccactaaagggcccacagccgctcggtggagaccacttcaggcccgtcccggccggtctccatggcagcgcccgcttcctgccggcagtaggaccagtcctctgcagctcgcagaggcagcgggcgcggctggagcggatacaccttctcgccgtgacctccctcgccgcttctcaggcctggcgggtggcactgaggcccgcacagacccgccccctccaggcctgcccgccgcgcgcctgcctccgcgcgcaccagtgaaatacagtggtttgtaattttgtggcgaacgtgtcagacgtcggac

SEQ ID NO: 38269 - DNA, 278 bp, Mus musculus
  source 1..278: mol_type = other DNA
tagggtagcacgtacgtacgtacatacgtgtgtgtgtgtgtgtgtgtgtgtgcacgtacgtacgtgtgtgtagaggcccgtaggcccttctgctccaagggaaccactgcctgtgccccccgtgttcactcggattgcggaatcccgacagctagctcccagagatgggccaggagcaggcccggctacggtgagcatgtttcgagggcgtggtcctaccctgggctgggggcgcggccaggcgtggcccgcctccgggcggggcgggcacgcggaga

SEQ ID NO: 38270 - DNA, 231 bp, Mus musculus
  source 1..231: mol_type = other DNA
gacacctggtaactgcgaagctgctgctcagccttcaaagaggccctcggggacgccgcgcacccggccgtggagaccttgccacaggcgcagatccgctccgccgcccgcaccacagaggcgttcctcgggactaccgcgcaggacgccgcaggtctccgcgtgcccgccccgcccggaggcgggccacgcctggccgcgcccccagcccagggtaggaccacgccctcg

SEQ ID NO: 38271 - DNA, 281 bp, Mus musculus
  source 1..281: mol_type = other DNA
tcacatgtatagccctggctgtcctggaacctctgtagaccaggctggcctcagttaggtaactttaaaagcaagtgcctcttataaaagagacagaaccagagtggccttctttcttggcttttaaggagaaatgtcacctcagcttctgacctgatctgcttggggcaggatcttgaccttccagctttgccatccccgggaaagaccagggctggcaatcatcagccatcaaaagctgtggacttttgcttcccagctcctgggaggtggtgcagagc

SEQ ID NO: 38272 - DNA, 377 bp, Mus musculus
  source 1..377: mol_type = other DNA
acagcgccacctcaggctcagccaggctgtgggtgtgtacaatttacactgttccgtttacagatgaggaaactagggttcacttccactcagccaggcttgcagagctgcacactggccgggatctagctgctgcggcagccacaggcctcgtccacagacctaggtgggtgtggtctctaactcctcatcgcctgcatgagagtgaggatgggtgcgcgcgctcgacgaggcgagctccggctctttgtgtgtccgagctcgtgcgcgcgtgcgtgcgtgtgtgtgtgtgtgtgcgcgcgcgcgcgcgcgccccgtgtgtgggcgtggccgacagaccaggcccctccctaggccccgcccaggcccggccaagc

SEQ ID NO: 38273 - DNA, 407 bp, Mus musculus
  source 1..407: mol_type = other DNA
tgctgcagaatcaaggccacagcactgctgactggggcggagttcttctgcagccctgactccctctgaagcagagttctgcagccctgactcctgggcagtcctctgggctcctgagagtgtggtctgggtccagacccatcctaagggcttagaggggagagggtagagaatctctctgccagtgtttaggaagctcctttcaaatacctggccctggagactcctgccccatcagtcgggagggggggtacccactaggggctccaatgctctgtgctgtggcacagcaggccagcccttctagcggctagctagctaggatgggtaataggttctccatgccagaacctggcaagatagatctgctctggcgccccgcttgcagtggaggaagggccttggcc

SEQ ID NO: 38274 - DNA, 242 bp, Mus musculus
  source 1..242: mol_type = other DNA
tatcatcatcaatgtggagaacactgctttgcaaagatacagcaaattcatgtttagggccatttcagaaattgttggaaattttgtcctaaatcccaaaattcttttaattctttagcaattcaaatagtaatttcaaaattagagtatgtatgaatgaatagttaaaattcaaatattttgtggctgtacaacaggacagtcaatatagtgtgtgttgcaatgaaagctatcttctaatt

SEQ ID NO: 38275 - DNA, 394 bp, Mus musculus
  source 1..394: mol_type = other DNA
tactaaattccagagtgcactgtagcccgcagtgtagccgagcttggatacacttttatctgtatttaggtgtcataaagcagttgaaaagtactaaaacatataaattttctgatagttgaattgagtgaagttttaaatttaagaattgagctacagctccagtttcagcttttaagctcaaaatttgttaaatttacatcagggaaattgaagttctccatcttcccattaatgaccaaagactggcaaaatgttctcatgtcttctctgcatgtctggagagcagagcaaaccattgagaagactgctctgagttccatcattctgctggcctgtagaatgcggagagcatttgaatccatatacatgaggtgcctgctgcacttagcta

SEQ ID NO: 38276 - DNA, 420 bp, Mus musculus
  source 1..420: mol_type = other DNA
aaaaggtcatttgaaaaattcaaattcagttcttaattgtacagtagacgctcaaggacatgtcatgcctttacatgcctcaggggacctcctctgagctccagacccaagctgtaggactgtgtatgtcagacagatactgggtctcactatctggatacaacatctccaagaggtgatggatgactacacagatctgacttgggtttcctcagaaactctgagtctgatgagggcccggaaatgcgcatacactccccatgggttctggctatggagagccccaactgagctctccatgaggaagagaacaagtgtgcgtggggacgccgggaccctcggtctctgcggaggcgcggccggagcctggagccccgagcttgagcggacgccccgcccaacccgagccccgcgcccagc

SEQ ID NO: 38277 - DNA, 611 bp, Mus musculus
  source 1..611: mol_type = other DNA
ctttaattcttggaaaattctattccagaccacttcatattttcaaggattttacagtgaaaggacttatatatggacagggtctgtagggcacagagatacatccctgcccccccccccccactttcccaggagacaggaaggggaggggactgtgtttaaaacacttgccacaaaatgtcgattaagactatgggcattgttagagtcaccctattgtaagcctaaatgtctactgcaaaaatcttgaagcatttatttcagagtatatccaatctacacaagaatgcaatcagtggctaagcacctgttttaaaaatgggcctggggcatctgcacacttgcctggtccggccagaggcatgcgaaggtaccgggagctcagtgcactcccaggacaccgctcgcttgcaacatctcggcgcggcgccaggcaagggcccgcttctccagcctgcaagcggtgcctacgggatcggccgcacctgcccggcccaggcctgcgggcctcagctccggcggcggccgcagcggcagcggcggcgttccggtgcgcgcgcgcgctcagccaatcgcgtgctcgcccgccccccgccgccgcggtgaggctg

SEQ ID NO: 38278 - DNA, 427 bp, Mus musculus
  source 1..427: mol_type = other DNA
taaccccagaagtgtgggttacaatccccagccttcatgtgtgcacaggacatgtctagaattgtcacttaagttttgaaaaaaaaaactaatgggcttatcagtagacagttcatctatgaagcctgggaagtcagttgaaaatttacataattacaaagggcttgatagaaaaattaatttgaggtcccacatggcagttcacagctctgtaaggtgcgggcactgcgtgtatgtggtgcacagccacaacacatattgttgacttgtcatatctgtccgtcaagctcttcacttcagaactggagatcttgggagaagataattggtttctgtgaagacacgagcccgggcccaaactacgagtcccaggctgccccgcggccgcgctggccgccgggaagtgcctcccaagattcccggagcc

SEQ ID NO: 38279 - DNA, 485 bp, Mus musculus
  source 1..485: mol_type = other DNA
ccattcacagctgctgctgaattgttgggaattggactacagactgtaagtcatccaccaattcccttactatatagactatagagttctgtgactctagagaaccctgactcatacataaatttattttaacttgctatgtaattgaaaattaacttaaatttttgggagtcccaaccaggatcaatttagaaacttttttttaacaacaacaacaaaaaagtaaaaaaacaaaattttgtatgtgtgttttgcctgcatgtctgtgcaccacatgtgcagtgcccatggactccagagcagtttttcaaacctgggtcctttggaagaacaaccgctgtattaaggcatttatgcaaaaatctcagaaactttttaacggtctctaaataatgttagctgggcccgccccgttgcggcagcgcctgcgcagcatcctcttgcgctcgaggactcggcgctcgaccgccgcgtgtcagtctgtc

SEQ ID NO: 38280 - DNA, 357 bp, Mus musculus
  source 1..357: mol_type = other DNA
ccctggggcaacttacagctgcagtctcctgcccctagtcaggacatgttaacaggccttagctggcaagggtgtcacaacttcagaacaacaggctgggtggcaaattcttcaaaccctggagttctgtctgatgatactctaaggcaaggactctagctgaaatctatttgccttttccatcatcgaggaactggtttctctcccattgcacagatgggacctccggagcagggcgccaacctgcgccagccgcgcctcctcgctcgctcggcccccaccaggtttccggaaagcgggcgggtcccccggctctgccgtcagcgccctgacctcacaggcgccgctgtctcgagg

SEQ ID NO: 38281 - DNA, 329 bp, Mus musculus
  source 1..329: mol_type = other DNA
agtggaagtcctggcctacacttacatgggaaaaagcctgtctgcactctgcctgttttaagtgccccagggtccttgttgtctcctgtgctcacttgaaattagagttttcagatcatcccaaagcgacttgatccggagcaggatctagttctggctgtagggctggtacagtttctgatctgaaccaggcacccaaactataactgtgcccagctaagaagctgagcctttgcattagcaaatttacatgtaaataaatctcaaccctgggcggccagactgggatccagatgctgtgactgacttgctgacatcacagcctcatt

SEQ ID NO: 38282 - DNA, 470 bp, Mus musculus
  source 1..470: mol_type = other DNA
ccagctcagcaggtgggattgccagtccatccaaggaaagcttattccctttacttaaaaaaaaaaaagatttatttatgcgtatgagggacatcagatcccattataaatggttttgagttaccatggcaagtgctctgaactgctgagccatctctccagcccacctgctttactttttaaaaaagatctgtagtagtcttggtgcaagattatttttttttaactttatgttttgaaacagaatgttgctatatacatggggagcttccaggcatgaacaaatattggttgtgttggatctcagatcaatcctaattttgaacactaggacctctggacctgttataaatgataatagtaatacacaggatgatagcaagcacagagcactggaagtctgctttctaagacatgtccagggtctttgttcgttaccattttaaaaatctcatttctcggagagttat

SEQ ID NO: 38283 - DNA, 312 bp, Mus musculus
  source 1..312: mol_type = other DNA
aaaacacagttcatttgaagttcacttaacattattggtgctatatagcatcccattatatggttatagcatgatttgtgtaccaaggtcccttgtggaataatggttttcagttactttcattttatagcaaatccacctaagactgatgtcctcaggacgtgtagctcaccgtgttacaggtgtaaagctttcatccttggtgcaatgccacgaagcacactgcttccttccccaaaggaaaggcatgtacgttgtacattgtttctaattttaaagcagtagttcccttcgatttaaatccccgcactg

SEQ ID NO: 38284 - DNA, 370 bp, Mus musculus
  source 1..370: mol_type = other DNA
tttcatttcccgaaagcaaaagagatgattattctttctttaagaatgagctaccagtcatagactgtaactgatcatctctggttcccagatttgctcttaagactgatatgctatatctttggttgctcctcttaaggaggaatattatatgggagaaagtatatttttgagaagttatctcattttctttgggaatgggaatatcatttcttatcttgtccttatcccaagtgcacagttggcaaatacaaaactgaagtttagcaatggatctcactgtggttcttgacaaattttagagttggattacaatatttacttagagaaaagtctgacagagtcagtgatacatatgtttgtaaaggac

SEQ ID NO: 38285 - DNA, 207 bp, Mus musculus
  source 1..207: mol_type = other DNA
aatcttagttttaccacctaaaactaaatgagctcagtgcaggcggctcgacacttaaatgtctgctaaagtcaagcattaacttggaagaaaaataagtccagcatatttctatattaagtggattctaccatgggttgaaaacactggaaattctaccctaattaatctgggccactccattcaatggctttgcaggctccatag

SEQ ID NO: 38286 - DNA, 153 bp, Mus musculus
  source 1..153: mol_type = other DNA
tctttctcataccgttgtcctaaagcctgcttatttaaaaaatatatatctgcaagttacatgccctcaagaagaccacgtgcactgtgttattgggggtccctaactttaaatagtggggtgcggtttgaggccgcgatgactcaacgcagc

SEQ ID NO: 38287 - DNA, 439 bp, Mus musculus
  source 1..439: mol_type = other DNA
catcctctctaattctgagagcaagcggaagtgactggaaatccctggaggttcgagtaaatgtcgggcagagttgggggcttccaagtccccaccctctctaaccgcacagtaagcgtcttaacttgggggggcagaaacctgtagagctctcgccacagggggtcccgcgaaacatctggttcatagtgatcaagtgtacacctcagagagagagaactttctctgctctccctccttcccacctcggggaggtgacgcggacggccaccgattgctccggcactgccggcgcctctggcctccgcctccggcagctggaggggcctaaagcggtgagtcctggcacccgcggccgaggaggggacaggatctacaaggaggcgggccgcctgccccgttttctcctggaggcgtgcacctagggtatttgagcgcc

SEQ ID NO: 38288 - DNA, 463 bp, Mus musculus
  source 1..463: mol_type = other DNA
agtgacctgggcatagggctgggatcaaagccctgcagagaacctgagatccccggctcccaaagccagctgcagtgctcagttagttagtctagctggactcacattgaacttcaggttagtggtagaccctgcctcaaaaattaatctacagaaatgactgaagaaggcacttcacaaagatctgtgtgtgtgtgtgtgcgcgcgcgcgcgcgcgtgcgtgcctaagacacacacagacacacgctgaaggggaatatctttaacttcatgaaaacagttatttcaaatataagaattatttctatgaaatttctttcaaagttaggagtagcaaatggggcaacccgatttcccgcctccccaggaccaatcgggtggtggggacttgacatgtcctggtaggggagctagctgggtcccgccccctcccgcccccctctgagaacccgggctctgtgat

SEQ ID NO: 38289 - DNA, 271 bp, Mus musculus
  source 1..271: mol_type = other DNA
ccaccactgcactggcttcttggaccccgcctctgggcggcgaattccgaggtggccggctcgcccacgcttgtgcaggacccgcacccgcggttcctagaagccaaagggggctggccaccgccgccccctttgctggaggtaaaaaggccacgctagctttggcttaaaaagttggccccaaagtttaacgatgggaccccttgagccccgcgctcacttccaggaggaggggtggggcgggcctgcccgcgggcggccgccgggcgca

SEQ ID NO: 38290 - DNA, 443 bp, Mus musculus
  source 1..443: mol_type = other DNA
ctgtacactcactattaagctgtatttttttaagtattaaattctatttatttcactatcaacatattaatatgtaataaaatataatatgcaaaatatatgatatacaataaatattaggtatgtccagacagctctctttcaccctatgggtcccagcactctcctactttaagtacattaatttaaagagaaataaacgtcagtacaaatggagaatactttttttttttttttggtaataaaaacgtatttttgtttaacattttttttctttctttctggaattggatcaacagaaatctggccttcaggtacaggcagtgccgcctggtcccagtcctgccagctcgggccacaggcttgtgcgaggctcttgcctagcgcctccggagccggctgctgaaggacaggagcacgtgctgtgtgacgtcacgagttct

SEQ ID NO: 38291 - DNA, 341 bp, Mus musculus
  source 1..341: mol_type = other DNA
taaagagcacgtcacggataatttcttggaaattgtattttaaaggcactgattttcaataacaattcaatttctgcagcacacagtcgggcccgaaactcatgaaagcaagttttaaatcttttttttttttcttttgcaaggcacctgaaaaagggtcaccatgatgtttgaccgaagttctggtactagaggtccccgcctttcacaccttgggtgggaaaagcgagcggaggcggcgagcgctcttagccctgcagccaacgtgggccgatctgcgccccggggccccatcggagcgagcagccggggcggggcctggggccgcggggctggaccgc

SEQ ID NO: 38292 - DNA, 277 bp, Mus musculus
  source 1..277: mol_type = other DNA
tttcttgacggtccagaggagcgccaggctcagcctctctccagcatacaggaaagccggaggccctcttttcaagaagcccaggggaaatcaattatccgagtctcccttgagtactcgagcgctcttcgcaccagacccagttgatggaaatgacaggctggcgggctcggggcgctcctccgcccagctagccttccgacgcgctggtaatcgcgcctgaggaggagccgactcggtcagccaccctcattggctaggcaacgcttagcagagc

SEQ ID NO: 38293 - DNA, 400 bp, Mus musculus
  source 1..400: mol_type = other DNA
tttatactaaacatagactcatgacacagtcagctgtgtccagctttcaacctcaagaggaaatgttgtcatctactcacaatgaaaaaaatttgcaagaatacgtcataatattttaattatgtttatgattttattttagatggcattcataacatccctgtaaataaagttttattgtctgcctacagagccaaacacatttgttatttggcccgcctagaaaagccctctgagctggagcacagggactgagtggagactgagtagatcagctctgtgtcttctcaaggtcagtgagactgaccagcactcagagctccaggatgaaaataatttagtagcctgcagccacttaaaacagcatgttgggagcttcaagggaacacaggaagcttct

SEQ ID NO: 38294 - DNA, 547 bp, Mus musculus
  source 1..547: mol_type = other DNA
tgtgatgagtcttaccttttaggcatgtgggttccataatcccattaaagagcataacacacatgacataaggatctctcatttggtctcttcctgaagacccagcccttgggactagggtagtgacccagctatcccactcctgggtataactgtagcctaactattcatatataaagtccatatatgtaagactctctgaactcctgttctgggacccagacattaaaggcaagaatgtttcttaaactctcagcctttttcattcattcatcaagtaattcttgaattctaactatatttcagctcataggcacaggaaaattctttctaattcaagcattagattaacatttgacaaatgggagcctgtgaaattaaaaataaattctgaatggaaaattacacattattaaataagtgagcctgcaggatggaaaagaaatctttaccaattatgtatctgacagtgggttagtgtatatataatctacaaagagttacaaagcctgaaacatacctttaaaaattattcacatccttaact

SEQ ID NO: 38295 - DNA, 417 bp, Mus musculus
  source 1..417: mol_type = other DNA
tcccaagcatctgtcacatagtaggtgtgcattttcagagaattagtttaagtacaatcatagtatatttccagggaagactgtaaagagagccaaaaaatactttttacaaagaaccttgagcatatttcttaatgatatatttctacttattaaacctgttaaataactccaaagatttttattttgcttaggaacacaaacaccagttatattccagataaattgcatttcgagaaccagctatattcagctagcttgctggcaacaagattcatttgaagcctaaaagccattaacactatcaatttcccttctcagttccctggcatgagaatggtataagagatcattagaatctaccttatctataatcgagggtaatgtcactttaaaacagactcccgctacttacgg

SEQ ID NO: 38296 - DNA, 345 bp, Mus musculus
  source 1..345: mol_type = other DNA
gcagaggtacatactatgtaagtgcatagcagcctggatactgtacacaaacaagaaaaatagctttttattaatttaaggttaagtagccatcactttcgcaaagagacagggtggtgcctgtttgaactaagggtagcattgatcctaattccttcccttcctagggccagacctagcaactgcagtctctgtcactcccagggccagttttaagtcagtgcccctggggctgagatcgtgaggagtgggtgggggggtcttccaccgcccccagccccctccttcctgccccgccccctcccgaggcctgggcccgggcgggctccctcctccgccccctcc

SEQ ID NO: 38297 - DNA, 392 bp, Mus musculus
  source 1..392: mol_type = other DNA
atggggactttgagtttaaatgaaaattctggttctagggtggagcctgaaagtccaaaattctagcctggtctcagagagaaggcacggtactactactaattaactccacaattgtgagcaaattatttagcctctctggccttagttttctcatctatacaatggcggtcagtcactgcatctagttagtgcccattaatagaaaatcaaagacattacgcatgcagccagactgcttttgcacacgttagaagatgcctgcttgcagtagtagtggccacagcgaggcgctcgcttaggagaggcgcccacgtggaaagggcgccagcaatcgggcagtctggccaatcagcgctgtcagcggccagccgggctcctcctggtcagct

SEQ ID NO: 38298 - DNA, 639 bp, Mus musculus
  source 1..639: mol_type = other DNA
gtgaatcataaatagttgaggtttcccatgaaactcaatgtgtgtatttctgttgttgtataaaagcagcagtggacactatgtaatgaaaatagatgcatttcaataaaactttatttgtaagcaaatataagacatagcttattaatccctggtataatcaagttggttttcactgccaaataagttagagggaatccagaaacgttcagttatctctattttgatacatttttaaaatataaacttattttatagtgattttactattgtcacttgagttactctatatcacacaaattacgaagaaataaaatgtcatataactctagtctgaaaatgctcaatgaaaaattcaaaaaataaattccagatgagtttcaaataactttattaacgtaattgattactgttatttgtatcataaatctgattgaaaatttatttttaaagggtatatatacacagaagtaaccacagcttatatttaacataaacactatgcatacacgtgcattcatagacatatacatatgtccacacacttaattcgatgtcaacaatgtttaagtattgttttcattcctattagaaaaggaaatacttgatttcctcttgaatattcacatttctcagata

SEQ ID NO: 38299 - DNA, 414 bp, Mus musculus
  source 1..414: mol_type = other DNA
gtctcatagtagcttcttaaaatttataagacatgtaagccttgtgaactgaatgcatctgagcatgtttattttgacaccattaatataagctgggtcctttttttcatttattagtggtaggatcctaggattcataatttaatggcagaaggcatgctggcttggacacttcatggacaggtacaattccctggaatctacatctgctcaggtgctggagacctgccaagcgcctggaggagcagccagggacttgcaccccggtgtcccacgtcccggaggggatgtggtcacagggttccggtccgcccttgagccccgggccaaggtgtcgcggcagctcccgggcgccccctggcccggcttgggcgccggaggtttccggttcgcggctgccggcggtgacgtctc

SEQ ID NO: 38300 - DNA, 325 bp, Mus musculus
  source 1..325: mol_type = other DNA
ccttaagtatggttctttgtgtagggtaggacaaagggctaatgcttgaattaaatttagcctttaaatgctggtagaaaatttttctttagcattattagaaccaaaagagagcatacaagctgtatcttttaggcagtgtgcacagtatgtactgtcatggctggcgtgaggacctggggaccgtgcccatcaagtcaggcatagacatccaggccaggcgagaactggcacacgcggctctggtcgctcccggaggtctgggcctcggcgcagatcgcgcgaagcccagaggcggctggtaactaagggcaagggcggcgca

SEQ ID NO: 38301 - DNA, 592 bp, Mus musculus
  source 1..592: mol_type = other DNA
actttactaaaagtgatatgtttaacacaattataccagaatcagtcatttacatacaatatatgactgtgaagaatagagtcaaaaattcattcatttattaacactttcaagtgacaggttataaataaatctctatacttttcatacctaatcatctatcttatctatcattcatttatttatctaatatatatcttgatgtatatatgtataacagattagttttctgacagactggtgtgacactgaagtgtcacaaagaaatatttaatgctttaaacttcatgcccataaaagcaagggttttgaatcttcctgatatatggaaaacggaaatttctttcaccaattttcccggagaaaagcactctattttagtttttaaatagaatatatgaacattttatgcaattatgtgtcaacgtataagtgtataaataagtaacatatctaagttcatgtggcatagcaacattatagatggtataatattaagtaggcacaattaatcaaagattttaaatacactggctaagcagcctatttagcccagtcccgcccctcccgggcggacccgctcggcgcgagg

SEQ ID NO: 38302 - DNA, 361 bp, Mus musculus
  source 1..361: mol_type = other DNA
aagcctaggagtcaggctagcacagggcctacgtgtgtctttaggtaaatgttatttgtttaatattggaataaaactaagaaacctttctggcctgggaagccatgtttctgcccaggaacacagagcacctccagcagctgtctgctttgaagctgctaagagctaacgatggcacaacggttcagtaagcaatcactttatttcagttctctagtgtgatttcacacaaagtgactcatgaaaaagtgacactgaggccggcttttttttttttttctcccttcagggcaaagaacacacacaagcgatgtgtttaaaaagagatggtttgtatttaaacttaggttggttgtcgctg

SEQ ID NO: 38303 - DNA, 337 bp, Mus musculus
  source 1..337: mol_type = other DNA
aggcatccagaacctggcctggctcttatttttatttatctgaggtatatacctcaaaacaacataatatgtttttgaaaaaatgattacaaacatctcttcagagccatcttaatttagctaggtttgataaacacttactaaagacataaatggttttaaaccccttgccttgttatccccatctgcaggatctaggtgcaatgagctgttccctccaggagaaactgcattttccccgggagatctacggctactcgctgtctagcccagcagctgtacgtcagatggatttgtccagatgactcaagttgccaaaaagggactcatgtagtag

SEQ ID NO: 38304 - DNA, 349 bp, Mus musculus
  source 1..349: mol_type = other DNA
caagtgcagttacaataaaaagtatttgtagccactgtaaaccagatcagaggtctgggctctgaactgacagacagtcattcattttatgtcaattttctcataattttgagaaataagtattatttttatttttgaattatattttcatttgaatttgagaataaatgttggacagggactaattctgtcagtttaatttcatcccagcttggagctcttctgacacaaaaaaagccctgccttctctgtaaataactagaagcccttagcttgctctgcgctccgggcaggctgaatggagtcagcctagcatttcccattcgcaagtgataaggaaaacacagaa

SEQ ID NO: 38305 - DNA, 342 bp, Mus musculus
  source 1..342: mol_type = other DNA
tccagagttgttgtacaagcttgcaatcccaccaacaatggggccatgagatggtgccagcaacatttaagacgggtcaacctcagaaatgaaacctgttgacaatattaaccatccagtccacatttagaaggtatcactccctcgccatgtcctctcagagatagaaccgtgggagccctggacctggccagagagctgactcagcaaggtctcttctgctgagtctcaggaaaagccagaagaaggaggggaaataagaagcttgctacttccttttcaaacaaaaccaaaacagccgggagtttgctctttaccgtgcactgccacatctgggtgctg

SEQ ID NO: 38306 - DNA, 451 bp, Mus musculus
  source 1..451: mol_type = other DNA
gatttttgtctccagtctacaaaactaaggtgtgtctaacttcttcagacggaagaaaaaaccaagtcaattaattacattcctgtgtgtttctctcattttaccataaagtataacataatttgaatatcccatgaataattccattggtaaattattctgcaaaatgcaaatctctgagtttacttctgagtggaaaagccagaagcatagcccagaataagcataggctggggagccagactagagtttgattggtacccagtatagcccagtaattctcaacattgtttttgaagttgagaattcagggcacacacagtatgtcatcatgtgtttatagtgtataatgaagagaaagaaacagcaggctttttagctggctttttgtttctaatcaaagcaacaaacagtaaggtcacttccttgtgataccggtttggagttagag

SEQ ID NO: 38307 - DNA, 392 bp, Mus musculus
  source 1..392: mol_type = other DNA
acaggatttcttagaagaactaggaatttctgccatcttctcgttgatgttttatacaacatgaagagtcctgggtcatttgtcttttaaaattaactgaatccttcaaggcctttcaagcttatactgagttccagaaaaagtgctttcattataaaagtgaagtttccaacactctgtttcataatagaaagtccttttattttaaaaatgggttttaactctgaccgaaactttctagtttcaaaaccccttagtgttttattttttaaatggctgagttgttcttattaatattaaacagccaggtctgtatccttgaagcaaaggaaccacaaatcccagggcgcaccgggctcagcccctcccgctctggtgtgagagtaaactca

SEQ ID NO: 38308 - DNA, 451 bp, Mus musculus
  source 1..451: mol_type = other DNA
caaaacagccaccacacaatttagttggagtaattgtttgggtagaaaaatgactgctgctgcataaaaaaggtgtcatcttttaggaaggatgaattatttatcatgtatactcaagggcttcatgcttaggattttatctttcattaataacagtgttgtccttacctaagaatataatgactaatgctctttggaatgtcattccaaatcctttttagaatatctgcaaatgatacatttaaaaattcaatgctttcttatttcttatacaacactagaaaagaaaaaaatgtttttaatccaaataatttgtgtataatttaatattaagacaagaattcttttattgttttaaaccacaggctttatattaccttaaaaaaaaaaaaaaaccaacaactctcagccgcaagttggatgcttctggcagccacacaaatctagcacc

SEQ ID NO: 38309 - DNA, 551 bp, Mus musculus
  source 1..551: mol_type = other DNA
aagccagaagaagagaggtatgacatattttactgcagaaatggagaaaattgttgactgtaattacattgtttaattgaagtgataagtggctgaggccactcacttaaaagcatatatctgtttaaatcatgcattggtgacatctgaaaagcaggccattattttccttaaatgattagtgagctagaggatacagttaagtgatattctcttttagatatgcataagtatcatatgtgagactatatgccgtgatatgtgcatgtatatgcctcttatttatgtgtttttttgcaaacatatacagaatcgtctttaaaagcctccttgattatggccatggaagtgctacatgcaagcttgttttggaagtagctggacatccaagtattagtttgcccctcatcttaattgctagtgaacataattaattgcaattgttattgtagcaagatcacattcaaaggtggtgtcccctggaacagccagtgtctctctgtcagagggggcctcttcctgcatatttaatctagagtaaggcagtggct

SEQ ID NO: 38310 - DNA, 540 bp, Mus musculus
  source 1..540: mol_type = other DNA
aagtttagcattgttggtaactttaaaagaaaaaaaaaatctcgaagtgcctgttgagagataaataagaaaggaatttcaagaattatttcttagcaggcacactctgtgacacaccgtgaaagttcaccgcggcgggttttcgaggaaaggcacagcctggcgccccgcaagcctgctcggtagcccagagcagctggggctgtaggcttccttggcggagggcgcatggggggccctcccgctccgcgtcccggaaggttagcacaactctttgtcagtttcgaagagcctttccccaaagccggctgggcagcggggcccagggcgcagaggagatgcgcgccccggcgcggtgccgggctccggcccagacgtcagcccgagaggggtccgcgggcggcggggccgagcgtcggtttcacctgccgcgcgcggagggggccggggcgcggggcgcgggcggagcccattgtgtggggcgcagcggcggcgcaggcggggcgggtgggcgcggcgcggcgcggcagcccgcgagcc

SEQ ID NO: 38311 - DNA, 594 bp, Mus musculus
  source 1..594: mol_type = other DNA
aagaattccattgagttttgattttgaagtgcatgtatctctttagagtctggaaaaagaaaactgggcccagattttttttttataaaggggtgggtgggtttgccctcccttctttgaaacgtcttataattaaagagcattaaaagtataaataaaattcaaacaccattcaaaaagtgtcaataaaatcttagtgcgccagtgggggggaaaatcacttttttttttgaaaagtaaagtaaacagcttgccgggttgttgtcacttatgcagaaatgggccattgcaaatgcttgtctttattgtgcaagggaagcattcccttggaaggaaatgcccagcctctgggcttgctaagtaagttactattttgtaatacatttctttttctttctttttttttttaggagaacacacccaaaaaggtatccaaaaatatgaagtcatctgaattctgtcttacatgttaaccagaacctcagcatgggattctaacattttctcacatcttgcttagaagatttgccttcttaatttgctgttgtggttaaaagcaaaaagaagagaggagagagccttctctacattaca

SEQ ID NO: 38312 - DNA, 417 bp, Mus musculus
  source 1..417: mol_type = other DNA
tctgtgcccccgggctgccccgagaacgctggagggctgagcagggacgcctgcgccctgggcccgaagcttggcgacatccctgcagccacgcgtgcggtgcggtcggcccccgcttgtcagagacagagcccgcgccagccgtagcaagatcgcgagtgggcttggggacagggcgcaccgcgagaaccctcggcgctcgtccgcgacacgcgcgtgccaccgcgcccctccggccctgtcccggcctcggagacgtctctccggagccgaccagaccaggcggcgcgcgcttcgggtggggaccgaggcggtggcggcggcgccgagagccgagtgccgcagggtcgtggtcatctgcgcctcagtcccgggagactggcggtgacacacacgggcgccagggagctccgcgcc

SEQ ID NO: 38313 - DNA, 333 bp, Mus musculus
  source 1..333: mol_type = other DNA
gttgaccaacagcacgtccccagctgctggaggccgggaacatacagcatgcctccagtcctttgcctttctcctgaagacagagttaactgaggcctctgtgaacgcagcggaggcagagctggacgcattctgtgggcacatcgtgcagagatagaaggaaagtaacttcgttcccttatgctattggttctacagtctcagacattggagtctatccagccttctgattgctggtatgctcccggcgcgggcccggcctttgttggactggggcagggcggaggcggggcggggcggggcggggctggcgccgggagactactaggcgct

SEQ ID NO: 38314 - DNA, 576 bp, Mus musculus
  source 1..576: mol_type = other DNA
aggaaaacgcctgatttcttacttaaagcacgcttgagctgggctcctggtaaacctaggctttaattccgaatagaaagacaactttacagtttctgggggtaagggtgaagggggtacactacccccctccccgtgactccagcgctggcgcttgacgccgccgccgccggacccccgtttacctggggccaaacgcgacttgtcgccacctgctgggcccccctcccggctgtcgcaacggcgcccccagcccagtcaggcccggtgcggcgcgggatgcctcggcgggactggcggcggcggccacgctgcgcgctccggcggaggggagggggctcggcggcggcggcgaaggcggtggcgaaggcggcggcagcggcagcggcagcggcgggcccggcggggggcagagccacatgcggggggctgcaggcctgcccgcagtgaagcccgccgcgcccagggcgcagggagtggccgtcgcctcctgcgcgcaccgcgactgagatggcggcggcggcggcgcggccgaggcgcgccgagcccccggggcagggccggccgggcgcgggc

SEQ ID NO: 38315 - DNA, 343 bp, Mus musculus
  source 1..343: mol_type = other DNA
ggtttttgcgctgactgggcatctggattccatattcctgaaaggaacgtcaccttagggacgtcgctgtggctactgctacagagctcctcatggattactccgtgtaatcctcacagcatctgaggaagctggaataatattagcctccttttatagttgttttaataaataatttctaagtctccccatagacgttaatgagtctaaggcgacttcttcgaaaaatttcccttaattgaagtttcataacaagcctgcagggcatctttctcaatctgtttaaagtctccaaggagactggcgcagggcgggacttccggcccccacacgcactcacttc

SEQ ID NO: 38316 - DNA, 301 bp, Mus musculus
  source 1..301: mol_type = other DNA
aagcaagcccttctccagagaggaagccctgacattcccttggcctaagccagggatgtgggttctcacaggcttccatggaccccgagggccagactctggtccccgttttcctaaactgtgctgtgaggcccaaagcagaaggagcagacctctgagtcagcttcctagccatcccagctcaagtgggctgcctaaaaggagagtcattgtactggctcctgcttctgtagagtcacctgagcctggctgaagaacaataggagtatacttcctgtcccagctaactggtgctgagaga

SEQ ID NO: 38317 - DNA, 523 bp, Mus musculus
  source 1..523: mol_type = other DNA
attgatcatccttgtagaagcaagcaagatctcttgtctcatgggatgaatgcctagagtccagcagaccaccaaaaaaaaatatatatatatgtataagacttggagtttcctctgggagagagccaccttcccagggcctcaggctggcagagcgccctgttctgcctgaagcaggctggaagctgcagaggagactcccacagctggaggggcagccgagtccctccaacttcttaagagacctcagggcagagccggtggcagtacctggcacgcatctcactgtagatatgctgaacaaatgtgtacaaatacagtgcagttgtgtccgccgcgtctggcacgtcgtgaagctgaaggctggctagggctgcggcgccccgcgggggctctgcccgcgtggcgctttgcgcgtggggcgcggggcacgtgcgcgtgtgcgcgtggagcgcggggtgtgtgcccgcgccgtgccccccgcgtgctgcctggcgtgagtcaccgcggggctcgccttcgc

SEQ ID NO: 38318 - DNA, 425 bp, Mus musculus
  source 1..425: mol_type = other DNA
gagaaggtggaacaagcaagagcttttcttttttctttcttttttaaaaaattattgagctagatgttttgagttctagaactatcttgacatactttggttctagagacatacttcgcatccatattatataatgtatgtgtcttgccaagtgcttggtttgtatcaacattgaaaatgtgttctctgagccctagtgatgacagcaacagcaccagcgccttcagtgtactgatggggaaacggaggctcatgtggttcagcggcgtccgcagcgcgcagctccagccgcgggctccgaactcgcgcctcgatcccgtgcgcctccgccgcgcacgcgcactgggcgggccgggagcgctcctgggcgtgtgtgggtgtgtgcgcgcgcgcagcgggcgcgaggacgacagctgtggggagcg

SEQ ID NO: 38319 - DNA, 336 bp, Mus musculus
  source 1..336: mol_type = other DNA
ctcaacagatgtgccacagagaatgtcctactgtttcggatcctgactgaaatgctgtaggaaaatagcagggcagttctgtgaagagtccattcttaacatgggattgtgatattattactcgatctcatgtatgctaaacgattttgttgtattcattatcccactttgagccccacattgtgcagtttgagaggattatttaacttaatgttcatagacaccttagcatttctattttgcaagcttggaaaaggttagtacagaactgagcggagtccagtggtgggctgcagggccgctactccacacagtacggtaaggagggctgctcca

SEQ ID NO: 38320 - DNA, 568 bp, Mus musculus
  source 1..568: mol_type = other DNA
cagctgtgggctgccgccagtgacaattggctctgaagtgtcacctctgcatatctgtggcatctgcatagctgaggagatggcacaaggctggcagcttctatgggattggcagcatatattggtaataatatctctcgcttgcaatttacatttgtatattttattcataggtgaaattttttttctcctacaactttgtacagggctaaacattatcggaatattattcaaaacatgtcctttccataaaatctgtttatgcagcattaaatacattttatatcatcagaaattttatgatatatttaaaaatgaatttctacttagctgaaacgcattagggattatctgctggaaaaaaaaaatgcagtcatgtttatttgtaactgccagaaaatggcttgcaaaattgttagtgtctttttattatttaccactggagcacttgcttgttaattagagaaatttcaactgtcatagttggcaattatagcttctgtatcattgtctgttatgaatagtcaatggaagctgattaatatgcatgagcagcagtatatatagc

SEQ ID NO: 38321 - DNA, 230 bp, Mus musculus
  source 1..230: mol_type = other DNA
tttaaatttgtaaattaaattgcaagtctctcagtggcaaggcgaacccggatgttaaaaatgacaagcaaagttttctctttgtccctcgcttttcagtacaagctcgaacaggtccagccttctggagacctgtgccaacagcaggaggaaactcccttggattctccaagaggcccagctttaggagaagttttcccaagatgctcctgggagaagagcaactcttt

SEQ ID NO: 38322 - DNA, 597 bp, Mus musculus
  source 1..597: mol_type = other DNA
acataactaagctcacagttgaaacactgaaattattatgtatttgctcccagtccaaaaacatttaaaatgagtttgaaggtcttgaatcatataggctaatttcttaaacgtgaaagttatcataactaacacatggtattaaagcccaatcaaaatatatttaaatctctataaatgtcctaaaatacaaactcatattgagtgatataatgacttttaaaagaatgctgacaataaaacaattattttagtatggcatataaaatataaaataaggaagaatctaattttctgagaaaaaaatcattactgtatggcacagaattttattatgaaaatctgtcctcagtcagtatttgcttttattttgaaacaatttgaacaaacacaatcatctgtttggttttagtagatgacaatatgtccttccatcaggaaagagagaatgcactgtggtacattacctcttggagtgcagctcattttctgaaagccaggtggactcttgctgtgtaagacagaataagaaaccttttccaaagagtacattttagagtcactgcattgtccattgtgaactgtagcatatgtttt

SEQ ID NO: 38323 - DNA, 404 bp, Mus musculus
  source 1..404: mol_type = other DNA
aaaaaagaatatgtctttgtgtcaggacctgaaaatgttctcattagtctcttcaaaaaacctccatgtgaaacacaaaaagtatttttttaaaaacaaggccaggaaactgtaaacaaactgtttctgagaacaacactgtttctctggaatgtcatttgccatctttaagaagcctaatgcacattagtttttcatttggaagggtatagtgcaccaggagctgctggcagaaagcttacatttgaacacagtctaaatctgtacagcagaggaagaaaaaaaataaaaaactacttcctttcctgttggatacctaataagtagttagtctgaatggcagctgctcccagctgcctgaagcagagaattttccctttgaatattccaaacgggagctttgc

SEQ ID NO: 38324 - DNA, 282 bp, Mus musculus
  source 1..282: mol_type = other DNA
cagtgttgttcagtgcgaaacaatcactgtgctttgcaaagaaccatgcactgtgtggaagggcgttaaggcaaagggtatggatacaacaaacttctttgtcatccaggggatgggggactgctacatgccaggtagactccgcctgccctgcaggaggaccaagccacagaccagggtgcctgggacagtgcgctccagagtcgggctggacttacccaagcacagcgcctaggccggcgcacctgagttcaggctgcagcggttcctttgcagccacta

SEQ ID NO: 38325 - DNA, 300 bp, Mus musculus
  source 1..300: mol_type = other DNA
ctctgatcttggggttttgtaaaattcccggggggctttgtttccacccagggagagaaaactcagtctctcttggcctttgcacagggatcagtctcgatgtctacttcaaaatttagagttgggatgtcagcctcattcagcttgaatgatgtccttgacctaagaagagttaaagatcctccggattccgactgtgcaggaagctggcaaaggaagatgccatcctctctttcgtgggtactcggggtcgcctccccagggcagggcggtgcaggtgggctcactgagcatgcccag

SEQ ID NO: 38326 - DNA, 567 bp, Mus musculus
  source 1..567: mol_type = other DNA
tagagcaaataatacatattggtttaaaatatttgtggtagatagttaatctttaatacttctaaagcaagaatgatctgggttatacttaataatatttattatgggttggaaatagaaattatttgctttgactatttaaggaaggtctgctcataatctttacaatgcctattttcctataaattaaaaaaaatgtggaggatcttgaagactttttaaaaatgcccctattttatgcacaggtcccacatgtcacctgataactatctctttagtatacacatgaactataaaagatatcctttataaaagaaactatttcaaacaatgcatatgattttctttgtgtaccattatgaatctcagaaactctgtgcctctacacagttgcattggtaaaaatgttccatgttcatgtcttgaacatgttcttataatataatgggtccagtttgaatgagaaaatcaaacaaaaacatatgactttttgagaggatataaatttgtattgtatctatgttatgatgtccattcaactctgaaatgtaaacatgagtactatgt

SEQ ID NO: 38327 - DNA, 244 bp, Mus musculus
  source 1..244: mol_type = other DNA
gtcaggctagatagaccctagcaatttattagagctagactcctaggcaggccctgtgacctatcaactcacctttgcttatatgcaagcacacacttgcagcctttgtcagtgaacagtatgatcactaagactctagtgttcttcttccaaagagcagtggtctttccattgtaagagaggtgtcttcttaaccatgacagttctgatgatgtagatgcacagctgcaggctcagagctcgg

SEQ ID NO: 38328 - DNA, 328 bp, Mus musculus
  source 1..328: mol_type = other DNA
atttcataaaatagctgagtagtactccattgtgtaattttaaccttaattttctgagtgactgtataaaacacaagagctcttttgtgtctctagggttcatgacatttattcccaaacttatggacaaatcctctgggttaaacatccgttagtctgtcgtttaaaaaattagatacccatgaccactatggcgtatgcgtttttctgttaacttgattgctttctctatctaaagcccgaaaaaacagcgcgcaggcgcaggaggaactggctccacttagtaaagcctagccccgcccagaggaagtgggtgggacccttcact

SEQ ID NO: 38329 - DNA, 361 bp, Mus musculus
  source 1..361: mol_type = other DNA
acaaattccccagaatttcttgacttgagtatcccggggaaataaaatcaggtctttgaagttgagaccctggttcaggttttcaaagtttcagaattgtttatacttaaaactccattgcagtcccatggagactatctttcgtccctatttttttaaaaaagaagaaaatgaaaaaaagctccctgcagcggctgtagtggcattgcagcgatctggcaggcccagggtggcgggcccgagctgcccctttgttgggcgggctacagatggtgccccagcgcgggactgcgcctaggcgggcgccgctaagcagccaatcggcgcgcagcccatcagctgaccgcttttgcttacacca

SEQ ID NO: 38330 - DNA, 249 bp, Mus musculus
  source 1..249: mol_type = other DNA
gcaccataggaaacatttttttcttggggtaaaaatgtagtgaaaacgtgttagaaatatattgtatacactcttaaaattggaaaaaaaaaatctagtgaagccattatgactaggctagtttatatacatcgttttaaaaattttgtcaaaacgtcttctcggctcgcctcgttggagccgccagggggcgctgtggcccgggagcgtggcggcggcgtatcgcagaccctccccctgcgtgccggc

SEQ ID NO: 38331 - DNA, 441 bp, Mus musculus
  source 1..441: mol_type = other DNA
gagtagatttctctcagtcacacaaataagaaaatgttttaagagtgtctgagaggttaaaaaatgattcattacttcaaagagagtcatcttgtcttttcaaaagagaatgaaactctctgacaacattatttttaacaataaaggcattttagtgcatgcagaggagacttctttaaagaaatttcctgttggtctacaaagttgaaatcctaagtaactaaaatgtgaagatttaattaacattttatgacttgtttcttaacttcaaaataaaggcacttttgcaaatgcattctaatctttttcttttcttcttttttttaaaataacaaatacattctatatagaatttttaatattcgtaatacgaaccattactacttgtttttgtgtaattacagacagtgagctacatttgggaaaagcagttacttctct

SEQ ID NO: 38332 - DNA, 289 bp, Mus musculus
  source 1..289: mol_type = other DNA
tgcatttatctgtaacaattccagaagctagagtaatttggtgactttagaagaaagttctaatgaatctcttataaggacaatctttagcctccaaacttttggtcaacaagagtggatgcggggagatttggcaatgttaacattttcctgagtgactctactcaaaacaggtttttgttaaaaaacgaaaacatttcaagttctccaaattttgtaccttttgtggttctgaaattcccaacgacgctgagggaggtatctccctcacctgcagcctgttgggacg

SEQ ID NO: 38333 - DNA, 398 bp, Mus musculus
  source 1..398: mol_type = other DNA
tcctcctcttgaaagaacataggtggggccagtccggacatcgcatgagtcatggaccttgaattttaattttcaccaataaacctatcttcaatatattctaatttggcatttattggtctattttaccagtggagaaataacctatcagtccaaactttgcgaagtgttattttatacaatctcatagtctagatttacatttctgaattgttatagagctcaaaattcatacgtgatttgagcagaccacttaattgtcctgtcaacacaatgtctaagtacttaaaaaaaaaaatgagtgtttatgtagtaaggtagtggtgctcagcaaatgctgaataaattcaactgctattacctatgtcagccaaagccgctgctttaagcaccacagg

SEQ ID NO: 38334 - DNA, 307 bp, Mus musculus
  source 1..307: mol_type = other DNA
tatgcactttgcagcctggaagcccagaggcttgggttgaagacaataaaaaactagaccagatttaataaagacaaacttgtttctttaatccttggtgcggattgaccctagtgacacctgactttaggaagggagggtcgggcttgccaaacctggggagtccggttcagcgcgcgggagtctatttagaacccagccccggagcccaggggattctgggacttgtagtccctctgcgcagccccaggcgccggcacgacctgggactcggactacccagggagcttcccggcctatataagcg

SEQ ID NO: 38335 - DNA, 397 bp, Mus musculus
  source 1..397: mol_type = other DNA
tgatgacacttttaattacattttaatcatcaagcaagatgattgaagtaaaaagtaactagctttagagaccctccataagaaatacatttttcattgcatgtagctcagtagatgcttgcctagtatgcattcagcccttggtttgatcacatctaaaggtcctagtactatacatacatgtgaccctatctcaaatggaatatacatgcatatatattccattctaatatatacatattcatatatactatcataaatcaagaaattgtgtacatccatgtcttagagttcccatagttcaaagacaacatttacatcatggcaggaagcatggcagcatccaggcaggtatgcttcgcagctaggaggaggaggaggaggcatcccatccctc

SEQ ID NO: 38336 - DNA, 495 bp, Mus musculus
  source 1..495: mol_type = other DNA
gggtgccaggccacccgcaggctgcgcctgggacctgagctcccgggagagtccggggggggtcggcacggctcacacggtccacggtcaggtgcgcgcggcgtgctcggcggcggcctcggctgccctagctcctggccaccagcggccctcggtccctccccaaggcgggctaaggggggccgacgactccctcagctgcgcaccggttcctaggagcgggccaggcggggatattcctctcccggcttgagtcagacgcgggcggaatccgtcctcccccgttccctcccaggagacgggaacttacttcatttccctggggcaggcgtgccccccacccagctgggcaggactctggctgcgctgccaccccctctttcggggaaaggaggccgcagccgcagacacctgggggcccgaggtttggagggggggggggaagccgggggagggcgggcaggtcgctccttccctccccggcagcggccatcg

SEQ ID NO: 38337 - DNA, 278 bp, Mus musculus
  source 1..278: mol_type = other DNA
ctgtgttagaaacaaaccctgtgtctttcacatgctgggaaagaaattttccctattaattaattcatttatttattcactttagtacattgccaatgaacaattatagaaaattcaatcaaaaagtgaacgaggaccaactctttgtttttttttaaagattattattacaccatcaggtggcgatgtcgccggagggcgctgggagtctacgggaccgcgccgctctttccgtgcgcttccgcgcctgcgctgggccaggcgtggggggggtaggg

SEQ ID NO: 38338 - DNA, 360 bp, Mus musculus
  source 1..360: mol_type = other DNA
acttttacatgtgaattttttttttccaagttaaggcgttccaataacaaaacaaaaaattcgtgcggtctgatttacccgggctagggcgggtcagaggccatgtctgtgtccggctcccggagggctcgccacgccagctagaccagactcggaaccgcccagggggcgtggcccagtggcagggcggggccttgcagtccgggcggcctatagagccggagggagtccccggccgcgcccctcgaggccgggccggtggaggccaatccccggcggccggcgggcgaacgcggggccaggcgggccggtcccgtccgcggggcgggggacaatggaccagttcctggtgcgtcacga

SEQ ID NO: 38339 - DNA, 316 bp, Mus musculus
  source 1..316: mol_type = other DNA
gagcagtgcacctatcaacaagttcttagtgtctcctcttgcagcaaaggcaaggaaaagcactgactgaatcagtggttaatttccccactgacctgctgatgaccagccttggcccttaggaagatcgagggtggacagcttccctccaggatagagggtacctactataggagaagcctctggttaaggactttagtcaagaatccggttccagaatttctgccagagctgacagtcaaacaagagcttactagtagattccctggggaccacacgcagcccctccctgcgtgatgatgcaaaccggtgggga

SEQ ID NO: 38340 - DNA, 375 bp, Mus musculus
  source 1..375: mol_type = other DNA
tttttttttcataaaacatatagttatttagacacttttgtcagagaaaaatgaagctcacagaagagtggagagagccatacatttctcatcttctgtgagttctagcaagaatgtgaaaattctcccaaaaagattaaacgattcatttggatgttttttcaaagaagtactttgggaaagaaagcaaattgttaacatgaacaccattttacaaattgagtttggattttgtgcttccaggagtagtattttttaattatttactataactgcattgcaatatatgacatcatctcacatataagcaaccttagatttggatgttaatagagctgatctctcagtttcatttgaaccaactaggttgtgatt

SEQ ID NO: 38341 - DNA, 461 bp, Mus musculus
  source 1..461: mol_type = other DNA
gtgaatccatcagtggctcagttaacctgacagtcgagatgaagtgcttgccgtgcaaacatgaagacctgtttgccaggtgggactgctgaggtggctcagcaagtaaaggtgcacgcaaataaataaataaataaataaatgtaattttaaaatgtttacacacagtgattaactactcctccagggtgggaaggtcgtgccaaggtcactcaggagctagcaagagacagagctgggaccgagcccacctcccttcttgggcagctgctcctgggaggagccccgcctccacagagtaccgggaaggccaggccctggtggctggcagggaatgccaggtccttagtcttaattttagcttggaggcgtgcctttaactagaggccggctgaagttatgcaggacagctgtcagccggcatgctgggtggggcctatttagccggcagcggcaccagt

SEQ ID NO: 38342 - DNA, 610 bp, Mus musculus
  source 1..610: mol_type = other DNA
tggaaccataaaaataattttgaagctataatatgggaagaattgatgtccacaactctctctctctctctctcacacacacacacacacacacacacacagagagagagagagagagagagagagagagagagagaaagaatattgttttcttcctctgagaagtttaaaagttatttttaaaaaagatattttaaatttttaaaaaaatttttgtggctattgtttttaacaaatgataatgtactagagtcttttctctctggttactagagaccttagccaggttagggtcagttgaggcttctggagaccacctgcccccgcgcacccccctgggacaagggggaagaggtgggcagagagcactgctcagcatttatttttggacccagctctctaaaaacctctgctccttgccctttaaaggagaagggcgtggggagggattcctgccgcctaggggacagctgtgagcccgaggtggcagggcagccggctaagctgacgtcagggtagagtttagccaagttctcagcctccctgcagaggccaccctaagggagggatgtcactttttagagggagtcccgctctccaattaaagcgg

SEQ ID NO: 38343 - DNA, 315 bp, Mus musculus
  source 1..315: mol_type = other DNA
ccctgggtagccagcctagcctgcctgcatggtgaagttccaggctgatgagactctgtctcaaacaaaatgtggatagtatctgagaatcccacatgtgtgcatgcctgaacacacacacacacacaccacaattcagagaaatctggggcttagtgggcttgaggtcctgacttccagcatgatccacatcctggctgatttgaaaaccaagatgacctggttctcaggcttttttcagacagagaagaatttgagtctcaggtctagacaagtaaaaggccgctgagggtagtccctcagattggaacctcg

SEQ ID NO: 38344 - DNA, 343 bp, Mus musculus
  source 1..343: mol_type = other DNA
ggagtcttcaaaacatacatgttcagtgataccgcaagctttcatctggaccaacttgtggcccctgagacgcgttccacatccagaacctttaaatgtgggttcctgttaaactgatttaataacacttaagtgccaatattagcgacctgagcctagatcttgaactctctaccaaggcttaggaatcttttgtttattcattttataagacagattaaagctgcttttaatctttcacgggatccaagaggtccaaatgcatcgctccttcggtcttccgaagccgctatcccagcatgccgtgcgctcgccgcgagcgcgccgcacgtagctgacgtac

SEQ ID NO: 38345 - DNA, 346 bp, Mus musculus
  source 1..346: mol_type = other DNA
cacactgaactatttgaaatgccaatgaaattaggactctctgactcctacataatgtagcccctaggatgctggggttaccatagttgctacctaggtactgagccaaactgttgcctttataacgccaatgtatttgttgaaattgtccattaaagagtctccaaagagagcttattttacagcctgaaggcagccctgtctgccagatctctctgcaatcaagtaattctttcaaaaatagtcatgcatcagactctgccagagtctcaggcagagtgacacgacgcaaagaaaagaatctttctgtgtttgtactagctcgagtttgcagggggagagctca

SEQ ID NO: 38346 - DNA, 292 bp, Mus musculus
  source 1..292: mol_type = other DNA
gtcagagccccttttaaaatgttacattttgagctggatccacgttatagtaggggctatactctagttcatcccggaggcagagacagcggatatctgtgatttcttggctttaagactggaatcaagtcccagtctcaccccagtgctcgacacccgctcgctaggagagcgccctccgcagtggttccctccgggcaggtgaccggcctaccggccgtgcgcacagctctccgcgcacactcccccgcctaccccggagcgtgggagcaccgtgccctccgaggcctga

SEQ ID NO: 38347 - DNA, 583 bp, Mus musculus
  source 1..583: mol_type = other DNA
ccggccggcggcgaaggggagggtgggcggccgctcgcgcgcgagctactttcgcacctcccgccccacccagtgggcagagcgaggctgccggcggctgcgcactccggctgccgttaactgacaggcgccttacgccaaccaaaacacgccatttgtgttttcacacacggcgggagcggccggaagcgctcctccgctgcccccccccccccgagccatggccgcgtccggtggacggttgctgcagggcggaccgcattcctgcccaccaccacgctcggagggcctgccgcggccgcccatccccgcctagccgaggctctctgaggagccggagccccaaagcacagcctcttctttaggcggccccggcagcctccgctgattggcggcgcaccggccaataagatggcgcggcgggagggggcgtgtcccgcgtgcccctggcgccggcactgggaatccccgtgcggtcagtggcgtttccgctcgggcagcgggctgagtgagctgccgccgctgccgccgctgccgccgccgggggaggggcggccgccgcccgcctgcgctcagagactca

SEQ ID NO: 38348 - DNA, 527 bp, Mus musculus
  source 1..527: mol_type = other DNA
ttagatttctttacaaatctaagaaaatgagtacttttaggcactatgttaacttactatgttttcacagcatcaatttcattttgagagttttctttcgacataagttatagcttaatcaactgtctgactgatggccaaatgagcaattctccctcagatatacaatactgaaggaggcctgagactaacaattctaggaatttgggactgatatttgagattctcagttcaaggccagccttggcgctgataggaaaatgaaggaacattattatctacacttttttaaacatttttaaaaaattaaggtgctagaaaatctttttaaataaataggatgatggtccacgctatattggcagggacgtccataagagagcccccgcagccgcggtggtttagcccggcttcccccggggaaaccccttgggcggagcgcggcccccgccgtgaggccacttggatccctccgcgtcaggggtgggccggggacctgtgggccgggcacgaaccccgggctctga

SEQ ID NO: 38349 - DNA, 381 bp, Mus musculus
  source 1..381: mol_type = other DNA
cactaacatgtgcgtgctcgagcacacacacacacacaaaatggggcataatttgtccactttacagataaggaaacaggtcccgatagctctcccaggagtgcccctgagggtgttctttggcctaatcaccaccggaaaaaccagcttgccagcccctttggaaggggtgttgacagtttcctaggagactctgaaaaccttcaacgcctctaagacgcagctttgtggggagctggaaccccacaactcaggttgtccagtcaggaggcctgaagggacctcagggtcaccgtgcctgaccgtacctctgactgtcacgcccgcgcgggaacgcgccccggccgcgccgcgccagtgcccgggagcgcgcgcctcggc

SEQ ID NO: 38350 - DNA, 479 bp, Mus musculus
  source 1..479: mol_type = other DNA
tgggcccccacgagcgaccagagttcctgctaccaggctggggaggcccaggcccacgaccccgagggaacgcagggagactgaggtgacccttctttcccccggggccctaccttgacccaggcgctgccggggcctgggcccgggctgcggcgcacggcactcccgggaggcagcgagactcgagttaggcccaacgcggcgccacggcgtttcctggccgggaatggcccgtacccgtgagtgagtctctgagcgcaggcgggcggcggccgcccctcccccggcggcggcagcggcggcagcggcggcagctcactcagcccgctgcccgagcggaaacgccactgaccgcacggggattcccagtgccggcgccaggggcacgcgggacacgccccctcccgccgcgccatcttattggccggtgcgccgccaatcagcggaggctgccggggccgcctaaagaagaggctgtg

SEQ ID NO: 38351 - DNA, 237 bp, Mus musculus
  source 1..237: mol_type = other DNA
ctggggaaagaaacccgggcttgtgtttataagcaaataatcaggctggcctcaatctcacacgcccggcggctttcatctttagtcagccgcttctgggctgtggggtgctcagtagctgccactagggccatactaatattgacataatgagcgctgctcagaattggctaccaactcccgaccatggatagttctaaggctgctccaatggggcgggggccgcctgcagggccg

SEQ ID NO: 38352 - DNA, 204 bp, Mus musculus
  source 1..204: mol_type = other DNA
gtcctacagttttactggacctcggagaccaaggccaggtccctaccgcagcagtcgcgccagcaggagggaggagggggaggggagaagggcgggctcctcacgcccagcctcgcgctgcctgtccgtagtcgcaaaactgagctttcgctcgctgagccctttaaggtgtccagcgccacgggaccacgtttaccctggcgg

SEQ ID NO: 38353 - DNA, 377 bp, Mus musculus
  source 1..377: mol_type = other DNA
cctcggagaccaaggccaggtccctaccgcagcagtcgcgccagcaggagggaggagggggaggggagaagggcgggctcctcacgcccagcctcgcgctgcctgtccgtagtcgcaaaactgagctttcgctcgctgagccctttaaggtgtccagcgccacgggaccacgtttaccctggcggacgccgtcgccgtcgctgctgctgccgccgctgccacagcctttgccgccacggtctcgccgctgctgttcctgtgccgcctccaggagcccccccattgtcccggcggcaccgggttcccaggccagaagctcgggacgacgctggggcaccggcgggaccgggcaggagccggggcggccagcttcgcgc

SEQ ID NO: 38354 - DNA, 291 bp, Mus musculus
  source 1..291: mol_type = other DNA
gaaaagcaagcactcttattactgagtgcgcactgagaagtcaacatcctagggaacagtcctcccaagtcagagcgtgctaggcagccaggaacggaataacattcggctacacaccgggagtgtagcaccgtgggtcctcttcctccggacgtggccccgcccccaggacctcccggcgcgcgcctcctcctcctgcgcagccctcgaggtttggaaaggcgcgccgggtcccagtttactcccacctggcgattggctgccagagacccggctctgccatttcagggc

SEQ ID NO: 38355 - DNA, 363 bp, Mus musculus
  source 1..363: mol_type = other DNA
ctccacgctcggactggagcgggtagctgtgcgggcctctgaagcctgggaagcccgagatggcgcattcggggcctcctggagacagagtctcgccatgactgggacgaccggtcggtgcgggccagcacgagaagttgcaggcaggccctgagattgcaccgaaagccctgaaatggcagagccgggtctctggcagccaatcgccaggtgggagtaaactgggacccggcgcgcctttccaaacctcgagggctgcgcaggaggaggaggcgcgcgccgggaggtcctgggggcggggccacgtccggaggaagaggacccacggtgctacactcccggtgtgtagccgaatgttattcc

SEQ ID NO: 38356 - DNA, 420 bp, Mus musculus
  source 1..420: mol_type = other DNA
agaccaggctggcctcaaactcagaagctttcttagcctaagcattctttttttgtcttaaaaaattataaatgatatagtcctttttgcctagagccatctctccacgctcggactggagcgggtagctgtgcgggcctctgaagcctgggaagcccgagatggcgcattcggggcctcctggagacagagtctcgccatgactgggacgaccggtcggtgcgggccagcacgagaagttgcaggcaggccctgagattgcaccgaaagccctgaaatggcagagccgggtctctggcagccaatcgccaggtgggagtaaactgggacccggcgcgcctttccaaacctcgagggctgcgcaggaggaggaggcgcgcgccgggaggtcctgggggcggggccacgtccggaggaaga

SEQ ID NO: 38357 - DNA, 439 bp, Mus musculus
  source 1..439: mol_type = other DNA
ttttgttgatgtcaatagatctatcagactattagaatttataatttatctttattttttatacttctctgtgtagccctggctgggctgtcctggaactaggtggcttacaacaactacctgtaactccagttcggaacctgtaagcacatggcatgtgcatactctccaggtcttctggaagatgttttaattgctaaagatttatttatttattatatgtaagtacactgtagctgtcttcagacgcaccagaagagggcatcagatctctggttgtgagccaccacgagcaggcgggtgctcttacccttaaagaatttttaagggattggcatccttatctgaggagagtgtggtcataccttctccccaggttgtatgagtgtacggcccacacagatgtccactaattactgcatactgactgagagtgctg

SEQ ID NO: 38358 - DNA, 322 bp, Mus musculus
  source 1..322: mol_type = other DNA
tctgaggcctgaccactcctagacaggccaggttgcgttgctctcatagtcccaaagagccaagtcgggtcaggtcccttggccccaagcctagagccccaggaaggccctggctcccagccacggtcacctattaaatgcagctccttttaaatggaacaggtcccagaactgttttgaaaacaatgccaggttcaagctggccagcctaaaaatcatctgcttctcttgtctcctgctgacgaccaaagggcacataagcatgctatagggcctgtaacagaacaactgggcaggctcctcctccattgacatcagagcc

SEQ ID NO: 38359 - DNA, 566 bp, Mus musculus
  source 1..566: mol_type = other DNA
ctcgggccgcaagccctagcgggcgctgtctgggccggaaagcggaagtgcggaagtgcccggacccgcgacgcctgccctttcgagagaggcgcagccgcagtctccgacagcacttccgggctggaccatctcgggtaggaccggggagggagagccgacagatctccgcttgtagaagacctgctatgagacagtagcggtcgagtccctacagcccgacctcaggttgggcaccaaattaggacaggccgaaccggagaaacgtttcttccggtggtccgtagggttcggccgggtagccaggagatttgggctctgggccccaccccagccccgggctgcttcctagcccgggactcctcaggcctagcattccacctcccggagattcgtaggtggccttagacccccacccccaccccggccctacaggccaccttgggctggccgtccccgccctcgcgtcaactgcagggggcccgcccatagccagttccggagcagttgcttccccgccccctcctgcggcccagggcctgtaggaggccgcagagaggttgggg

SEQ ID NO: 38360 - DNA, 363 bp, Mus musculus
  source 1..363: mol_type = other DNA
caaactggtgaaggaaaaatttattcctaacgttctgttgtgaattttatgtaaagtgaacataccataaacttttgaggaaggaaggggccttctccactgagctgagctctgagaggctgagctaagctgtggtcattgtagctgaccttgtccactgagaatggacagcttgatcctgtatctggtcaaaaccagtttctttagacagtctagattatttttaagactagctagttttgagggtagaagagagatcacttctgaattcccagcatcatcagccttacctagctctggcaagcggatagccctgcaggaagccttcggtactggactggctttgcttggctgaggcagact

SEQ ID NO: 38361 - DNA, 586 bp, Mus musculus
  source 1..586: mol_type = other DNA
gggcttcgcagcccggtctcctgccccctccgaacatcggggagccgggattcccaacctggaagcttccgggcctcgggccgcaagccctagcgggcgctgtctgggccggaaagcggaagtgcggaagtgcccggacccgcgacgcctgccctttcgagagaggcgcagccgcagtctccgacagcacttccgggctggaccatctcgggtaggaccggggagggagagccgacagatctccgcttgtagaagacctgctatgagacagtagcggtcgagtccctacagcccgacctcaggttgggcaccaaattaggacaggccgaaccggagaaacgtttcttccggtggtccgtagggttcggccgggtagccaggagatttgggctctgggccccaccccagccccgggctgcttcctagcccgggactcctcaggcctagcattccacctcccggagattcgtaggtggccttagacccccacccccaccccggccctacaggccaccttgggctggccgtccccgccctcgcgtcaactgcagggggcccgcccatagccagttccggagcagttgct

SEQ ID NO: 38362 - DNA, 594 bp, Mus musculus
  source 1..594: mol_type = other DNA
tttccaggacaaaagatgatgcctcagtctatttccccattaagaagtataaatctgtaatgcccagttcagtgcctggcacagaagtgggactgcccccaacctctctgcggcctcctacaggccctgggccgcaggagggggcggggaagcaactgctccggaactggctatgggcgggccccctgcagttgacgcgagggcggggacggccagcccaaggtggcctgtagggccggggtgggggtgggggtctaaggccacctacgaatctccgggaggtggaatgctaggcctgaggagtcccgggctaggaagcagcccggggctggggtggggcccagagcccaaatctcctggctacccggccgaaccctacggaccaccggaagaaacgtttctccggttcggcctgtcctaatttggtgcccaacctgaggtcgggctgtagggactcgaccgctactgtctcatagcaggtcttctacaagcggagatctgtcggctctccctccccggtcctacccgagatggtccagcccggaagtgctgtcggagactgcggctgcgcctctctcgaaagggcaggcgtcg

SEQ ID NO: 38363 - DNA, 282 bp, Mus musculus
  source 1..282: mol_type = other DNA
acccaaagtttaacataaaggtaacctaaagccttatctaaagcagcttcagttgctaggcaagctacagggctgatccagctctttttaaaatcctggagtcactccccggagcagcggtgcagcagcagcagccggtgcagaaaggcagcagtgggcctgccccatagccacatgttttaaacgtcttgaaacctaaactttttgtctttttttttttttttttaaacaaacaaaaaaaccaacctccagctccagtggctgtgactggccccagtgatt

SEQ ID NO: 38364 - DNA, 289 bp, Mus musculus
  source 1..289: mol_type = other DNA
gccaggcctgcaaggctttcccagtagagacaggcaaatctctctacagactgagttcctggaatcttgttttgaaaactaaaaagaaaaagatccttcgggcagttgctgagactcgtttccctgtatagccttggctgtcctggaacttactttgtagaccaggctggcctaagctctgtgagattggggtccaccatcctcagtgcctggcaatatcgaggcctccacagagtctgattgtgcctgggcaacagtctcctaggagagggcccgagagggcgccagg

SEQ ID NO: 38365 - DNA, 393 bp, Mus musculus
  source 1..393: mol_type = other DNA
tagagacaggcaaatctctctacagactgagttcctggaatcttgttttgaaaactaaaaagaaaaagatccttcgggcagttgctgagactcgtttccctgtatagccttggctgtcctggaacttactttgtagaccaggctggcctaagctctgtgagattggggtccaccatcctcagtgcctggcaatatcgaggcctccacagagtctgattgtgcctgggcaacagtctcctaggagagggcccgagagggcgccagggctgaggcgcactgtggggcactgcgagctggtcagctcggcgcttctcctgagcgcggggcagctggggcccggggccgcctggtaccgccaggagggcagctccgagtgtagctggctccggaggt

SEQ ID NO: 38366 - DNA, 395 bp, Mus musculus
  source 1..395: mol_type = other DNA
tataggggtgacccaaggagaaccaggtcgcagttcctctgctccttgtgctaagggctgaaaacaggcaacggggaacctgggacttctaggtggcctgtgtggagtcctgagtatgacacaagctgtaccacagggctgtgcagggccttacagcccagttacaaaccatagtagttacctaaattagttaaggctccagaagtgcagagtcagctcctttgtcaccctagatggtcttcagtagaaacaggagggctctattgctcaagggcccatggggcaaagcaggactttcaggtccctcacagcaccaggaggtgtgactcacctcctgccagcgtgaagcggactctgtcccctgagacagggacaaatcagtgcctctttagcac

SEQ ID NO: 38367 - DNA, 371 bp, Mus musculus
  source 1..371: mol_type = other DNA
gaaaacaacaggcaatcctgttgtttgttctgtttgtagcccaggctggcctcgaactcagaaatccgcctgcctctgcatcctgagtgctggtttgtgtagaccaggcttgtctcaaactcagctaactacttgccatctcccaggctggtcaacccaggacctttcacaggctgttacaatttcagacaggtgtactgaccgaaaggctgcataccggtcttcacctggagggtttcagattaaggttccccaaaattgaaacgacagtcttctcgaccctttctctactttgagtaaaaggggaggcaaagcccggattctcgctcgtctgagcgccctctgcagcctgcctgaccaatctacgcacg

SEQ ID NO: 38368 - DNA, 533 bp, Mus musculus
  source 1..533: mol_type = other DNA
aagctctgtgagattggggtccaccatcctcagtgcctggcaatatcgaggcctccacagagtctgattgtgcctgggcaacagtctcctaggagagggcccgagagggcgccagggctgaggcgcactgtggggcactgcgagctggtcagctcggcgcttctcctgagcgcggggcagctggggcccggggccgcctggtaccgccaggagggcagctccgagtgtagctggctccggaggtcgcagccatccgagctccgcccgctggccctggccgcgcaactccgagtcccggcggtctgagaggctacaatggcctggtcccgcctccgccaagccggaggtggcgagctgtggcgacagccgtcgggacattgcctgcgcgccacctaagcagcgctcgcgagtcgtccatgcccggtgctctgggcactgtgaacctgatgccctacggccgcctgatggtgaggcgcagagtggcccaccacccctgacaccctatcggcttcaggcagaggccgcagagtccc

SEQ ID NO: 38369 - DNA, 355 bp, Mus musculus
  source 1..355: mol_type = other DNA
tgtcttgaattagagattatctttctgtctcttgagtcatatatttctcttaacaagatatttttattttgatattacacattgtcataattgctgattttatttattacatatagcatattagcaacaacaatcacagcacctaagttacaaatgttttttcaaactcagaaatctgcctcagcacaaatgtttattatgtgtgtttatcatgatgacagctctggtgtgagcacagacagcctgtgtgggggcggaactcagaccccttctggaagccagtctgacttaaaatccctaggggaaagtttcgaactcattccccatgctcttttccccagctggggctgggggc

SEQ ID NO: 38370 - DNA, 273 bp, Mus musculus
  source 1..273: mol_type = other DNA
tagtgagactctgtctcaataagtactcttaaccactgttaataactctccagttattaattatttaattaatttattggcaaacgttcaacaggccaggctggcctcagatgcctctccccaaggttgtgtggagcttcagtggtttaagactataatcacgcacatgaagccctgacaacttaaggtctgtctgcaggcacaaaaaccaagtaattattttaaatgctttaaatgaagttaaaaagtcagtcctcccaggatagagaggcc

SEQ ID NO: 38371 - DNA, 450 bp, Mus musculus
  source 1..450: mol_type = other DNA
gaggcaggagtccctcaccttccccagagggaggcctcgaacaaagaggtttatctacctgcctctaggacccacaagcattgcctgtgaaaggcaagggggacccagtgcctcctggatcctctccatggccatcgctctcctgcccctccgtctcccctgaacctgggccaggcagtggggagctcactttctggtgccctttgacagcagcccgttgtcttcagtgtttcacgagggtcactgtcactgagacccagggagacccagtggaccttaggatcccagggtcatacagaacacccggcatgccacaagcctggggtctttctgaccagatcgatcagagccttcccagggctcctcccagccaggtaccagccaaggagcccaggtccaaagctgctggctcctaagcctggagttggtggcgggaacagccactgcctg

SEQ ID NO: 38372 - DNA, 537 bp, Mus musculus
  source 1..537: mol_type = other DNA
ccgcgttgagccagatgccactgcgcgtggccgtggacctgtggagccgccgcgagctgagcgcgcacggagccctagctcttctcgcccgcggccgtggcgcagtgtcagcagtggctgcagctccagacagtggagcccgggccgcatgacgccctcgccgcctggctcagccgtcctgcaaggccgggcgaccggccgctacgtcggggtctacttcgacgggctgctgcacccagactctgtgctgccggctttcctggatgcactgcagggaggctgctccacttccgcggggcgacccgcggaccgggtggaacgagtgacccaggcgctgcggtccgccctggacagctgtacttctagctcggaagccccaggctgctgcgaggaagtatctgttccggctaacagagcctttaaccccgctgccctttaaagcccggacaggtgcagcccggagccgcttctggtggccccgccctccggactgcggggcgactcggcccacagcgcccggggcggaggcggggggcc

SEQ ID NO: 38373 - DNA, 304 bp, Mus musculus
  source 1..304: mol_type = other DNA
aggctttgaggtttcaaaagcccatgccaggcctagtgctactgttccagtgcctgccaacatgagcacccaattaaatactttctcttatagcagttgcaacaatagaacagtgactcaggtagtattgatcttcgaaaatgtgtcagaatatattgtaaaatttaagaaagcgtgggctcatttttatttaatatgctggaagatatgatccagagaaagaaccccacagggctctgacaccatctgggctgtgctgccgttcccaaaggaaagggttaagtatcccgcgctcctgtgggcg

SEQ ID NO: 38374 - DNA, 273 bp, Mus musculus
  source 1..273: mol_type = other DNA
gctattattattgtttctctcactctgaggactggctgaccttgatcgaactcagagatcctgtatacaatgttctgtctgcacatcagaaaagggtatcagatttcattatacatggttatgcctatatgcatgtggtgcacataaacaaactaaaaacaggttcaaatttcttattatacgagatttcttattatgcgtttcctacaataatatgtcactaacctggggacccgccagttgcttgccatcaaagccgcgccgtggcgtgac

SEQ ID NO: 38375 - DNA, 320 bp, Mus musculus
  source 1..320: mol_type = other DNA
aggcaggtggaatggtccatcgcaactcctcacgcaactagcctaacaatattaagaacgttttcaggccctgggctaaaggcttttaggtaagattattcccattttactgacaaaaatgaaggtcacccgggagtgaggtcgaggtactgacctggagtcaagcagcagctcgggccccgccatcttcgctgagagttcgctgcgggtcgggaccttcacccgcccctcagtctggctggcgtggaatctggggcagcctagctttccagctgggccgccaggccgtcaacttccggtgcgggcgagtaacgtcacgc

SEQ ID NO: 38376 - DNA, 320 bp, Mus musculus
  source 1..320: mol_type = other DNA
ctacagtttcatttgccttttaaatagcagccatctcttaatcatgtttactccttctgtaatgaatatacatgtatacacagtgggcactggacagatcacgagtggctggctgtatcaggctggcctcgaaactcagaaatgggattaaaggcgtgcgcttttcttaacctggagtccttccagtgcagtaataaaacctttccaaacactggagcacagtttgaggcagggtataatgaataaaggttaacttaacactggggaaggggagttgtcctctatgcccctgtcaaaagcacaccgaagggcggcccctg

SEQ ID NO: 38377 - DNA, 245 bp, Mus musculus
  source 1..245: mol_type = other DNA
gaaagaaagaaaagtattttgctcatttggtaacacctgatgatctgagtaggtgaggaacccactcctgcaaatctctgtgagttcgaggccagcctggtcgggcgccccctaacgacaagatccgctagtggtcagcgggtttaccccagcgtgggagccaagctagagcgcagggattagagtgcgcacgcgcgtcgctctgccagccgctggcggcgcaggcgcgctggaggcctgtagag

SEQ ID NO: 38378 - DNA, 425 bp, Mus musculus
  source 1..425: mol_type = other DNA
aaagttttacttttgtactctggaagacattttgaaatgtgtagttaaaaatagtaatagcataggtgggcccggcagcggtggtactcagctttgaaattaaatttaagtacactcaaaaaaaaaaaaatatatatatatatatgaggctcatgcctgtaattccagcactctggagtcagaggcaggagatcatgtggtctgtacacggaattccccctacctcaaagcaagtctttctggcatggagataacggctttaatcccagtactctggaagcagaggcaggcagatctccgagagttcacccggggctccgccgcggccccgccccgccgccccgccgccccgcccactgctgcggccccgcccaccgccgcggcccctggctccgtgccgccccgccccccagtttgagggctcc

SEQ ID NO: 38379 - DNA, 442 bp, Mus musculus
  source 1..442: mol_type = other DNA
ctcaggacttctggaagcacagtgctcttaaatcgaaatatgaatttttttattgacatgaaaactatttgttattgcctggctgctgtcgtagaccaggctggcctcgaactcagaaatccgcctgcgtgcgccaccacgcccggcgcgagtttactttttaatttaaaaaagtctcactcagtgtgtgtgcaaccagactgctgaggttacaggtgtgtcacaatcgttccttctgtccacactgaaggcaaccggtctactcctgacactggtccaggggtcgggtggcatgtgctactgaatgccactgggaggcgctcgcttgcccgctctcggccatagcttgggtggagcgtgacaccgcgcttggccgctcgggggagcttgctcgcttacccagtggggccgcgggcagcgccgccctttactagggaagtcg

SEQ ID NO: 38380 - DNA, 325 bp, Mus musculus
  source 1..325: mol_type = other DNA
ctttcttgtgcaggtcgacacacagagactctgtgcatgccggcgtggtggcacggcaggcagatttctgagttcgaggccagcctggtctacagagtgagttccaggacagccagggctatacagagaaacccgtatgtggcttgtggtcccaaggtccatgggggtctcatctggatccagcaactggaactgggcctgttgccagcaactttttgtttagtcctgctggccaaaaccaccggagatggatcccaccacccctggctgtttgaccacccagggcctgtgtgcaggcactcaagtgcctgtgttaaggcaaaaa

SEQ ID NO: 38381 - DNA, 663 bp, Mus musculus
  source 1..663: mol_type = other DNA
attaaaatttttttagttgtagtcaggtaaaacgcagtttcctgcgttgttttttttaaaaaaaaaaaaaaaagggggaggtgacaatgtttggcacgcgcgtccggtatcccgggcgtccccagcaggcccttcgcgcggatccagggccacgtgagagcttcgtgaggcgtaggggcacgccccagaacgtcggaccaacaggcgcgctccgtcttgcccgttggagcaatcggcgccgtccctgacgccggctccgcccctgccgcacgccggccgccggccgctgggcaggttccgcggagctgacgccgaggttgcgaagtaggcggcggggccgaggccttggatgagggcgcggtgcggcgctgggccgggtcagctagcggaggtgacttccggcgcgcggctccggaggccagtggctccctcaggcccggggcgggacggggcggcgggaggcgagcggccaccccgcccgcggcccgcccttggcgtccggggcctgcgggcgcgtgcggcccaaaaggcggctccgcacgcgctcggccccccgcgcagggcttcggaaggcagaccgctgcaccgcgccgcgccgcgccggaagcgcctcggcgtctcgggagtggcgcgctgttgacagccgcgctcgcggacttgggc

SEQ ID NO: 38382 - DNA, 325 bp, Mus musculus
  source 1..325: mol_type = other DNA
ggtgcacctaaaattggacaaaatcttgtccaattttgtccaaaattggacaagttctccactgtttgttcttcaacagtgaggggaaaaaaagagtacttagttcccaaggattagctgtctgtatatgtgtgtatatatatgtatatatgtatatatgtatgcatgaacatgcaagctcaccgggtctaaattattcagcactggtcattcataagtgtcagtgagctcactggtcagcctaattagctctgtcatcaggctcctgagtcagctcccaccctagcagtccttacttctagaagcttgctggattctagcctga

SEQ ID NO: 38383 - DNA, 225 bp, Mus musculus
  source 1..225: mol_type = other DNA
cgtgcatctgaggagctgcagtcagactcccagggacttgagactctcttgtatacgtagaacttcaagtactattgctttatccatcaacgtaatttacgatcatctcattagatgatgaaaaagcccttaacaatatccaataccccttcatgttaaaagtcttaaagggattatgactagtcattttatgtatgcatcgatcctgggtgacagcctgccggc

SEQ ID NO: 38384 - DNA, 452 bp, Mus musculus
  source 1..452: mol_type = other DNA
agactactgttcgttcagtccactggctcaaatgtctagattaatttaataactttttgaaatcacagagtacgaggttatatccgtttctttgtatctacgtatacttcttgaagactgtatacgtgcgtatagataagtagatattatatatatatatatatacatatatatacatggatatataaagttcctttattgctctattttaacttatgtcctaaaagaagaatgtaatttgtttacaaacctgtagataatgtctttggctatttgtgtggtttaaggacactggtggccaagatgcttacaaactctggtgacgtcaacgtctgttttctctcaatgaaactcgcttgagtttacagagagcatttcagaactgagttgtctttggcactgttttagttagtaatttagaagtttcttttcttataaacggcagcatagac

SEQ ID NO: 38385 - DNA, 574 bp, Mus musculus
  source 1..574: mol_type = other DNA
caccatgccggccttgaaggtggacgccactcctgaggtgtggggaggcatggccacagggagagacacctcattcaatgagaggagtccacaggtctgcccttgggagagtccattccctcggactccaaaatgggatcactctggactccacagacgcactagtccttggcagatactgggaatgtgctaacactatggcctcttcaagggttctcctgactggacccatccccaccctggagcaggtgagcacacccaggcagcttgtggggctgcagacatccagcagctggctggagatatagagccatcctgtctgcatccagggagcctggaagcccaagtgacttagggaagcgcgtgcccttgacacggcctcctgtgcgaggggaacgggcctctccctagggctctgcgggcggccgcggatgcgtcccgtgggagcgatgcccagagccgcgctcccaggcgcggggtggttcggtccgcgctcgcgcccctcccccggcggccgcgccccccctcccccccagcctcgggagcgatggtacagtctgcgcagggaccgggc

SEQ ID NO: 38386 - DNA, 371 bp, Mus musculus
  source 1..371: mol_type = other DNA
tgctccaccccagggctgctgagctcaggcctggtaagtttgtcaacaggatctgcccagtgactgaccctccctcactcaggagactaaccaggggaggtcagttacccttgcggggtgcatcgggtgggggcccacccatttggctttttataaagccaataaataaataaacaagcgggcatgattaattgatggcatcccaggcgctgcagggccccttgtcctggactcagccaggccctagcggggccactcacccttagtcacccacgggtttccttggggggtgaaggggaaggagggaaacgagtcctcatggcccacctgcgtgccgttcggcgggcggagcgcagtgcagcggcggcggc

SEQ ID NO: 38387 - DNA, 362 bp, Mus musculus
  source 1..362: mol_type = other DNA
agccagacgtggacatgcatgtctgcatactgcatggtgcatggtcattgactgtctctactgtaggaagagtaggtgaagcaggatactcagcttagacttgcctgctcccacactgttgagactcatatgtgtgtagaggcttgccagcgagtcaggctgcagggcaaaccctgtgccctgagttagccaggtgggcacaaggtcaagtcactggacttgcagcgcccctaccatcccgggattcaagcgggcaggaggtggcctgggcatcgtgtccccgtcccgtgcggtccgacccgggcggctccctcggctccacccccggctcccccgcccgccgctcgagcctctcaaaagcc

SEQ ID NO: 38388 - DNA, 234 bp, Mus musculus
  source 1..234: mol_type = other DNA
ttttggggaacatggaaaagggagagatgcccctttccccaaagcctctgccaggggcagaggtgttctagataatcctagggtggtttccagtttgtggtttgctgcacacacacacacacatctttcccaacctagtagctcaggggaagagtcctaccccactgcggcacggacaagccccgcctagagggcgtgtcttgacagccccgccccctccgccggccctgggag

SEQ ID NO: 38389 - DNA, 311 bp, Mus musculus
  source 1..311: mol_type = other DNA
gggcctgccccttctaggggattgttaaaagggttttccctagcaaagaaggagaaacgccctcagcgcaaggccctgagaaacagtggttgtgcggttctaaacctcccgagtcttggtgatccggatcaatcagtgtcactaattcttgccaagctcagggctccgccacagatgcggggcgcgctggggctgctggtgggcgggcctctcagcggctcctcccccgaggccgcctccgcgtgctcccgccacccccgcggccgcctccgccaccgcaccgagcagtctggccgccgccgccaaacttt

SEQ ID NO: 38390 - DNA, 297 bp, Mus musculus
  source 1..297: mol_type = other DNA
gacggggatgccaggcttactggccagccagtttagcctccagcaggttcttccagagaccctctctcaaaaaatgagttggagaaaaactgaggaagactggtgccctccctcactctgaatggcataggccaatcactgtgagcctggtgccagccacagacccacagttatatatttttttgcctcagagagatttgcagcaggaatctcagatgccagtttctgtgtcactaattctggactccacctagccccgtggggagggccatggccctgtgtaatgggaataggccc

SEQ ID NO: 38391 - DNA, 368 bp, Mus musculus
  source 1..368: mol_type = other DNA
aagtcactcatgtgcaagactcccgagcatttcattatgttcattatcctgtcaaaaaaaaaaatgttttcccagtagtaagttttttgttcagccctggctgtcccagaacgtagaccaggctggccttgaactcagaaatctgcctgccgctcctgagggctgggattaggttcttaagaagtgattttatagtcactgaagtactgatgtatatgtatacaggtccagaacagccatggctatgtagtatatgaggaggacataacctttttaaaaaattaaaaatgcaaaaaatagtactaccctgggaatttgataataattccgtagtactgtagagtcactcgctaatctatgcgcgccgc

SEQ ID NO: 38392 - DNA, 313 bp, Mus musculus
  source 1..313: mol_type = other DNA
ctttgctgctgagctgaacagtaaactctgaaatcaaaaatgcaattgtttttatttaaccattggcccatgcatgctgcaagcaggcaggtgactccaagccactggcctgtcagaaatctgcagatgggagcagatatgctggcctccaactcgctgtaattctgacagcagatctgttttctctgaaaatggaactgcagcgatgcatgcaacgttcttggcaggcggcactccgtctcccaggcccgcaggaagcttcccctgcagcgaggggcaggcggccccgcacctcacaccctggggtgcgcgc

SEQ ID NO: 38393 - DNA, 354 bp, Mus musculus
  source 1..354: mol_type = other DNA
gtgtgtgtgtgtgtgtgtgagagagagagagagagaagagggagagagagacctgtaggccactcacttgtccccagatctgtttatgtccatctgtacagctacagagtttaggaaggaagttacatgtaacattgactttgaaacaatgtacttacatataataaataaataaataaaatctttaaaaaaaagccctggattcccagcttgcaacgaagtcacggaaagttaaattccctgtactttgcttcccactgccggcctctggctccggggaggaaaggctctcctcaccccctgtctgcagcgcctggagcctgagccgaggctccagtgagcatgctcacagca

SEQ ID NO: 38394 - DNA, 557 bp, Mus musculus
  source 1..557: mol_type = other DNA
gtcccactgcagagctggcccgtggcagcgcgagtttgcccagcgcagcaaagtgcagcgcgcgtccagagaggcctcgcgtgagtgtgaacgggcgcgcgcgcgcgtgaagtcccaagcctgtgcgaccgcactgtgccttcaggtacgtgtggctggcatgtggccccgtgtggcgccccacggagctgcctccgtgtaggtgcaatcgcggagcctagactactgggcggttaccgccgcgcctgccctcgggctgcagagaggcggatgcgcgtggctggcggcggcgggcacctggacacgcatcagagtggccgccagaaatgccgtgtccacgtgccccctgccgctggagctcctcgctgggagcagcgcgtccgacgttctgagtcggagctttggattcccagcgcagggcgccagagggtacgcgccgctcgtggccgtgcagcgcggccccgcgggcttacctgggcgcggctccacctgccaggcctgaggggcgtgtccggggcgtgccttgggcgtggctctgcctgcctgggggagacccg

SEQ ID NO: 38395 - DNA, 384 bp, Mus musculus
  source 1..384: mol_type = other DNA
ggctggtagtcttgtattctataagagagcatgagcagcaatgtggaatcttggtcatgatgtttgtgcaggaatagaaaaattgaatgcaaatgtgagggaatatttatacaatatgtttccttttatggaacatttatttattatcagacttgaaaaagacctttacagtgaaaccctgtctgaatgctttgaggccagcctggtctacagagttagtccaggacagacagggaaagaaaatcaatataaggatgatttaattaattaaatggtttaataaccattcgtagttttagtgctacagccggctagagggcgctacggagcctcggcctccccgcaggttgccagctgcccgctctgaagcgcgcgtgcgtggag

SEQ ID NO: 38396 - DNA, 452 bp, Mus musculus
  source 1..452: mol_type = other DNA
actagtccccttgagggatcctgaaaagacattttcagtcttctcgggctctcttgcgcgcgcgcgtgctctctctctctctggtcagggagagaattgtgttcttcctcaaggagggtgaggtagccctctacttcatttattcattcattcattcattcattcattcatccatccatccatccattcattcattcatcatctgaaagttggggactttggcatcattttcctgagcttcaggaaaggaaatgcttcgggtcctgggtgtgtgtgcgcgcgcacacacacgccagagcgggtggaggggctcacctcaagctgacacctctcttctaactagatgggtggttcccacacagtgctcaggtggcgggaggggacactctcccttctctttgcgccagagcctgaaaaggcgggggaccagaagtagtcacgccctcggcacc

SEQ ID NO: 38397 - DNA, 147 bp, Mus musculus
  source 1..147: mol_type = other DNA
caggatccagcctcaaattcttggagcagtttgctgacaaacttgaacatggcagtctccactgggcaatgatgtgcagtaggcgctctgaggtccaaagtttgccctaagaaagggtttgaaagcactggctactttaacttccct

SEQ ID NO: 38398 - DNA, 214 bp, Mus musculus
  source 1..214: mol_type = other DNA
ctaggagtttctaagacctgattaggggtattgaggcctcatatcaggtcagaataccctaagcagatgttataccatcttggtaactagagccaatctctgagtgccttgggggcagatgctgcctcaaactgcctctctgggaaggtctctaaagcagctatagctaggagctttgctggctagaggtgcctcctggggcctgatgagggca

SEQ ID NO: 38399 - DNA, 667 bp, Mus musculus
  source 1..667: mol_type = other DNA
aattttaaaaagccagtgacacaattgttttttaaaaggaaattaaatgattagcactaaagtctgttgattaaggcattcgccttcataacattctgagattaaaaataaaaataaaactgagagagatcctaaattcacttaattcatataaatatatatatgggtgtgtatctattatatatcatatatcatatatatgatatataaatatatgttatgtatgatatataaatatatatggtatatatatagagagagatctccatgacagacatggacatggacatcggtctctgggtcgcctcccagcggctgtgaggagcaaggcggccaggtaaccagcgcacggcgccgggcgcgggagggccacgcgggcctcgtgggcgccggcctccgggtgcgggcgcggggcctccggcctcaccctgggcaccgcccccggtccggccgggtggctcggctcggctcctccggtccgcggccggccaggcggggcccgtcgcactcagagcggcagccgcctggggcgctcgggtcgggtcggcctcaccgacgcacagcacccgccaagccgccgcctcaggtcagagtcgccccgggccacgcggcccgccggagggacgcggaagaagagacctggggcgctgcgctgggcgcgcgcagc

SEQ ID NO: 38400 - DNA, 437 bp, Mus musculus
  source 1..437: mol_type = other DNA
gaggggactcgggatgaagtcacattctgacgcctaaccctgtctcgactagaggggatacggggacagagtctggaggggtctcggctgaggaccggtcaccctcctggagagccgagtgtgactgacagggtgactgtcctcgtgaggggcaccggcacggtgcggagggccacagtgcttccctgagagggtgcgcaggcaggcatgtgttggggaccgcgccagcagccaccggtcgccctgaggctctaggggtcggagacggaggcgatttggcccacggccccctgcccggggctcaccaggtgtgaggaaagcggggtcactgtcgccaaggccccgccccgccagtgcccctcttcaatctaagcagggggcgagcacagggcccggctcacgggagtaggcagccctcgtgctgggctgcttttata

SEQ ID NO: 38401 - DNA, 683 bp, Mus musculus
  source 1..683: mol_type = other DNA
aagtcactgaattatattaggtcacttatgtgactttttctgccaaaaaccagagttttcctgattacaactccacaattccttgccaacctagcagggtaattcaaccattggaatactactgcagttgctattgatagataaacaaatttaaaacacaaactttgatatataaaatttaaattttactagcctttattctgtcaactattcctttttatagaatttggatagcagtatagacttgttgaataaatcaccttagaaatgtattttgttacctgtgtgggtaacaaaatctaaaataagaatgtgtatatgtttgagtacaagaatattcttcataaatacttaagaaaaactttggccaaatacgtttatctggtgtttcataacttagagattaaggttttctattttaaaagccactggtgtgtattttactgcaattttaaaaagcaatcaatattgaacaatctctgctctggtaattccaactactgtacagttcacgcccctcacagaacagtgaatggtcactggcgagacaatgtagcaacgttttccttgtaatgtaagcattatgacacaccattttgtcacaactggctctcagtcaggacagtgccagccaattcaggatttgaaaactggattagcatattcataagctccataagcct

SEQ ID NO: 38402 - DNA, 205 bp, Mus musculus
  source 1..205: mol_type = other DNA
tgggctctgtcatgttcagaagacagcactcaagggttaatatagataccccatttaaagctgagctctcagcagtcactgctgagtgtagtcaccacagccctctgcagagaggagcttctctggccaggggcgacaggcagtgagcactggcaatgcaaccccgcttgcaactggttttgcggccgcactgcttgacggctgc

SEQ ID NO: 38403 - DNA, 376 bp, Mus musculus
  source 1..376: mol_type = other DNA
cggtctttaccgaagaaccgttctgcagaaaaaggggaaaacagcttcctgctggttgtgttttttttctggctgtcctggaactcactttgtagaccaggctgaggtgtgcaccatcatgcctggcaagacagggctttttaaagtctctgagactgcccctatgaagaaggactgtgtcatgcagcaggctgtttgtaactttccaactttcagagtcagtgcccgctgctctgctggctaggggagagaggggatgaactctgagcccaccccagtctgaaatcagatggctgtcaccagctgcaaacggcagcatcgccagctcaaataagaactagctctttaaatctacctagcttggtgtctaaagcct

SEQ ID NO: 38404 - DNA, 506 bp, Mus musculus
  source 1..506: mol_type = other DNA
ttcagaagagcagtcagtgctcttaacccaactgtagtttgcaaaaatccaaattatatatatgtacatactgcttcagtagttatgtacgtatgtatgtatgtatgcatgtatgtatgtatgtatgtatgtacacaaaaagatcagtactatttggtgtggatataatcaaatacattgtacacatgtatgaaattatccaaaaataaataaataaataaaaattcttatcataaaataaagataaatagtaaaattacttttatcatcattaacatcatcaatcatcatcatcatcatcttaaaagactgccttgaggtatactagacatgctcagacccttagcctcagaaagttgggatccggactactaaggagtagggaccttccggctcgcggcaccttagaatagcgcacgaagggtggcgcgcgcaggagtgacgcgactccgcggggggcggggcggggcggggaagggcggggcggggccgggctgggccacggc

SEQ ID NO: 38405 - DNA, 627 bp, Mus musculus
  source 1..627: mol_type = other DNA
ggagccctgtgccgtgtgtcaccaggcgcgtctggcccgctgagggcctcgcgggtggccggaccgcggctgcagcccaataccacgtggcggccgcaggaccgcgaggccacgcccccggaggcggggccacattccaggctcgagcgatagcgagcccaggagctcgcgcagaggcagtgagcccggcggcgccgcaggtcagggctagctcgcccgggatagcctgagagcgcaaggcttcttccgcaggccctcggacgggccagctggccgagctttggggcgcgtgccctgaggcgcggggcgctagtgcagcgatgcggggcctccccggggccccgtcccccgggctggggacacgccgaatgtgaccgcaaccaacgcgttgctgccgctgcacgacgggacccggcactgcccggctccctcaggtaggccacagggctgacggtgcgaccgtggggcgcagggtcggccaggccgctgtcatcctggtggcgggccgggcgcgggccgggtgtcatggccggcgagccagtttgtttctcggaaacgtgccagcgccactccggtcagagctgcccagtgactgtgttgagtggggggagcccggccttgcacctc

SEQ ID NO: 38406 - DNA, 369 bp, Mus musculus
  source 1..369: mol_type = other DNA
tgcgggtccccaaatggctactgagtctgaggccagcctcaaattaagagggaatctggcacattctctttgagctcgaggccagcctggtttacaaagtgagttccaggacagacagggctgttagacaaagaaaccaggtgaccatacttttagtttttggtcaacttggtgtactacagcgaacactccacggatgtcaacttcggagaggctggagccctgtgccgtgtgtcaccaggcgcgtctggcccgctgagggcctcgcgggtggccggaccgcggctgcagcccaataccacgtggcggccgcaggaccgcgaggccacgcccccggaggcggggccacattccaggctcgagcgatag

SEQ ID NO: 38407 - DNA, 335 bp, Mus musculus
  source 1..335: mol_type = other DNA
aaattggctgcccagttggacaaggcctgtaggacttgcttcacaggttgagcacatgctgagcttgagcaaatagtcggggccttcttttccaggaagctcatggccctggacagtggcagcaaactgggtgaggtaaccctccccaaggggaagcactgtatggctttcgaagcagggaacatgacagcatcttctaacttgtcagccgcctcctggagtttgtcacgacctggggaggtccaccatggttggtgtgtttgccaccatcagcccctcttgcaccagggtgagccagcgggggcccaggggcaacgtcatggttgccccgccct

SEQ ID NO: 38408 - DNA, 301 bp, Mus musculus
  source 1..301: mol_type = other DNA
atagagttttcacaatgatctgtaaaacaaaatagactattttcttagcaacaggctggcctcgaactcagaaacccgcctgcctctgcatcacttattaatacattaggtacataccataagtagagaagaattaggaagttttaggacatttgctcaaccaaccgcctaaggatcttcgaagagtctggcggaaataaatgcccaccagtcccaagagaaaaataaattttagttcactctaagatgttaatgtctactacagaacactagtccactagggtttcttagtgacccagag

SEQ ID NO: 38409 - DNA, 383 bp, Mus musculus
  source 1..383: mol_type = other DNA
gtttgaattaagacaaggtcttgatgtattatccaggctataagagggaggtgtttcctcaaatgggtccttttggaattgctctgcagtgcacacctgtctgaggtgagagagaaagcaagtccttccacagagagcccaggaggtcttccctggagggcagaggatctggcttgcagtgaccattcaagggtcaggcatggtgaccggagaatctctgtgagttggaggctagcatggtatccaaaatacatagtgagactttgttttgaaaaagaatgacttctcaggagctggagacttgactcagccttagagctcttgcgagaggtgctagactcagggtgtggctcagcgagagtggccggtggacacagaaacta

SEQ ID NO: 38410 - DNA, 353 bp, Mus musculus
  source 1..353: mol_type = other DNA
gggtgtggctaaacagaaattttaatacatttaagataaaactttcttaacaagaggcaggctctgagtttgaggctagcctggtctacaaagtgagtttcagggcagcaattactatacagagaaaccttaaaacaaagcaagaaagataaaggtttcttttattcctttgagtaactaaaaatagccagccaagctaggtagcagagatttgaagcgacacttcctttctaaagatctacgcgcgcgcgcgcgcacacacacacacactgttgccattgactggtgcccatgctgagcagagctgtccaggagagggggccaggcccgttacttcagtcctgctcgggaca

SEQ ID NO: 38411 - DNA, 266 bp, Mus musculus
  source 1..266: mol_type = other DNA
taagtactaattttgaaaatactcctcaaacttcccaatcaagagatgtcttgactgaccgtacatggaaatgtcctgtttcagacacagtagatctcagctcaggtgttagctttaaagtgaggctctatacggatcagagtcctcggtccaggccgcaggcccgttgccatggcaatgcgccggttcctgcgcaacgcacatgcgcaatgaaccgcgcccacctcctccgccgaagcgccgggcgcgtagggacgcaggaggcg

SEQ ID NO: 38412 - DNA, 425 bp, Mus musculus
  source 1..425: mol_type = other DNA
atttttgtaagtgtttaattaaatggttttgttttgtgtttaacacatttacagccactaacaccagcctggtctacaaagtgagttccaggacagccagggctatacagagaaaccctgtctcgaagaaacaggtgtaaggcctgagcctgagtctggattccacaccccatagttcacctattagtggagatttcaaaggtttattaaagataggctctccgctgggatacaagtggttgccaccaaaactgttctaggattctcagaacccagggtagagttatgatactttttttaaatgagaaaagtcagcttacaagaaaataggacatttttttttttcttcaggccgaagctcctgacttccgggaggtggaagggaagaaaggttctcccgcctccttcttgcaagtggaagcgct

SEQ ID NO: 38413 - DNA, 280 bp, Mus musculus
  source 1..280: mol_type = other DNA
gtagcattaaaaaaaaaaaagttttgttgtttgcttttgagcgcccggaggtttactacgtaaacactaccaacttagttaaatgcccagcccttaaaagtgtttgagcgcccaagttttgggacatgcaagcttcctctgtgacccacagggcgacagctctaggtgccacctcctctgaggccgctgctttggtccactggggcgcagctgcagctccaggccgagacgcctcctgcgtccctacgcgcccggcgcttcggcggaggaggtgggcgcg

SEQ ID NO: 38414 - DNA, 397 bp, Mus musculus
  source 1..397: mol_type = other DNA
catgtcagaaatgctggcctcacaagacaccaggcctagtgctggtcttcctcagactggcgtccccagcaggccagtaggatcatcttttagcctacagagttctgaagcctcagagccccagggaataacctggcagcctgctccctcatgcagggaccacgtcctgctgcacccagcaggccctccctggacaggaatgtgtctcctccccgggctgagtcttgctcaagctagaagcactccgaacagggtaatgtacacggcacacacagctcagatctgtcaagtgagccatttagggcccaaaggttccagtcgcagcctgaggccaccagactgccaattaggccccggtggtcgcggatgctgaatcagcctctggcttagggagaga

SEQ ID NO: 38415 - DNA, 397 bp, Mus musculus
  source 1..397: mol_type = other DNA
cttgcagtctaggctagccccaaacgcccccccagtgtgggacatatatgctgtagcatgttttacagcttcactgatgactcagagatcccttcccaagtcatgggtgggggggtggcagctggctggttctctcaccctagccagtaaaacagtgacttaggtctgtcccagtgtgtcttggaatgccaaggacactagccagcctggctcgctccggagaggagtagtctggatcagggtagacagattgtgagcaaccccccaactcacagtgttagatgtcagctcgtcaggtaggtaggacacagtgacactgcctccttaccccgtcctcaggtcccacagggtaaggtggatgctgtgttcagagtgagtcttaccctctaactgagct

SEQ ID NO: 38416 - DNA, 386 bp, Mus musculus
  source 1..386: mol_type = other DNA
gaagaggaatgactgctgcttgcaaactccttttacagagcagttcggggaggttagccaggggcctgatgtccctccaggagctggccaggaaccaggaaagaggcaggcaacttgcgactgcccgggtatcggccaccagtgacctcggaccgcggggcgtggcccagaggcgtggccgggggcgtggcccggggcgaaagggcgtgggccaagctgctggggcgggggctgtgggcgtggtctccacggagccgcccccgggctgagcgcctcgccagagtcgggccggggcgccggggccgggggcggcaggcgcgggcaggaagcgcctcgcggcccgggccccccccccgcctctcgccgcctccgagctcccggctccc

SEQ ID NO: 38417 - DNA, 334 bp, Mus musculus
  source 1..334: mol_type = other DNA
ctatgaccttaggaaaatgactccttgccccagggcctacctgttcctttgaaggtcaaaggagtccggtaccttggcctaagggcaaaagaggaatgactgctgcttgcaaactccttttacagagcagttcggggaggttagccaggggcctgatgtccctccaggagctggccaggaaccaggaaagaggcaggcaacttgcgactgcccgggtatcggccaccagtgacctcggaccgcggggcgtggcccagaggcgtggccgggggcgtggcccggggcgaaagggcgtgggccaagctgctggggcgggggctgtgggcgtggtctc

SEQ ID NO: 38418 - DNA, 424 bp, Mus musculus
  source 1..424: mol_type = other DNA
tactgctaatagggagtctattccaagatggccccttagtatccttctttatattgaaacttgtaaaggatcttaaaaaaatgttattttcattttctgtgggctttttattttagaaaataacataaccattatctgaaaaattatcttttaatcttctgattaaagattgcttaattataatactgtttggctataaggtaggcatgaagcctccatctctcagctgcatgcatttttgacagtctcgtgtgtttaaaattttttgagtttgcaaataagcttattaagcttactgatggagccttcgctctggagaacattaatgtgattggccaaggcttgaagcatctcttccagcaccacacgatgtgcagcagattcagacagatccagagccatcatgtgctgagattgatggtgt

SEQ ID NO: 38419 - DNA, 307 bp, Mus musculus
  source 1..307: mol_type = other DNA
tttaaaaggcttcctgaaactctcagaggccagcttaaggattgttaaattggaccattgacctaaagccagtccctagttggaattagcaggacagctggcctgagttactgaggctctgagggcacccctgaaatgcttcagcgtctgaactgggcggaggatgccgcaccacctgcagcgcctcgcgcccgcgtgggggggtgggcctgaggcgtggctacacctctgggtcgggtcacgcccccacggcgtgcgcggtcccgctcggcaccgccttgcgcatgcgctgtcggcgggaggcgga

SEQ ID NO: 38420 - DNA, 427 bp, Mus musculus
  source 1..427: mol_type = other DNA
tggatcaacactacagtgaaaattcttgcagatttttacctgagcaggttttcatttgtcttagttgcataccaaagagaaatctttaatgagataagatctaaggtgagcactcaccatataccaggcactatctgttttaacacctattatcgagacagagtttctctctgtgtagaccaggctggcctcgaactcagaaagtattgcttctttaatatgcagaagaaagcttatagaagaagctaagttcagtctgggcaagaccaatggacagccaggggagctttggatttcgatttctaccacattgagggtcactgtggccctgggctagctaacccatagctcccgatcagaggctgcgccccaggtcacgtgaggacaccatcacgtgacgtgaaccatgtccaccgcgctgggtggc

SEQ ID NO: 38421 - DNA, 310 bp, Mus musculus
  source 1..310: mol_type = other DNA
cctgcgcagtcacctcagtcccgaggagttgaaactgtggagactaggatctgagctcatgtttgacctataatcttcaaatagttgctcaaatgcaaaaggcatatagaaatgttcccattttacagatgacacaactgagtcgcatggacatccttttaagtgtcctaggccatgaggcgtgcgaccccggcgtccgagcaaccgccagccgcggaagactaggccccgcccctcgcgagcgcgctgatcggcgattggtgagcggtgtcaccgggaccggagcttcgcgggccagcgtaggccggcg

SEQ ID NO: 38422 - DNA, 577 bp, Mus musculus
  source 1..577: mol_type = other DNA
ctggttgtagctgctgcttcccacagcaaaaatctatcttctagatgaatgttgctttcatacaggaatggaacagtttgctctctaaacagcatagtatgcaaactgaccagcatatttgagtatgctgagtaacctgattagctaaacgaaaatcgtggagtactgcagggattgccttacaaatctctcatgaatttaaaaaaaaataccttgaatgtaccgtgtaataaagattattggacttaggaaaaagaatctttgggtccaaccaacagtactgtggtggggacaagtcacaacaccagtgtaagacaaagtagagtcaaatacgtcttgtctacatggacagaaatatcctcataaaaattatgaataccatatttacatatccataccatatacactcagagtctctctaggttagggagtgtagcgcaccggaaggtttacctttctctacactgagaaggtgaagccgggcggagtctaccagcagcctcacccagcgccagtctaccaggcggccgccgccgctaccacgcttttagcctgaggcgcggcggggcacgtgacc

SEQ ID NO: 38423 - DNA, 237 bp, Mus musculus
  source 1..237: mol_type = other DNA
gatactcatgttgctgcttggaagtagcatttgaagaaacataccactcttgttgtgtttctcatgcctttagaggtcctaaactacacagctgttgaattggaattggatactaccaattggtagtatccaattccaattggatagtaaagcatccttggcctcttataaactgccaatagcacttacaaagccatgtcactactgttgatgaccactcctagtatggttaaatgt

SEQ ID NO: 38424 - DNA, 216 bp, Mus musculus
  source 1..216: mol_type = other DNA
ttaatgctgcccattgttccactgtaaattaaggatgttatgcttggaaggtttactcattttgtgaagaaaacaccgtggagcacgctgtgtgctgcaactgaatgaggacacaggtagtttccagtgccacagtcctgggactggccagagacaggggcggagccagcgcctgaaggcagggccggtcgcagggtggagccagacccaagcgca

SEQ ID NO: 38425 - DNA, 405 bp, Mus musculus
  source 1..405: mol_type = other DNA
ccctgggaaggaagcatgtgtgcccactcacagtgtgagcgggagcattttcctctgataggagcaaagtcatgagttttattcagaggccaaacacaagtgatatcaagatacttttaaattcatttgctctgtttagacatctcagctatagatgtcatctaatgcacatccttccatagaagtggacggaatggatgcatcccaagatgaatactaattatgcctgtgcggaccataagtaacaccttaggctgaagttatttctctagactagatactcagtactaagaatgcaatttatctgtttaaggtccttggctctgccttctgagtggtaagaacaggtggggtgggccggggaccatagagggtctctccgcctcttcctagagcggccggcag

SEQ ID NO: 38426 - DNA, 363 bp, Mus musculus
  source 1..363: mol_type = other DNA
ctgagtttgaacccaggtcaggctcacatacagaaacactgttttaaaaacatatatgtgttggatcagaagttgcagctgctctgaccttagttcagtcatggatagatagatagatagatagatagatagatagatagatagatagatagatattggaaaggttgcaagtatgactcatgcttcccacgcaggtagaggcagtccaacagctgtgcaggcactaagctggctgagcctgcatgtacttgggcactgactttgcacatggtctgtgattcatctcagaacagttacccgttctaagggatacactccttccaacagatgctgtggggagcgagaggtctctgttttcagaaa

SEQ ID NO: 38427 - DNA, 418 bp, Mus musculus
  source 1..418: mol_type = other DNA
cacagctgctgtcatttgcccgagcatggcatctggcagaagccacatattttgcagccatcctgagtgctgagtcactgcgcctgcccactgatgcactgggaaacaggcatcaatgccattagcagtcactggcacatgcctggccaacaacgggcaagcaaatttctccttgaaagtatctgagatgttatgagagaagtcagacagactgtcaagatcatgatcataagtcttagcacaagggcgtgtcacaggatcacaggtcctggggtaatccatagtagaaaatactgtgctaagcccatgggggtcctatggaggtcccaggttccagcagtccccaggtcccaggaaccccctaagtcaggtgaggtggctgccccattccaggctggcagctgggccaagccccacc

SEQ ID NO: 38428 - DNA, 272 bp, Mus musculus
  source 1..272: mol_type = other DNA
cattggggtccagagactctaatgccgtctgttttcaaatacgtgagtacctacacttttagaagtcccacttcatactctaaaacggccctgtgactctaagagggaagctcccagcctatagcctggggctctgcctcagcgctggccctttttaaattcaccagctccacctggacaataatgcagaaacccaagtatctgcgttacccaggctccctggcctccgcctgtgtagaccgagggcccctggggacccactcgaagcgcct

SEQ ID NO: 38429 - DNA, 301 bp, Mus musculus
  source 1..301: mol_type = other DNA
tcatagtaaaatatgtaggtcggttgcccacctagggccggcctcagaggctgagcgtgtcactttctgtcacagttactgaggctcccagacacctctgggtttcggaaggtcagagttcaaatctaccagattcggaaaggaactcatttgctaagtggctaccagtggagatttagaaacacatttgttctatctctgctttggacccccagcaggtgtgaggtgagatctcaggcagctgcaccggagccggagccgaagccgctccaggctaggccagggctacgtgggggctgct

SEQ ID NO: 38430 - DNA, 199 bp, Mus musculus
  source 1..199: mol_type = other DNA
aatgggtctggactttcttctggaaaggcaggaaacactgaagtttaagaagttgtttccagcttccattaactgaacacggctgggaatccaagttattctaactgtgtaggtcagcttaagttcctggccgaaacagactgtgtctcagcacccagcggagccgcggaccggctgctccgcaggggatgcgcgtcag

SEQ ID NO: 38431 - DNA, 343 bp, Mus musculus
  source 1..343: mol_type = other DNA
ttggtcctgttgcttagcaggagcattctctgatgctacagagagcagcaggggactgtgacttacacctcactacagttttaaaagtttcccagtatgaataaagggtaaatgtttaagacagaaacattgctggccatggcagtgcatgcccataaggaaaaagaaatgctaccatcccttttgatctttcttggcaccagatatgaaagtttcacatggcaccctgtaagtgtgatgactaatcttagttatcaatgtaacttgatctagaatcaactaaagcccaggcattttcttgatcagattatttgaagcaggcagcaccttctggtggtgaccc

SEQ ID NO: 38432 - DNA, 544 bp, Mus musculus
  source 1..544: mol_type = other DNA
tttagctctttacaactgctaagatcttataacagaagtggcaagataaaccactttcttttttaaattgtttatttatctgtgtagccttggctattctgagatttgctgcatataccagtgcttgcctctgactcccagattttgggattaaagcctggctgcttatttttaaaattatatgtctatgtgtatatttgaatgtggtttgtgcacttaagtacccaagaaggccttgtagctgttacagacacaacacttctctagtatacaagataagtcattttctttaacaaatgtgatggattgggtagtttaaaataagagaaaaatcaattaaatgtattatgtatgtatttatgtatgtccctgctgcagtgcgggaggtgtctgagaaacactttcagctactttcccaaagctaagtgtttccaaagatgcttgaaacagttgtgtagagatgtcccttatgattctcagagtgccatgaggtgagccctctgtgacttcacagggtaaatccctgccttagtaatagcagagt

SEQ ID NO: 38433 - DNA, 437 bp, Mus musculus
  source 1..437: mol_type = other DNA
tttcctgagttcgaggccagcctggtctacagagtgagttccaggatggccagggctatatagagaaacttataaatgcagtcgatggacgtttaaggcatcttaaaagagattttattgaatggatgctcaatttctctaataactaattttagagtgttcaaatctcaacccttgtgtcattaacttcttcagttaggaagacaatgttagtgtctcccgggccccgcgtaggtgccctatggggtcctggagccgtcggacctgggctccccacaagtgagcgccctgggtcgtacaactagtcggggtagtacctaaactcggtgaaaaaaaacttattacacggaccagagagtaagcagccaccgcgtttctgccgcagctcggtcgcggcgcttcccacagtgcctcggggcgcgcgcgggctcctggga

SEQ ID NO: 38434 - DNA, 480 bp, Mus musculus
  source 1..480: mol_type = other DNA
gatatttgtaaaaagaagtctcaagtctgaggtttaagagttttgttcacaacgttcctggggaccatgtgggctacagatgtgtcacaggtttacctagagatccttttgggagggtaagtgaaacttagcgacatttaatactattgattccttagaatttcgttgacatagatttaatggcatttcactgatctattaagtcaaccttatgatccagtttttagttctttatatccaaatacattattgttgattcttaaaaatattctgtttttaagtttgtgtgtgtgtaggtttgtacacatgaacacattgtacatgaacacaggagataagagaggtgatgagattacccacactattcacttaaagtggttattaacagcttcagaatatttttaaggctgaagacaattttataatgattttttaccctctagcatcatcaacaagtgggggctcacaagagtgagccca

SEQ ID NO: 38435 - DNA, 238 bp, Mus musculus
  source 1..238: mol_type = other DNA
tgtaatttgccaataacagtgtttatagagcgaccatgcattgtagcctcggccggttcctacgcccgcctaggcgctggaagcttcaaaaataatcttctgagcatgcggtcatgtttgcgcctgcgccgtcactgtcctctccgggactcagaggcgggtccacagctctctagtcccgttctgggctcgtcagaatggcgccgcggctgccctgtgcccggatgtccgctgcctg

SEQ ID NO: 38436 - DNA, 690 bp, Mus musculus
  source 1..690: mol_type = other DNA
aggtggggttcggggaaggccagcccgcggtcacgccggctgctccccgggctactgtttccgggtgctcggggcgtgggccgagcggggagcggaccggggatcaggagggcttccggaggcgccgctggcgctcggcaggcgggagttgaggagcaggccggccgcgcggttgactcgccccgctgaggccgtcccgcgagcgcgcctgtgggggtttccaggtgagggccgccggcggggtgtgctggcgcctgggcccggcgggcgttgcggggccgaggtggccgccgcacagccatagccgtgcggaggctgcccacggagctggggaccgcgtggccggggtttggggtcgggagccgagagggctggagtccggtcggtagggccgggcctctgggctgaggtgtgcggagggcctgggagaccgcagccgcggcccacgcccgcccggagaaagcgcggctttcctcagagccgcccccccaccccgcccgcaggcgcggcttcctcggcgggatattgggggggggggtgagggtggagcgcttctcacccaccgcggcttacgctctgtcagcggccccccggcaggcccgggcggtggttgagcgggcgctcacgtggcccgaggcgcccggagtcaagactgggcgggacggctccgcccaccgcccacgcccggcc

SEQ ID NO: 38437 - DNA, 303 bp, Mus musculus
  source 1..303: mol_type = other DNA
aaaataaactttagtaacattttaaagtagttatgtataagagtgcttgcagtgttttcactacaaggtaccctcaggtgtcaagcctttgaaataatctaatcagttctcaatctaattgctttgaattaaaatacatttttataaggttcatttttatacatgtgggccaattacattggcaacaggtgcaggcctcggtgccgatattaatatatgggaagtttttagttttttaaagtttatgtttcaacatggaaaatatcctcgagcccatgtggcgggcccggcagggcacttcct

SEQ ID NO: 38438 - DNA, 252 bp, Mus musculus
  source 1..252: mol_type = other DNA
ggcaacaggtgcaggcctcggtgccgatattaatatatgggaagtttttagttttttaaagtttatgtttcaacatggaaaatatcctcgagcccatgtggcgggcccggcagggcacttccttactgccgctgtagatcacgcggctgcagcttcccggactccggaccccgcccgagcctcaggctccaggctccgaggcgcaggagcctcccatcccccgcccccgcccggaagctcccgcccgagccc

SEQ ID NO: 38439 - DNA, 421 bp, Mus musculus
  source 1..421: mol_type = other DNA
taaaaagaaagtaactgttgaatcctcaagtctccctcacttgaggatcatccaaaggtccatggtaggatggtttgggccagcatcggacaaagcaggctatcctgtccctggcaatgtccctccctctgtgggaggcaggcaaaagtctacctggactgggacagtgtcctattccacctgaagtaggttcaaataaaaacagtgcgactgccagtctctattatagcacaagccaggaggctgaacccctgcggccttagagagagagagatcagagataacttctgagtcagctttcgtaacaagtactcgtaagacctaggtagactgaggacttgaaggagccaggacccagcactggctctaccctgggtgttggtgtgtggcccagggcggagcccctgggtttaaagagcag

SEQ ID NO: 38440 - DNA, 238 bp, Mus musculus
  source 1..238: mol_type = other DNA
cagctgagagcagctttgactcctagaacctggcaccgctgccatctaaactctaagagctggagctgcagcagctgctgtaacagctgtgtggagcgagcgcccgcccggcaggggaaggctgcttgggcaccccaaggaggagtctgggacccttcctggcccagggtcttgttcacgaggctcgccagccccgccccgggcgggaggtggctgggtcacgggagggaagtccccg

SEQ ID NO: 38441 - DNA, 292 bp, Mus musculus
  source 1..292: mol_type = other DNA
atgtgcaggggatgcagattccctggccttctgctgcaccagagacatccccgtgtcttggtcagggacaggttcttggcgagccaggcctggaacaagatcttgaattttaacaagatcaggtgctcttgccacatgtgacatgcaagtgaagacttcagaagtgcaccatcctggcctccaggtgtccgtgagaccacccaaactatactgagacccattagtgggaagttagagcatgtcccttaccctcagaggcaaaactccagtggttttccagagacaaactctg

SEQ ID NO: 38442 - DNA, 425 bp, Mus musculus
  source 1..425: mol_type = other DNA
gcacttaaccatttgctaaaggactgtggctggtagacagcaggccccacgtcgtcctaaagaagcagctgtccaagggagacactttgttccatcttctgcccagatgagtgtgtgcttttctgaaaaggctagacttcacacacacgcaaatggaattatttattttaagtaaaaacacgtaaggacctcttcagtgttcagtaccgatcttccctgagcagaaggcatgacgattagccacatgcgttgaatcaactgtcatctgtggagctttctgtgcagggcacaggacagaaggcctggccctggagggcgggactgggcggagcccggctgcggtgggctgggtctggccctggagggcggagtctggctgtggagggcggggcctgaccgcggaggcgggcgcgccacagcaaccc

SEQ ID NO: 38443 - DNA, 182 bp, Mus musculus
  source 1..182: mol_type = other DNA
tagttgcaagccatgcttcaaaaagcaaggctcccatatcaagggtaaatatatttaagaggtgttggagggtccagagactggagggacatcattctagactctgggagtataggtgaccagtcggcccagacgccgaatcttctgtgttgctctttctgggcggcgggaaaggactaaca

SEQ ID NO: 38444 - DNA, 250 bp, Mus musculus
  source 1..250: mol_type = other DNA
aggcagaataagatctcagctggcctggtcccaagtcagcctatgttatctgcagagtgtgctcgtgcatactgaaggagaggagcagctgagcccctccccagactcaggttccaggacctgtagttgcaagccatgcttcaaaaagcaaggctcccatatcaagggtaaatatatttaagaggtgttggagggtccagagactggagggacatcattctagactctgggagtataggtgaccagtcgg

SEQ ID NO: 38445 - DNA, 436 bp, Mus musculus
  source 1..436: mol_type = other DNA
cgcgagccccgtcggcctcgacctcccgacaggctgctcccaggctgcgtctgggctggaaggcctcggccgccggagaggtgggtcactcgagcagggagggctcctgcccagctcggctgcgtgttggagctgctcgtttgttttcgttttaagttaaaaggacacttcagcctaagctacctagaatagtaggcactagtcacgtgcgactaagtttaaaattaatttaaacttaagatagttttcagtttccgaaccacgtgtagttcacaaggcttctgtactgagaacactgtcattacaattatttgaagatactggctaaacattttctacctccattcaatgaacaaatacatcagcacttaagtaaattaaattactgccctcctgtgtatttaggtaagacttagcaagacctacagcttggaga

SEQ ID NO: 38446 - DNA, 310 bp, Mus musculus
  source 1..310: mol_type = other DNA
gaacccatgttcttggctcattgaggtgagatgagctcagttttgagtccagcattccccaggactggactgagtcctggggtttctgaagaaggagcagcaccctgccctcagcccgtcggtcctggcacaagagggcagcagagcggtgaggacagctctggcagcggtgagcgggccagggcccagcgccgcgcggatcctctgaagccaggtcgcgctggctgagagcccgactctcagagtggctgggactgaaagtgcgcttgcgcaacccacttccggttccctccgacgggtacaagcagaa

SEQ ID NO: 38447 - DNA, 263 bp, Mus musculus
  source 1..263: mol_type = other DNA
ctctctctctctctctctgtgtgtgtgtgtgtgtgatacgtatcattatacccacaggtaacaaagacattctttttacgctcgagcaatgctgcagtctttttgagtgtagaaaatatattaatttgatccccagtccccagcctttacttcttacataaagtaaccctggtttcatacagagtgagacaggagctgactccacgtggagaccccactacgagcaccgttgggcgcaccgccccttcctctgcgcatgcgca

SEQ ID NO: 38448 - DNA, 445 bp, Mus musculus
  source 1..445: mol_type = other DNA
ccatatatgctatatgtatacatttatgtgtaaaaattgtaactttcgtatgaagaatgtaatatttccatatttctaaggttagtacagtgcggactaaagttatgcaaggacatatacaagttgttttacatattcaggacatcgttctataagaatggcattctgcacaactttaaaatatatactgtacatttacatagttttgaaaggtagtaatcctaagacaaaattgcaagctttggatgtaaacttcaagtattaggcgcatgggcagagccctcgcctgtcagctgagtcgtcttgcgggggacaccgagccccgcggcatcccccgatttgaggggttctccgattgcggcgggcgggcgggcgagcgagcacgcgatcctgtggggcaggcgggtctgagccaccgcccgggtgacgtggcacccactcgcct

SEQ ID NO: 38449 - DNA, 287 bp, Mus musculus
  source 1..287: mol_type = other DNA
tccactgggactccccatctgaggggtgttacgtttctattaaaattggaacatgaaaagttcctggctttagattgacaaaatttattaacaatttaaaacgtcaaggtgaacacttacactggaaaactgcttactaagtattactttttccaggtcctccagaaggttctgcgcccatctgccaggcgccctcaatgcccgcagtcctggagtactgggtctgggttccacgctgctgagcgccccgggttgcggagcctggccgtgcgcacgcgtgctgggca

SEQ ID NO: 38450 - DNA, 491 bp, Mus musculus
  source 1..491: mol_type = other DNA
ctggagatttgcagctgacacttagccgtgcttaaagccacagtggtaggcccttctagaatgggctcaccagccccatctagagggtcgtctgtgacacgtgtttcatagctccccgccagggtggcatctcagacatctgggcaccactgctgccttgcccacaaggcttgtaatcgatcaacagaatcacggctcattccaggccttgctagcgtggcgcccccccccacccccccagggacgcgcggtggccgcggggcctcgggagggtggaggtcgcagccggctcgttccccgccgtcgcgaagccagggggttctcgcgtggcggcgccgctccactcgggctccggtccccgccgcgcgccgccgccacatctggaagcgttcagctcgtctgctccggcgcgccgggcgggcgggcgggcgggcgggcgcgggcaggggcgggcgcgggcgcggcggggctggagggaggagggaggccgc

SEQ ID NO: 38451 - DNA, 440 bp, Mus musculus
  source 1..440: mol_type = other DNA
atttcttgaaagaaacaggaaaatcttagttttgaaaaagcctgtccagaatctatctgaatagctttcagttaaactgatgggtggtggcacaccccagtagtcctagcacttctgtcccacattaatttaaaaaatatacccaaagattgttttttttttttttaatttagtaccaagggacgcctggcttcagctgctcagacaatcagaattgtcatggacaatcataaccttgcaggcctctgaggcactcaggaaatccctcacggatatccaaagaatcttgattggtcatcgaagagccaaagaagatcctgttgccaaggcgacgatcctccgcgagaggacccggccatcgattagcgaagcctagcccgggtcccggaaggtcgccccgccgcgctcgctcgctcgctcggcggtcgattgagggggct

SEQ ID NO: 38452 - DNA, 286 bp, Mus musculus
  source 1..286: mol_type = other DNA
cacataggtgactgatggatgcctgctcaagctggccagactgtgaacttccaggggagacagcgaagctctgtctcgcaggtgctgagcagtatgtgcgcacagctgcacctccaaggcaggcagacctcctgtgcatgccagtcatgtttggctggccccaaaactccaggcctgggctctgagcactcagtggggtggggcggctatcagttggcctctttggagcagaagggcacactggcccagctgctcagagctggaatcagggcaatcctgctgaggt

SEQ ID NO: 38453 - DNA, 426 bp, Mus musculus
  source 1..426: mol_type = other DNA
gagtttttaaggcagggatagatcactatgcacagagatcaccgtgcttcagagaggatggggactctctcagctctgctggattgcagtcctgaatcaaggcgctacaagctagatcatctgctgaacaggcaggatgtaaaggaatgaggcctgtttcaggctgcaggctgggaagtccagctatgccagtgaatggcaatgagaggtcttagagtgtgcacagaggtggccaagggaccctcagcgttcctcttgtaagaggaactcagcctttaaggagggtctgacacaggagacagaccggtctaagatccaagacagtcagcggggctgtgtggtcctgccttctagacagccagagatggcgcgtaccgtactcctgctgccacagagcttcggaggccggtgcgcgcgcccgccatc

SEQ ID NO: 38454 - DNA, 477 bp, Mus musculus
  source 1..477: mol_type = other DNA
tctgtatagccaaggctggcctggctcgcgatgtacaccaggctgatctggtaagatcttggctatgagaccgattgtggtctaaaggcaaggtctaaactaaagcttccgaatttactttgacgtgtagaaaccatttttttatcattcaatgcttaagtcgtttgcaatcgaccattgaaaataattttgaatatcttctagaagtggtagggagttgactaaacgctttcggaatcctgaaaccttcataagacgacgcctagcattatgttggccgctgttctcagatctcttcagaaatcgtcgaggaagctgggtgagcgttccgaggcactctgcccgcactgtttacattgtggaccagcgcggctgcgcacggggtgtggtcttactggctcggcccgcctcgtgcgatgcgcgtcacggctacgcgcgggcgcggaggcggggagacgcggcggcggcggcggcggc

SEQ ID NO: 38455 - DNA, 317 bp, Mus musculus
  source 1..317: mol_type = other DNA
actgctgtgagcagactacaggcgttgaataaaagcccttgaattgctttgggatggaacccatggtctcacaccagctgagacgtagatacccattcttactaagtgtgtttgcatcttactccaagattgcagcagcctggccgacaggctgcctgctgcttctaccaggcggcggtgctgggcacagcaggccttcctggaaagtcctgtgagggtggacacataatgtcagatccatcagccctgttggagttcccatccaggttcccttctctgccaagagaaggttcaaggtctaacaggaaagttagact

SEQ ID NO: 38456 - DNA, 543 bp, Mus musculus
  source 1..543: mol_type = other DNA
gtatgtgtgtcagcacatacagatgtattggacaacttccagaaatttctagaacagcccgtgggccatcgggcgctctttagggctgcacggtgcggcgaggccgccagccatcccggcgcgcatggggttaagcctccgcggccgagggcagagcccggtttccaaggaaacggctccaccagttccggcggcgcgggcgcgtaccactgagcgggggagccggcgcggaggacgcggagggcgcagcgcggctggccggctcctagggcgcaggcccgatcacgccggtgagttcgccgcgtcccgccgcccgcggccgtgaatcggacccgcgcgacttaggcgggggaggagcggcgcgcggcggccccagagtccccccgcgcagcggccgagtgcgagcagcccggggctgggcagtttgaaccgcggacggcagacaaaggcagcaggaagccgtccgcagcccgagcgcccggcccgggcctcgccggcgcgcgcagcagcgacgcggccgggcgcgggatgccgcagggcgcg

SEQ ID NO: 38457 - DNA, 651 bp, Mus musculus
  source 1..651: mol_type = other DNA
ggccgtccagtccctgggctatgtacaggctgcccatggccagatgcatgatgccggtcgcaggttcaggctgcgcaggctgcccatgtgcgacaggtgcagaaggcccgcgtccgagatgccgccgcagaagctgaggttgaggagccggaggcccgtcagccctcgcgtgagctgctccaggcccaggcagccctcggcagcgctgcgcgtcatgccggccaggtgcccgatgcccacatccaggtggcgacagctgcggagattaaggctcttgaggcgctgcagcccccgttggtgatgttgctgcagccccccagctccagcacctccaggcccttgaggtactgggctatgcagttgagagcgcgcagcgagccgatctcctgcacgaacgcgtggcccaggctcacgtagctgaggctgcggcggaggctgaggatctgcacgcggcggatgccccgggcctgcaggctggggaacagcgacgggttcgcccggcgcaggtgcagcttggcctccacgccccgccacaccgacttgtggtaggcggcgtcccgccaggccgtgcacacctgcgccgcgcgacccttgtctcggacgtccaagtagccgaagatcatggccagcagctcggggaacaggcacgag

SEQ ID NO: 38458 - DNA, 540 bp, Mus musculus
  source 1..540: mol_type = other DNA
ctttctttccaattaagggatcatttgatgaaaatatcccttaacccagaagggggattctgttcgagggaatttctttagcagggtgacaaactcacaacctgcagaatggattcagatcatgtgctcgtggtgggcaccatgtaaccaggatctggatccagctggaggctaaattctgccctgagctaaggccaaacactggcctctagtgacctttgcaggctactaacggtagggtccttttatgtgcctcagcatcagagtcccagtctgagacctgcctgtgtgggtccggaccggggggtcgcttcgcagctccggacacgcgtccgcgctccacgtccacgcgcggttgcagtgctctgtccccgcagagtctgcgggacagtgggcgcggaggggaggcaggtgcgggggccggtccggctccggggaggagccctccggagctgggcgtcgcgcgcggccgcgggctgcggggggcggggaggcggcgcggggcggggcggggcgcaggcggcggagccccgggatcgc

SEQ ID NO: 38459 - DNA, 500 bp, Mus musculus
  source 1..500: mol_type = other DNA
tagcttatctacatttttaagattagtaactattttttttggcttgctcttgacaaaaggcaaaggttgaataaggtagcagctgctttgccttgcaaaaaaagccacctactgaggcgagggtcttttgcgacattctcttggacaaagggtgtccaggcagccgtggctctggggcgactccaggtttgggaaaggccactccactcctggggcttccagcagtccacgtcctacggcaagcaggaggagacaaacgccgcccctcctcgtatcgcggcccgggctcccggtggacgctcggccgtggggcggcgctacgtgtggcgcaaccctgcctcggcacccagttaccttcgcggcctcggagcgccgcacttgtcgatcctggcgcgcggtcccgtggagcggcgtagcggggcgcttcccagtgggacgagggaaagcccagcggcccgggagagcgggaggcggggcgagggcgccgcgcgggcgactgg

SEQ ID NO: 38460 - DNA, 576 bp, Mus musculus
  source 1..576: mol_type = other DNA
atagaatgaagttgtctaaacaccaacatcttcgggattctcttccctcagcgaatttctgctgcagtagcccctcctaaccaggttcaaaataataagatcatcttaaacattttacatgtgggcccttcgctcccgcccaatccgggagctccgcagggcgcggccgccggtgggctcgggtgcgctggggcggggtccgccctcccgacctccccatcctcctccccacccccggcccaaaaaggagggggaggggtccccaagcctcacctacagctccgcccctccccaggggcgctctgccctgcccagccagggccgggagcgccgagccgggtaggaaacgctcggcgcctgcgacctctgggcagatcgaggttccgcctgacgagcgagccgctgccgacgcggccgccttactctcctcagggccgccgctgctgctgcggttgctgctactgcttcccggacagcctgccgccgacactaccacagccgccgccgccgccgccaccgccacagcacgaccggcgcccgcgacgtcaccagtcgcccgcgcggcgccctcgcccc

SEQ ID NO: 38461 - DNA, 417 bp, Mus musculus
  source 1..417: mol_type = other DNA
ttacaggacgaaatttggtactcttgcatcggccagtagcacagtttcaaatgttcttcgagacagagtttctctaagtaatgaattccagaaacagaattctgagtttctaagtcacatatatggccatataatgaattggttaaattgcaacaatcagtatataaactacacattgagagatctgaaaacatcataaactgagatcagtctgtgtttaacttggagtgaatagttccggttgaatttcaggggaaatcccactgtggctccgggcgtcacccagccgggtcacaccagggaccctcgcagggcgcctacggaaaccgaagcggcttgctgcggctgcgggaaggctgatcgccgcgggcggtgagataacagcccaagagcgctcaggatgctgagtcctccgcc

SEQ ID NO: 38462 - DNA, 575 bp, Mus musculus
  source 1..575: mol_type = other DNA
tgcaattgattcctaaataatgattttgatagacggcctcgagctcggcacgcctgcgcgagagccccccgagcgcgatgtgggcggggccgccccgggcggcggggggcggggtccaagcgggctagcggagagttttcccgggcggacgcgctcctcctctcctcctggccagagaagtagcggagcccgggccccgcggtgagcggccctcccctcccctccctccctcctctgcccccggcgccggccagagaggggaagaggttcgccaggcccggggcgggcggggaggcctcggggacggggggggccgctcctcaggcttcgaggcttcgaggcttcggccctcagcatctagtgatgggcgccctctgagactggtcccctctccggggcgcgtgctgcctgaggcggcggccgagcgagcgagcgagcgagcgagcgaccgggaacccgggccgcggccctccttcccctgcgcggcccccactcctgtgccccgggctgccaccgcccggcgtcggggctcgtccctcgcgcgctgtgcctccgccctcagggcctatcccgcc

SEQ ID NO: 38463 - DNA, 316 bp, Mus musculus
  source 1..316: mol_type = other DNA
gaaaataatttttactcaaatatagaggcaaaagtcaactatgtcctctcaagtttgtaatcaaagattaaagatgtagaatatcttcgaaccgttaagtttccggcaaagcaaagattgcagccaaagtacttgtcaacagtgatggtatgtgcacgctctccattaaagacgaacaacatcatttttctgcaattgattcctaaataatgattttgatagacggcctcgagctcggcacgcctgcgcgagagccccccgagcgcgatgtgggcggggccgccccgggcggcggggggcggggtccaagcgggct

SEQ ID NO: 38464 - DNA, 356 bp, Mus musculus
  source 1..356: mol_type = other DNA
ggtgacagaaagctgactgacacatatatagctgtgggatctaaaacaggtctaggaacaagaaaaaaaaaaaaaagtctgactgtcctagctctcttttataagtgctctcaaagctctgttgcatcctacctggtcctctctccctctcttaggaacggagggtacaaacatgtcttgggattgggctgaagccatcccacgattggtgacctgacaccctactctgagcaactagtgttaactgcctcaaagcaggcaggcgccagtcacctcagatggcctgcacatgcggggcagacactcgcacacgtgtgcacctccccccaggggttgaggccgatgaatagctggtc

SEQ ID NO: 38465 - DNA, 307 bp, Mus musculus
  source 1..307: mol_type = other DNA
accaggctggcctcgaactcagaaatctgaggcctgcctctgcctcccgagtgctgggattaaaggcatgtgccaccacgcccggcaggacagctatttctgccctagaacttgctgtgtagacccagcggcttatgcctgagtcccaaagctaaactggatacatagtgagtcctggtttggggaattccgtaggttgtagaacgtttcttaggctcacttgaaacaaactacatttatgcaacaggtttcattaaaggaaaatagttaagtgagtttagactgagttgtcaaaacgagttctgca

SEQ ID NO: 38466 - DNA, 337 bp, Mus musculus
  source 1..337: mol_type = other DNA
ttctgggaaggaaaaggtcccagagacacccagtcgtcaggccaaagcctgacaatctctctctctctctctctcacacacacacacacacaacggggaggaggaggaccgtcccgccgccccagcacgccccccgtccccgccctcaggcgacgctaccttggggaaagggccggctcaaagaccgggcactcgggcggtggcacgaactccgccgcgtagccccccgggcccacggacggcttggctgacggccaccaaagccctctcacgtccccgcactggggccgcagccaggagcgccagccgctcctctcaggggcaggacgctcccgga

SEQ ID NO: 38467 - DNA, 238 bp, Mus musculus
  source 1..238: mol_type = other DNA
aactcgataagtgtaccatgtggccttatgggacatctaccttcatcaccataaaggtatatggatgtggaggcttcaacctttaccagccaagtttcataccaaactgaaatgggttggttacaaagcaagcgttttcaggccacagctagactagcaaggccaggccctctatctcggccaagagttcgtcacttgtccaaacctagagaggggcccaccttgcgttcgtaggcat

SEQ ID NO: 38468 - DNA, 287 bp, Mus musculus
  source 1..287: mol_type = other DNA
taccagccaagtttcataccaaactgaaatgggttggttacaaagcaagcgttttcaggccacagctagactagcaaggccaggccctctatctcggccaagagttcgtcacttgtccaaacctagagaggggcccaccttgcgttcgtaggcattacacattcctccgcgcgccggaagcgcgcgttccaccttcgcctctcctcgagagaggtcgcggcgccttgaggggccgcgcacccggggtggacgacgttaacttccgggagcgtcctgcccctgagagg

SEQ ID NO: 38469 - DNA, 292 bp, Mus musculus
  source 1..292: mol_type = other DNA
ttttcattacaagaagtgttagtcttggagaaatttgaattcccagccaaactgcactcgacacatctctgttacagaatgccgtgtttgctttagtatgattcaacgctgaaaaaaaaatatagtttcgtttccgaaattagactaaaatctgggctcctatcttacttagctgagcaacatccaagagcacacctgggccaaggcggaggcggggccagaggaaggacagcccccacccaagccccgccccgagcggcccgccctcgggggagccggaagcgggacagag

SEQ ID NO: 38470 - DNA, 328 bp, Mus musculus
  source 1..328: mol_type = other DNA
actctgatttatgatcttagtcctcaaagctgagaagttctttctgcagcatgtcaggatgacctactgagtaaaagattttaaagagtaacattctttatgaggctcagaggatttaggtctcaaaacaatggtctttcccagcacgggtggccgcgagtcgatactcgctgaccccaagtctcctctcggggaagcgagggacccagagcctcgccattcagtgtcaggaacgcgctctccgctccgaactcgcaacccgagcccgagctccacggtcggactacaacccccgagaggccctgcgcgggcggccgctgattggttg

SEQ ID NO: 38471 - DNA, 499 bp, Mus musculus
  source 1..499: mol_type = other DNA
cagggcggctgcacgtgtccgttccctggggtgggggaaattgctcttcccgctgaagactcagataggctaataatagtaataataataaaaataaaaagaaagcgcgtcgtttccccggcactcccggagcgagtccgggccctttaaaaggactgcacggcagagcgcggctcccacccgcccggccgcccgcgggctgcgcgcgggcccctccgcgtcacgggcggcccctccccgggcgcggctcgcccgctccccctcccccgccctcggtgcagctgtccgcgcaggggtgggggcggggttgttgttgtggtgcgcgccggccccgccccctcctcgtgggcggcccctcctcccaggggggcggccgcacggccgcggcgggacggggcgagcgcgcggcccccgccggctgcccgagcagcggccgcttgagcgagtcggaccgccgccccccgcccggccgcgcctccgcttgagctcacgccgagcg

SEQ ID NO: 38472 - DNA, 283 bp, Mus musculus
  source 1..283: mol_type = other DNA
tttggcctggacagacatcagtgcacaggttaagtctgacctggtatctgtcagacagtaacctacgttatgaacaaacatcacctagaacctggtttaaatgtaggttctgctttgatgatgcatcacatataagatgtcctctcatctaaagttttcaaactgtggccctaatatcaaaagtaggatagtccctcagctgctgcaacattttagttaacaagggttttcatgatgcactcaagattgaaagccagccagcttcctagctgactttgcaggg

SEQ ID NO: 38473 - DNA, 274 bp, Mus musculus
  source 1..274: mol_type = other DNA
tgggattaaaggcatgcctcccacgcaatgcttttatttacataaattatgtaaactgtttatatttattttatgtgaatacactgtcgttggagttcaaaccttttgtttgtaaacaaacaaacaactcaactgttttactaaaacaaccgctgaagaagtataaataattctgattaaagtctgatggaatcccttgtccttgccaagcagtcacgatgcgcatgcgcctgggaaagggcgggcagaggctacggccccttggtcaccaagc

SEQ ID NO: 38474 - DNA, 345 bp, Mus musculus
  source 1..345: mol_type = other DNA
tttatcttgcctagatatcttgacctttttacacgatctaaaaagctcttgctgagataatcgggttataagtaaatctttaagatttattcattattatatgtaaccacattgtcactgtcttcagacacaccagaaaagagcagtcagtgctcttaaccatgcttttgtagagtcaagtaaaaaatggattactactataagactctttttatcctgcagggtgagcaggcgtgcggtggtgtctacctcatcacccttcacgcctgcgcaaactgaccagcaggtgtcagtgacagccgctggcttccggcttggcattacgcccgggccccgcccctacgc

SEQ ID NO: 38475 - DNA, 341 bp, Mus musculus
  source 1..341: mol_type = other DNA
aaagtacttcatatgcgtaagaactgtacaattccattgttatgcttcctggagctcacctggcagtcagcctagggaaatcacgcgtggagctgggaagctggtccactccacacacaaacacacaccaaccatgtgatttttttttttttttttttttagtttctctgctcaggaacaactagctagcagtttgagattatctgctagcctccttttaaaaattcccagcatctctgatagggccgattctgacagggtcagaggtcgggatcaagtatgacaccccatcctcacgagggcaggtcgcccaggctttggggactctgggcggggctccc

SEQ ID NO: 38476 - DNA, 445 bp, Mus musculus
  source 1..445: mol_type = other DNA
ccagcaggccagtgaagaagaatcaactaaaacttcattaaactctaggagcgctagactctaatctatctatctatctatctatctatctatctatctatctatctatctatctatctatcctggtgttagaaagtctacccactttcaaccacacttctttatgaataagagattaataatctcttgaaagatctaacagtctcatctgatccactcaaagtcaaatagattcaatatagattcaattctctgaagttttttgtctcatctggatgagatcaggaagaaaattctagctttgtttttgtggaagggctaccatatggtccatgagcaggagtgagctgcgggagcactgagcacccgcacccccgttggggtcggtggtccagcctgaagggccgcagcccccgccctcccatgtgctggccccgccccggcg

SEQ ID NO: 38477 - DNA, 455 bp, Mus musculus
  source 1..455: mol_type = other DNA
agtgaataagaattcactgaaaaaatttttctctcttcaggagttcaaagtcacccttaactattaatatacagttcaaagccagccttccatatttaatgagactcttgccttttaaaaaggaaagaataaaaagaaataaaattgttttccagaataattatattgttaaggtgttaatctttcagggtttagaatttagagatattttatcactttttggggatcaaagcctgcgttcacgatcaaaattaacattgtaacaagaacaacttaatttgataagcattttctaagacaactttgtatctttgatcctagggctcaaagaggttactccccggagctcgcccgcggctggcacccgctgggagttcgctcacttgaggctcaaccgcaccagggtaggcgcctgctcctggttaccgtggcaaccgcgaggagccctagacagc

SEQ ID NO: 38478 - DNA, 384 bp, Mus musculus
  source 1..384: mol_type = other DNA
cttaagctagcttggtttacaaaggctaggtgagcccctatcctcacccaactagatggagggtgaagactattctgagagtatttaaaatagtgctgaatccctgattgcagcagatgcagatgcagatgcagaggcaagcagaagcgtgggctctgaccacgggctggtctgatccgtgtcttcccaccacaccagccagtgttggcagcctgactgcaaggctcaggagctcagtggcagctccgggcatgagaagcagccggaggggaggtgccattgtgacctacccaggtccctcccctccgcgggcactgtgatgctgcagggcaactgctggcccagcatctcgcagtgtgtcacaaccgcggaggcggccgtatc

SEQ ID NO: 38479 - DNA, 458 bp, Mus musculus
  source 1..458: mol_type = other DNA
gacatatttgtatatcttacgttgaactacaatagcaaaacagaatatagactcttcgattaagatacatctgtaaagagctagcaagcatttcatgtatgtacaccaaacccggctcggcttagactgataacctctttgataaaataaaaacattttatcctatagaattggggtagaggcacaaaagaacattgtgcagataaacttatcttcagtgtttaaggataagcctggcaattaacagagaatcgctgtctccttaccccctggggacagcctcagcaagggagttatctgctgctggccaatgagttaccgggccaggtccggcttgtcgtgtcctggtctgtaggggcgcgtacaaccgctccgcccgcccgcccggctttcctttggatctaggggaaaacgaaagtggccaggcgtgcagaaggcttggccggcagtgccagggc

SEQ ID NO: 38480 - DNA, 390 bp, Mus musculus
  source 1..390: mol_type = other DNA
ttccagaagctgtgtgctctgctcaaaactccaagctgtggtgcttggcccctgtgctgcctggcaccaaagcttgtccctgcactgcctcgcagcaggtggtgaactcatccctggaagaaacatttcattgattgcagctaaaaaaaaagttctcgaacattgtcaaagaattcatgttctgagtttaactcagaaaccttttcaacattgtgtgtgcacatacgtgcgtgtgtctcttctcacagttcagtaatctaatgttctagaatgccatttggaacccgataaggttggtatacttttaaattaatcctaatagcactactactgactgcttcccaggagtccttgagttgtgggagacagagtccccaggccagggaatca

SEQ ID NO: 38481 - DNA, 250 bp, Mus musculus
  source 1..250: mol_type = other DNA
aggcgtgctgggcagaatctgagtatctggatcccagaaccccacctttccaaagcgggaaactgaggctcagagtcttccttggctgggagaccatgatctctggagacttctctaggaaaatcccaaggagaaggctctcgagctttgcggtggctcccatcccactgctctggtaagaggggtagggctgcctgaggcagctgagtgcccactgggctcaggaccactgggtgagaattcctcttcc

SEQ ID NO: 38482 - DNA, 293 bp, Mus musculus
  source 1..293: mol_type = other DNA
ctctggagacttctctaggaaaatcccaaggagaaggctctcgagctttgcggtggctcccatcccactgctctggtaagaggggtagggctgcctgaggcagctgagtgcccactgggctcaggaccactgggtgagaattcctcttccaggtcagagcatgcgcagagcgcgcagtctggttatcatagcctctgtacccctgagtctggagagctgaggctcagggcccagcaggggagctgcggtcccctgaggccacagggaggaactggccccgaggaggcgggcca

SEQ ID NO: 38483 - DNA, 356 bp, Mus musculus
  source 1..356: mol_type = other DNA
tcccaaatcttttagaaatatatttatctcagagagggcacatcctctccccctgaagccggccaggcagtccagttacatctgctacaaatgtgtaaggagacctaggtccactcctgcagagcctctcaggagacagctgtgctaggctcctgtctgcaagcatagcagagtatcaccaataagtgtcagggattggctctcttacaggtgtccattcttgaattttgatagaacacacggatgccatgtgtgttctgctcaggttagatgctctaaccaagcctggtcctggctgcacagctcctgttgatatacacaaaggtgatgtgaatcaggctgccctggggggatcc

SEQ ID NO: 38484 - DNA, 286 bp, Mus musculus
  source 1..286: mol_type = other DNA
aagaagcattccggagatccccagactggtgactcctacatcaaaattaattattaagtctttgatccactgcttataagctacaagaagccaacaaatccatcctggtagtttttattatatcatctcctagtccagtatttactacagaaggttctggaagcgaacctcagcagagaggtccaaagagccatgagatctcatttcccgcgggaagcagggttcgcccagaggtgggaggtgggccctggcgccggtccgcccctcagtgcggcctgtgtggcgg

SEQ ID NO: 38485 - DNA, 312 bp, Mus musculus
  source 1..312: mol_type = other DNA
tttaaaagccgtccatagatggatgcatgaatcaatgaaattgcctccaggttttcaccttaaactggaatgagtgtatcctgggatttagaaattcgattataggttcttacaaaacagacttcattttcagtcaatctaatgtataacaatactcctttcatggaagggactttgcgtgaaagacagacagaccttctgtggctcagaacttgctggcacacttgaattattcaaacctctccagtgtaacaggaaagtgcttaatccttctgggaattccggtcaaaaaacctcagctttgttcagaga

SEQ ID NO: 38486 - DNA, 484 bp, Mus musculus
  source 1..484: mol_type = other DNA
tacttgacaggcttcaagaataatgtagtgtcactgaccctgaaattctctaggccttgttaaattttatcttgtctggagaatcctcattatcaggatagtatactgcagacaactgagttaatgactctgatttattgtagtccttaattagttactgaataggttaagctccttgctgctatctgggatcttggagtagctaattcagaatacaatcttaaaaagcatttactataaggtaatgcttaatagaggggaaacgccaaactccaggagggaatttccgtggaacaagcctccaggaggagagcttccttgaaactcttttcctcatgagaaagcttccagacttgtcaagctgacgtttactagtaattaagactgagaaagtcttctctagttcagagtgttcaagccaccactgaacacagtgacattaactctgttaacagagaacaaatattctattttgctattgaaa

SEQ ID NO: 38487 - DNA, 294 bp, Mus musculus
  source 1..294: mol_type = other DNA
attgatattaaagatacaacttttaaagctaagttaaaatacaaaacccccttgtatatttgttgtctttgtttcttataaatatcaaacatgacttgaagcacaaaaatgtacaataaatcttagaactagcaatagtctactattgattaatttggggttcacagcctttacctccttagttttggggctaaaggggtgcacccattcctgagaaagtcttctctagttcctgagactgtcattaacagagaacaaatattctattttgttatttaaacactgataaataag

SEQ ID NO: 38488 - DNA, 301 bp, Mus musculus
  source 1..301: mol_type = other DNA
aaattcacagagatatgcctgtatttacctccttaggtttggggctaaaggtcttagcaaaaataaaaatccctatgatctagactagaaattctaatgtggtccctcaacaattgaagcaaacagctttagtgggacattgatgttataacaaagaattaggtacagacttgtaatacaatgtagatgtcacattaattaagactgagaaagtcttcattaacagagaacaaatattctattttgctatttaaacaccttgggcagtgcgatttgttttcagagaggactcataaataag

SEQ ID NO: 38489 - DNA, 480 bp, Mus musculus
  source 1..480: mol_type = other DNA
aaatttgatattaaattcctttaaacggtgtcagtatttgtgtcacgtgtgactgttagtacacagagcaagcagctatcggcagggcaggaggctgtgctgtggagaacctgtggtggattcccccaaagtctttcaggtacctttgtcagttcctgggcaatgtaacttccagccacagtctctgactcctgcttggtgggagtgaatgctaccctgtctatgactccctcttctcccagggggaagccagggtagggagtcctgttcacttcactctctcctttacttttaccagaaataaactgctgtttagaatttgtttctctttgtaaatttgcatagaaagataaagcaacgcaagacagtgaatgttatgtcacactcacaaaatacatggaagtctgtctcttgcctgtctcttgtagatgcaaaggctgcagcgggcctctaaagaacaatttgattataaatttctat

SEQ ID NO: 38490 - DNA, 230 bp, Mus musculus
  source 1..230: mol_type = other DNA
ttttaaaaagcggtgttagcagtttaagcacagttctacctctgacatgaggccccagtatgcttatctagcaagatgccatatggaaacaactcccaggagcgacactctttgtagttccacagggatgaggagcgcccgcccagagtccctggaggcggaggcgaactaggctgctgaccaaggttctgcggtcacacgccgcggagtctagtgggaggagcagttgc

SEQ ID NO: 38491 - DNA, 224 bp, Mus musculus
  source 1..224: mol_type = other DNA
acccgtttaacaggttcctagaagcctcctaaagatcttactgcagctgtctttgctaacaatgctctggtttaaaaaaaaaaaaagtaggtgttctaagagctctgagagactgagaataattaaatcctgttaaatttgcgtgtgacttaaagagaaagacttaagtattattcaaagcaagttgcttcaggttccagaagctgcagaaaataccttctttt

SEQ ID NO: 38492 - DNA, 321 bp, Mus musculus
  source 1..321: mol_type = other DNA
aggtgttctaagagctctgagagactgagaataattaaatcctgttaaatttgcgtgtgacttaaagagaaagacttaagtattattcaaagcaagttgcttcaggttccagaagctgcagaaaataccttcttttttagacgtctgctttcagacggcgagccgggcctagagcgcggaggccggggagcagcgtcgccatggcaacgggcgcgcgcgagggcggggcgggccggaggaggggtcggctgccccggaagcacctccccgcagccccctccccgccggcccgcggccccccggcctcggccccccaccctc

SEQ ID NO: 38493 - DNA, 441 bp, Mus musculus
  source 1..441: mol_type = other DNA
agacttaagtattattcaaagcaagttgcttcaggttccagaagctgcagaaaataccttcttttttagacgtctgctttcagacggcgagccgggcctagagcgcggaggccggggagcagcgtcgccatggcaacgggcgcgcgcgagggcggggcgggccggaggaggggtcggctgccccggaagcacctccccgcagccccctccccgccggcccgcggccccccggcctcggccccccaccctcgcggcggggcaggaagtgacaggcccgcgcgagcccccggcctggcggagccgcggcgcggccagcacccggacggcgggaggggcggggagcggcggccgcgccgggcacctcccaccgcgcctgggcccccgcccctccaggaaggggaggaggcggcgcgccgccgccgaggccgagcgacccccccc

SEQ ID NO: 38494 - DNA, 559 bp, Mus musculus
  source 1..559: mol_type = other DNA
gctcctaaaatatatgatgtttatcgcagacaggacgctagggagggagggtggctggcccccttagcgggcagcgcgagtaccctggccagacctcgcggccggaggctcggaggggtcggcgggcatcaaagcgctcacggccgcagcccaaggaggggctgcgcggggcgggagggcgcacaacggcagggcctactctcgcggtgcgttttccaggctccgagaggacggtttggagcggcgaggcgcgcgtccttggagcgcccgcgtgcctccccttcgcgagcgcgcgccccgcggctacccctccggcggcggggcggtctcctcgcaggtgtcaggagtcggccgagcgcgctcgccgccccgccccccgcccgccgccgccccccgcccgcgagtgcggcgctcgggggcggggccgcgcgggtcctcggctcgggcggggggcgcgcggcgcctcggtctgggggacgcggggcggcctcgccggcgtcgtggtgagagagagagagcggggtcgcgcgcgcgcgcggtcgagcgacaggcgagtgag

SEQ ID NO: 38495 - DNA, 232 bp, Mus musculus
  source 1..232: mol_type = other DNA
taaaaaggaagattcttaatcttttaaacacgaagttgtattagtagaaacttgtaaattaggtgctaaataaaatatccagggacttggtagtgtaagcaggctagcctgggctatatgaccagctccaggccagcgagccctgggtttaatccccagagtttgcagtcagcctgtccaacctgggccggccctggcccttcgagggagcagtgagctccctctcttattc

SEQ ID NO: 38496 - DNA, 295 bp, Mus musculus
  source 1..295: mol_type = other DNA
ttcttccagtgatcagggttcaatcggtatttttaatgaggaaaaagagttcttttttaaaaaaaaaatactttttgacacacacacacacaaattaaaataaatcactttttggtgcaaagtctttctagctatcttataatgtcattttaaaaaaagaaaaatatattagcaagatgcatttaaggccactttaagtcactatgactgctatcattcttgttatcacaattttaaaattaggaagcatgctaggtgtgatacctgcattatcatgataccaatgtgaaaagct

SEQ ID NO: 38497 - DNA, 410 bp, Mus musculus
  source 1..410: mol_type = other DNA
gcattcaacagttgataaccagtctggctcttgagctggctggatacagctcgatctataatatttaagcactatataatataatagagtgtttaaacacattctggtagctaatttcctcaataaaacgaggatgaagttccagtgtcatagggacattgtgaaacacaacttaagcaatgaggttacagattgagtaatatttttccgcttggtcacctacaaggaactcactcaaacacaatgcaattgggcttatgcattcttgtgagtgtctcacacattgaagcttaactttggaaaagagaagaaagaggaagcagccttttgcaaacaaaagggcatttctgacaacttcttttatattttaggtgaccccaagtccttgttcaattactaaagaacaaaca

SEQ ID NO: 38498 - DNA, 464 bp, Mus musculus
  source 1..464: mol_type = other DNA
gggagggccccagcccaatgtgggtggtgccacccttgagcaggtggtcctggggtcagtaagcagcatccctccatggctgctgccttacagtaacagaattggagagaatgatctcaaatctgagggatgattagcctgaacttgacccgaaaagtatagcatattaacattgtttaaaattggagattagatttagtcatacggctaaccaaggtcctgcttttgcatcttaagctgcccctcctttttccaatagacatatggagcaaagggcaaatgggagaacccataatattctcaccgggtcacactgagacttcttagactcttacttgagcctgaaggaaggagaaagctttctaaatatagatgtcacctaagagaactttagagtttaatgtcatcaatgttctactccggggaggacaaatacgtgtccctgcaggtggctgtgggcacac

SEQ ID NO: 38499 - DNA, 274 bp, Mus musculus
  source 1..274: mol_type = other DNA
gaagccattttgaataaaactttcattttgaacagaggtcagtgttgaactgacatcctgtctggcaagttgagacatgattgctaggcagttcctagggaagacttctatccctagatcctaatttttatttttagatttttacaccctaacatttggataccaaacgctaacctactttctggtggagcctctctaggacccaagaaagctgctccgagggtcagaggaggaaaaaacgggccaaatgcctgcagctctagctgttcgagtt

SEQ ID NO: 38500 - DNA, 338 bp, Mus musculus
  source 1..338: mol_type = other DNA
aagctagcttcaaacttgctatatgattgaagttggtattatatttttattcttctatctctgcttcctgagtacagggataagaaattagttcctgcaagacaccatttctggaaggaaggaactcatccaatctcattgggaaaacttgggccagcaaggtgccccagtgggttcttgttataataaattattgcatatcacagacacactaatgtctgtgtgttgaatgagtgtgtcgcctctgaggggctgagaagagagcaattcacacttgattagctcccaggctcctgaattgagcagaggaggctagaccgctgagctgcgcaccccag

SEQ ID NO: 38501 - DNA, 422 bp, Mus musculus
  source 1..422: mol_type = other DNA
aagctttataatccagtttgaggccaacctgggctgttacatacgttagatattattaaatgtattgtctatgaaatgatccacaattatatattcttgaattccatgcatatatatatatatatcataaaatatccatctatttaagtataacaaatacatctttatttagtagcatttaaagtgaaatagttttcaaagatttaagatgaagcagtcaaaacattctaattaaaaaataaaattcctgatatttcaggaaaccaaaagagattctagataaaatctgcaatctttgttgagacagggcttctctgtatagtcctgactggaactcactctgtagaccaggctggcctcgaactcagatcccggtgggctggtctagaactcagaccgagagcggggaatccccccgcctc

SEQ ID NO: 38502 - DNA, 339 bp, Mus musculus
  source 1..339: mol_type = other DNA
cactcacttctgtgagcacaaccaaatttgaaatacgataaatttcttctcagcctaggttttacagtgagaacttgtctcaaaacaaaacagaaggcctctacattaatttaaacactgtagacaagcctggtctacatactgaactaaggtagcccgagtcttaagcaggacacaggctctttcttcagacttgcgttaaaaagccgcacttgtctgactctttcatgtctgtagaaagaagggatgtctttagatcagaggatgccccctaagtacaatgtccatggtggaccctgcaggtgggattagagcaggacctaccctttaaatctatcg

SEQ ID NO: 38503 - DNA, 362 bp, Mus musculus
  source 1..362: mol_type = other DNA
gcctgcctcctgcaggccatcgcagtacttgtctcaagtttgtctttcgagagacacacaatccctaggtaatagtatgttagcaaacgtttcttatatgagaatcagttacccgggtggggagagctatgcactcagcaaaaatctgtaagttgaattagatatttgttgtgtttctagatgctgttaatctcaaaacagagctgccttcttggagcctcaagtcaagaaggctgccttctttccctccttcaaggcgagtacacccagcctataatgaaaatttcaactaaaagcagcactgactctactctgcgtttagtttttttctgtgaaacaaaaagggttgaaggctccacccc

SEQ ID NO: 38504 - DNA, 644 bp, Mus musculus
  source 1..644: mol_type = other DNA
tagtctatagaaatgtcacttgactttagcacaaaggtaaaaaaaaatgacattttataagggaaatgaataatcatgcaccattttaaaaagcaagagtatcatatcttcacaggctatgcttccagaaactagggccttgcacaagtttgcagctgacctccaggataagagtaaactttaacttcacgagcgtggacgctggcatcgccagtgcccgggacggagggtcggcgacccgtgggctgcggggctccgcgctcctccttaacccgcgccgggaggcggcggccgcggcggcgggagggggaggggcgcggagcgcggcgccgaggccggggaggagccggggcctgcagcggagctgagccgagcccgagccgagccccgacgcgctccgtccgcctgccggctcctggctgccccgaccggtcggagcctcagaggtggcagcgcggggagccccacgctccgggaagcgcggcggacgggggacgtgacccgggaggcgctgccgcccggcagcgggtgacgggagcccggaccgcggcctccgggaccctgctgtccaggccggccggccaggcgggcgggagccggagtgcgaggaccccaccctcgggacaccctgtgccgggacctgc

SEQ ID NO: 38505 - DNA, 325 bp, Mus musculus
  source 1..325: mol_type = other DNA
aaaccaacaacaacaacaacaattttttttttttaaaaactttttagattgtttttgatagccatggctggccttagctcaggctggctcaaactcatggcagtcttcgtgctaccagaacaaacttgtgtcactatagctaacttgttagaatttttattttatttttacagagatagaaattaagataccgaaacctctagccaggcagcctggccgacaggaggttcactcctgggtaccagacttgggtaccatgtgcaggttctcgaggatctcacaggtcagttctgcccaggccagtggcacgaggcccacctggaga

SEQ ID NO: 38506 - DNA, 308 bp, Mus musculus
  source 1..308: mol_type = other DNA
aattaaaagtaggttgcaaaaaatttataaatgtgttatttgttctttaacaagtacatatgctgacctggggattaaccacaagacctaggacttgagataataactttctcaagttggtcttaaaatcactctgtagagggcacaaatatatgtacacacaatcaatagatcttttaaataccccaagaaatctagcatcctttcttggcctctgtgacaaccatatatgggctcaatcagtagctaaggtgacaggttcctgcaggaacatgatcctgagttccctttacccagggaaaagtcag

SEQ ID NO: 38507 - DNA, 408 bp, Mus musculus
  source 1..408: mol_type = other DNA
aattattattggttatatgtaagtacactgtagctgtcttcaaacatggaagagcagtcaggtgctcttacttgttgaactggctttgctaggcaaagcagaccaagaaggtgccatctaaaacatttctaagttacactgttgtaagcttacatttatttgcacaaagaacatatttgtatagagctgtttagtactcatcgtgatgtgtagccagctgggctactcatgctgagggatgctagatagcatttaagagaaagcagagattcattttgtccaacctttctggttaccgtttgaaggtaggtaaaagagaactgaattcttatttttaatttttcaggcgcaggttaacctcgaagcgacgcgaaggaagccgtcggcgtctcagcccgcccccacccg

SEQ ID NO: 38508 - DNA, 341 bp, Mus musculus
  source 1..341: mol_type = other DNA
tgtgcgcatccatgcttcacagccaagcttgtgtgttgactccgtaggtaagaccttgagcttctcatgttcctgagaagatatagcggggcagtgtgtgtgtgtgcgcgcacactctaaaaagtagatgacagccaggcacagtctgccagcctccagagtctcccagggaatctggagaaacaaagtccagagccatcccagggctttggcttggtttttaggagctcctgcagactttggaaatctgccctgtcttacagtggtgcacttcttctccctataggcagctttgccacagtgtccacagcctctgtggcccagagagttccaccctgtgg

SEQ ID NO: 38509 - DNA, 196 bp, Mus musculus
  source 1..196: mol_type = other DNA
acacagtgtagttagctcacaatgtgaatttttcccctagggagatagcggcaattttagaacgtcccggaaccgatttttctctttgcttactaaataattcaatttcccatgcttggggcacttctcattttggctccaaatcaggctgagattccgagactaaaccgcacaaaccaggcatgagactgtccct

SEQ ID NO: 38510 - DNA, 167 bp, Mus musculus
  source 1..167: mol_type = other DNA
cccatgcttggggcacttctcattttggctccaaatcaggctgagattccgagactaaaccgcacaaaccaggcatgagactgtccctttctgtccgtctcaggaagacccactggcagctcttcaatctcaactccgtagggagtttgacggccaggggagtgctg

SEQ ID NO: 38511 - DNA, 432 bp, Mus musculus
  source 1..432: mol_type = other DNA
gggttctgctcttggattccgccttgctaaattcttatatgagtgtaacttttaagtatctggagaatctccagttgtcaggagaacttgcttttaatattcaatgtagccttactgaagatttctatcttggagagattcgttgagccactggcttaattagttactgaataggtaactataacataatttaatcttaaaaggtatttataataaaatattaaaagagagcatatggataaactccaggaggtgagcttccttgaaactctcttggcttttaggcttcacagtctgtcaagctgactcgactgaagaatgtgatatcacaatttgtttcttcagtcaaaatcaatcccattttgtctggttttccttaaaaaaaaggaaaactggtttgcatatttcatacaattgtgtgacatgacaacc

SEQ ID NO: 38512 - DNA, 347 bp, Mus musculus
  source 1..347: mol_type = other DNA
acttcagtccttcttgaaagttggaacaaaacccacctggggatccatcccatatgtggataccaagaagtgcttgttgtcaggctctgctagagcctggcaaatactggactgactatatttgaaatctacataaataaaatatccaattaaaaaaggaaaaaataagaaatacggtttaaagatacttttttttttttgaagtgaagaaacttctgtattaaagtgatgaaaataatcttgtcagaggtttcaggacaattttatcctctttcccacatccttaaatcattagaggaaagtgcataatgtgatttccatttgcacagcattggctatctctgtgg

SEQ ID NO: 38513 - DNA, 311 bp, Mus musculus
  source 1..311: mol_type = other DNA
tttttactcatagatgtagattagaaatgccaaattttggaaataaaacgaaacctgtggctttacattaaaatgggggtaatagtgttaacccatggttttcagcatgtttggatataaaagcaaaagaaaaccagtaaatacaaaattcctattcccaacagtgcagtgaagggcatgtccagtagcaaagtgagtggagagtccccatcacacaatggtgagggctaatggtccactacaatgtggtatcaaaattttcctgttcagtcaaaatcatgtctggttttccagaaaccacatttgcatat

SEQ ID NO: 38514 - DNA, 184 bp, Mus musculus
  source 1..184: mol_type = other DNA
attcctattcccaacagtgcagtgaagggcatgtccagtagcaaagtgagtggagagtccccatcacacaatggtgagggctaatggtccactacaatgtggtatcaaaattttcctgttcagtcaaaatcatgtctggttttccagaaaccacatttgcatataactgtgcaatatgacaact

SEQ ID NO: 38515 - DNA, 476 bp, Mus musculus
  source 1..476: mol_type = other DNA
tagagtctccacacctacagttgagagggaactgtagagtggcaatctgaatacacaggtcaaatctgaatacacaggtcatcaatgtgattttcttagttaaaatggagttagtaccttcaaaatgtagtcacaataatcataattaaaatacctaatactcacatgtcttgctttaatgtatgtatgtatgtatgtatgtatgtatgtatgtatgtatgtatgtatgcatgcacatgtgtacacatgtgtgaaggggtgaggactacttattgcttcctagaatcctgtttgatatatgagttaagcctcatatcaactgaataatccacataatgtattgtaaagaacatttaatgtaaatacagtttatagacaaatttattttgaggtggagatacttccacattaggaactgagaaagtaatgagaacattcttgacagagtttttaggaacaaatttaggtatgtttct

SEQ ID NO: 38516 - DNA, 354 bp, Mus musculus
  source 1..354: mol_type = other DNA
tgctgtacaatagactttaagaaacatttctaagctgctgggtatttatgataattatagatgcatggtatatatttattctcatgaatatatgggggcagtcataaggactgaagtgtttatggcttcaacgaataaagtttggaggaacacaaatgtccattctttaatagtgtctatcatacaacccttacctgagaaaatgttgaaatctaatcagtggcttaaggatttcatgtctttacatgcaccatgtgcacaaaatctatgttaaaagctttgttcattgttattttggacatagaaatcttacatgacacacttctggaagtttgtgttctagtacattagagg

SEQ ID NO: 38517 - DNA, 379 bp, Mus musculus
  source 1..379: mol_type = other DNA
caaatatataaatggcaacttgacactatattaatttctatcagtcgctgctgcagactgggctgaaagattgaagcagagtctggaacagatccccatcgttctgagacatgaaagactgaccacgtggttatcctgccactctcaagttctgagatttccagggttgcctcaactctttaaaatagtttttcatattgtggtgacccctgagtgtaaaattacttagttgctactttgtaacagtaatttggatactgtgatgaatagtactgtaaataaatatctgctcttcaagatatctgaccaccaaagtggttgagacccacaggttgagaaccagtgacttagcgtgatattcataggctcagttatggac

SEQ ID NO: 38518 - DNA, 406 bp, Mus musculus
  source 1..406: mol_type = other DNA
agggaaatttccaatctgtggaaataatagaaagtttccttgaggcaaaaaaaatattgtgtagcacataggaaatctgggattaccaagtcatatgtgtatactagtgtgacttttacagacattaaagagtctttagaaaacttgtaggaagttaaggaaaagttctgttgaattaaaaaatagaattaaagtacctaatgagtccttagacattgtgtgtcagtttaagaaactgaactgactcacaaaggcatgtgtggctgatctataaaaactttcattgccaacttgtaaatatgcacattataatttagaggctctcagcctcctgtctgtgtggtactgaggcacatagtgccaaaggaaaaaaataacacagatatatttttccactaaactcaat

SEQ ID NO: 38519 - DNA, 408 bp, Mus musculus
  source 1..408: mol_type = other DNA
aacagacccctgggtcccagacatggccctcaggccaaacagagtctctgagtcgggagtgctatgtactaccccaggcattgtctgcccctaggcctgtgctgcatctaagctagatccgtgttcaggctccatggagctggactggtgatcacaatgcccaggccttcctgagccgctcccacccctgaacccgtggtccgaggtagggtttgagactaacgcaggtgtgacacagaagccacttaagagcagattaatcaatcaattaattaaactattcaatcaagagcaacatatgaataaatacactccctagtttttggaaatctatgaaaactgttaaactgactctccctttaagattggctcctccctccttctagagcctttccagtcttaagagtg

SEQ ID NO: 38520 - DNA, 438 bp, Mus musculus
  source 1..438: mol_type = other DNA
taataattatgtataattatgtataatttacttttcaaagcaccagtggtatgataattcttttgaacttagaagggagacaccactctcatcttccttcttgaggtaatatatatatatatatatacctcaaatatatatttaattctcatatatatgtttgattctcaaatttaagtgttaatttcttaagactaatgctaggattgagagatctaatgagttagctctctcttatgaatatagatgttccaatgtaataagatgcagttcctgaatatatagtaagctatgtgcttgattagtctggccaggcaacttattttaggtcatctaagcaattctcaagttgaaagatgtcaatttctggcctcatatgtgcatacacatgcatacacatgcacacacctctgaagctatgatgtcatagctatggtc

SEQ ID NO: 38521 - DNA, 222 bp, Mus musculus
  source 1..222: mol_type = other DNA
gggggagcccttggaggaggagagaggagtgactcacagcactctccccatctcaaaatgcgttggaccctattttagtcaccagaaagaggcaggcccctgtctccttggaggctggaggccgaagcaggtcatagatttgacctccgaaatctcccgggctcagggtaggtcgttgagctgggccgcagcgccgccgtcccggcccctttaaggccgagt

SEQ ID NO: 38522 - DNA, 204 bp, Mus musculus
  source 1..204: mol_type = other DNA
acccagggtttggaggatattgaaatcattgtgtaccatgtctgcagctgcctgatgtggggcagcagatgcagatgaactgcccttccaggagcgtgtgtggaaagggctgccgggagtcctcgcccacagggccctgagttggaactgaaatgctagaatttcctactcgaggttttgcctccaggtttccagaaagcaggg

SEQ ID NO: 38523 - DNA, 273 bp, Mus musculus
  source 1..273: mol_type = other DNA
ctaatacgaattatccctccacaaaacaaagtgccataaattttttggtggagacaggaacaaattttttaaacaggacaccatgtccttgtggacagcacagctgtcccgggtacctggtttcccttctaagaagaaagagtcactctcccaccatatgtccaggaaaagatgttatctaagttcactgggaagccttgctttagtgtccatctagcctgtggcggtctggcccaaacaaccaaaactaaactgggaactcagatttttttt

SEQ ID NO: 38524 - DNA, 388 bp, Mus musculus
  source 1..388: mol_type = other DNA
cccttctttttttaaaaaaagatttattatttattttatgtatatgagtgaattgaactcaagagtatttactattatatgtaagtacactgtagctgtctttagacacaccagaaccaccatccggaagagcagtcagtgctcttaaccggaaggagaggaaagaaagactcgggggttcttgagtcacacacttcaagttctccgggtatccttgtgatcccagccctctggaggcggggcaggcatgtggagcccagtctagtctgcagagtgagttctaggacagcctaaaaatacaaccaagatctaggtgtgaggtcatgtgtacatatgtgtacatgtgcacatactctgctagtctgtcagcaggtggcagacctgcacc

SEQ ID NO: 38525 - DNA, 281 bp, Mus musculus
  source 1..281: mol_type = other DNA
cagcctgatattctctatgtagtccaggctagactcagattctcagaaaccgtctaggtgtaagatgagttgcatttatgtattaattaaagaaagaattgcattggacctagtcttcctttgattcatgaatcacacagagggttttaagaagatctctgaaacacaccctttggctgtaagagagaattaggcaatctcaaaattccccattcccccagattttggatgcaaaaagaggagcttcctgcaaaggccactccctctggagctgcaggggc

SEQ ID NO: 38526 - DNA, 278 bp, Mus musculus
  source 1..278: mol_type = other DNA
ctaatacgaattaacgtttcctctatgccataaaatttttggtggacataggagcaaaatttttaaacaggacacaatgtccttgtggacagcacagctgtctcgggaacctggtttcccttctaagaagaaagagtcactctccgaaaagatgtttctccagccccttggcttccaggcctttaagtgtctccgcagtctgcgatgcctgaaactgggaactcaagatttttttttcctttatgcaaatgcttcattccctgaaacatttctccagg

SEQ ID NO: 38527 - DNA, 600 bp, Mus musculus
  source 1..600: mol_type = other DNA
tacactgtcactttccctggggtcaatcagtgggaagtgaactgcatgcttgaactttcatcaggaacatacattatgttaattaaagcggcaagtgttaagtaggctctttttaatataaataggcagatcctaatttcggagagaaggtccgttttactatagaaagggcagtcccagtacaaagggtgttcttgggcccctgggctcccccagagccttcaggaaagggctgggaatgcaggaccctcgctctccccccctcccccgcccccgaggagacaccgttagggggcgctcgtggggtgacaagcgccggcgaccgagagtaacctcgcggtctggtgacgcccccgcccaatgggaaggcagcgagcaagccggccggacacccgtccgacccactcctgcccggagccgtccggaccgagttgtactgtcacgcctcgcgctcccgcctgctccaatagcagctgggtcgcgatcgcaagccccgccccgccccgccggcccggcccgtctcggccccgcccccggctggctcgaccaataatcgggtgggtctagaggctctgggcgggcccgcagccaatgcgcacg

SEQ ID NO: 38528 - DNA, 530 bp, Mus musculus
  source 1..530: mol_type = other DNA
cgaccacaaggactcttcccagtcgagaacagcagccgtcaagggtgaagggtcagggcctgttcgctctgcccgccatccaagtgaaggccttcggccaggatcgtgtcctgctgcacgcctgaccgccttccactgcggagagaggggtgggagtcagggaccgtgggtctggggaccgcaacgtccggccagcggaaggaggctgctcaccggtgaacacggattcgcggacgccgtaggccaccgccccggcccccagcagcagcttcagcgccgtgcccatgccccgaggcccggcgggcaggcgtccagcctgatcctcccgaaggcggcggcggcggcaccagcggtcaggagggggtgcccgccagcctctgccccgctccagcgcgggagaaagggcaccggaagtgcgcctccctccggacccgcccccctccgcccgggcggccctgaactccgcgcacaggaatggcgcatccggaagtcccgcctcttggtgggggggaatggtgtgccctcccgga

SEQ ID NO: 38529 - DNA, 605 bp, Mus musculus
  source 1..605: mol_type = other DNA
cgaccacaaggactcttcccagtcgagaacagcagccgtcaagggtgaagggtcagggcctgttcgctctgcccgccatccaagtgaaggccttcggccaggatcgtgtcctgctgcacgcctgaccgccttccactgcggagagaggggtgggagtcagggaccgtgggtctggggaccgcaacgtccggccagcggaaggaggctgctcaccggtgaacacggattcgcggacgccgtaggccaccgccccggcccccagcagcagcttcagcgccgtgcccatgccccgaggcccggcgggcaggcgtccagcctgatcctcccgaaggcggcggcggcggcaccagcggtcaggagggggtgcccgccagcctctgccccgctccagcgcgggagaaagggcaccggaagtgcgcctccctccggacccgcccccctccgcccgggcggccctgaactccgcgcacaggaatggcgcatccggaagtcccgcctcttggtgggggggaatggtgtgccctcccggagaggcttccgtacgggctcgccattttcgagcgccctctttcaaaatggcagctacgtgaagttctaacttaagg

SEQ ID NO: 38530 - DNA, 344 bp, Mus musculus
  source 1..344: mol_type = other DNA
ttaggttcctcttcatgaggtggctcatggccacatgccaaaggctttttaaataatctgatccagacatacttcagattatacatcacagactcgccggagctgctacgaggttggaagccaccactggccgcagacatcagtccttaagttagaacttcacgtagctgccattttgaaagagggcgctcgaaaatggcgagcccgtacggaagcctctccgggagggcacaccattcccccccaccaagaggcgggacttccggatgcgccattcctgtgcgcggagttcagggccgcccgggcggaggggggcgggtccggagggaggcgcacttccggtg

SEQ ID NO: 38531 - DNA, 408 bp, Mus musculus
  source 1..408: mol_type = other DNA
tgtcccttgctaaggaagataccaatataaattgggattcatcctggggtttacatacacaaggaaggctgagcgctcctacccctccctgctgacagtcagggtataggaaggaggagctgtgatgatagcatctcctttgaaggagctttgggtcctcaagcagaattcaaaagtcattggctttgaaactatttaggtctcttcttggcctgtgacctgtaactcacaggaggaatgacattgtagcaatgagtctggcaggctgcgacactccattaaatgacggtgccactgcacacgatcattattagactgtgcctaagaataattctgaggcagactgtgggaagtgggccctcccccaccctgccataaggggtcggccgcgccccttcctgtctccgc

SEQ ID NO: 38532 - DNA, 442 bp, Mus musculus
  source 1..442: mol_type = other DNA
ctgcctgacgaaaggagatcttctgctctagggagcccccttggctgcctccacacactggtccccagcagttgcccgcctaatgaagcccaggatcccgagattgccagcctgtcaggcaagctgaaggcgccccatgggcctgcttctggaagcagtgtggcagtgtgactaaacctttgtgtcagtcatttcatcacaaaggtggcacctcctagagcagcgggcccaggctcttctttggagtccgagggcggtccctgccttctgctccagcagtttgagctccaggtagaacagcaggtggctcctccccttcccagggaagtaggcctggacaggcctgaagcctgctgcactcctgcagtcctctggggaatttggccgtggtgggcgggcggactctggccagccccgccccaccgtgagacctgtaatccag

SEQ ID NO: 38533 - DNA, 307 bp, Mus musculus
  source 1..307: mol_type = other DNA
cagtttcagagatctgaatcccttctcagcatagtttatgatttgaaacagttaaaggtgttaagattagtatttgtaaaagatttactaatagttagggtatgagctcatgtctgcgcttatgaatgcaaggcctcaaaagagaccagaagctgttgggtccctagggccatggagctttttttttttttaacaacataggagctgtgattggctcagccaaaaacgagcggttttaatagtcttttagaatattgtttatttgtgattcacatcttcgcaagtgttacagctctttagagttctc

SEQ ID NO: 38534 - DNA, 293 bp, Mus musculus
  source 1..293: mol_type = other DNA
tgacataatgtgccacgacagtttcagagatctgaatcccttctcagcatagtttatgatttgaaacagttaaaggtgttaagattagtatttgtaaaagatttactaatagttagggtatgagctcatgtctgcgcttatgaatgcaaggcctcaaaagagaccagaagctgttgggtccctagggccatggagctttttttttttttaacaacataggagctgtgattggctcagccaaaaacgagcggttttaatagtcttttagaatattgtttatttgtgattcacat

SEQ ID NO: 38535 - DNA, 290 bp, Mus musculus
  source 1..290: mol_type = other DNA
ctctggcctgtcccagggccccgccacagctctaccctgggaatgctagtggagggaccccccatgggtcccaaagggggagccgctgcctcctcagtgggtgcccctagcggaggcagtggagcaaagccacccagtgctccagtgggtggtgggagcttaccttctgcaccaccactcctggcatgggggctcagccaatccctgggcatctgccctctccccatgccatggggcagggcatgagtggacttcctcctggcccagagaagggtccaaccctgggtgga

SEQ ID NO: 38536 - DNA, 323 bp, Mus musculus
  source 1..323: mol_type = other DNA
gccctctcccgcgcggggcccgcgagctccccacgctctgcgcagcgaggccctctctctctgcgccccggccggcttcggccaactcgcccggcggtgcgagtcgccggacgcgccgcccagcctgtccgtccgcccgcagccccgcgcccgaccggggcctcgggccaggacgcgtttcggggtggcaggcctcggggcgggctaggggcgcgcggcaccagcggcgggagggtcgggggtcgcgggcctcgccgggaccgcgagtgcgggcggaggcgggcggtgcggcgggggcgggcgcgggcggcgcgttccgggcg

SEQ ID NO: 38537 - DNA, 162 bp, Mus musculus
  source 1..162: mol_type = other DNA
gaccaccacattcatagccccgtcacaggaagtgggagatgcttttcaaataaaaaggcatttttttatattttccagcctggtcctggatcgctgcagctcttgactcatcggggcccccgggtcacatgcgcccgccccctgcccaccccccgcccgcgc

SEQ ID NO: 38538 - DNA, 262 bp, Mus musculus
  source 1..262: mol_type = other DNA
tctctctctctctctctcacacacacacacacacatctagccctggcatagattcactctgtagactaggctagccttgaactcaggtgttgcaccaccactcaagaggctttcgaggaggtcaaacttcaacagcaacctctccatgataatgtagcttaaggcttcagcaacctcattctcctgaacacaggagcaggagttcagctagctcaggcagagagagcaaagcccaggggcggagcgcgggcgggcgtccgca

SEQ ID NO: 38539 - DNA, 198 bp, Mus musculus
  source 1..198: mol_type = other DNA
aggcagcctggcttacatctgctgactcagtctacagaattctagaggactgctagtaatcagcagatctttttagatgtattaattttattattttatgtgtagagagctgggtcttttagaagaacagccagggccaattgctttaaggacttacactctaaactctcaacggaagctggctgcaaagctaagcgt

SEQ ID NO: 38540 - DNA, 221 bp, Mus musculus
  source 1..221: mol_type = other DNA
cgccttaagccagccaatgggctgaggactggctgccctttctgtttcattaaacaaaatagaatgagttatcagactgtattcaaataccaagacaagtgctttctgattggacgagtcggcattctagagtccttgaatcaacttgcccaggcaggctgggtccaactgccgcgctttagcgcatgcgcacactgagtcgcgctcattggatgcgagag

SEQ ID NO: 38541 - DNA, 229 bp, Mus musculus
  source 1..229: mol_type = other DNA
agcagctcctctcgcatccaatgagcgcgactcagtgtgcgcatgcgctaaagcgcggcagttggacccagcctgcctgggcaagttgattcaaggactctagaatgccgactcgtccaatcagaaagcacttgtcttggtatttgaatacagtctgataactcattctattttgtttaatgaaacagaaagggcagccagtcctcagcccattggctggcttaaggcg

SEQ ID NO: 38542 - DNA, 254 bp, Mus musculus
  source 1..254: mol_type = other DNA
ccagccaaggcctggtctgctctcagaggtggagccatgacagcccagtgatttgtcagggaaatctcggagtcagcaggacacagagctctgttctcttttgtacaggggcacatgggcccagctccccacaacagggtgtcaccctcctgttctggctcctggcccgcttgctgaacaaggccaagatcatgaccacgtagggcctggggagctatgactgctcctccccttcttgtggctgcataagaggg

SEQ ID NO: 38543 - DNA, 189 bp, Mus musculus
  source 1..189: mol_type = other DNA
ggccgcataggcccagcgggggggggggggcctacatccgggctctagagccccagctctaaatctttgcttaaattagtaaaaagtactcaattctgagtagaaaagttttggtgccagaattggtgtcccaaacacggagtcaccctcttccaggcagcgtttcgaaaatccatcttcacatggtgg

SEQ ID NO: 38544 - DNA, 322 bp, Mus musculus
  source 1..322: mol_type = other DNA
ctccctgagagtcttgatctggacactgtgtgtgtgtgtgtgtgtgagagagagagagagagattctctggcccgtgtgactctgtaattcacagagagactacactgcttgcattccaggaagagaaagaggtgtatgcaggtgcacaaaaagcccacttcttttcttgatccaagcaagcacttccaactttacaagcgatctcagctggcatcgcaagcccccttagcttctagcaggcctgggctcctctgagctctacccaagaacagcccagtgacacacggtgatggggtgggggcaggacaccaaccgcttcac

SEQ ID NO: 38545 - DNA, 288 bp, Mus musculus
  source 1..288: mol_type = other DNA
ttatgtatacagacacatagcaggcgcatttctgagttcaaggccagcctggtctacatgtaatgcaagtagggttaaggactagacagcttttgccttcatgcttccttttcacaagttgctttacggaaaatgtataatacagttatatgtagcatagaatgatttttttttttttttcagtgttaatgggaaagagcaagtcaagtacagctgtagagggctcggctgctgggaatcagccccctcacactttccactgcgaagcgaaaccccgcgccttggtct

SEQ ID NO: 38546 - DNA, 459 bp, Mus musculus
  source 1..459: mol_type = other DNA
ttagcaacagactgctccctacctctctgccacagcgagtcagatatacagtctgctgatcacaggctgcacattgcacagatgctctcaggggtgtgtaatgagaagccctcagagggatcaccacagagtggccctactcttcctgtaagatgggcacacagtctgaatggcttctttctgccttccccatagaggagacacacaaggtagtaagggagccaaaccactatgtctttagctgggcaacgtaatctaaattttccattgattaaattgctaacttttttttttaaaacatggcattactgcataggcagcctagtctggcctgttacatgcccgtgcccgtgcccgtgccgctgtttcagctgactttggcatttttaatttttcaacttccccaacaactgggggtgggagggagggactcctgagggctggcttacgtccgccgtg

SEQ ID NO: 38547 - DNA, 187 bp, Mus musculus
  source 1..187: mol_type = other DNA
gagttctcctaagtagaggcctgaggacactcccgggccaggcaggaactaagtcagcttagcatgagccaggccctggcctgcagggttggcccctggagggtatgtgaccccagctgctaagcagctctctggccacacatggcccaatgtttgggcattctgggcggcactccgcagtttccct

SEQ ID NO: 38548 - DNA, 235 bp, Mus musculus
  source 1..235: mol_type = other DNA
gctcaggtaagaaaacagtgttatgccgagaggcccaggctgtcctttgtactcttttcctcctcaaggccacctagagaaggcggacaggagcgagaaatggctggccagtccgcccccaggagccagactccagcttgcaggcagtaggctggcatttggagcggtgtctccccgcaggaaccccacacccctgggaagcccctcccgtcgggcagcgccgccttaaaagcgg

SEQ ID NO: 38549 - DNA, 329 bp, Mus musculus
  source 1..329: mol_type = other DNA
tgcaagacaattagtatgtcaaaataccacttggtatgcccaaggtcctgagttgggtcctgagcactaaaaaggtcctggagtggtctcctaaggagctaaggatccagcccggcccaggatcgccctctggcggccaaactcccatggttggcctttggaggacaccgcccgcccgagcgtctctccagagggacaggcccacgcgctcccgtgcggcacaccctgcccccacgttggccccagaggacccgccctccggggctccacggcgcgcgcgccgccctccctcccaagcaggtgggcggagctcccgcagcccgcccccg

SEQ ID NO: 38550 - DNA, 246 bp, Mus musculus
  source 1..246: mol_type = other DNA
tctaattagtgtatgtgtcacacctggggatagaacccaggtgccatctccacggcccaggtcaccgaggcaggcttctagtgcctctggtctaggaatattccccaacatccgtgttggatattctgagtctcggaaaagctaagtatagcaaagttggggactcatgactcagaatctcagactgcttgggggtcagaaatcgaggggaagcttaccatcgcggagaccaagtggtcctagtcg

SEQ ID NO: 38551 - DNA, 143 bp, Mus musculus
  source 1..143: mol_type = other DNA
attccctggggtattcaacacgtccagaagacacagggtgtcacatgtttcttctagattctcctaggactccatgcatttgggtggttaagcatcaagagcaaaaaggcagctaggcagccagctttctaaattaagatcca

SEQ ID NO: 38552 - DNA, 415 bp, Mus musculus
  source 1..415: mol_type = other DNA
ggtgtgtaccaccatgatatttgggagatagggtctctcacactgcctggatgcatccaaagactaaaaaaatgactcaatatttatttgtagtaaccatcccctacctctacctccaatacgccggggggtggggtgggggcatgtgttaccacttcctgcccccttattcttctgctctttaaaaagagtggataagttgttggaggccgccatcctgccttgtcctgcagctcccgggagggtcgctcccccggacctccgcagagccgaggtcctctccggacagagcggaagatgggcgccgctctcgcgcctcccgcggtccggaaacggaagcaggccggagccgcccggaacccgcctcccgagagcggaagtacggccggaagctggcctgggagccgctgccgga

SEQ ID NO: 38553 - DNA, 342 bp, Mus musculus
  source 1..342: mol_type = other DNA
gctcacaaccatctgtaatgggatcctgtctgaacgcacgcctttaaccccaggcaaggccagcctggtctacaaagtgagttccaggccagccagggctatacagagaaaccctgtccagctggccgctcctccagaggaccggaggttcggttcttgtctttagtttgatgcataattcagtctcttccggaagcccgggaacgccggtccccgggtaaggagctacttccgcccttacgtgtcgcgagccctaacagcaccggatgtgctcgagcggctctcggaggactcggggttcccgggagcacgagccgcagcaccacttccgggtgagtgtcc

SEQ ID NO: 38554 - DNA, 503 bp, Mus musculus
  source 1..503: mol_type = other DNA
ttgtctttagtttgatgcataattcagtctcttccggaagcccgggaacgccggtccccgggtaaggagctacttccgcccttacgtgtcgcgagccctaacagcaccggatgtgctcgagcggctctcggaggactcggggttcccgggagcacgagccgcagcaccacttccgggtgagtgtccaggagggcgggggcccccccacacctcgcctcgcgcccccgccctgcgggtgtctcgcgcgccgcccggccgagcgtcggggtccgtctggcgcctgcggtgcatgccggcgagccccgcctcgcggttccgagcccgcgccccgcgggtcctcccgctgtgaccgccgcccctcccgcgcgctggctctggcgctggcgtcgccgccgccgccgccgcctggtgagtgtcgcgccgctgcagtcggtgcgcgccgctgcccctcgctcctccccccccccctttacctcgggcgagtggggaggggggggtcgtcc

SEQ ID NO: 38555 - DNA, 291 bp, Mus musculus
  source 1..291: mol_type = other DNA
gtcagttatccgacagcatgctcttagattagaatggagtccacatcctgctgtcctgctttagcaactgctcagcaggaaataaaagagctcaaattttatctagtttgagttcttttccctaagagcagcaacctgacaggttttgactaggtgcaaagcctgacaacttctacttgttgaaagcgattatttgcaaaatataactacaccaaacattcctagttttggcttcgcgtgacgtcatgcctgtcacactattgccgccttattaagggcggaagccaggct

SEQ ID NO: 38556 - DNA, 227 bp, Mus musculus
  source 1..227: mol_type = other DNA
aagcattcttttcgcatcctctggattggtccacctggaggagtcccaattccaataaatcatgtatttgctttatatgtttagcttgatttcttctaaatacaaaatagatacaaacatgcccacagtgctgcctatactcaacacatcttttttaggttcacttcccggcaaccaggagttcacctcgtggcctggccccgccctcaccttctgtgacgtagcag

SEQ ID NO: 38557 - DNA, 269 bp, Mus musculus
  source 1..269: mol_type = other DNA
gactgtcctgtttgtagaccaggctggcctcgaactcagaaatccgcctgcctgtgctgggataggcgtgcgcttatcactcagcagaatattcacgttgatttttatcctctccaaaagatccgtctttgctaactaatatgcattgaagggctatgctcagccccctacctccaggagctcccagcctgaggcagacagaggttcccggaaactgcacatctgggagccatatgtgtcaggcccgcccaggagcaggtcctaccagg

SEQ ID NO: 38558 - DNA, 434 bp, Mus musculus
  source 1..434: mol_type = other DNA
tgtttagaaagtcttaccatgcatgcattatttatttatttatttatttattcattcattcattcattcattcattcattcattcattctatgtaagtacactgtgtcttcagacgcacctgaagagggctcagatctcattacgggtggttttgaacttcagaccttcggaagagcagttttattttttaatttatttattcatacatagatttcttgaggtctgaacttggctgtgcagaccaggcctggaactggcattagaggtgtataccagctcctctgaggcatgatgtcattcttatacctaattaggctaagaaaagacctctatcccacaggtaattgtgggcacaaagacctgaattttgctggggagggcggctcctctgagccgagcaggacagatcatgatgtggtagaaaggagccctg

SEQ ID NO: 38559 - DNA, 125 bp, Mus musculus
  source 1..125: mol_type = other DNA
agctgctgatcaactatatgtctgtagccccgggcacatatatgcatagaggcggttgcccaggtgacgcgcgcgcgcgctcgacgggggcgtggccaatggttgcctgagctaagaggcgacgc

SEQ ID NO: 38560 - DNA, 611 bp, Mus musculus
  source 1..611: mol_type = other DNA
taagaggcgacgccggagccggagccattttccccccttcggccgcggcgaggaggagctggagcgggagtgacaccggcgagacccagcgcgacctgaggcggctctaggcaacgggagagacatctctctcagcccgacgtcgtcccgcgtcccggggcccgcgggccgtcccctctccagggagccgacccttcttccccggaggcggccgggttacctccagacggcgccctgccctgagggagtccccccctcctgggctcggcctcccacaatgccgggcgagcgcctgcccgcccgcccctcgccctttgcgctagccccccgggacacgtggcccggcccccttcccggtggcggcgtcccgactcttcgggaccccggagcgcccgagcctccacgccccctggtccccgccgttccgcccagaggacagcctttggagagctgccctgtctggggactggcccctccccgggcgcagaggagcgcccccccactcctggctcaggccaggctagcgctcctgctggggagccggctcacgggctgtccccgagggtgggggagggggactgcgcgtcactcactgttctcccccctccccc

SEQ ID NO: 38561 - DNA, 465 bp, Mus musculus
  source 1..465: mol_type = other DNA
acctaagtggaagccctctaaggaggctggtgggactctgccccaaggcctaaggactgtgctccatcccttggggacagcagttagcacagcagcctgctaatggagctgctcccctgaaagaagatgctgtttccaagggaccctcagcatcctgatgcaaggctggcctctgtgcatacatatgaaatttaatatacatattaccactcctatctggggagagacagttgtgcactattcaaatgactattcaaatggtaaatttctccctccatttcttagtcttcatgggaaaaagctgtctctaaagagccagaggtcctgtgcctacagtcagaatcttaggctgtggctccccgggaagggctagtctggctcctgccggggttgaccccactcatggggcctcagacccgggaaaggttcagcgctgatgccctaatgagggcctttcattggccc

SEQ ID NO: 38562 - DNA, 453 bp, Mus musculus
  source 1..453: mol_type = other DNA
aaattgaagatttatttattattatatatgagtacacttcagaatcagatcttggttgtgagccacgaagagcagtcagtgctcttgactgctgagccatctcctttgtgtaatcctgggtccaggaattccagggctgagattatagagaactaccactctcttatataatgtgcacactagatgggtgggtcctggactcaaagactcagttctgcaggctcggagacaagcgcgtttatccgctaagcggtctccctgcttggaaggaaggccggcgaggggcgtgggaccccgcgatcttgcgggctaaggcaacctcgggagtagcgggcggaagccaccttccggggcagagaaacgctgaccgcagcgccgcgcgtttccctctctgaaccgcgggtgaggggcgtgtccctggatcacgtgtgttccggtgccgcggccggaaga

SEQ ID NO: 38563 - DNA, 448 bp, Mus musculus
  source 1..448: mol_type = other DNA
cccaactctccaccctggggctacagtgggtgaaaggggcagtgtctcctagcctgggcggggcagctctcaggttccgaggagggatactataggaggcctctgagcctcctccaattcgcccttaccccggggtcccagcttaggttcatcaggtaaactccaggctgcagggcatcctgccaggcctctggccaaacctgagggctcccgcgggaggaaaagtgcccccagagaagatcctcaacttttccgcagccttttgcagcattcaggtctctgggtcctggatgtccttggtgcacactccaaggactcctcgctgagcggggcaatcacacgcttggtgcgtgcacatttcaaaaatgggtgcacgtagctcaggcctctgcgcccttgaagcagggcgggaggcggggcgcgcgtcatcagctcccccccaccatcc

SEQ ID NO: 38564 - DNA, 389 bp, Mus musculus
  source 1..389: mol_type = other DNA
ctgcaggaggtccagctgtaagccatgctgtgtgcccaccaagtcacttggagcaggaggcacaactgctgtttctgctgccatgacaacagcacagtgctgctgagaaaagggactctgaatctcgctcatgggaagcctgggcacgggccacacagctgtcagtctaacacagccttggctctggggccccaaggttggggtgcagcccagcgtgctccctgccttttaagcaaaggtagccactggcctagcaaagaggcgccagaatgccttttctcccttccacttgtggcaagaggctaggggcttctggctccagggccagtcagcacgtccctggatggggagggacttccgccctcacgtcccaactctccaccctgggg

SEQ ID NO: 38565 - DNA, 357 bp, Mus musculus
  source 1..357: mol_type = other DNA
tgagccttacgaaggccaaccgtgggacgccttcagcactgcccagtgacaaggttagccggcttcggcatgccgaggacagtcccaggcgggactcacacggtagtgacagcttagggagtcatcccaaggtggcgccccgccctccaagttccggcctgtgaggcgcgcgtcctcaactgtgagggaagtggagtatattcccggactggactgctttaggcggcccgcggcgggaaagcgcagactcggggccacgcccctcgcccgcttgccccgcccccggggctgttgcgggctccgcgagcgcgacgcctggcgctgaggcgggtctccgtctcagcctgccgcggattg

SEQ ID NO: 38566 - DNA, 353 bp, Mus musculus
  source 1..353: mol_type = other DNA
agcccaatcaatggaatggaaggacattaacttctacttacctacattgggtagtcacattcagattctgatctgtggcaaaggctgcgtcacgtcctggacccttcttcaaccggagagccccctgctgaacaatccgcggcaggctgagacggagacccgcctcagcgccaggcgtcgcgctcgcggagcccgcaacagccccgggggcggggcaagcgggcgaggggcgtggccccgagtctgcgctttcccgccgcgggccgcctaaagcagtccagtccgggaatatactccacttccctcacagttgaggacgcgcgcctcacaggccggaacttggagggcggggc

SEQ ID NO: 38567 - DNA, 337 bp, Mus musculus
  source 1..337: mol_type = other DNA
aaagctgaggctgagactttctctcagttgagctaaaactataaataaattcatttgtctacttctatactccccttcctacagaatgagggtaggggcttatcactgctgtgcttgttggctaccaaacaaagaaagagaccctgtctggctggtgtatactctgttcgatcacagatctgaacaggggtccagagtaccggggaatctatcttcctctccagccctctcatagttggggctgatgggaaagctgatggggataccaggttttgaaatcacctgagaaagcagagctggctgcagccattactggcctcgggcgggcggccacaga

SEQ ID NO: 38568 - DNA, 506 bp, Mus musculus
  source 1..506: mol_type = other DNA
aagggcacccaagcatgcatagatgcaggcagaaacttgtaccataatatatatatacatatgtgtgtgtgtgtgtatatatatatatatatatatatatatatatatatatatacacacacacacatacatacgcataatgtgtgtgtatatatatatacatatatgtgtgtatatatatatatatacacacatatatatgtgtgtgtgtatctatatatctgtatatatgtatatatctatatctatctatctatctatctatctatctatctatctatctatctatctatagagagaggtctcaaaaaacaaaaatagggaagtctactttagttctgtggccaaggacttcatgaatatgcattcactgctgaacctcgcagccagttggattccagcgtctaagtcactgggcgggagcggtaagagacagcagtctccagctcagcggtctaactcagcggcggagacagagtttgtttgtattggtcagtgttctcacg

SEQ ID NO: 38569 - DNA, 321 bp, Mus musculus
  source 1..321: mol_type = other DNA
ctggaggaaatacttgcgcaggtcactgccttcccgctgcagtcagcatggagcatgcctggggaatctgtaccaagtccactggggagaacctgaggcctcaaagataacaggtgaatcctgtttggtctcagtgctcccctggaaatctgtgatgccttccagggagccatcatccagcactggtacctgcagccccgcggtgccactcttcccaccccttcaccaagccccgggctgagcagcaggtaaaggtgccttctgagccccgctgtgcagcggcttcctagatctgtcctgatcaaagccagttcctagcct

SEQ ID NO: 38570 - DNA, 593 bp, Mus musculus
  source 1..593: mol_type = other DNA
tttttgtacaaaagccttttgggaggaaagcaagtagatctatcatttctcttaatttatacatttctactttttgcaaaggaagaggtaggatatctgcagtaccgtacactagaatagcataatttaaagaggcccctttaacagtgagaaaaaaaaaaactctttaattgctgttgcaaaaccatatatatatacacatacatacacacacatatatacacacacacacacatatatatatatatatatacacacacacacatacataactgattttaataacattaatagagaatatgttctggaacaattggctggtaagttctagtaacagaaccatccaaatggttagtctgagacaaacacctaacaagaaaagtcttcttttgtgggactttcagataagtcctacagaaatattacactgtgcctaaaccaaacttgaattattttccaagtgttaaaagtttcatataaggtcttagtatatgattgccaataattaaaagctttaaagtagtagtgagtaggaaagaaaatcatataatctttttctactttcagtttctgtgtctgagcctgggaaaggt

SEQ ID NO: 38571 - DNA, 333 bp, Mus musculus
  source 1..333: mol_type = other DNA
ctcttgccctcaattgtatgcaatggaaactcaaacctcagttatataaggctggttgtcatgacccaagctgggaaccaggatgcaaaaagccctgggtttcatcccccgggatgcggcagcacagcgctatggcaggcaaaatctgaaaatgtcatgattttaaaactggtcacctctggaagggctgggctatgagagaggcacccagcgtccatccctatcaacaggtccggcggctgtgggtattcattactgaaaggggggcacatgtctgtgaagctcagcagagctgggtttaccccttcatagtctctccggagtgcggaaaag

SEQ ID NO: 38572 - DNA, 348 bp, Mus musculus
  source 1..348: mol_type = other DNA
cctctgaaggatgcagatccgcagtcccaggactctacaattcattatgtgcagtggaaagataggtatgttagctctgaggtagcctgagacagagtttcaacttctgccagcccgggctacaagctttggaggccagccagggctgcatacccaataatgtcggaatccaaagcgagggaggctgaacagcttttctgccccagctagggcatccctccatcgccgatgcgcagagttggatgtcggggacgcgcagacacacctccccgtgggatgtggagcctaaggccgcccctaaggcgctctgggccaatgagccccggcctggactccacatccgtcctg

SEQ ID NO: 38573 - DNA, 287 bp, Mus musculus
  source 1..287: mol_type = other DNA
gtcccagggctcttggtctgtgcccacagagctctgcctgtggcctatcagccaatagtgtcctaggacctggcccagcctgggcccctccctcccaggcctggacagggccaggtagatcagcaggtgctcccagttacccacctccaggaccctgggtgtgttgagggacctcaatcagaagggaccctggtttctgaaataggaggtacctccgtggccgacgggcggtctctggagccaggcactgcacctgtcaggtgagagggtgggccagatttaactgg

SEQ ID NO: 38574 - DNA, 356 bp, Mus musculus
  source 1..356: mol_type = other DNA
ggcatcctgattctccagatgtttgaggccagccggcttgggctaaatgaaaccctatttcacacaggttggaaagggggccctgggagccctttacagaagcctgagagggtgctgcctgacaccccctcacccgtgccccaccgttggtgaccgagccatggtgggcagctgggacccaggcagggtagaaaagaacatttgatttccctcccggggcgggcgagcatcagatattgccctccccctaataactcccgcctgccgtcccgtgagataggtgggctagcaaaggagtccgaactggaattctgtggactctcaagctttggggcgccaagctacgggacccgggc

SEQ ID NO: 38575 - DNA, 474 bp, Mus musculus
  source 1..474: mol_type = other DNA
ccatgggatgatataactctcagttcttccctcagaccagacgacaggactgggggggcggggatgcctttcacatcacgcccagccagtgttcagtctgtgtagcccttgggaaggccacactggcccaagtgcagtccggtgggagggtaccctcccctggtatgccccctccctcctccctgttgccagggcaggccagcaggtctttggactccatggccagaggacagccatggggctgagaatccttgggcctggctccctttgggatgtgtacctgccacaggtcgctaccctggcgcctggcaggggtctggccgctggtggcctgcgggtggcacaaggttccagcccctggccccgaccaggtgactgtacggagagtccggctccctaccctctctgtccgggtgaccaggaccgcgacgctgcaaggcccgcagggagggggaggtgccagcccacgtcccg

SEQ ID NO: 38576 - DNA, 279 bp, Mus musculus
  source 1..279: mol_type = other DNA
ctgtgcaccgctgcctggcaccctgggcccttccgtgagaagagttctttttaaaaagtcacaaggccctcagtctctgccgcctggccagacgctggctgcatggacacccagctgcaagtcagctctgcctcgggctctcggaggtgggcctgaccctctgagagccaggcttccgaagaaaggtggaggccgggttccgggcctgcagctctcaccctgcgtcgaggcggccaagcctgttccccccccccgtcgcgattgcgacaggccggcctc

SEQ ID NO: 38577 - DNA, 455 bp, Mus musculus
  source 1..455: mol_type = other DNA
agtgtgccctctcagatttgggagagtggacactctcttgttgccctacccagaggcccatctgtagagtctactagcacctgcctctggaccctctgcaggtgaacggccacctgggaaatgcagaaacaccggatttctctacagccaagatagttatcgctcttgaaaaagaatcaagacaatctagtctttcaggtagcttagtcacttgtgggaccaccgaagtgggcgctcgactgccctgctggcaaggagccttgcgggccggggagggcatcgagtctctcacactcgggggtgctccgggtgggagcaggcacagaagtgcacagccggagccaccaggaccctcggcgcccacctgccagtcccgcctggccagctggcagccgctgcgcctttctctactcgcccggagtccgcctggcgcgcgcagtaccagcggctcccgg

SEQ ID NO: 38578 - DNA, 345 bp, Mus musculus
  source 1..345: mol_type = other DNA
aggccagcctggtttacacagggcgttccaagccagataggacagcatagtaagactctgtctcaaaataataatagatttaaataaaaaaaataatagcagggcggccagcatacacccctgcaggcatggaggcgaaagtttctgagcaaagtagaactgctcagattagcacctagaacattctagcggccaccgtgctcaactaagtgcgttcaggccagggtcttccaacgtgagctcttatgcagacccgaagtcccagaacctgggtctgggggtgggccggggggcggggtcggcatccctccgcacatgcgcaagtggcactttttaaaagtggag

SEQ ID NO: 38579 - DNA, 285 bp, Mus musculus
  source 1..285: mol_type = other DNA
ccactcctagacactctgcgggggctgcccagctgagtgccggcaatcccatggaaccattgagagaggctctctctctctcaagatacaaacaggctaggtttttgtgaggtctagcctggaaggaagtgctaacatacttcttcctctcacaagttggctaggttagaagagtttttcaaaacctctggaactcctagcctggaccaggctggagctctccctcctggcttttcaagccttatcagcctggaagggctcgatttcccgctggtaattaagaga

SEQ ID NO: 38580 - DNA, 197 bp, Mus musculus
  source 1..197: mol_type = other DNA
gttctgagctgggacaccagagcaggcagcccctgcacacagactgtgcctgcctcatagacttgtcttctgtaaaacaggggacagacattgctttcccaccgaggaggaggcagagtctcctggggatactcagggctatagccggcagacttgccgccaggcagttcatgagataatccggctgaattatcaca

SEQ ID NO: 38581 - DNA, 318 bp, Mus musculus
  source 1..318: mol_type = other DNA
gcaccatgcaatggctttgggccccaccattgcatgttgggcacacacgtatgagattatgacagctgtgagagctctagtgtagagctctgagttctcggaccgtggccagaggccaggtcaccgggccccaggcctagccaggtctccaggagagagagttcccgagagtactgatggatgccccatggagtctcccactgttaggcgggcagactcccaggctcagttcccacaggcctgagaaacctgcctcctcagctctggaggctgtgagttgccccggtgacctctcaggtggctgctgaggcagctgga

SEQ ID NO: 38582 - DNA, 425 bp, Mus musculus
  source 1..425: mol_type = other DNA
gcagagtcatcgtgtcaattgtgaccatggaccccgggaggagacgtgtggctgccgctggacaggtttttaacttgctgggtagacaaccagtgtggataaatcagaaccacaagaagcattgcttttctggtgttcccagcacactctttaagaatgtacatcactgagatgtcagaagtgtagctgcatacacgacacacctccagagccctgcccttgagtatgtgcttgcattcaactgtataccatcaggtgacctggtgtaagagctggacacaggtccatcccctgtaagcgtgtgggaggggcagccctctgcctcactgctgggaatggcctcttctgcgatacagtcagaactggatttcaaacgggatacatttcccttagaagaaaacgggctcatgttatttctgtttact

SEQ ID NO: 38583 - DNA, 243 bp, Mus musculus
  source 1..243: mol_type = other DNA
ggaaggggtggtcggctcctaccttgaaatgtgagctgcccccaggactgaggacaagctttcctgagccaaggggcaagaaaggccttcatgatatttacgtgtaaaatataatgataaatcaaacgttttttgtcttctccccatctctaaaagggaaggtcaaaagagggggcttggcgcggaaggggttaaggcgctgagcgcggagccatctggccgggttggctggttataaccgct

SEQ ID NO: 38584 - DNA, 318 bp, Mus musculus
  source 1..318: mol_type = other DNA
ctctagctacatatatgactcttagcgtgagtctttctacaaaaactataactctccagttagaaacttgggtctataattctgacagtcttttatctgcctataaaacttctgaactcctagaaattcaaaatgcctttagagtatcctgaaggcaaagaggacctttaatccttagtcaggtcttacaaagctgtcctgacgtcgcccaggtctggcaaagggaggcggccagctctgcagaacaactcctccctccagaccgccagtgaccggggagcagccggcggcggtgcagcagccccgggaccaggagct

SEQ ID NO: 38585 - DNA, 319 bp, Mus musculus
  source 1..319: mol_type = other DNA
ccgcagcggtggaaggactggagctgctggctgcctcctccggtgcagcctgtatccaggtgcagcggcactggggacgcggtgcatgggcgacttgcttctcacgtttgtcccaattagcaccaagttggcaattctctgcatttcagaatattctgactgtaaagtgaaatctcccagtaacactgtgtggatgaatctaccaaactgcaccctttggagtcacctgaccatctccaatgtgaaattcccggggaaggtcgctcgcagcggagggccgtgcgtgggaggggctgccggccgccacgcccgggtgggc

SEQ ID NO: 38586 - DNA, 403 bp, Mus musculus
  source 1..403: mol_type = other DNA
gcaactaaaatgtgtttattagatgctcatcacacatagctacattgtcacagataagtataaattgcagaatctttttatttacttttttcttttcttctttttttctccaaaggaggcgtgaagcaaagattcttggggactccatgagagcactgggcacgggcccttgaaagagagctgcagccttgcctttccaggttgcaaggattcatcttccccccccccccaggagaggttgaaaatggcaaggatataaaaaacatggattccccgacccccccaagtaaatagctgtggaggggtcagttttgctgaaatacactgagcaggtcagctcggtgaacagaaccatctctccccagcatccaggtgctgcagcccaggcggggcctgccacgtc

SEQ ID NO: 38587 - DNA, 289 bp, Mus musculus
  source 1..289: mol_type = other DNA
ttttcaaagaggcccagtttttaaaaaagctgctctgggtaaagccagcagtttttccataagaaaaatatgttgaatgtcaagcatagcatgcgattttatatcacatttcaggtgattcacgtttcaaatgactcctacctgaagttccaaaaatagaacttctcgtttcataattcagttagtgatgagtgtgcttcaatacatctaagtatgcattctatgaaaacactaacgccctgcatagaaaaagggtctttgaaagctggccattttgcttccccggaaa

SEQ ID NO: 38588 - DNA, 400 bp, Mus musculus
  source 1..400: mol_type = other DNA
aaagagcactgattttaatacctggagtattttatccagttcaacactaagaaacagactgcttgcctcaaatgattattaataggctcaggtgactaaagctgtcagccagccagtgtgcctgcctcttcaaacatcagggaagtacacagatgcagtgtgtctgagctgcaaaggctctggtttttctaagatgagaacgatccataataaaagttggtagttggcaaatggctttattgaaggataccaatatccaggcatggtggcttgtgccagtgacaaagccagcagcttttaaatgaaatccattgggaaaggcttcctcagaagtaataggattcttctaactggcaatcttaggcagcctcacatggttgctatagaaacagtgatgtca

SEQ ID NO: 38589 - DNA, 185 bp, Mus musculus
  source 1..185: mol_type = other DNA
ataaaaacttcaaagtgtgctacaagggttaataaccatggacgatgtggtctctcgggtactcagctaaatcaggacatgccactgtcacagttccatgtagctgtttttgaaagatcttagaaattttccagtctggtgggccttaagtggggtaagcctattcagctccgcgcctggttgag

SEQ ID NO: 38590 - DNA, 284 bp, Mus musculus
  source 1..284: mol_type = other DNA
gaacaaaaccaataaaaacacacgttttcatgttactctttgttccgggtgtgcctacacccttggcaagcttaccagataccgtcattgggtcctccacactgaaggggcttcataagtcagctaagctatttttatattgtattttagactcggtaccaaatcgcaattgtgacgaaagtgcagtacgtgcccgggccacggtgtgtgtgcgcaggcgccctctcttcagcacgcaggcgccgcctcaggcaggcgagcggtgattgcgggctggcgcagcg

SEQ ID NO: 38591 - DNA, 365 bp, Mus musculus
  source 1..365: mol_type = other DNA
taaatggatggccagcctggcatcccggttgtgatcacagccacttaacgcggtcgctcgctgtcgcgttaagcgcgactcaaatgctagcctaccaggtccctctgccaggcgggctcctctgagcagcgggtggctctcaccggagactggcatgcatgacagtggcgccctgcctagagcagcagtgctctggagctggggagcgctgcgccagcccgcaatcaccgctcgcctgcctgaggcggcgcctgcgtgctgaagagagggcgcctgcgcacacacaccgtggcccgggcacgtactgcactttcgtcacaattgcgatttggtaccgagtctaaaatacaatataaaaatagctt

SEQ ID NO: 38592 - DNA, 199 bp, Mus musculus
  source 1..199: mol_type = other DNA
ggtgtggacatgggctggggaggtgcccagtcctgcagctcctggatgcttcctgagagatgggaggtgttgagctcatgctcccacctaacacccttcctggggtttgtgtatggggatatatcaagacacttgcctcctgatggaagtggggaaacaaatgacccagggtctgcccacacatcattcacttatggga

SEQ ID NO: 38593 - DNA, 316 bp, Mus musculus
  source 1..316: mol_type = other DNA
cagacaagccacgtaacttctttgtgacttgacttttgcaaaagggtgagcaggagaaggtgacccatccctccttgtccccaatacagaatatgccctgttctggtagatgggcccttctctgccatgagctctttccatgaataggtcttgtgcagtggggccaagggcgctctcgtaagtgagctgggccggctgacgccggctagagaacgtccccacgccatggtctataccggcggagtgcctgaagcaggctttggtttcatgtcagcagccttcatccattgtgcctgagaggcaaggtggatggccc

SEQ ID NO: 38594 - DNA, 472 bp, Mus musculus
  source 1..472: mol_type = other DNA
aggctcagtctcagtcttgaagacatctcttcctggaactgcagttacagatgtttgattcagagccaactccccaacccctctcgaggggttttatacagaacgtttttaaggaaacgactttcctctagatcagtgcaacagagataacgttcattacaataggaattattttaagaaatggttgaattaaactcttaatacaacaggtatcagtggagagctctagagtaacttaattataaatgagcattagcgaaaatacttggtaatagagaaactaggttggtttggatctacatacctactttgctggctgtgtaaccaccagaggagagccatcggtctagctctggcaagactccagggcgttaacccagggcggggccgcgcgcacctgccaggcgccaatcacaggttggcgcgcaggagcgcaagcgccactggcctgggcggggctttacggggccgg

SEQ ID NO: 38595 - DNA, 281 bp, Mus musculus
  source 1..281: mol_type = other DNA
attataacatcattaactagaatattctgcattaccagcagctcctggggcttcacagagttgtcggtgtaaatgcacagcttttccagcgggtttcagcttggaagctaggagcataatctgagataacaaaaagaattttttatgtgtgtgtggggttcgggtattcccgcagcccagagccgccgccgcctgccgttcccttttttggatttcgtcatcttttcaaaaaatcaataaaaatattctggaagctccgaaacccgacaattgaaaaaaat

SEQ ID NO: 38596 - DNA, 260 bp, Mus musculus
  source 1..260: mol_type = other DNA
ggccttgctggcgcagggagagccaaacctaaaccctccatccgcagacaccgggtttttcctgcgtggccgaggcccgcggaggaaccgctgctagccctgcccccggtctggggccgctctgagaggctggccgcgttgcccaatggcgccctgcaggactccacgcacgtggctcggtatgcctacagaatttcccctatccgaggcccctagcatgcggggctggatggggagatctaactgcccttccagcttgc

SEQ ID NO: 38597 - DNA, 226 bp, Mus musculus
  source 1..226: mol_type = other DNA
ttaactcctttctaatcccatagatcaaacagtgaaccatctacattaaagtaatcttacgagtctattgacatcgtttaagttgttaaagctttactcttaagtacacattagaattattattcccctggataaagcaacatggacagcagggtcctttggacatgacctgcaggaattctctggctttttgtcctctctctgagtagaagaccagaaagcattc

SEQ ID NO: 38598 - DNA, 548 bp, Mus musculus
  source 1..548: mol_type = other DNA
atttttagaatttcttattgaacagtatcatttctaagaattcgttccaaagagtaatgaatgtctgaacaaaaatagtgattatagtaatttttgttacatagtaacttgtgtctctcacagtagattatttaagatatgtgtgtaacatgtaaactatggaatgctatagtctgaagaaatagattcatacacatgggaatggaaaaatatattaaaatgtaaaaaacaatcaggttctgaatctgtggtcattctttgacctatttttaaaaatacacctatagtctcaaacctgcttggaaacctccatatttgccatgctgtctaaaatttcacgtttcgattctaaaatccacgaggacagggacatggtcagtgttcacgtagtgacattgcaattcgaggatgttgcaaacaacaaagaggtttgaagctttaacctttaagccattgggtatgatggccggcttcaaacagctttaccacacaggtaaaggcggcccgcgacagcacgcgcggaagttccaagggcgggaccgccactg

SEQ ID NO: 38599 - DNA, 337 bp, Mus musculus
  source 1..337: mol_type = other DNA
cttgctagtacatgcctgcgtggcagccagcgaatgaatggtcagggttttttccctgtgaaagtcatggaaagtaaattcaatggtgacagtactctggtgagtaccaagtgcaacctgactagctggccagaagtttaaagaggagtaaagaaacatgtacatttgaaatgctgttcattgtgcagattttatatgaaaacagcctctttctaattttcaaattattagggaatgtaacaaatccagtagaagattttaggtgattttgttctattttggtgtcaatttaacacacagaggaacacctaggcgctgcctggcacttttaaaaagg

SEQ ID NO: 38600 - DNA, 391 bp, Mus musculus
  source 1..391: mol_type = other DNA
ttttttttacatctggccaatagcaaatagtaatatatatatatatatttggaataatctttctactaaaggcttcatttgtgagtccctggagcacagaaaaataaatgtgatatatcagaggacgtacaaaatgtctcataaataacagactttgaacgtgttgtaaaccaggatcacgtgtttgtgaatcacacatcatcttggataaccacaagactgtaggttgcccaggaaattcaactcactgaatttaaatgatagttcctattggtcacaatgtggctgcagaagcgagaccaggcaatgcctggaacttccctgctagcctgatagcttatgctagggggataggtcaggagctcataaccacagtgtactgacatcaggg

SEQ ID NO: 38601 - DNA, 343 bp, Mus musculus
  source 1..343: mol_type = other DNA
tgttctatccctcaatgcctgacagatggccacatcctcacggctctctcctgtgtgtccccccgggaggggaggagttgaggacttccccgggctgagaccctccagcagcctcgtggacgcctgcttcccggagcctggcgcgcggccccgcagcgtgcgcgcagccctagcccccgcgccaggtgtgcgccgcgccaggagcgcagcggagcgcaggcggcccccagaccccgcggtcccgggcacgggggcgggctgggggtctccgccgtcagcgccccgccacccgctccactcaccggctcagcccccgggagcgccgagcaggacgcgttcgccc

SEQ ID NO: 38602 - DNA, 427 bp, Mus musculus
  source 1..427: mol_type = other DNA
gtgcttctgtgaggatgttttcagaaaggtttcacgcaagcaaactgagcgcttacatttggtggcagtgccaatttccagacagagtttctctccaagccttgatcacacagggtgctcacccactggccgggcagtgtgtgtgtgtttgggggggggggggagggcggtcagcaactcttcaccctcacccactggcagagactgggtctaggagggtaaaagaaatgacccaaaaaaaccggttcctgtgtctcaggagtgaggtcctggaatgggtgggacgggacagagggccatccgcctctcttcagcgagccacttctgcacaactgccaggaccgagtgctcagtgtgctctggagcagccccggtcccgcccgccccgggcctgtgggcgcgtcccccagtctgagtgagaggggca

SEQ ID NO: 38603 - DNA, 413 bp, Mus musculus
  source 1..413: mol_type = other DNA
tgcaaaccgtggtggccccaggtcagcaatgcagacttctgcatataatgacctcggctccgagaggacaaaaagcattgctaccttgctcttctgctggcaagcctgccccttgcagcccgccgtcccactcgggaacgcggaggcgggggcttgcgcagctgcaggagtctctcggagccgcgcgtgcgtgtgcgcgtggagggggcagggagggcggcgcgccccgcggaggcctgagggcgctttcaccatgtgccccaggctagacaggcccgacgttcctagggggcggaggccagcctagtagtgcccttgctggggcaagaaaccagggttctgtggggaggggggtagctcccctaccggagccagagggggcggggcccagagcccggggaaggggctctagg

SEQ ID NO: 38604 - DNA, 364 bp, Mus musculus
  source 1..364: mol_type = other DNA
tcaaagcagaacatgattatgatcagctgcttctagctggtaatcttcaaagtaaaaactttggcccaacaaatctttgagtctcactttcacctagctagggcacagcgcaattaaaaagctcacttttaatatatacttgaggagtttaacaccaatgtttgaaactttaagggattttacaactcatcgtcgtacaggagactgagggccctgagcccccgcgagtttccgtagctctggtctgcgcctgcccggaggagtcgggaaacagcatggccacagacagagtctggcagttcaagcaccgcccacagactggtgcctcaggcccgggcgctctgccctctggacccctgagctc

SEQ ID NO: 38605 - DNA, 297 bp, Mus musculus
  source 1..297: mol_type = other DNA
gctagcctggtctacacaggccagccaggtgagatcttctgctgagatttcagtgcacttatgagaacagaaaactttcaggtaggccagagatgaatctcctgcttcctagctcaagtggaggtagctcccgaaataccaggcaagtatttcttagaggccctgccctccctcggtccagccccaggagggggcggggccgtcctccctccagtgctggacacatggccattgtggagggggctcccctgaggccggaccccccgccccgccgcccggtgaggccccaccccctcc

SEQ ID NO: 38606 - DNA, 421 bp, Mus musculus
  source 1..421: mol_type = other DNA
gtttgtttcaccagctctggctgggagagccacaccaataaaagcttaataagtttctcaaagtgacagaagtgacagttctgcagatgatctgggagcagagccgggagttcctgcttcctgctcccggagcgagtgtcctccgtagcagcctcggggaagggaacagcccttcctgctcctgtccgcgtactccaggagcgcagcgaggcgcgccccaccccggcggaggggacggttttcggacgcaacccggggcgagaggcgccgaggggtccgcggggttcccgggtgtctccgccgtgtcctgtcccgtggccgcccgcggttcccgggctccgcccagccgtggagcccagcctctctctggcccggctcccaaaggtgcgggtggcagcgccactccctccgctccctcccc

SEQ ID NO: 38607 - DNA, 179 bp, Mus musculus
  source 1..179: mol_type = other DNA
ggtaccaggttcaatggtttgtttcaccagctctggctgggagagccacaccaataaaagcttaataagtttctcaaagtgacagaagtgacagttctgcagatgatctgggagcagagccgggagttcctgcttcctgctcccggagcgagtgtcctccgtagcagcctcggggaagg

SEQ ID NO: 38608 - DNA, 537 bp, Mus musculus
  source 1..537: mol_type = other DNA
tagttttcaaaaattaatttctgggacctggagaggtggctcagcagttatgataactccagttccggggtatctgacagccttgggcaccagggatgcatatgatatgcagaatgcctttaattctagcactaggggtatagtgaaatcctgtctcaaaataaatacattattttttaagtgaatttttggattcaacctttggccttactaattaagtttatatgctatagttctggtcataaagtcctatagggaccaaagccacaaaggcattgatggctggaggcatgatttactgcagagaggacagcttagctgctaccctcactaaataaggacatttgctgaaggtccccaggtagggatccctcagtcgggctttgggcaaactcggcaggcagcagcctggatgttctcggtgacagagggtgctggggatcgctctgtgggggccagtcccggagcggtggaatggagcagcagactcttccgacccaaccccggggggctgctcccggatctagcgcacgcgcc

SEQ ID NO: 38609 - DNA, 499 bp, Mus musculus
  source 1..499: mol_type = other DNA
ctaaggaaggaagtctttagaaaaagcattcctatggatttttttataggtagatagaataatttatcattaagttaaatcctgtcactagaaacagagaaagcagctgtacacctgccaaagaagggattacactcttttgacgtttgccaaagaggccaggatcccgccctgcagcggtggaggcggaggcagggttgactgcaaatgcagactccgagggcaggcctgttcccagggtccggggatgctcggagaacacggcggcggcaaggccgaggccggaggctcagaccttcttcccggcagccccggcagtgccgactccgagccctccctggacccggacaggccgcgtctgctccacgcggggccgagccgggcccgggcggcgggtcccggcgggacggccggggtgggagcccggggcggggtgacgggggagcccgggccgggggtgggtcccgcagcgccgccggcggagcgttgcggtcacgtg

SEQ ID NO: 38610 - DNA, 320 bp, Mus musculus
  source 1..320: mol_type = other DNA
ctgcatgaagaaatcctgctgagtctaccactgagatctcaggctgaggcctgagaaggagaaagtgaccgggtgatgggcaaggcctgcccctgctgcatgggccttcatgattcatatctataatctcagcctttgaggagggttccatgggaccagactctgacttaggtccttgttgattggtaacggcctgaaaggagccagcccccttcctgctcctgagccttcccaggcaaggctagcagctcctgttatgaggagcctcccaggacaggcaagggcctcctcccacagaaagggctttcctccaaagccgc

SEQ ID NO: 38611 - DNA, 522 bp, Mus musculus
  source 1..522: mol_type = other DNA
tgggtaacagatcttacaccgcgttctcatttactgtcctagccagtgaccccggctactccgatgttccctcgccatcagacgctgaggccagggggaggacgcccgggtccgccgctgtatcctccgctcttacgtaaagtacttcgagtccggacacctcgggggctggggcccgggaggaggcggccacagaccggagcggggcggagccgccggaccccacggagccgcgtggactgagcggggcgggggacccaggggtaaccgagtgggtagccagcccgggggcggtccggggcggggcggagcaggctgctggccgccgtccgcgcgtccccgcgtccctcccgccgcccctcgagccccgccggggccgccttacccgccctcccggccgcggccgccgctcctcaggacaccgagcgttcggggccggaacccggagacaagccggtgccgattggcgacgctccgtcacgtgaccgcaacgctccgccggcggcgctgcgggacccaccc

SEQ ID NO: 38612 - DNA, 355 bp, Mus musculus
  source 1..355: mol_type = other DNA
ccagaagagcagccaatgctcttagctatttttaagatttcactaaattgtcagcggttaagagctgctcttaactgaggtctcttaactgactgcttttccagggtcctgagttcaaatcccaccacatggtatgagatcagatgctgcagtgtacttacatataataaacaaattatatatatatatatatatatttcactaaattgaaagcctgtcacactgtagctcattcccagaattcctcatcatggaatcactgggactgaacgttcctgatctctttgcggggaggccactctcatactgtcccaacacccgcgtgcgcgcgcgcgcgcacacacacacacacaca

SEQ ID NO: 38613 - DNA, 321 bp, Mus musculus
  source 1..321: mol_type = other DNA
ccttccttcctattcacctttagtaaagagggggaagggggaaaaaatttttttttcgcgtgagctgaaaccattttgtgtgccagtactaaccaaaaaaggctgattagtatggtgggaggcctgccaggctgcagggagggcaaagtctgttgcccacgcctggaaccatgggcggcctgggtgagcagggccggccacgaggcaggcccggacttgggaggctcgccagctcctccctgccccgcccccgaggcggaggggaccaattgcaggccgggccgcgccaggcccgcccctcggcgtcaccccactcggccg

SEQ ID NO: 38614 - DNA, 475 bp, Mus musculus
  source 1..475: mol_type = other DNA
gaatctaacattttacaaagttactcaatcttgatgaacatggtttcctcacctgaagaaacaataaagcttacataattttgctgattaaataatacatgtaaggtgtgctttgcaataggtatttttcaaactgctgcccataaagtacacagcataattttttcattataatccagggtatatatatatatatatatatatccccaaaacaaggaaaataacacgatttactacttagatcttgccagaagaggttgtctggcgtcggacttcttagaactctaggaatcttcccagggtcctctacaagagcaagcagccagtgctcttatccactacattgcgttgacaactccattagggaatttcataaaaattgttggaaaacaaagctgttaattatgacggctattactatgacccgagggatggtctgaatcccccctcctcccctaaggttaggggaagaaag

SEQ ID NO: 38615 - DNA, 811 bp, Mus musculus
  source 1..811: mol_type = other DNA
gggcaggcgaggaactacaggtcccggcatgcatcgctctcgctctccccgggccgagaaagggggcacagcatggccgagcccgtgacctcgctggatctcgagggctttgggccaggaacctgctcccgggagccgtttcaggtcctagctttaactttcaagtgggcgagccctggcgcaccttcgtccaggtggacggcgcacgctgcggccgaggggttcccgggaggcgaggcctgagtccctcggcgcgcccgagcctcgtgcaccccgcccgggccccctggcagcggctctcgcgctccgctccgcccctctcagccgcacagtgcagccggatcgagttggcgttgcagtgggggcttcttcccggacccgggccgcaccctccggagcgtgcagccgccgtgccgttttcagggctgcagcctgcgcagggaagacccgcggcccaaggcccatgagcctgcagccgaggactccgcggcccctcagaggcaggggcgccgactgcgccccgttctccgccgccttcatctcctcggcggtcatggccgctgggcgcaccgttggctgcgagagtgtggcaagcgcgagcacggcactctggccgccgaccggagtgagcgacggggcggcgtgcggcggaaggcggcgctgcccacctcgaaccgcgctccaggctcgcgcacccggctatccgcgcgctcgccggcggcggccgagtggggtgacgccgaggggcgggcctggcgcggcccggcctgcaattggtcccctccgcctcgggggcggggcagggaggagc

SEQ ID NO: 38616 - DNA, 514 bp, Mus musculus
  source 1..514: mol_type = other DNA
tactgaggacctaagtttgcatcataggtgcacctgtggccctagtcctagtcctgtggggcacagtctagccaattggccctcaaaaaatatgttcaaggcataagtaatgattctaccaaagtctaacttggctttacttttttcaatttctaaaaataaaaaataaaattgaagctcagtggtaaatttcattatgtccttcagtgaatgcaatactccaagttaggaagaggaaattgatattgtatatttgcattcactgtcctttttaaaaaaaaaaaatggacaggtgtattgattgacttcaccaaaccatgtgatttctttcatttttcttttaaaatgtctaaagcagcctgcaagcaccatctttcaaacatttgggtaacttttagaagtgaataaaagaatagtcctagaaaatggtctggaattgattttttaatagttaatatgttacaaaaataaatggttggcagtttactttcactgcccatcaggtaaaataaaa

SEQ ID NO: 38617 - DNA, 359 bp, Mus musculus
  source 1..359: mol_type = other DNA
acacatatataaattaaacatttttagtaattaaattggttcttctgatagaaagcattccctgatgataacactataaagcacattaataatggagttatacagataaccttcagtgccacttcctaaggaggcctcaggattttccctttccgtgaaaactggaaaaagcagtgactcacctctatcaaagagttgtttcaaataggacttctgaatgacagtgaccacggtgagtcccacgggcaatctaggcaatatctacgcacatatgtacacctgaaagctgttatcttgcctgtcactgggctgcgactgcgctcaaacagttgaggctgaggtttctcagctggcacgta

SEQ ID NO: 38618 - DNA, 227 bp, Mus musculus
  source 1..227: mol_type = other DNA
tgcaaatgaggtggtaagcataacccatgcataaccaattgtgagacacaacttgtgcagaaggatcctgttgcagcatcgttcttgctggtgagtcgggcgcacgcaagagagacatgttacaccttcctttcttaagacaataacatgtaagagcctgaagcagcagtcatgaagcctgcatgggtctgcacccagccctggtaagaggcagtgggtgtaggcac

SEQ ID NO: 38619 - DNA, 395 bp, Mus musculus
  source 1..395: mol_type = other DNA
gctcattatactagggaactattatacaataaatttctttactacatggatatattttactttaagaacatgtagtgaaaatctattgcattctgacatagctgctgtatgtttcgaatttacttacttacatcataattattcatgatcagaagaatggccaaatctagagattctgtgtgtaaaaatgttccaaaattaaaatatatttaataacagcatctttcatcaaagcattatttttctcaaagaaccggtgataagtaagggatattttctaattctcaggcattttaaaaacaaacagaaaacttgtgtgacacatgatgtgctcagtactgagaagtgattaatgaatcaccagtctgggctaggaagcacatacagtatataag

SEQ ID NO: 38620 - DNA, 436 bp, Mus musculus
  source 1..436: mol_type = other DNA
aaactttgtctctcacataaacttatatacatattttaaaatatgtatttgttttattttatgtccttgtgcatgcagaacttgaattttcatcctctggatgagtactaagcactcctacacagaaattcttaagtttagaatgtggcaacaacatgatagaattggaatagacatttctgtttgaaaataatttcatacatagaaaggtttggtttttcctaattttgatatgatttaaaatgctaattcaatttaactaatagcaaaaatattatgataataatagtaaaagtattatgataataagtaagagaatgctcagcctataggagaaagagagtcagccacagcctgcttttgtttgaaccagactgacacaatgctatctgtatagatcatataaaaagccagatgtgcaagtgtatacctgtat

SEQ ID NO: 38621 - DNA, 198 bp, Mus musculus
  source 1..198: mol_type = other DNA
cttgcacatattactatttatttttacaataatatattgtatcttgattgtcagtcacttaaatttgaatacatgttacaccttcctttcttaagacaagagcctgaagcagcagtcataaagcctgcatgggtctgcactaggccctctgcatggaattcctaacagttgtttgtatgagggaagaacacagaaaaa

SEQ ID NO: 38622 - DNA, 457 bp, Mus musculus
  source 1..457: mol_type = other DNA
cttgttgaagtcttaggtttgggactgtcatcagtgacagctgaggacatttcacagtgtcttaagtgatctgtgagatactaaccatacttcatagtcattatggtcatggaaaaatgagtgtgagtgtctgtacacatcccctgtctcctagaactcacagccagcagactgctgccagtacagtggctttaaggaaatccttgctaggcctacaaatccttcgatgagttagcaggagcccttagctcagactgttgtgttgccatgggttctcaccacagctcctaatccacattttcataacatagaataaaatgtcacacattgagggaaaggtaaatttgaactcaggataaatatttcacatttgttagaaaccaaaccgtacgttctgtatgtggcacattcttgtctaaagaaccctcagccaccagtgtgggcgggtgtggacaca

SEQ ID NO: 38623 - DNA, 280 bp, Mus musculus
  source 1..280: mol_type = other DNA
tagcacagatgggtccatggctccagctgcatgtgtatttgaaatgtaaataaataaagtaattaataataaaaaagaaatgttctccaatggcacagctgctcatgtacaaagctctgagtttgatccctgcagtggtggtgcacaccattgccagcctggtctacagagtgagttccaggatatccagggctacacagagaaaccctgtttcaaaaaagttactttttgtaccttgaaatctaaaatatgtctcagcttatcaagtcagctgatgtga

SEQ ID NO: 38624 - DNA, 471 bp, Mus musculus
  source 1..471: mol_type = other DNA
taaaaagagtcaaaaattaatagtcaaaaattattctgagaatgagaaagatcacaaggcctgacctgatgtctcatgttctcatgggaacaggaatgaaagcctggtgctagcatcagagtctttagacgaaaagatggcatcactcttctatctgtctcctaaaaaaataaataaataaataaataggcataaatttctacagtccatttgtagacatagagatccaagcacaaaacttaatatcataaagtcatttgatttttagaaaagtaagggaatgtttgtgaacttgtcttgggcaaaatcatcttcgatttaagagcaaaatcactgtctgcataacaggatggttatacattgatgtggatgtccatgttaaattttacagcttctacaaagctgtttgtaagtgtaaaatgtgatctttatgtgaatatttgcagcagcttgacacatttgtgaccatta

SEQ ID NO: 38625 - DNA, 173 bp, Mus musculus
  source 1..173: mol_type = other DNA
acacagagactcaactcagagttgtcaggaaagaattggtaatattttctttgattcccgctggacagtaaaactggtctcattacagtctaaggaaatgccttttgctaggccctggcatagtctcacaagatggatccagggatccaccctataataataaatgcctttct

SEQ ID NO: 38626 - DNA, 274 bp, Mus musculus
  source 1..274: mol_type = other DNA
cattgttggtgggattgcaagcttgtacaaccactctggaaatcagtctgacggttcctcagaaactgggcatatatccagaagatactatgtataatacagatatagctctctcttgtgagactatgctggcctagtggcgaggcccattggacttgcaaactttatatgccccaggcccaatgtttactaagagtctgtgcttacaaaggggtcttgatgctttgttgctaagtagctagcacttagtctgccagatagcttctgaatcagc

SEQ ID NO: 38627 - DNA, 470 bp, Mus musculus
  source 1..470: mol_type = other DNA
cttactcccatatatactggaatactatgcactagtaacaatactgaaagctaaaagcagacaggagtttccactcttttcttggattggaaagatttttgaaatcacaatgaaggggttgagtgctcctgctcacagcaacacatggctgagaggtgcaatgagcacagtagaatttattatactatctttttatattctgtagaactagaaagaatgaagccgatccaaaggaaacagccttaaagctttctttaaggattcttaactctgtaaaaagtataatttacatccagtaaaattaattcaattctgtgaattttgaaaactatataatcttgcattcttcatcatgatatataggggctgaagatttggctcaaccattgagagcacctgtagtatacatacatacatacatacatacatacattctgttacatgtaagataaataagactgaaacagtca

SEQ ID NO: 38628 - DNA, 589 bp, Mus musculus
  source 1..589: mol_type = other DNA
acagtgtttacttaatttaggttccacttagtttaaaaagaatttgtacagttttaatcttctttcagcagcctcttaattcatacgattctttttatggatttttataatggaaaacttttttttttttttacacataaagatgtatttttattttaaaaatgaaataaaataaaataaaataaaataataatatcatagacatttgatatttagaaaaataagggagaatatttgtgaacttgtcttgggcaaaatcatcttagatttaagagcaaaatcactggacaacaggatggttatacattgatgtggatatcaatgttgatgtagaactaacacgcctttttaaagctaaattgtacagctactacaaaactgtttgtaagtataaaatatgatatatctttatgtgaatatttataacagctttaaggatccctgtgaaaatgatacatttgtgaccattgaaatattatccagcctgggcttgccctatctcatgccaggcaaagtttcatttgagaggagacacccaacctgacagtttcacaacatctttgtataatatttgctggtgagactcatg

SEQ ID NO: 38629 - DNA, 534 bp, Mus musculus
  source 1..534: mol_type = other DNA
tgctttacatagcagagactaacagtgtttacttaatttaggttccacttagtttaaaaagaatttgtacagttttaatcttctttcagcagcctcttaattcatacgattctttttatggatttttataatggaaaacttttttttttttttacacataaagatgtatttttattttaaaaatgaaataaaataaaataaaataaaataataatatcatagacatttgatatttagaaaaataagggagaatatttgtgaacttgtcttgggcaaaatcatcttagatttaagagcaaaatcactggacaacaggatggttatacattgatgtggatatcaatgttgatgtagaactaacacgcctttttaaagctaaattgtacagctactacaaaactgtttgtaagtataaaatatgatatatctttatgtgaatatttataacagctttaaggatccctgtgaaaatgatacatttgtgaccattgaaatattatccagcctgggcttgccctatctcatgccaggcaa

SEQ ID NO: 38630 - DNA, 360 bp, Mus musculus
  source 1..360: mol_type = other DNA
tatagtcaaaatctagagcagtttttctagggtctcatatgagacatcctgcatatcaaatatttacattataattcataatcgtaccagaattacagttatgaaatatcaacaaaataattttatggttgagagtcaccacgcaaaatgtttccatatgtaaacatgtactgtagtcctgaggtaggatctggctccagaacaaaggatctcttattccctgagaggcaagaagtttgtagagattctgtctctggggagaaaggatatggacagtaaaactggattagtttcacttcattacagtctaatgaaatgcctcccttacaatgcttcaatttgagtcaaacattgggctaa

SEQ ID NO: 38631 - DNA, 322 bp, Mus musculus
  source 1..322: mol_type = other DNA
ctgtgacacaagctgagctggcagcagtctgtgacagttttggctcccagacagtttgtataggcatatcttgtttcaatccagacatgacattgtaatgcttataccaagactcgatcttgtatcaagtgagcctgagggaaatccaattctgaaataaacacttgctttaaaattaaaagctgtttgctttgtcaaataatacagcctttagcaattctgattattttatttgcagtatactacattgttttcgatcctgtttttcaaaacaaaacaacaacaaaacactgaaaaccttcatgtgctgtgggtatccaca

SEQ ID NO: 38632 - DNA, 609 bp, Mus musculus
  source 1..609: mol_type = other DNA
gtatatatatatatatatatatatatatatatatatatatatatacatatatacatatatatatatttatctgacaatcaactaatgtaaggacatcattagcccattaactaaatactgtgcagtagcagtagctggtgatactcctgatatttaccagcaaacactcacatggacaaatgattcttgtctggcatagaggtgtttgtaagcatgtataccacaatggaaaaatcttgcacatttgctcaaatcttcagttaagatgaatcataaggcagagtcctgtgcctggtattgagcataatgactgtcaacacacacatctcaagtaagctgtgagacgtgagtcccaagttgtctgtacacaccccctgtctcctagaactcacagccagcagactgctgccattaccaggtaattgtgaacacctggtcaaagaaagcatctttaaggaaatccttgctttccttctttttcacttgtgatagttaaagaaggaaataaaaccatgtgttgtatcttctgtttcaaagataaaattatttaatagttgcagacacagacagcagtgtccacagaagacttccttttgttgcttctcagaa

SEQ ID NO: 38633 - DNA, 413 bp, Mus musculus
  source 1..413: mol_type = other DNA
ttacattctatcaaagaaccataacacaatataattttccattacactgccttacatcatgcactgtatagttttttgatacactctattacatcactaacatgactgttgtaaatttccaatttacttactgtaaataataatgcaagaatatctctctcagatatagctgtttctgtgctctttgtgcaccaaatatcataattactgacaattgtgaggatggccaaatctagagattctgctgactcttctaactaactaactggagaataataaataataataaataattaattggagaattaataacagcatctttcatcaaagtaatatttttcttaaagaatcagtgtgagggatattttctaattaaaagtccttattaggaagcacatacagtgtataaaagg

SEQ ID NO: 38634 - DNA, 277 bp, Mus musculus
  source 1..277: mol_type = other DNA
tgttaaaaacaatgaattcatgaaattcttagacaaatggatgggatatcatcttgagtaaggtaacccaatcaggaaagaacacacatgatatgcactcactgctgcccagatgccaacaagagcctgctatagctgtctcctgagggcctttgtcagtgcctggcagatacagaataggtggcccattggacttgagcccgcattggaaatgtaaatgataaggtcagcttgaattatgtttctaaatcagagtcagtctccagatggcgccagt

SEQ ID NO: 38635 - DNA, 249 bp, Mus musculus
  source 1..249: mol_type = other DNA
gggtctgctcagaacacttgcatgtggtcagcagagggcaactttgtccttcagagtccctcagaggttacactacattgtgtcttatatatgacatgttcaaagaataaattttaggtatatacttagaaaaatatgctgtacaagggcatttatttggcagttatgttatcctcttctataacaaaacaaaaagtagcaaaatgtaaatgagctaaattgacatggttaaacagccctggcttaacg

SEQ ID NO: 38636 - DNA, 532 bp, Mus musculus
  source 1..532: mol_type = other DNA
ataatgatttatctcatcacttcgctagaattaaagcctgaaataactgtgaattgtcacagtatagtagcattttctcacaaagctctttaaagctttggggacatagaatgtctatctgtgaaaaatatcatataaactaaatgttgtatatgcatgaaagaaattatttaggcattgatttacaatcatataagttatgaggtagcttttctatatcaattcattgtaattaactgttaaatgaaattcatcactttacattttcaatataaagtagcttataaatgtaagagatgtgtgttaatgcaccttataattataaacttagtttatctttggcttgagtcatgactatggacgataggatgtcacacctttgttcggaaacatttattaattttatttattaattttatttttaataaaaaagtttattaattagaatttatgtccattggagatgtacacatttcacgggatatgacttgtgacaggcacaccccacctctccccgccctgccaggctggg

SEQ ID NO: 38637 - DNA, 288 bp, Mus musculus
  source 1..288: mol_type = other DNA
tgtcaaatgtagagatcattccagaatgtaagaaatcatgcttgtaattttttaagatcccagacattttctgcatttatgtggtgctcaataacttatctgaatgagatggatatcatgggaagatatgtgtatagggatcatcttccaaatatccccacacgttttaaatccataattaactaaataaaactggtattcaataaatgcctgtacctgcctacatatacaaagaaaccaatgcaaaggattgcatgaaaaagttttactctctcttccatttaacca

SEQ ID NO: 38638 - DNA, 383 bp, Mus musculus
  source 1..383: mol_type = other DNA
ttgttgtcagttccctgctggaaacagagcagaagcagccactctgatgggtttctccctttctgcttttggtgagaaggttttatcaaatagacagttaacaatcttcttatatcagattttacagatgtgtggcaccacatataaaatatgggcatgctgatgtttcttatgtttgaattacaatggaatttaaatattccttaatccgatctttcaattccccaatacttaaagataacaaaaaagtataattccttcttcaattacgggaatctgtaggcatgattccagcttctgtggaaacaaaccttaatttaccatgagtttactttgccaagtaagtgtgatttacagttagttcaaacaactctaaagttaca

SEQ ID NO: 38639 - DNA, 402 bp, Mus musculus
  source 1..402: mol_type = other DNA
atggacagcataaatctacttgtgctaagaatttttctaacatctgtttttagaacccctaggtgaagttggcttcgggtcaacacctcttcctaactagtgttagcattaatgttgttcattactaaaacccaacctttgtttaggctgtattatgttgcaaagcaagctcagtgagcttatttcaggaacttgcaggtgcagcaaggcgataactccacttgagcctgcgcactgtgtggtaggagcaaattgcgcaacgctaatattatccaagcacagtttaaaaaattaccttatgtaaaggaagaaatatgaggaagaaaagtgttcctctttcaatcttatttattcttgtctgaggcaataaactgactgtggctcatagacacatatttgaga

SEQ ID NO: 38640 - DNA, 354 bp, Mus musculus
  source 1..354: mol_type = other DNA
agataatttatgttatcaagctttttaaaagaaatataaattaatcctatctttatttttcataccaaaaagatagtgcattttctataagaaacacaaatgaattaaagatatcagtgtgtctttgccactctctcaatacagcaaggcattgtttaaagagtttgtggtctctctatgtctctttccatcacacacacacacacacacaagaaaactggattttctgttcattcttacatgaagccttaatgtttgcttgcctacaagcacagtaaaagctgttgctttctctcactttcactagagagaaattgactttcattctgtcctcacaaaggaacaataggattg

SEQ ID NO: 38641 - DNA, 444 bp, Mus musculus
  source 1..444: mol_type = other DNA
gccagcctggtctacagaggagaaaatttagaattacatactacaaaattaaataaataccctggcaagctccatatggtgctcctgtataaatgatggagtatttatgacactgtgattaactcaaacttaaaaggtgccgttgcaatctagttttatttaatccaagaactcattttaaatattatctaagaaacatatattgtgatgagttttgtatttcttcttttttttttttttttaaataaaatgacttatattggatgcaagaatttaagtgaactttaggtcataaatgtgtaatttcacaccggataatataaatgataagattagacattattatatcgttcttttcaaatgatattagatttgaagtcacaggcatcagttcaattacgtgatgtattttgagctttgtcatttgacaggatactccctcag

SEQ ID NO: 38642 - DNA, 473 bp, Mus musculus
  source 1..473: mol_type = other DNA
atttagaattacatactacaaaattaaataaataccctggcaagctccatatggtgctcctgtataaatgatggagtatttatgacactgtgattaactcaaacttaaaaggtgccgttgcaatctagttttatttaatccaagaactcattttaaatattatctaagaaacatatattgtgatgagttttgtatttcttcttttttttttttttttaaataaaatgacttatattggatgcaagaatttaagtgaactttaggtcataaatgtgtaatttcacaccggataatataaatgataagattagacattattatatcgttcttttcaaatgatattagatttgaagtcacaggcatcagttcaattacgtgatgtattttgagctttgtcatttgacaggatactccctcaggacggattgtttttaggttcaagccgtatctctgaacatccaagaaagggcttc

SEQ ID NO: 38643 - DNA, 420 bp, Mus musculus
  source 1..420: mol_type = other DNA
cctcctgaatgtgccatttattgatccagtgagtggtgtctaagagatcagagttctcagtacaaatgctgtagtcacaggatgtgctgaaactggtcatccatccattaaataattgattccttggctgtgattcccaacactcccaagaagcaagtgtgggttcttactggtattttgaagtttacttataataacagtcagtattaccctaatcagcagactgattggaaataaatttagggatgaaatctctcctaagctttcttgtttggaaatccaaaagctatgtacaagttgatttgtctagatttaatttgcttcatagtttatagcaaatagtagtagctattttgagctcaataattctcatttcttcattattgagatgatgaacatcctttatgttgcattttacca

SEQ ID NO: 38644 - DNA, 421 bp, Mus musculus
  source 1..421: mol_type = other DNA
tatccttaaactaagtctattctcatttacagcagtaatcaagtgatggttgtttcaaaactgtacttatttgatcattttttgttaatctgagaatgagagagagagaatgagaatttatttttatgtttcaggctattatatgtatcatataattccaagtcttaaaaacttagtagactttgttcttctccttatttgaaaatagtaatgctaatatgtcagaatcattcccagtaaatccaagagaatcattcactgcttaaaagtttatgaccaattaatcgtgtcagtttcaatggggagtgtaaccaatgtcttttaagactgtagtcaatggatatctaaaacgacagtcatgcatcatacagcatttcagttttcttcagaagttacagcctcagaaacagccaacgcgttt

SEQ ID NO: 38645 - DNA, 424 bp, Mus musculus
  source 1..424: mol_type = other DNA
tctcttagagaatgttgtcaacactttgatcttgagtcagaaatatgagaaacatttttttcattttgtatgaatgaacatgacaaataatagattatactgttctgcttcagtaggaacacacaggtagttaataacagcgctgtaattaatagctttcactttctttttgagtaaaataaaaaactaaaatcgattagggggtctgcttcgggacacccagtgaataatgcgttgctctctgcctttggagacaggaagagtctctcctccttccccaaccagttctgattatgctttactactaggagtcacatccccaccttgcaactctggcattctgaatacaggctcagaggggaggggccgggtctctccatgcaggaactggagtcagaggcttcccttgctgcttgcagggaaa

SEQ ID NO: 38646 - DNA, 432 bp, Mus musculus
  source 1..432: mol_type = other DNA
tctgtgttttgcacacatacttaaaaagtataagtaatttcagagacatatcttttcatggtgtatataggtataaaaagccaaggcataggtcagagtaaaacatactcttttctaatcaatttaagtatcctggatactacaattagtagcagttttaactattatttctgacttttatgttccaactacaaaaacctgtcatttttacatctaagttgaaacattacctaaactccagacaaatatgtagattcaatataaatatttcctgagaagacccagggaaagatctaagacttactctagaaatcctatgtgacttaagtcatatttctgattgctcattaaaactattaaaagtaaaacatgtaatgaagaattccaatatgaagcaaagcttcctttcctcctctagataagagcggctat

SEQ ID NO: 38647 - DNA, 358 bp, Mus musculus
  source 1..358: mol_type = other DNA
tgctctccttagctgagaacaggaaattgtttgcattcataattctcacatcatatcatcacggtctgatcacatggtgtgtggggccttgagtgtgatggaacccactccacaaatctaattgtgaaacagacatgtcactgtgaaccaacactgagtgttcttacttagtactttttaaaatatgacttgtaagtcttattttatttgctctgagcctggttctctagtgacaacatcacaacactgttggaaaatggtttttaaaactatgcctgtgtttctgaaactgaaactctaaagtagggacaataaatgacccagaacctgcagggttgattgattggcagtgactttc

SEQ ID NO: 38648 - DNA, 252 bp, Mus musculus
  source 1..252: mol_type = other DNA
ctctctctatactattgagggtctttgtgatttgattataaaatgaatggattcatctctccttgaacccgggctcctctgtgtttgttttgggcatcaaacaagaaacttggttagagcattctttgaattaacaaattacctttaatatcaatcctcaaaaataaaaacccgactacatgatttttgcgtttccacccggatccagcaggtccttagcgccgggggcggagcgggggtggggcgtcgtga

SEQ ID NO: 38649 - DNA, 293 bp, Mus musculus
  source 1..293: mol_type = other DNA
gcatgaactaggtattagctgcttaaatcggggttctcagtactggttcttgagatccaccttgtttgagggcccgcctggtgaagcccctcatctcgagtttttccaatgggaaggagtcatggaacatgggtgctgaatcctgctgactcacccaccacgcgcacgctgcgcttcaggctacctcggtagctcccggcacccggtccggtactggaacttcatgatggacctcaggatgtaggggctccccggacggggcctgctgcgcgcgctgatgactgcgtctcgcg

SEQ ID NO: 38650 - DNA, 488 bp, Mus musculus
  source 1..488: mol_type = other DNA
atctttttagttacttaactttcaattttacaaaaaaaagatgcaaaacaagaacttctgcatatgtatacgtagtcaaagagaaatccactaggactttacagagaggtcagccaatggctcactttctttcttaaagactgtattagtattcttaaggaatgtctttacctgagtctttgacagaggcattcctagggcataagtctgggaacaggctgaagatttatatctcagaatgtactacagtcttcaaaggtaatactttgaagaagaaaactgtctaaaataaaatttagttaagttcaaatgaaagttaagggtgaccactcacgcgcgcgcgcgcgcacacaccattctgactcgattgtgtttaagctgtggttccagagagtcatatatgacattgtagtgaaaatgttcttatgggaatggaatatttgattacatcaatgttgtgcctgggaatgaatgcacagcctcatgaa

SEQ ID NO: 38651 - DNA, 324 bp, Mus musculus
  source 1..324: mol_type = other DNA
ttcattttgagaaaacacaataatactgaattctttctgggtctggtcagtgatcagggagtggatatcccaacagtttgtactagtgcaagtccaaggatgtgcttggtttgagatcttaagtaaccttagatcaaatttggtattttctttattaagcgatcagataatatgtgatttaaaatttgtttaacacaaaataaataagtatttctttattttgaaggtagtaattctgagtttaccatggtttatttgatgtgtgcacattgaaaacaatctattttgctgtggtgttttgtaccaaaactaaaagagcaaatt

SEQ ID NO: 38652 - DNA, 565 bp, Mus musculus
  source 1..565: mol_type = other DNA
caaataataaaataatataataaaaaataatataataaaataatataataaaatagcaaataataaaaatgatgtcaccaacttttgtttcttcagatcttggctatctatgtacttaatacatatttaagattttcctacaacaaaatccagagtgttaattagaattaccaaatatctaaagcatgctaagaacagttgacagctttatgaatattcagaaactttgtattttctcaccaatatttaatgcttccattattagtttaactgtatatttaacaagatagttgttgctattaatctttcatctttaacaatatatcagcacttgcaaattaatgttacactgtttgctaacactagccctattaaatgactattaaattatttttattttctatgtacataaacatatttattttcatatgaatacatctagcatatatgtgtgtatgttaatgaccaaagcttatgcataggatgagtaaaggatttttttccttctatttattttcaaacagattgaaaactatattttgtatttttttgcatacttttcaaa

SEQ ID NO: 38653 - DNA, 531 bp, Mus musculus
  source 1..531: mol_type = other DNA
gtgctcagttcccacagacaacccagggagcttgtcatattcaattatagtacaccccaacttatcactaattagaagtaaaaataacctttgagaaaaatagcatttaaatatttcaaatattatttaatatatatgtttattttgacacaaaccattttccaacatttttttgtaatttctctgaacacttccagtaatctaagagatgctaatttgatagtatctggttcattttattaaattcatatgaattattgaataaaatagtgaaaataattttaatatatcaaccttcctactcactattttaaaacattgtttccagtccttattaaattcaaacatggcaaaatatatgcacaattgttttctattactgtgttcttttcttaaagacattaaaatattttacggtgttattcctatgagaattaaatctaatatataaatttagcctttttatttatgaataatttttttttcatttttcctactaaaaataagaatatttttaaccatatcacgtga

SEQ ID NO: 38654 - DNA, 548 bp, Mus musculus
  source 1..548: mol_type = other DNA
tgctcagttcccacagacaacccagggagcttgtcatattcaattatagtacaccccaacttatcactaattagaagtaaaaataacctttgagaaaaatagcatttaaatatttcaaatattatttaatatatatgtttattttgacacaaaccattttccaacatttttttgtaatttctctgaacacttccagtaatctaagagatgctaatttgatagtatctggttcattttattaaattcatatgaattattgaataaaatagtgaaaataattttaatatatcaaccttcctactcactattttaaaacattgtttccagtccttattaaattcaaacatggcaaaatatatgcacaattgttttctattactgtgttcttttcttaaagacattaaaatattttacggtgttattcctatgagaattgaatctaatatataaatttagcctttttatttatgaataattttttttcatttttcctactaaaaataagaatatttttaaccatatcacgtgaaatactatacaaaagcacc

SEQ ID NO: 38655 - DNA, 738 bp, Mus musculus
  source 1..738: mol_type = other DNA
aattctagatctcacttattccagggctaactgattgaattgttaaattatattgggttattacaattgtattttatgtgactaaaatgacactcaatttggaaattttgaatcatcattctactatgaatcattttttcatgttatttcacttgttggctaatttttttaaataaaatggaattaaaatggtctttgaaatattttgaatatcatttgttttaagcatgatttttttgacatagcattttcaagaatgtacaatatcctttaagttttagtcatttctctgaactcaattattccaaataaaataaattttacatcaaacatattttaataaatacattagctattaaaatcatatgcatgttttatacacatatatatgtatcaaccttcctaggttacctatctagagaagtcagattttctcattattggattttaatttattactaaagtttagctgattgctgtgtgtgcatgcacagataaaaatgaaattatgtgaaattctgaaaataattttaaaaagtaatttgaaatgaattcaacattcatttctattagtgtttcatggtgttagtcctatgaaaactaaatttaatttataaaacaattctttggtttgtcatgccttatcaaaaatattttgccaaaagttgttgttgctgttgtgttgttgttaccacagcactaaaaatagattaggtttaaatttccaactgcaaaatg

SEQ ID NO: 38656 - DNA, 151 bp, Mus musculus
  source 1..151: mol_type = other DNA
tcctctagctgcatatgaatcagaagatggcctagtgcattggaaatgtaaatgaaataaatacctaatttaaaaagtggaaatatgtgtgctttaaagcattcctaatacacacttagctaaatttttcatgaggaacctgagctgcaca

SEQ ID NO: 38657 - DNA, 567 bp, Mus musculus
  source 1..567: mol_type = other DNA
cccaattatcagacaatatataagtagactgctattttatgagtgagctttctgaactttctgacaaatctttcctagaaagatggacacaatacagttagtatcttatctagttccaacatgtgcaattacagatgattttccagataagaatgtcatatcatggacgattaatgatagaaagcttttgtaatttttgtatgtaattttattattaacgaaatgtatttaaaagcttttcctcttctacatatacctaaagcttaaacaatttatctattcttttcagtctttctttttttatatacacatttttgtttatttaaaggtagtaatctctgtgtgagatagaattttaacagcttctttttatttttatcactatgaattattttgtcatctatttttaaagtagtggatattttaattcctccccctataaaattatataactataatttataaatatttgatcagcaatatttttataatcacaccactcctttgtgtgaataacatattatacatcacagatgcatctctcactggtgcagtaggaagtgagaa

SEQ ID NO: 38658 - DNA, 631 bp, Mus musculus
  source 1..631: mol_type = other DNA
cagatgacttcatgcataaaatgtcttgcttagtatgttctaagaatatctcatatagtttttaaactaaaaatagcaaaatagtataaaacaactaggatattcagtagcattaggttagctaattaatttatgctgtacataagtaattagtaattatacattactttaaatatatatatatatatatatatatatatatatatatatatatatatatatgaaatgcttgttctttatttattaacctggacatggtatacagctataagctcagggaaagaatatttgctgagcattttcattgtcttagatttaattttcagacagaatgacattaatgttcaatggaaatattatctatgattgaagatctagaaaattaaaaaaaaagacatgtgagtgcttaaaagcattcttaatatatacttagctgcaattagcataattcaaaatcaaggagtaactaaaaaatatagtaacataagaataaatttcaaacagtctatgacaaaatttatcttctctgtcttaaaatataaattattcacatttgttttgtccacctgatactatatgttgtttcaaattgcaataagcaatttcctccttttgcttagataaagaggag

SEQ ID NO: 38659 - DNA, 639 bp, Mus musculus
  source 1..639: mol_type = other DNA
ttctaagaatatcacatatagtttttaaactaacaacaagaaaatagtataaaatattaggatattcagtagtagtgggttgtataattaatttatgctgtacatcagtaattatgaattatacatggctttaaaatcttgatatatatatatttcatatatatgtatgatatatatttcatatatatgatgtatatgtatatttcatacatatgtatgaaatgcttgttatttatttattaacctggaatacgttggtttcatggtatacagctataagtctaaaacactatgcagaacaagtcctgagtctgtatttcagggaaagaatatttgctgagcattttcattgtcttagttttgattttcagcatcatgacaacatcagcatcaaaataccatacagaatgacattaatgttcaatggaaatattatctatgattgaagatctagaaaatttaaaatgtgagtgctcaaaagcattcttaatatatacttagctgcaattagcataattctaattcaaggaataactaaaaaaatagtaacttaaatgtaatttccaaaatataaattattcacattgatactatatgttgtttcagattgcaataagcaatttcctctttttgctttga

SEQ ID NO: 38660 - DNA, 463 bp, Mus musculus
  source 1..463: mol_type = other DNA
tttaaatcagctgattgaaacaccttcttagcagcatctctaaaaatcagttgtgaatattttcatcctaactgatagattgtaaatgaagtagatatcatgtgataatctatatcacggatcttaaaatatgtatctctttgaatcccatgacttcatgtataaaatatctttcttagtattttctaaagacgggataaagtatttgctgagcatgctcattgtctagatgacatcactgttcacagtctatattacctatgattaaaaatatgtacaggcagactttaccagtggaaatgtgctttaaaggcatttctaatacacattagcatgaataaaaaattgtgagcagacaagttttaagtccatctttttcccaatggttttgctaaagacaatatcatatatagtcatttcttttgcagcatctggcaaaatattttcaaaagcaatttcctct

SEQ ID NO: 38661 - DNA, 288 bp, Mus musculus
  source 1..288: mol_type = other DNA
atgtactcactgataagtggataaagtgtggacactttgccccttcttagaattggggacaaaatatagctgtctctagtgaggccaagcaaacacagaggtggatgctcacagtcagctattggatggatcacagaggccccatagcattggaaatgtaaatgaggaaaatacctaataaaatattttttaaaaaaatttggagcacagaatcttcagtccctctttttcatatcatttatagatgttatttgttctcagactcagatttcaaaagcaatttcctct

SEQ ID NO: 38662 - DNA, 518 bp, Mus musculus
  source 1..518: mol_type = other DNA
tgtctgttacaaatacttactatttacatgtactaactatttacaaatacagtgttattttctgtatactgcattgtgacaaaatttattttcatatagcctcccttgtaacatcatgtgtgtttatattatatgtgacatgatcatgaacatgaaatgctgtgagattaaaagttcataatgtatcctctatgagacatatgatatagaatataccacattcaatccaagagatatttatgtatattaaccttcaaatacctttcttaaggtagtgtcagggaaaaagacggaaaaacaattaatattcatttattatcaaaatgcttaaataattttaaagcaacatttttatttattcctaaaatttcaaagagattatatcaattgtagaatgacttattaaatttttaattctttccatatttcttagaaataattgctgtggccattataaacgactttaacatcatcatatctagttatcttcctataggtgaacattttaacatttttcg

SEQ ID NO: 38663 - DNA, 554 bp, Mus musculus
  source 1..554: mol_type = other DNA
ttagtagtgggttagctaattaatttatgctgcacataagaaattagtaattatgtatggctttaaaatctttatacatacacacacacacacacacacacacacatatatatatatatatatatatatatatatatatatatatatatatatatatatattgaatgcttgttatttgtttgttaatgtacagatgctacataataatatttgctgagcatgttcattgtattagattccatacagaatgacattaatattcaatggaaatattatttatgattgaagatctagaaaattaaaaaggaagatttcgtggaaatgtgagtgcttaaaagcataattcctaatatatacttagctgcaattagtataattcaaaatcaatatgacaaaattaagacactatcttcaaatataaatcattcacatttgttccaatactatatgttgtttcagattgcaataagcaatttcctcgaaaatcatgaggttgagtatcacccggtggaaatttagttccgactttcaattttgaaactcgtaggagatct

SEQ ID NO: 38664 - DNA, 555 bp, Mus musculus
  source 1..555: mol_type = other DNA
taaactaacaacaacaaaaactaggatattcattagtagtgggttagctaattaatttatgctgcacataagaaattagtaattatgtatggctttaaaatctttatacatacacacacacacacacacacacacacatatatatatatatatatatatatatatatatatatatatatatatatatatatattgaatgcttgttatttgtttgttaatgtacagatgctacataataatatttgctgagcatgttcattgtattagattccatacagaatgacattaatattcaatggaaatattatttatgattgaagatctagaaaattaaaaaggaagatttcgtggaaatgtgagtgcttaaaagcataattcctaatatatacttagctgcaattagtataattcaaaatcaatatgacaaaattaagacactatcttcaaatataaatcattcacatttgttccaatactatatgttgtttcagattgcaataagcaatttcctcgaaaatcatgaggttgagtatcacccggtggaaatttagttcc

SEQ ID NO: 38665 - DNA, 307 bp, Mus musculus
  source 1..307: mol_type = other DNA
tgatatagctgtctcttgtgagactacgcagaggcctagcaaacacagaagctcacagtcagctatcaaaagatggcctagccaaaatacctaactaaaaataaaaaaaaacttagtttaacagttaaaaaaaaagaactttaacagtgcaaatgcctttaaaaggtattcgttaaacattttcaaatagaaaaagaaaatttccaacagcctattacaaaattagaagcaggggaatttcagtcccccattttcagtattcaactatcaattatggaaatctattgcagtatatgccagaatacat

SEQ ID NO: 38666 - DNA, 190 bp, Mus musculus
  source 1..190: mol_type = other DNA
agtcacaccccactttacaagtaaaagtggttttacatctgttccttccaagcccatttaaaaaaacaaagaaacaaaatccctagctatttctttgctaagataaaatatacaggaattaagacaaatcttgtatagaattttagcttttgcccgtacgtgtataacatcgtcacagagttaaaaaaga

SEQ ID NO: 38667 - DNA, 425 bp, Mus musculus
  source 1..425: mol_type = other DNA
tctttcaacgtaggttattaaatacatattaacagcttattatctgttgcgtaaaccctgcatttgcagtcattctggaagatctagattttaatcacttgtggagtcgctaaacgaggccttttgattttataagagtactaggaatactggagccctctgctccgcggcgacctcgcccgggtgcccgcatccccggactaaccagctccgggagccttgccgagtagcgcgggcgcctttaaatgctaataagcagcccccgcgtccgcctgcccgcccgccgcccgcgagcacttgcgcggggccatcttcggggccgggagatccagcgagaccgcgagcgcgcgcgtccccagccctcgagccgccgcccgccgccgcgccgcgcgatccgcaccggcctccccgagagcgagccggac

SEQ ID NO: 38668 - DNA, 321 bp, Mus musculus
  source 1..321: mol_type = other DNA
gctcaagctttccccagtttagtgctaattatagccaactcgattccactctttcaacgtaggttattaaatacatattaacagcttattatctgttgcgtaaaccctgcatttgcagtcattctggaagatctagattttaatcacttgtggagtcgctaaacgaggccttttgattttataagagtactaggaatactggagccctctgctccgcggcgacctcgcccgggtgcccgcatccccggactaaccagctccgggagccttgccgagtagcgcgggcgcctttaaatgctaataagcagcccccgcgtccgc

SEQ ID NO: 38669 - DNA, 472 bp, Mus musculus
  source 1..472: mol_type = other DNA
tatcaatgtagaatccaaacccattatttgaagtgttagcaattttactaaacctatttatagtattctaaggtatttaaaaaattatgataatttaaatatgaattaaaataatgtaagataattttaattatagtacagaattatttttatattaccaacaaaatgtcctcttttccatagttgatagctaccttccaaaaggactcaaacaagatgactctttgtttgatattatggagtgacaggtgtatctaattgaaattcctttcagatttgatagtgcgttcaattcatgatctcaattcatttttttccaacttgtataagataacttatcgtagatttccttagaacagtgttggacattagtaatacttagaattaataaatgaggaaaataagccattgtttcaaaaacttgtagaaatgttttgtttcctttgaagaacacatcctgttcttttcaagg

SEQ ID NO: 38670 - DNA, 352 bp, Mus musculus
  source 1..352: mol_type = other DNA
tccacttttctttccctaacatagaagtaataaaagaaaagaatattcctgctttcagtgctttgatatcacagtttttagcacaaataagcttccaaagagtatgaatattggcacaaatatacatgtttgtatagaagcaaacatatcaaactagaatttcatttctaatatctgaaatttcactatattgcttacacattgttgcacaaatatcatgccctatgatttagaactgaattctttttcattttttattagaacttttcttcattaacatttcacatgttatcctgaaaacctgtctctagaactgaattctatgcatggcatgctcctgtcacaagtgtgt

SEQ ID NO: 38671 - DNA, 314 bp, Mus musculus
  source 1..314: mol_type = other DNA
cttccacttttctttccctaacacagaaggaataaaacaaaagaagtgctctgatatcctgggcacaaataagctaccaggtttgttgggtatgactattggcacaaatatatatgtttgtatagaagcaaatatcaaactagaatttcattactaatgtcttaaatttcactgttatgatttagaactgaattatttctttttcaattgtattagaacttttcttcaataacatttcaaatgttatcctgggccaaataggccatctgagaatgtctctagaactgaattctatggcatgctcctgtcacaag

SEQ ID NO: 38672 - DNA, 390 bp, Mus musculus
  source 1..390: mol_type = other DNA
tccacttttctttccctaacacagaaggaataaaagaaaagaatattcctgctttcagtgctttgatatcacagtttctctaatacaaataagcttcatccaaaatgtgtgaatattggcacaaatatacatgtttgtatagaagcaaattcatatcaaactagaatttaatttctaatatatgaaatttcactgtattgcttacacattgtaaatatcatatgatttagaactgaattctttttcattttttattagaacttttcttcattaacatttcacatgttatcctgaaaagcatacaatggctggagggccccaggggagaccatgtctctagaactgaattcttgatagctcatgcatggcatgctcctgtcacaagtgtgt

SEQ ID NO: 38673 - DNA, 640 bp, Mus musculus
  source 1..640: mol_type = other DNA
ttaatatccttaatgtgtagattaatgttaaagagttctcttcaggtctctgaaaattgtctaagaattgtcttaataagaagaaactgtatccaaaaagaaaatcttgagataatgtcctatcagaaagttacaaacaacttgtgttaaataacattctgaggtctgagcctattattgacattgaaaacaatgataactgtatacaattgtcccattgagtgaaacatgaaggttgctgtcatgctcagctcctgaattctaaccttaagcatctttaatagaacaattctaaaagtggagcggattcaagatattgactcatgtatacctcatatgtgtgtaattgatatttgtttatgaatagcctcaactcactcttaactaattatagaatatataagaacatatataagtgacagtggttaagctatcctactgatcataaaaattgaccacattcaatttggacagaaatcattactgtcaatataaacaaatgtgtatgcacactagttttaccccaatgcacattgatacacaaaaaatgtcagcaaatgcaatgagatatttatatattgttagtcattactgcaataactgggttatatgattacatatagtagcactagcagctagc

SEQ ID NO: 38674 - DNA, 429 bp, Mus musculus
  source 1..429: mol_type = other DNA
tgtaaagtagtatagattatcaaggaagttcaaatatatattcctctggaatactttgtaatcattaagaacaattcgtagattcctatgcaatctttctgagccacagtaggatgagaaaggagaaatatctactatcccatgaaattcatagttgaaaactatatatgtggggatataaaaccgcaaatatgaacctttttcatttttagttaaaggtttaatggtaacaaacagtaaatgaccatgtatggtcataattcactaaatagaatgaaatttcaaaggaatagtaaacttttgttttgtttttgtagccctggctgtcctggacactctgtagaccaggctggcctagaactcagaaatcagtgaaacttttaatatctagattgattgtacattgttacactactggttataaataga

SEQ ID NO: 38675 - DNA, 547 bp, Mus musculus
  source 1..547: mol_type = other DNA
ggactttcattttaacttaaaaaatggaaagaatattcttgaattgaatgaaatgttagaaactttcaaatcattttaatcaaacaattaatacttgagactaatgtgagctctgcatgaaagttttaaaacaatgatttacatattgaagaccacagtataataatgctttcatccatgattgtgctcttatgaattgttaagagtaaatgtacacacaagtatttatcaaggagcctcattgatgctcatcagaaaaccaatttgagattctttattcattaacttgaacaaaaatgcattcatataatgactggaactccctacattctaaaatttcactaacaaatttttgactgccataaataatgaaggtttaaagaaattcctctttaatattggagacattatggtaatataaatttccattaaaaatgagactgcattcacctttcaacacagagttaaaaagaaacaagaactcttgtatacattcagttagtcacaagtataattatgttcacatattttaaaaaaatgaatcatg

SEQ ID NO: 38676 - DNA, 537 bp, Mus musculus
  source 1..537: mol_type = other DNA
ttaaaggaatgctgccttttgaaatcctcctgcagtgcaaagtggagttcactttcggatagactgtcctttgaagtttgggaaattgaagtgtcctttcaagctgacactctccatacacgcaagtcagtgtcagatatgagaaaatctaacaatgacatttaaaagtatactgtattctgaaagtctaccaaaaaacatgaacataaaaattagtatcttggtccttaagcatgcaaaaagctggaatctatacctaatcttaactttcaatgggtttatattaagtctccatatatatgttcatacattttttttttttgatttgtcacttgcaatataaatagtcctaatacacaggtaaacgcataacctaatacggtgacgttttcagttatggtactctatgcccgtatacacttacataaggtgatagatcactttgtcctactgtctcagtgaatgttacatgaatattgagacggagctctgccctttaaagggacagcggcacggagatcccctgtccctagagct

SEQ ID NO: 38677 - DNA, 377 bp, Mus musculus
  source 1..377: mol_type = other DNA
cccagcactcagggggcagagtcagaaggatttctgagatcgaggccagcctggtctacaaagtgagttccaggacagccagggctaaaattaaactaatagtacagtgatatttcacattatacttgtcagaatagtgaaggtcatatcctgcagaagatgtataaaatgtgaaccctcattcatttgtcaggaattttgaaaatcactgtcattccattcacaataactaggaaggatatttcatctcctgactggattaagaatgtggtgaatccaaacaatggaataattcttatttgtaaagagacaattaacctttaacatcatcaccacattaggtgttgctcctatagcactcaaatattccattgttt

SEQ ID NO: 38678 - DNA, 345 bp, Mus musculus
  source 1..345: mol_type = other DNA
aggatttctgagatcgaggccagcctggtctacaaagtgagttccaggacagccagggctaaaattaaactaatagtacagtgatatttcacattatacttgtcagaatagtgaaggtacatatcctgcagaagatgtataaaatgttgtcaggaattttgaaatcactgtcattccattcacaataactaggaaggatatttcatctcctgactggattaagaatgtggtgaatccaaacaatggaataattcttatttgtaaagagacaattaacctttaacatcatcaccacattaggtgttgctcctatagaaaactaacactcaaatattccattgtttg

SEQ ID NO: 38679 - DNA, 226 bp, Mus musculus
  source 1..226: mol_type = other DNA
tgtaagcctacctgatatctgtggtagcagaacttctacgagctagatcactgttgcaagagaggacttgtctttacttgacactggtcctggatcatgctgaaggtataccaggatcctggtctagcagccaaaacatggtaaatgtggagttatcaactcccaattttccatttttttggacacaaaaccatctttggggtgcagaaaagacggtgacctgccc

SEQ ID NO: 38680 - DNA, 645 bp, Mus musculus
  source 1..645: mol_type = other DNA
tataatgcattcatacacgcatacatttgtgtttattttaccgtcaaagcacaaaatggaagtgcatcaagctcttcgttatatatccacatattaaacctgtatagactagagggttagaatttaaacaccatcggtgctcaaggctagcgcctcagccccaggattccccgggctgtcccctccgccaatgaccgagcccgaggagcggcccaggggagggccacctacgtcggttggtagcggccgctgtggctttaaaggcgggaggtcaggccgtggggcgcccccgtcgcggggagcacccccgctcgccgcgtccctgcgccggagcgcgaccgcgcggctttgtctccagcgtcgcgccctgccgcggtcgccgcgcagaacaaaggccattgtctcgcttcctgcggcgccgcgtccttcccggaaagccccttcctagactgcggtccccaggctgcatttgcgcctctgggagtgcacagcccctactgtgcgtggcccaggtcctcctgaggcgcagccaggggaaccaggcttgctggtccttgggccacgctgcaaggttccccaaaggcgtcctccgcctcggggcggcccagtgggcatcccgcgcccctcccccggcccgcggtaacc

SEQ ID NO: 38681 - DNA, 711 bp, Mus musculus
  source 1..711: mol_type = other DNA
acctacgtcggttggtagcggccgctgtggctttaaaggcgggaggtcaggccgtggggcgcccccgtcgcggggagcacccccgctcgccgcgtccctgcgccggagcgcgaccgcgcggctttgtctccagcgtcgcgccctgccgcggtcgccgcgcagaacaaaggccattgtctcgcttcctgcggcgccgcgtccttcccggaaagccccttcctagactgcggtccccaggctgcatttgcgcctctgggagtgcacagcccctactgtgcgtggcccaggtcctcctgaggcgcagccaggggaaccaggcttgctggtccttgggccacgctgcaaggttccccaaaggcgtcctccgcctcggggcggcccagtgggcatcccgcgcccctcccccggcccgcggtaaccctgggaattcacgtcagtttctgccctgaaactctcaagatcaatgagcagagagctttctcagtttctctcttccaggaaggaaaacattcgagcgagcgagcgagcgccgcgggagggcgggcgcgccggccgcgggtgggaggagacacgccaggccggcctgctgcgcccgggtcgccgcgccgcgacccgcacaccccacgccgtgctcgccggctcctacgcccccgcacctcgcgcccaatccgcgcgttgagaagccctccccctcgggcggccgccgccagc

SEQ ID NO: 38682 - DNA, 474 bp, Mus musculus
  source 1..474: mol_type = other DNA
tagaattcgaatagaagtcctaaagaactctgagatattgataaataagcagcatagtctgagatattgataagtaacatagtctactaaatgaagttagaacagaaagtcccaacaaaaagaagcctctttgatgagggctgcttaagtctttaggagtctgtttaatgctatttctatttagtaataggtttcctagagcctctgacctctagctacttataggtatagatttcaacttatggattaggccttaaatccaattattcctatgacattcaaatcactgagagcagttttgactgccatatggaagtgggtggaaatgggtgtccagttcccacttctctgcatataagatgcaatgacttgtcactgcctgctgtatgagcccctcaaaaaagtgggtgctcagactccctgcagacatttacaggaatccaagcatttttccggttctactgttacagtcac

SEQ ID NO: 38683 - DNA, 384 bp, Mus musculus
  source 1..384: mol_type = other DNA
ttagtggctactccaaaaataaaattaaacaaaatctcccaatattttttgaaagaaaatagtcccccactgtgggaatcagcttccatggaagaactcatggaggtttcatgactctcaaagtcaacacatcacatcacttgttagggcgtcctaatgatgggacctaagtaggtacagacagcagatttttttttcaaccacaccatactgtacgtgcttttacgaaaatgtgcgcaagtaaggaataggagcaatggacattttttatgtacctgccacggattggcttcgagtcaaattactcgagcaaagggcagcctctccttcagttaaagagctggaggcggagcttaatgaggaagtggcttcctttcttaagcc

SEQ ID NO: 38684 - DNA, 667 bp, Mus musculus
  source 1..667: mol_type = other DNA
ttcacaaaaaaaggtctgtatttcttggaaggcaataaacaaacaaacaaaaaactattgttttttttctttaatttttttcttagtttatatttattgtatgtaatgatggataagattcaagcacataattttcttttaacatgttttattttcttatcatctatgtgttaactcatatataaaggcatttctacacagtaaggtttacttattattatgtaaagcaggctccacactaggagaaaaacatacttttttttttttttaaagtcgcccgccgcttcgggaaagcgtaagccgccctacgtcccggggcagccccggggtccgcagctccacctggctcggcggccgggcgcacaaagagcggcgcgggcggcgacgggccgggacgcagaaagtagtcccgaccacgccggccccagtgtcggccgacgtcgcctcacgccctccgccgcccggggaaagaatcccatcggaatgcgcctcgggaagaccttatccccgcagcgtgcgggggctcgcgaggctcaacccgcgggggctctccggggagtcggcgcgcgcggcggtcgcggctcccggggtccggccgcggcgcgctgaggacgggggtggggggcgcgcagggagacggcggcggccccgcggcggatccctgcgc

SEQ ID NO: 38685 - DNA, 302 bp, Mus musculus
  source 1..302: mol_type = other DNA
agaccaggctggcctcgaacagaagtacattttagtcaaatatgtgtcagacagcactgctagaactgccagctgtcccaattaaagtcctaattgtcgtccttgcgacaaaaagcagcgcttattgtggttgcttggcgggagtacacctgggtgtgtgacctccccatcagcattccccgcggccgagcggcacggtttaagacccgaccccgagaggctaggttcgcacatcccggctggggcggtcaggctggatgttgcctgggaagcagctccgggttgcagggcagggacgcgcc

SEQ ID NO: 38686 - DNA, 494 bp, Mus musculus
  source 1..494: mol_type = other DNA
ccatctatatgagattggctcagataagtcatagtgatctgtcaataaaacagcatattctaacaatttcttacttatttctagtttagaaaagaactctgcttctgtactagtgtgaattgaaatttactacctttcttcctcattggtaaaataggtgtaaaaataccgatttttgcctgatcgtttgaagataaccagcattacagttctttttttttttttttaaaaagatttatttattaattgatttttatgtatatgagtacactacagctgtcttcaaacgcaccagaagagggcatcagatcccattacagatggttgtgagccaagagcagtcagtgctcttagcctagccctttaaggcagcgccgccccagcctccagcgcgcgtctcttgccccgccccacccctcgggtttggaggcgggacctccaaacccggaactgaaggccgcgcattgccggcccggccaatcggcgtcccggaa

SEQ ID NO: 38687 - DNA, 435 bp, Mus musculus
  source 1..435: mol_type = other DNA
cgctcgctcccctccgcgagcctggagccggcggcccctcaagtaagtgttcgcggcgggccgcgggccggctgggaggcgcgtccgctcctcgtgccggccgccgcgcgctctccccggccgggggccggcgggccacggcggcccggagcggcgacggcggcggcggggggtgtgtaggccgcgctgggggtcggcccgagccgcgggggcgccccggcctcgccgcgccgagcgggcgagcgggcgagcgggcgaacgagccccgggccgcgggtcgccggcacctgggcgggcgaagctgctcatgtgtgtgtgcaggcagccagcgaggccacctggggagcgaccgtcgcttcctttgcttgtgcaaaattggaaagaacttttcttaaacgcctgttgcaaagatcccccctgaagggtttttaaacc

SEQ ID NO: 38688 - DNA, 458 bp, Mus musculus
  source 1..458: mol_type = other DNA
aatacttacttagtgctcggtgcccatggaggtcagcggagggcatcagatcccctggaactggagttacagatggttctgcaaccctaaaatacctttaacgtcttattacattttatttgtagggcacgcagaaaagattcttttagaaaaaataattcttggctctcaagagaaaagccccggatttgggattccgggacctcccctagagtgggggcattggagcagccgcctccgtcggaggagagaccccagcgcgggcaggaggcgggcgggccacagacccaggctcccgggccgcgaacccggagcgccgaggcgccgctcggtcggcccggtacgcgacccgagcccgcctcccggaggctccggaggctccggctcgcggggacgagcgccgaggggcgggcgatgcgcggcctgggccggagaccccgcccccccaccccgccccc

SEQ ID NO: 38689 - DNA, 194 bp, Mus musculus
  source 1..194: mol_type = other DNA
tggtggtgcagccgtcaccaaaatcaactgcctaacattttattcaaagcttattcatatgacaaactttaccgcgggattaaaactaaatgttataggaaatagttgcgctgacaggaaaacagcccgggcagcggaggctacatgttttatggcggccgagggggccaatcagcctgcagagccccgccccc

SEQ ID NO: 38690 - DNA, 358 bp, Mus musculus
  source 1..358: mol_type = other DNA
gggtcccatggtgaccggttttgaaagcctgagacagcattcctgtgtgctgagggggtatgaatttagtaatataaaaacctgatttgtcctcctaattagagccctagcttatatttagatatttaacaaatatctttatttacctgaaatagacaaatggctttacggactgcaatgctgtccgtggtgctgaacagttcatcgaccagatgtgagtctttccttttcatatggagatttttcagatcagagccaatcaggtcagagatttctgctgctttgctcgggggaagggagagagaagatggccacatttccccccccccatgtgacacattccagagccttggaaaga

SEQ ID NO: 38691 - DNA, 525 bp, Mus musculus
  source 1..525: mol_type = other DNA
tatttagagcggactttgaagggacattcagacttcaaaatttgcatcaagagtcagcgccgccggtcttcgctctcacgctccgctgctcacttcagcgacggtggcgtgcacagcacctgggtctgctgggcgttgtggttctcatttcagggctccgagattcccacggcacactcggctgctcgctccctagtcccgggactaggaggcgcggttttcccggagaaatccacgtcagccgcgcaggcgcaggcgcaggatctgggcggagggaaggggcctgcgctcggcccgcggtaaacaagcactgcgcaggcgccgtgcgccaagtttttgttttttggtttgcatagcatcataaaaaaggagacgatcgcgaccatggcagccaactcttccacagagctgccggccttgagctctttcgctcactgtctacactgaggctgagaggacagaggccagccgggactccgcccccgccccgcccgtggctgtgtgcgcatgcgctgcgcgcaaacc

SEQ ID NO: 38692 - DNA, 330 bp, Mus musculus
  source 1..330: mol_type = other DNA
atagattagaaatctataatcttgtaatgagccagtgactcatctgagtgacttgttagccaaatttcattccggctgaacaactttaaaaaatgtttctgttacttgcttataaatatgcgtaaatattttaagctaacattcacagcctctcagaatcttcgggggtggggggggggtagctcgcgtgccaacgaaaagtggaattttgaccgaaaaatcctccctcgggggccgacggggccacctgtgaccaagcaggaagttcggtttgcgcgcagcgcatgcgcacacagccacgggcggggcgggggcggagtcccggctggc

SEQ ID NO: 38693 - DNA, 525 bp, Mus musculus
  source 1..525: mol_type = other DNA
aggaaccaagaaaatcagaactggctttttctgatttctgtctgggacggctctaaagagaggtttcaatctcgagatcctacggtggaagctcagtcctggcttctttgggtcaggctaagcggccgattccgcaccccagctaaggcaccctgccgggtgggggtgggtgggctgccccaggccctgagccaagggccagcgacctaggagcccactggtccaggccctaggtttcgcgggcaaagacctggaggtcgcagtcgggagcggtgacgcgcctgccagcgcagctctgcagcgccgggacctagatccccgggtccctgcctggccgccgcgctggcccctccccagctcgagtagtcacgcgaccagccaatgtcctggcggcgctacggggaggcggcgcgctcgggagcgcggagaggcggcggcgccgcgcccggggccaccttaagagcgcgctcgccagcctgggcggagcggctcccggcgccgagaccaatggagctcctcctctgt

SEQ ID NO: 38694 - DNA, 564 bp, Mus musculus
  source 1..564: mol_type = other DNA
gggtcaggctaagcggccgattccgcaccccagctaaggcaccctgccgggtgggggtgggtgggctgccccaggccctgagccaagggccagcgacctaggagcccactggtccaggccctaggtttcgcgggcaaagacctggaggtcgcagtcgggagcggtgacgcgcctgccagcgcagctctgcagcgccgggacctagatccccgggtccctgcctggccgccgcgctggcccctccccagctcgagtagtcacgcgaccagccaatgtcctggcggcgctacggggaggcggcgcgctcgggagcgcggagaggcggcggcgccgcgcccggggccaccttaagagcgcgctcgccagcctgggcggagcggctcccggcgccgagaccaatggagctcctcctctgtaaaaaggaggggggctcgtgcttttccgactcactcgcggctccgagactcgcgcggcggcaaggtttggagaggggctgcgttcgcgggacacacgggctcgccccagcctatcactgaagcctcgagctgcgcggcggctggggtg

SEQ ID NO: 38695 - DNA, 354 bp, Mus musculus
  source 1..354: mol_type = other DNA
acctcgacgcgcctctaaaagggaagggcgcgcggttcgggcgccggccgggggattgcggctccccctccagaacccggactgagaaccgcagccaccatcatggcgctcgggtcgggacgcgggaagcgcgtccaggccgcggccagcgagcttagaagcgtttggcggcggagcgccggtcgaagatttaaggtggatctgcgaggctgcagctgcaggcggagcctcgcgcttggtccgcgggtccccgcccagcccgcctttttttttttttggatgcttgttttcttgttaaaaaaaaaaaattaccgtacggtgggtggagctttctgttccaaaagttgccccccc

SEQ ID NO: 38696 - DNA, 272 bp, Mus musculus
  source 1..272: mol_type = other DNA
ccctaactgcttcagggatagctatggggtgctacattcatttcgtaatagataactgctttgattctttttaaaaatgattttctgatggagtcctctcaaagaaacactactggggaaagcctcccccggagaggaaaggcagggtatccccactgggagatgacagcacttgtttcaagttggggaagttcgtcatatcctggccgaaggcagggcaggagcttctcagaatgagacaaggctttcccagagccgtcattggctcctgg

SEQ ID NO: 38697 - DNA, 333 bp, Mus musculus
  source 1..333: mol_type = other DNA
gcctcagtttcagaaagtgtgccccacacattgagaatgccagggtacacttgcaggcacagggcatgtaacatacattgtacctcacgggtttcagaaatctgcctcttcccaagcgctgggattaagctcagatctgagaacggcctttctggtatcagtagcacttttcataattcaaagtggcccattattacctagtccaaatgcaggatgtcaaatatatgaagtaatgaataaatagtatcgtgatgtccatgtgtttacatttctatagttagaaaagtttccttaggcatcctgtgtggggcgctgccacgccagacccgccag

SEQ ID NO: 38698 - DNA, 347 bp, Mus musculus
  source 1..347: mol_type = other DNA
cctaacgcaaccaacggggtaaacctggtccagtgcagccggactggcctgataatggatgcgctgcgggcccctacctaagcagaaggcaaattccttcatttcaaaatttcaactgctttgtcaaacttttggagaggtggttaaaagatctctcagtcaggccatgctaacttggctatgcgaggaagctgcctggagctgctggcttggggcccggttccctccaggagatgacagccagcagcgctcgcgggagctctgggaccgacctgaacactcgtcgagagctacgcctggcagtctgccgcggaactggattaggcgtgtcctcgcctttataaccg

SEQ ID NO: 38699 - DNA, 350 bp, Mus musculus
  source 1..350: mol_type = other DNA
aacttggctaaaccaagcaacaacaccaaaccaggtatgctgatgtggggacaaagaaaaccagagggtcattttgtaggctttgcctgtgtcagcataggaaatcataattatggttttttcagatgccatgagacccatagcaagtgtgtttaaaaaaagggactccccctaatttcggtaaaattgcctcagactcttaggattaaaatcagagtttggggtaaggccctgcagcaaaggttaagcttcctccccatagctggaggtattgttcttccggttctttttatagacacttcaggaacctgagtgaggtcctgcaggtcttttgaggagagattaaagca

SEQ ID NO: 38700 - DNA, 371 bp, Mus musculus
  source 1..371: mol_type = other DNA
tctagtaccctaataatatctgtgatactatagtgtactagagtacaggtaatatttacaaagtacttatcggttagcagctcttaaagacgagagaagctcccagggcaccagtgtgcgcgcacacaccttaagaaaaccatttttaaatgcactgtagagcttgttacgttcccaccaccctggcttttccatccccttcacttgcaagcccagtgctccaagggatccacaaaagaacgaacacggtttgtttttaatgctccgcacccaggagactgggctcacgtgggtggagtttgggggacgctgcccaggccacgcccggtgtcgcccagtgggcggagaccgccgcagccccgccccaatcg

SEQ ID NO: 38701 - DNA, 301 bp, Mus musculus
  source 1..301: mol_type = other DNA
tcgcttaattctctaagcaacaaggtaattccagcacttacacagtacatgatctcaatatataaataaataaacaaataaactctctctctctctctctgtgtgtgtgtgtgtgtgcctcaaggtcaccctgactgactgacagacaactgggcttcaaattcagtttgtaacctcattctaggttcttgctgctgaggcgcaagcgactcaaccttggctccgcgctagctgggctcccggcaggtcacacctttcccgcccgcagccccacgcgcggttcgcagcgaactacacttcc

SEQ ID NO: 38702 - DNA, 256 bp, Mus musculus
  source 1..256: mol_type = other DNA
cagctttagctgctgctgtcatcccagcacttggaagtgtaatgccttgtttctggtctttaagataactcttttgcaccattacctcttcaagaatggtctagagttaaaaagcaacttagctgttatatttcattttaatgcaatgggatgtcggctttcacccagccctgggtgttagaacactgttaatatgtggctcacaactgtctggttggcaccaatctctcgcctgctactgtgacatcacagaatg

SEQ ID NO: 38703 - DNA, 246 bp, Mus musculus
  source 1..246: mol_type = other DNA
agggctgcgggattggacaactctgtagcaccccccccccaactctgagactaagtggggagtgtcaatgattatcacatgtgtttaactaaaggcccaggattatgtcctggtgatgagcagctgctttgatgattagccgggactttaattaatagaactgggcttcggtaaacagatctatttgtgtgagtgtctgagtcagagggggctgctttaaatccagactgattcatagaaactcct

SEQ ID NO: 38704 - DNA, 404 bp, Mus musculus
  source 1..404: mol_type = other DNA
agtacatgtgtgcatatatgcaaagcctattctaacagtcttttaaactctcatactatgtgagtctgcagagaacacgttacaaattctaaactcagcagtttctacaaagatgctgcgatttggacaggactttcattgaatctacacactatcttagttagaggatattaatgtcttgttaattcccaagtcttacccacaaacatggagctttatttatttagatgttcaacaatatcttgtacttttcaaactatggttttcataattttttgtaaaaatttgttcttgatattttaattttagcactaaaaaaaaatttgaactttgggagtcattcattgaggtatataaaaatacaaaactgtgtcggcagggtcacggccagttctgcgcagcac

SEQ ID NO: 38705 - DNA, 371 bp, Mus musculus
  source 1..371: mol_type = other DNA
agcctatttttccttttaaacaaaaggatattttggcagcggtgccagaggcgggagccacgcgctgcgaccctccagtccaatcctctggctgcaggtgcagcccggtgcgctgcacatcagcgcgccggcggcgtgagtgtgcgcgcgcgcgggggcgcgtgcgcgtcgggggcgtgtgtacgcgcgtgcccagtgtgcggccggtgcacaatcagaacccattgagcattgcagatatggtgtgcgtgcatgcgcgcgcgcgcgcgtgtgtgtgagtgtgacatgcctgtcccaggaacggcataggttgccagctgttttcaattttccttataacgacttggtatagagatatctatatttttttt

SEQ ID NO: 38706 - DNA, 236 bp, Mus musculus
  source 1..236: mol_type = other DNA
tcaagctccctgaagacaagaatcctgtcatcaagtgcaggtactaagcagagactgctggtgcacagccctgcgcggtggtcgctattccttcttgctgccaggaggaggcaccacggcctcgggttaagcgagagcaagaggacgcgcgtgcacacacaccctgccttgtgtggtgtgcgcgcgcgagcgcgcgcttgagtggcacgttcctgggtgtgagacccaaatcaaga

SEQ ID NO: 38707 - DNA, 234 bp, Mus musculus
  source 1..234: mol_type = other DNA
atctacaaggatattaatattgaagaatagatatttatcatttttgcttgagatctttaaataacgcaatccacttaaaatcaagctccctgaagacaagaatcctgtcatcaagtgcaggtactaagcagagactgctggtgcacagccctgcgcggtggtcgctattccttcttgctgccaggaggaggcaccacggcctcgggttaagcgagagcaagaggacgcgcgtgc

SEQ ID NO: 38708 - DNA, 173 bp, Mus musculus
  source 1..173: mol_type = other DNA
cagactgtaagtcatcaataaattcttttactatatagagactatctataagttctgtgactctagagaaccttgctcctgtctaaaggctcacctgagcctgacacagctgtgtgggccttattaggcatcagtaggaagggaggccctttgtccgttacatttgaaatgta

SEQ ID NO: 38709 - DNA, 452 bp, Mus musculus
  source 1..452: mol_type = other DNA
acttaactttttgattggttaagttactattgaacaaatacttaaagggagaaaattaagtttaagggattccacctaatattatttttcctgatttacaaaacatatttagaatcttttcttcattcatttgtcggaacagtgattactgtctctatttaagcgacacatgttcatctccacatcttgatgattaacacaattaacttagtgaactttaagtgatacctgtaacactttgacagagtttgaggccgaacaaaacaaaaagataaaaattaaaaaaaatttttttttcgaataaattaccgtactctaggtttagacttatggaaaaatcttttcgctttttaaacacctactttcaaggcaggaggccctcattcaaataacgatcgctcagtgggtggagtacatagtgtgcccacgaagctccgcggccccggcgcgtg

SEQ ID NO: 38710 - DNA, 750 bp, Mus musculus
  source 1..750: mol_type = other DNA
ggaagtgcatttacttcagctgcacttttgtaaatacatttttaaccctgttgtgcaatgtttacaaaatagaaacttttatttttgatttgtttgagaggacaagaaaaggatgtacaagttaagttgaaatctcaattttctcaggtattacatctttattatttttttttttaaaaaggaacatttcatccaaagtcaatgaagttttaatccaaacacttgagtctttcatgtttttagttttactgtttcttcagttagagaaatgttaaagaaaattagtgaacacgatttctcattattttgggatgacgtataagctattatatcattttttgatgaagaattttacaaatattacaagttctattgaggtccttatttaagggaatcaattaaacattttgagtttttgaaaaaaatatgtgcactgtagtatatgtgtataatgtacactttaaatatgttttaggtgtatatttagtttcttaaaatgccactaaatttcagttgcagtatacgtataatttaatataattttcttattctaccctagtctaaaaacttgtgttttcataaacatctgtcattcatatgtatagttgctttgcttatgtaacccaagtttaaatcagtctgttgtcaaattaagtgctgttaaatgtcgattggtttggctctattacccgaaacaaatactcttagaaataataggatataattgaaaggaacattttgggctgtttt

SEQ ID NO: 38711 - DNA, 463 bp, Mus musculus
  source 1..463: mol_type = other DNA
ctggctccagagctgctggagcctgagaagcagaacaggccctttgtgtgcctatactagtaccattgacttatactagtagctctgtgtatcctgggagtgtactcaggacattcagactacaaagagatatttaattttatgggaacttattaaaatatgctttgttaccaccttagtttttaagactgtatcattccaactaaaaaatgtggttgtaaagtctaaccattctgctagattgagtacttttgaagcttagattttgtcaaaacaatttaattagctttttaaaattaaaatcaacgtgatcaaatgaatataggattcgtgttccattaaaggtaaaataaatggaggcttgctttcaggcaattcgactctgtttgcaagtccggattcccaggcatcactgtgtgagttcttcagtgcacagtgcagccatcttaatacacttttgtgc

SEQ ID NO: 38712 - DNA, 254 bp, Mus musculus
  source 1..254: mol_type = other DNA
aatcaaattgaaaaaataaaaattgaccatgtcaagtgctctttctgacttttagacttctgttaccacccgacgccacagcccgttagaatgaacgtgtgatccaagcggacattcatgcatctgatagatggaggttggctggaccgcagatgcgcagctcatcctagtagtgttttgttgtgcagctaaacataaagcctgatatgtaaaataacctttctgtgtgcaaacacacaaagtgaactttgctg

SEQ ID NO: 38713 - DNA, 435 bp, Mus musculus
  source 1..435: mol_type = other DNA
ggtgacacttcacgcacgtgccataggacccaaaggatgaatattaccaaacgaaattgtgatttgtatttcataattcacaggtgtcatttctagcaatgacaaatttatttcttcctctaacaaaggcacttcttcattactttttaaaaaatatttatttgtttatctggatttacctacttcacaatgtcacctagggcacccttggccaacttcacaatcatgggtctggaagctcaggggtagatctgcttctagctcctgaggtcagacaggctggcgcaagaagccctgattcctgacggagggaggcatgcgacccactgctgcctcggtttccttatcctctgctacagggaccaaggccaccttcccggcctgggagggtcagaccagacggaaaggatccgcctctcctagcctggggctcag

SEQ ID NO: 38714 - DNA, 416 bp, Mus musculus
  source 1..416: mol_type = other DNA
catcggtggtgcagtcagtgctcttgtctttaaaaacgaaacaaacttaaggacagtcctgttattcggtctagcctaggctggccccagctcttggcaatcctgcctcagcctccggagagcttctcttttaaactagttcagctaagtaactataggttgcaatgcagcataattttcttatcgtggccacaaaagaaaggtataagacctagtaagctagatttctattgctagcttcttttcattttcacattaaagttgtgtaaaaacaagcatgctgcttagaaagatgcgccgtttttatttgtgctaaaaaaaaaaaagaggagaaatagattgttaccttatattatttaaactttcaaatgtgctaacaaagagccagggggtggagtctagagctccgcccactc

SEQ ID NO: 38715 - DNA, 159 bp, Mus musculus
  source 1..159: mol_type = other DNA
gtctgcttactgttgtattttatttaaaaaaaaaaaaaaaaagccgggaggcacacctggctgctgccaggtaactacaaaatcggctaccctagtgctgggattgcagtacggtacctgcctgtcacgggcggcagcggctgcatggcgcgcgtcgtc

SEQ ID NO: 38716 - DNA, 600 bp, Mus musculus
  source 1..600: mol_type = other DNA
aagtttcattcatttggaatggaagagaaagaagtgataataatgaaagcctggccttaaaatatttcccacataaatcaggagtcatatgtgctagtaagaatatactttaatgttaagtttgaggagttctaatacttcatttttgagagtcataaatcatttgatttggtattaaatcaagataaatatgtttgaatggattgcattagtaaagagcatgtatttgtctttaacccacataatattccaaacaatagcattagttcttgttgatttctttattcagttaacagcactatataatccataggaaagggttaaacttttgagtagttaatgatattctcactgtgttgactagtacagatactagccttttctttgtggtcaagaaaggtaaagaaagccgggcgcacgccccctgagttcgaggccagcctggtctacagagtgagttccaggacagccagggctagctatacagagaataatttcttggatgcttcattcaaaattaaagatatttctttacagaaattgatgcaaattcgtaaaaggaagtctttttacacatacagcaaaactgagttctttctt

SEQ ID NO: 38717 - DNA, 447 bp, Mus musculus
  source 1..447: mol_type = other DNA
cttcttctggagatctataagacattggaagatggaagtgttacttgccagcccatcagttggaatctactagcctggtgggactgagcaactcctagatccttggacttcccattaggtcatcataacaaagtccctttctatatagagactatccacaagctctgacttcagataaatctagagggttgatgcaaagttcatttgaagtgttatgtaataactggaaaatcgacaaatgtaccgtttctcttttaaaatatacattttcgtgtagatttatgcaccttagactctatggaagcattcctgaaaaacaggaagcagttgcggaaatgcgtcagaattctgagaacaattccaatagtgtcaatctacaatactctaatgagagcggaagtacctctggctctggcccagtgcctggcaacgcggtgagatcgcggc

SEQ ID NO: 38718 - DNA, 261 bp, Mus musculus
  source 1..261: mol_type = other DNA
agatagagctttatcccctgagggtctatccacgttgttgggatgtgagctagcacagagaccaagttgtaccagtttaacagccactgcactggctgcagatgtagcttctcccaggatgacagaaatgaccttctgcacgatggctgaaggcctgcaacccaagtgggtattaagaacccctgtgagcttgttggtgacctggaagctgtcagacaagcagtccagcagctgctggtgaaggcatatttcagtacgcct

SEQ ID NO: 38719 - DNA, 546 bp, Mus musculus
  source 1..546: mol_type = other DNA
gacccggcgggagatcccgcccgagaacccgtcggacgcagtgccaggccggccccgagccctgaaacccgaggctcccgccaccccgggcccagcggaggaagagcgcggcctctgggcctggtgtttcagagaaggcttcgcaggccccggggagggtcgcggaaaacaccgagtccccacgcactcacacgactgcgaggctcccgggacggcgagagcagctagcgggcggtcccggaggactctctgcgaaggggccttcacgccgcgatctcaccgcgttgccaggcactgggccagagccagaggtacttccgctctcattagagtattgtagattgacactattggaattgttctcagaattctgacgcatttccgcaactgcttcctgtttttcaggaatgcttccatagagtctaaggtgcataaatctacacgaaaatgtatattttaaaagagaaacggtacatttgtcgattttccagttattacataacacttcaaatgaactttgcatcaaccctctagatttatctgaag

SEQ ID NO: 38720 - DNA, 276 bp, Mus musculus
  source 1..276: mol_type = other DNA
acataaataaatacacatataattgcacaaatatatttttagacatgcatcatacagcctatgggatatccaatccccactatgaaatgaacaggctatatttatatatgtaggagtgtgtgtgtgtaaaacaattacagactggttccccgcagcacacctagcctgggaggggagctgcaaaagaaaatacaaaaccattttggagagttttataatgactaagttaatattgcttatgattatagcaacagaaacatatgatttctcctggct

SEQ ID NO: 38721 - DNA, 321 bp, Mus musculus
  source 1..321: mol_type = other DNA
tccaggttcactgaccaagtaaatcaaaatagctttctccaagcaatcattttgaataatcacaattcccaagaacggaatttggttcttgtcacagttcgagccagcagactctgcggacttaactcctgcccgtctctgaacggggatgtttcaaacgcctgtgctgctggagggcaatcattccagggcagggctatcagcactgccagatgagccccagctgcgcttcatgtgccactgcagtggctcacccgagtactcctggagcatgccttttcttgtcgatctgggaaaggcaaggctgaactgcacagcctg

SEQ ID NO: 38722 - DNA, 287 bp, Mus musculus
  source 1..287: mol_type = other DNA
ttttttttgtaagtaggcacaggccgagctgtctctgactccccggggaggacgacacttaagttcagtactgagggccttcctcgctcaggcagtgccatgactaatatcacaaaattaaaatcaaattattgtgcagctcgtgtgcacaacgtgcctatggcttggtctagagttcaaaattctgccctacttgtttgtgcccggggtctggctcacaaacatagggtggccacaatttctgcatcctactatagcacagccaggcctggaagtggagggagctt

SEQ ID NO: 38723 - DNA, 283 bp, Mus musculus
  source 1..283: mol_type = other DNA
gggaagactcaccctacctatgggtggtgtcctaccttctttaggttgctctggtcacttaaaatattttctcacagcaggctgtagcgacttcgaggcagacatctaccactctctgatacatgtttaaatcatggattagcctggtctacagagtgaattccaggacagccagggctacacagagaagactgcttaaatcaataagccgcatagtatttttttttattatttaaattcttccactgtgagccacttatcacagaaggtgaaagttcccccc

SEQ ID NO: 38724 - DNA, 342 bp, Mus musculus
  source 1..342: mol_type = other DNA
aaagtcaattttgaattaatgaagctgcatttacaatctacattcctagatataaccaacagtgtttgttcttttgtggtgcaataatacaaccctctgtctgaagacaaattatttaaattgagcacccagtatatacatttaacattcataatttgtcttactataaataaatgaattataaataaaagattgtagtacacaataaagcatgtcacatggggtttgctccacatgtggctcataggtttaaaacattttaaccaccctactgcccttgccagaggagctgttgctgttcttaggaagggcggttctttaaaccgaacttcatgataagaa

SEQ ID NO: 38725 - DNA, 393 bp, Mus musculus
  source 1..393: mol_type = other DNA
aaaagtgccattttccccaagtcgcatattaatacaaatactgattattgaaatgttagtataaacagccctgtctccaacgggactgcacacagtgttatttaaatttattcacaagtcaaatagctgcaaagtcaattttaggaattaatgaagctgcatttacaatctacattcctagatataaccaacagtgtttgttcttttgtggtgcaataatacaaccctctgtctgaagacaaattatttaaattgagcacccagtatatacatttaacattcataatttgtcttactataaataaatgaattataaataaaagattgtagtacacaataaagcatgtcacatggggtttgctccacatgtggctcataggtttaaaacatttt

SEQ ID NO: 38726 - DNA, 341 bp, Mus musculus
  source 1..341: mol_type = other DNA
agaaatggacagagaatctgcatttccttccttatctgcatggctaggagatagtcaagagaccattgaatatccagggttgtctacataagatttatgtaaggcagcacacaaattactagacagcctacagatcataaaaatgtatgatctagtgattggttttcaatcaacaatgccatttaaccagagatattctgtactcttacattttatcatttctgtgatcagactctttatagtatatgtacagtcttataagatgtgtgtgtgtgtgtgtgagagagagagagagagatcatgcatctgtgaattcaatgtgccttcactcctaagcctat

SEQ ID NO: 38727 - DNA, 341 bp, Mus musculus
  source 1..341: mol_type = other DNA
gtctctgcctccacggggcagagactttcttccaccagagaaaaaggagaaaggcatagacatttcctgttgctttgttcgtcttgcttagcttagcatagcatgcatcaaagcctcatatatacaaatatgaatttcggttaaatttggtgtttatatcaaaaatcatgaagattattagcaagatcctttgaaaaaaggcgtagagaatgctttttaatctgcaggcctggcgtgagctaggctgggttgtgaggcgctcggctcgcagactggtccagcagggggcgcccgggcacctcactgcagcatcttggtggcggagcgcagcggcggctggc

SEQ ID NO: 38728 - DNA, 474 bp, Mus musculus
  source 1..474: mol_type = other DNA
ctttgggaactgttagtgcctcgatctattcatggtttatagtcctcatgtagaaaaagatgagcagctgtgtcccagagtgctggtgagtgcaccgccagggtgccatgataaaaagaaatgacttaatataatgaatcccactttttatttttaatatagagttgtctttcaaaaactacacaactaaattcttagattagttagttattcatggataattcaagtacttagtgtgttcacacacagagagaatatattacacacttattctaaatacgtgtaaaataccacagaattattcagtttccctagctgttgagattcactcctcttttcgaaaacattaagtgtcacttgtagtgtcacttgtaaatacaaagactctggaaaggctgaggcggagcctggtctggggggctgcctagcaatgggaagcaggcaggcccccaagatctgcacttgaggagttcc

SEQ ID NO: 38729 - DNA, 311 bp, Mus musculus
  source 1..311: mol_type = other DNA
aattcggaaataggaattctatttccaaatagaaagcatggtgtgggggccctccactaatggataatgtctgtgacaaaactgttagttcttttccaaaaaaatacattatttacttgtttatttagttagttagttagttcagggtttctctgtagaccaggctggcctcaaactcagaagtctcttaattttcactaaagtttcaagaattcaaacttgcactaaggcccaatcttcatcatcttaagaaaaaaagagatcctttcccattctcactcaacaagttatgtgttgtcaggacaacacta

SEQ ID NO: 38730 - DNA, 248 bp, Mus musculus
  source 1..248: mol_type = other DNA
ccaaaaaaatacattatttacttgtttatttagttagttagttagttcagggtttctctgtagaccaggctggcctcaaactcagaagtctcttaattttcactaaagtttcaagaattcaaacttgcactaaggcccaatcttcatcatcttaagaaaaaaagagatcctttcccattctcactcaacaagttatgtgttgtcaggacaacactagctacctgccacacagacgtcagtgaccctgc

SEQ ID NO: 38731 - DNA, 190 bp, Mus musculus
  source 1..190: mol_type = other DNA
aagcaaggccaggcctcctgttctgatccagtctgctccaggagacgaagtggccccccgggtggctccacacagccaagcctcatgctcactttaaagaaaattttagtgacgtgtttgctcggggaagggctttacctcctcagcggtggtgacttccttgtttaaaagaggaggaagtcatccgtga

SEQ ID NO: 38732 - DNA, 369 bp, Mus musculus
  source 1..369: mol_type = other DNA
ttgcttgcctcgcaaagcaggtaggcccagctatttaagccaagttttgtttaatagtctgccttggcttctttggaagtcaattgccttggaagttccaaggagcactgagcagtggtgagtagttattactggactaaagagtctgagctcctaccggcccagggactggagtaccagccctggccgcggtcaggaggctgggatcccgggtctcccctgcggggtgccgtgcccttgagattctatccagagccctagggtctactagagactcaactgtcctcaagacggagccctctcccggccgcgcggggcaacgcgcgttcccggctcgctgctgggcatgcgcggcgcgcgctggctgtg

SEQ ID NO: 38733 - DNA, 480 bp, Mus musculus
  source 1..480: mol_type = other DNA
atacaaacagtatataagatgctgtacatcttaataaattagcttagcataagacatagttttagactcaggtcactgattgctatgctggctggcagggattggtatcttttcagtgctgcattccaagcatcaagaactttagcccagtagactggtgatagttgctagagccactgaaagagcccttatcagttaggttgtcacggatccttgctgagcactaagtgaatatttcccacttgcaaataagcatttgctggccatccactaaacgccagtcacttatctgtcaccaggatataaatgttgttagcataaccactctattagggaagcttagcaatgagaaggttcggctcccaacactaacgggacgccgcgcgcttgacgtcgtcagagcagcatgggttcggtctccgagctcgcgcctgccgccttcccgccagtcgtcacttccggctgacgcgacgcgtcggg

SEQ ID NO: 38734 - DNA, 298 bp, Mus musculus
  source 1..298: mol_type = other DNA
gtggcctggcctggcctttgcacatacctgaacacatgtgctatgcacacatatgtgtgtagacacaaaaatgaaaatactatattttctaaatgaaagaagctggaccttttattgaatgtagcatctgcggtaagagcactgactgctctggtggtgtgtctgaagacagctacagtgtactcatatacataaataattacagcgcgttctagctcctagacattctgtctagttcaattggccatgtaagcatttaaatgctcaagtcacaggcctgactgggctccaagcccag

SEQ ID NO: 38735 - DNA, 172 bp, Mus musculus
  source 1..172: mol_type = other DNA
cagactagtgtgtaccacgcgttccagacagggtaaagttcccgagtgaaatgttgcagatgggaacttatcaaccttagagctctcagagctggagcttggccactaagtcactgtgaaacaagttagttgcctaaaacattttctttttaggttgcagcgcgggtcctgt

SEQ ID NO: 38736 - DNA, 204 bp, Mus musculus
  source 1..204: mol_type = other DNA
cctccactggcactgtcagtaacagatttagagggcaatttgccactcccaggcttgtcaattttcaccctgggaaattagcaacaaagcccaagcaagctagcgagcaagggagccagctccctgagagccagggcttcctcgggacctcattattttaaacttaaaaaaatatatagagagagattctaccccccggttttt

SEQ ID NO: 38737 - DNA, 137 bp, Mus musculus
  source 1..137: mol_type = other DNA
gtgccaggcattctctcctccactggcactgtcagtaacagatttagagggcaatttgccactcccaggcttgtcaattttcaccctgggaaattagcaacaaagcccaagcaagctagcgagcaagggagccagct

SEQ ID NO: 38738 - DNA, 256 bp, Mus musculus
  source 1..256: mol_type = other DNA
gctcctctaccgaatgtactacatccgcatgggcatatattattaaattttaacattatattaaacctataataccctccatgcttcgacagaattcactcaaatgcattcatgctggctcctggtgcatcagcggtagcctagcaatggttaccatgcgtttgccctccagaggctggggcaggaggattgccagccccaggccagtcctggcgttccaagcttgcctgcgctgcagagcgagacctggtctcta

SEQ ID NO: 38739 - DNA, 525 bp, Mus musculus
  source 1..525: mol_type = other DNA
ctctccctcttgagaggaatgaagttccaatcatgctgttctgtgcactgcaggccctccatggcatacaccatattgtgtcatgataacagagaaacctaaacattgtaagtatcttctcactggcaactttgagtgaacataatttggaaatttctatgatcttcatttgtactcaagaaatctctcttaggagcaattgaaatacttttggctgacagcctacttagctgcagtcttttaaaatgtttttacttagaagttgttcctttgtaaatttactacgtgtttgaagaaagtaatgcttatcattttccagacttaaaataaaattgaacacgttgatagcccctggctctggaggagtcattctctctatatgcaaagaggagcttacttgatttaaggaagaaaatatctaccttatggctatatttcactgttgggaatcctttggcataaattcttcatgacacacagaagctaactcatgtttaggattgtggctgcaaccctgaattcatc

SEQ ID NO: 38740 - DNA, 369 bp, Mus musculus
  source 1..369: mol_type = other DNA
aactggagttacatgtgactgatacttgcattattgtaaagtatctaacggtggatgaggaaggcttcaaagtctatggaggcctcttcctggacctggcaggctagcttgtccatgctccaatttttggtttacatacataatatactcaagtaaatatataaaatgataaaatgacccataaaaataaatttatagggctatttacacatcctctagaatctttctaaataaaaacaggacatttttcttcttgattctccagaggattatgaatgggacttctgttaaaaatacataaccattggtttcataaatctcagtgaataaatattagtccaatttttagactatctgttgacaagttat

SEQ ID NO: 38741 - DNA, 298 bp, Mus musculus
  source 1..298: mol_type = other DNA
ttggagatgaggaactagctcattaggaattgagttttctacctaatagcatcttctaagagggagaaagtcatgtttctctcagacacagaagatctgctgaaagtactttacagtatggtcaacagactgttcagtcggaccaatatcttatataaatgtaaaacttttaaaaattagagaaacttacctatgttctgatactttattttcttaggtaaactgacataaaaaagattgattaaataaaaacttaagacatgtatgtgtgtgcgcatgtttgcatgtgtgtacatgt

SEQ ID NO: 38742 - DNA, 297 bp, Mus musculus
  source 1..297: mol_type = other DNA
ccttggagacttcaatatgaaggttgacacacctttacctggaagatccttaagcacattgcaatttccatttgggtagtgatcattcacaacaacggatcttaggtactcggtctcattccgaatgattccgtgcctgcgcactcaccctgatggtgcactctttctctttcctactcaagacgctgagttgagaaaacggtccatgggataccttgcccattcaaggtgttactcactctgcagatcctggtgacgtcacagagaagtgtggaacttctaatgacgtcacaatga

SEQ ID NO: 38743 - DNA, 370 bp, Mus musculus
  source 1..370: mol_type = other DNA
aggtgttctcgctgctaccgcttttctagggaaaaggcagagaacacatagcctgttgcctttgctcttgtagatcaatgtgcactcaaaaagtgcacctaaaatatttgacttcttatgttatgagaatttctaatcccactggcattttcaatgtgtgtgtgtgtgtgtgtgtgtgcgcgcacgcgcacatgcacatgagctcacactttttgtaacgtgtgcactgagatcagaggacaacttgggagacaaaaacttgtccagaagctaagttcttaaaaccttcacagttggcatggcttgccagctcattgtgacgtcattagaagttccacacttctctgtgacgtcaccaggatctgcagag

SEQ ID NO: 38744 - DNA, 576 bp, Mus musculus
  source 1..576: mol_type = other DNA
ttactggtgcaagggaggtcttactagcagtgaacccttcctttgttcaaaggacaagggcaacgtattcattcgagtagactcttggaaatctataggattgtttctttgcccctctcagtgaaacggagacaatcatagattcacgttgataatcaagtgcatcttttttaagaaaggaaaaggcaagtttttattttctaaactattatatggctcagaagcttagaaaggaataagtctgaatcagtcccatgaaaagcctttcgcccggcgtctcccagagaagccccgggctaggcaggccacaggttcggagcccagccctccgggcgggcgccggcgggacccgaccccggaaccttcgcgcggcgcgggcggggcacgggggagggctttggcgggggcgcggcgccgcttcgcccagcctccgagcgagcgagcgagcgagcgcagcgcgggccggcggccggccgcggaggatgccgaggggcggcgacgcaggccggactcagccggggcggcggggagggcgccgcccgagggggtagggcggccgcgggggcgcgctcgggc

SEQ ID NO: 38745 - DNA, 402 bp, Mus musculus
  source 1..402: mol_type = other DNA
gctggcctcggaatctcggagaccctcctgcctcggccaccctagggctggggttaaaggcaccacccaccagactggtgctgcaaaccgaccgccggctcctctggaagagcggttagagccctcaacggctccagggcgacaggtaagcaagcctggcttgcgagtcaagcctctaaaaaccgatttatcgaactttctgcacatgtctgagacctggcaagcgctcagacgggctgtgaaaatccccaccgacttcgggagggctcgtcccgcctccgcccggagcgggaaggcgtgggaactggaggggcggggccgccgcggcgcgcaggcgcgctgcctcctccgcgtgagtgcgcgcgttccggcgcgtgtccccgcgcgggctccgtagcgcgt

SEQ ID NO: 38746 - DNA, 607 bp, Mus musculus
  source 1..607: mol_type = other DNA
tgaaattacaggttatatacttttaatgctacattattgcttttaaatgacaaatggaatattcttgcattttataaagtcttttttgaattatcttttaaagagctgtaatatctacaataaattttaagcgtaggccatattattagtgttccttgttcattaaattataattgtctatgtcattttatttcaaagtaaagatttaaagcaaggaagtacccagttgtatttgcttttagtaactaattccaccaaagactttccttatagaatgacagacattttatagttgtatagtatgaagagataaatatgtggcatataacaggtatacaaatgtatttgataaattacaaataatatttaagaagtagataaactcctctgaatgtccagtggatgtagttccattgtcagactgttctgtgtaagtacagacccccctaagggaacctcagaggctactcagcctctctcagtacagctgtagctgaaatcttacaggctgtctgtacaaaaataacatggcttagtacttttatacttggcctaaaattagtttgaatttttacgaccatcttaaattaatatttctgtcgctagc

SEQ ID NO: 38747 - DNA, 444 bp, Mus musculus
  source 1..444: mol_type = other DNA
cagttatatatgcatgtggtgcaaataaacttatagaaacacatataccatgcagctgaagttacatctgtgatatatgacatcatttaatctttggatattccatggaaatctcattctgaataacaaatacatagctttgctcaagtaaatttacttaaatgggaaaaaaaaatcagtatttctcaaatcctctaaaatcattctcttgggaagaggtttggtttgaattttttctcagagcaaagctttctctttccttaggcttaggtagtgtaagtaactgaatgccaaaaaatccaattgctattttgtcaaatctgcaggcccaagatatttttttaaaaaaataatagcaaacaaaaccccctgtggaatggtgttttctgggatcagcaagtaaaaatcacaaatggtcttttctttttttttttttttatctgc

SEQ ID NO: 38748 - DNA, 700 bp, Mus musculus
  source 1..700: mol_type = other DNA
aaagagaactgagtggtctgtctaaacacacacattgtggtaattttaaacatgcgtggttaaacaattttactgaatccaaatgaaagatcagaatggttttgtctctgaaattgattgaatgatggcaattattaccacttaataatcgaattctcccaatagcttctgagacctcttgagaacaagtgcaaactactcattttcaatttcctaacaactactattgtgcttagaatttagtagcttaataaatacttgtgtattaaatgaatataatcattgcaaacaggactttgcattagaaagcctaaagctgcctggtaaggcttaggtaatgtgactcaagtgtggctactagaagtgacaggcgtgccattaacagctggctctgctcaaggcagaactcatattttgaatttcctcttctgcttctcagtttagatttagaacacatctaaactgacaaattgactagattgctggtgaagaaatgattttgcatggtaaaaccatatgaatgggcaattttcttgatatcagataaggtttctcaggtacctggaatgtagaaaataaaatcacttgctaggaattaaacaattcattgtatttccctaagtaagcattagctggacagcacccaagaggctgtctctcacagttagaggcaatttgaggattctgaaaataagtgctt

SEQ ID NO: 38749 - DNA, 579 bp, Mus musculus
  source 1..579: mol_type = other DNA
ctgtatgacaagaacttcaagtctctgaaaaaagaattcaaagatctcagaagagcaggattaatgcaatccccattaaaattccaactcaattcttcatagagttagaaagggcaatttgtaaattcgtcttgaataagctgtactacagagcaattgtgataaaaactgcatggtactggtacatgcagaagaatgcaaatagacctattcttatcttcttgtacaaagctcaagtccaagtggatcaaagacttccacataaagtcaattttcttttgaacatgaattaacctggcttctttttcagaattacattgaatgcttttaagtagtgggtaatatgttgtattcatataaattatcaaagatactaatgtgcaaccaatacaattggatgaaagttgcaagccacttctaaaaacaaagtttgttattttggcacttgtataatataaagtataaaaatataatgtgtacattctgagaagttttaaatacagtctttaaaacacaggagtctggatcaaataattgtgtaggacagtgacctgaagagatagttaatcatcactgaac

SEQ ID NO: 38750 - DNA, 376 bp, Mus musculus
  source 1..376: mol_type = other DNA
acattgccaaagaatcagcatagatttttgtgtttgctttttcaatagaaatcaaacaaatccaatctgcagttatttataaggttagtcagagtaaataaaacaaaaactgcctagatatttttataacatttcagtaactggttaaattagtccataagtatgtgtgcaggtgtacatgtatacatgtgcatattagtcaatgctgaatgtcttcctgtactgcagtttacaggcatgcctagctcttttacttgcctggtaataattaaaagtcagggcctcaagacagttttatatgaatttgacattatattataattgacatgtgacagctggaagcagcattcctccttggttccagcatccaggataa

SEQ ID NO: 38751 - DNA, 454 bp, Mus musculus
  source 1..454: mol_type = other DNA
tagtgaatatgcatgtaaaccttctatgttgtaaatttctatttcaatttatgactttgtaacatgtgatcatgtaagagaggagaattttttttcccttagaagaatttttttccagatagctttcataggaaactttttacaacatagtaataaactctatataggctatttacttaatccttagaaattgcagtttctggcttcagaggatctagaagtacttagacttagataaataaactttttattattatacctcttgtaagacaattttatagttcagtaaataagttaactgctttaataatttaacaattgttcctgataccagggtttgagcctagtttcattgtaacttattaaacattccattgatattcttacaaggcaaaatgaaaaaaaaatgacttgttattgttcaacaaataatttaagcactgtcttttaaaca

SEQ ID NO: 38752 - DNA, 360 bp, Mus musculus
  source 1..360: mol_type = other DNA
gagagagtgctgtatctgaatgtaattatctaggcaaagcactatctaagatcagctatattcttagaccaggtgtgaggtccttatgctcctggggcaagggctttcacacctaagccatagttctaattttgatttattcagagctgatctcatgaataatgcagagtgactcaggtgggggactttcttctattcaataatgtagcctgccatacataactataataagcattctaaacttactttcctaagcttaccctgaaatttctaactctatgtagtagattgcaattcatctgaataggtaatattcttactaaatttgacaaattatttcttggaggcacctataataaa

SEQ ID NO: 38753 - DNA, 403 bp, Mus musculus
  source 1..403: mol_type = other DNA
tatgtactttttatagtaattgaataatgcagtttattgtattttattgacttgtttaaattaatttactttttgacctttaaactccctggggcctccaggctcttgagggttacacataccaggactgtatgtgtgttgggggccccatgtactttttaaaaacagttcttactgtggttgataaaatgtttctgagtatccatgacactgagaaaatggatcattttataaatacactttattgttattcctaattactatcttttaaaaagtcacttccttactgtcagacttaattgttcaaaaattcacttgtatctcacaaaaagatgtgttgatgccatctgccaatgaaaccctttcatctacaggatggacattaatgacagtctctctagcc

SEQ ID NO: 38754 - DNA, 523 bp, Mus musculus
  source 1..523: mol_type = other DNA
tgggaaggctagcactgacacaatgctcagagcacaaagtgactttttaacattagtaaacttggtgcccaccccagccttgcaggcgctccgcgcgggcggacagtctggtccgacggctgttccgtgggacagagcacgggtgccaccggggcgaaggcggcggcggcacttgggccgaggcaggtcggcggtcctcccgtcacggccccctccctcccgcgggccgccgccccacgcgcgctcgctccattcattgcggggcggagcagaggctgaggcgggagcaccggccaacgctggggcccggcagcgcttactctgcgtatccggcggcggcgaggaccgcggtgcttcggggcccacgctgcgaagcctggtccggagaagagcctcggcgacgccgcccgggcccgagccgccacgtcttccggaaacacgcagccgccgccgccgggccgcaaggccgcgctccattggctgcagcgagaccaatagcacgcgctcttgttcggatgtgcac

SEQ ID NO: 38755 - DNA, 367 bp, Mus musculus
  source 1..367: mol_type = other DNA
tgaagcagtgtatatctataatgagatatagagtccctgtaatttcttaataaactataactgttaagaaatgctatgtttttgcacctgtacatagttagaggctaacttcttcaactattcaacagtatttgattgtcataaagatgtcataaagttaatcccaggactcgggaggcagaggcaggcggatttctgagttcgaggccagcctggtctacaaagtgagttccaggacagccagggctatacagagaaaccctgattccagaggattcgagttcttcaaagtctgcctccagattttcaaacgcaaaacacgtgggaaatactcatacggactaagtgtgagcttccgcccgtagtc

SEQ ID NO: 38756 - DNA, 322 bp, Mus musculus
  source 1..322: mol_type = other DNA
gtctttattggccataccacaaagaataaaacattatctctaatatgagaagcctgcaaggcttgccgctgctgtcttttaagaaacagagccagctggcagtaagttcatgaagtgggcaattataaaagtacatgaggcttgctaaaggctttttaatgagggaggggcctcaggctccaagtggctaatcttggaatctgtttccaagattataacctgtttttcaaaacaaagaaactttaacaaaagattagaagttatataaacaaagatctctttattcacagggacagaaggctctgtctacactctgcagggt

SEQ ID NO: 38757 - DNA, 335 bp, Mus musculus
  source 1..335: mol_type = other DNA
caaacgtttgaaagtgtgttatatattgcttaattttatatttgctaaacctaagatgttaagacagataagccctgatctcttcacttttgtaaacagcctagaaaaaaaaaaatgccttttccggaacctaaaaacaggcgctttctcttcgctcactacttcaaatatatatatatttttggacttttccaccccgccggctccacagacgaggcagaagcgcaagctgcggcgacctatccgcccagcagacagccgcgcccggcagtgcacatccgaacaagagcgcgtgctattggtctcgctgcagccaatggagcgcggccttgcgg

SEQ ID NO: 38758 - DNA, 128 bp, Mus musculus
  source 1..128: mol_type = other DNA
tgtaactggtatactaatttcaaattccacacatatttgttaaatcactgactactccccagaggagtcatcaggtccgctcagttctgatcctctgtgcagactccaacactaggagtttttaaagc

SEQ ID NO: 38759 - DNA, 298 bp, Mus musculus
  source 1..298: mol_type = other DNA
acacatatttgttaaatcactgactactccccagaggagtcatcaggtccgctcagttctgatcctctgtgcagactccaacactaggagtttttaaagcccgggggttgtaacaatttgctgaatagaaattgggtgaagttatgaaaatcatatctttctaatttttaaagttactctttatggattaactagaaggtggtatactgagtgaagtaaggggcctactgtcctctctgactccgtccgatgaggctgtgtttgcgtcctggcagtgacagccctgtctgcgctggaa

SEQ ID NO: 38760 - DNA, 472 bp, Mus musculus
  source 1..472: mol_type = other DNA
tgatagcaagctaaacttgtaaagaacatggttaaaaatcaagcatgcttgtagtggtgtttgtctgtatgggcaaacacacaagcacatacatatgcacggcctttactgatgatgtaatcatcattatggtgaaagttcagatcaatactttcctgagcactgaattatgaaatactatcaatataatacttgacatttaaaatccatgaacggaactaaaattcatttctctttagcaaatgacacattctttatgtgctatgcagaaagacaccgtggtttatgcctttgtataccaagcacaggctggggtagactctaggcaccaccgtgcagtcctgcttgtgcttctgccaatgacaaggagtttggtctaaaggccaaaggccaaaggactggactcttgtcctgaaaggcagcaaggagctgggcacgcttcatccagctgcgctgggttcatgtgacctca

SEQ ID NO: 38761 - DNA, 565 bp, Mus musculus
  source 1..565: mol_type = other DNA
gcttatgtgtaccaccacacatgcatgaaggtcagatgatgacatgcaggagctgcaggatcaaatccaggtcatcaggcttggccggaattcttaaaattcaaacaagaagaatacttgggacaattatcattttctgaaagaaaaaaaaaaggcctattaagttgatagcaagctaaacttgtaaagaacatggttaaaaatcaagcatgcttgtagtggtgtttgtctgtatgggcaaacacacaagcacatacatatgcacggcctttactgatgatgtaatcatcattatggtgaaagttcagatcaatactttcctgagcactgaattatgaaatactatcaatataatacttgacatttaaaatccatgaacggaactaaaattcatttctctttagcaaatgacacattctttatgtgctatgcagaaagacaccgtggtttatgcctttgtataccaagcacaggctggggtagactctaggcaccaccgtgcagtcctgcttgtgcttctgccaatgacaaggagtttggtctaaaggccaaaggccaaaggact

SEQ ID NO: 38762 - DNA, 294 bp, Mus musculus
  source 1..294: mol_type = other DNA
acacttctgattgcttaatccatgctggaataatctctctctctctctctcacacacacacacacacatgggaccttgcagtttcctggaggaactttgaaggaactttaaatgaccaaaaatctgttcaacagtcgttctgaaaagagttcagaagctccgaggccttctgctctaaagtggagtagagagcgggggagagcgcgtgcacactccagccttgtccttgaaggagattagaaagctaggaggctggagcgccgcggccccgcctcctcctcctccttcttgtag

SEQ ID NO: 38763 - DNA, 375 bp, Mus musculus
  source 1..375: mol_type = other DNA
cggcgggggggaaaaaaagcacatttgttcccccacccccactatagaaagacatttactgtataatctttcttgtgcgcatctagactgagccgcgactgcgcctgcctgccccgaaggcatacactttaaaaaataataaattaaaatctctttgcgtcagtgaacttgggctcagaaagttctctgagcagcgagccttttaaagaagcagaatccgggctactgggaaccgagctggctcggctggtgcctgctcggaggtctggccccagctaggcggctgaggagctggcggagcatggccactagcacctctatccccagctcctaccccgccctccccgtggcccggcagcaggaggggggaagcca

SEQ ID NO: 38764 - DNA, 369 bp, Mus musculus
  source 1..369: mol_type = other DNA
tcacatatacatgcatatctatatcaaaagcgggcacagtctgccttcaatagatattgttttaagcaagttttgttattttaagagttaattatatctgtttgtgaaagcgatgaaacaaatgaacaaataaaaaacttgaaatcaaactcaaattttggagtgctcagacaagtgccattggtccattagtctggaccagcaggcaaattcccccatccaagtgagacaagcatgcctggtgctcacccgtaggagcagctccggaggagggggagggtccccgcctcaggcgtctggggtgcctgcagtttcctgccagggcgcggcagtgtccgccccaggccacagcgcagcgcagcggaggag

SEQ ID NO: 38765 - DNA, 276 bp, Mus musculus
  source 1..276: mol_type = other DNA
gcctcaagttccaggccatgagtagtcatgggggccctctctctctctctcatactgtttgagagcccaaaatattgtttgtgaaacaattaggctgggactaagtctcatttattttagaaatctccagacattattgctcacctggccggccccactgcagggtgacggcgcggggaactacaactcccagcgtgccccggggctggcggagccgtgggcgtggcctacagctgccacagcaggcgggcggtaccgagtggagtcggcggggcc

SEQ ID NO: 38766 - DNA, 475 bp, Mus musculus
  source 1..475: mol_type = other DNA
gcttgagcagctgctttctgttggcttgtcctagaacacagcaagccaggacacttcattgctgcgattaaaatttaaattttcaactgagtttcattgaaataactgagcatttctttactatatctaattgaatctggaatattgtaatattaccaaccaagactaaaattgagtgagataagaattaacttccttctctctactattctgtaaaggctgtcgcaagagtatttcccaattcaacccaattttcttaattactttcagtgacataattcattgtagtgactaaagactttacctatttaggacaaaggatttgatagtggtacaatcttaacatgagtgaaggacacattttgtaacctgtgttatcagaaaaattcagataacatgacttttataatagacattggctcagttgtggtttaaaaattattcttctagagagctgcaaaaggtatatatagac

SEQ ID NO: 38767 - DNA, 572 bp, Mus musculus
  source 1..572: mol_type = other DNA
gcctttgcagccttttaagaataaacagctttttagtctacagaggcgttatctcctccaaggtggtggatcccagtgtgcatgcatctcccctgttcgcgcgcgcggacgtgtatgtgcgtgcctgagcgtgtgagctcgcgcccgcgcgtgcacgcaagtgcgtgcatggaatcgtagctcagcacgggctgggagccgaggaaggaataaatattcgccagcctcctcagcctgggcacaaggtgtgcgggtccccaatctgtgcatactccgggatagacatatgcgcgtgtgcatgcacgcaccagaggggctgctgctcttattgtctgcctccctctgcagagaacaagggcagcggcgaggggcctgcaccctgggctagcgtcgcggccccaagcaggtcacttgatttccaccaatcccggggcgcgtgtctgcggagtccagggcgcagcagaaggctgcggcgcaccgcttcctggcgggcgcggccgaggcgccgggggtggggtagcggtcccgggccgcatctggggggtgccgggcaccgcggcggcgcaggaggc

SEQ ID NO: 38768 - DNA, 571 bp, Mus musculus
  source 1..571: mol_type = other DNA
tgagatttcagtcctgtgacgactaagctttgtccttgcacaggatgcttaagcaaatacttttccgacttctgctagggcgagcagaaatggcttactgtgagtctctcctcgcttgcctttgcagccttttaagaataaacagctttttagtctacagaggcgttatctcctccaaggtggtggatcccagtgtgcatgcatctcccctgttcgcgcgcgcggacgtgtatgtgcgtgcctgagcgtgtgagctcgcgcccgcgcgtgcacgcaagtgcgtgcatggaatcgtagctcagcacgggctgggagccgaggaaggaataaatattcgccagcctcctcagcctgggcacaaggtgtgcgggtccccaatctgtgcatactccgggatagacatatgcgcgtgtgcatgcacgcaccagaggggctgctgctcttattgtctgcctccctctgcagagaacaagggcagcggcgaggggcctgcaccctgggctagcgtcgcggccccaagcaggtcacttgatttccaccaatcccggggcgcgtgtctgcggagtccagg

SEQ ID NO: 38769 - DNA, 161 bp, Mus musculus
  source 1..161: mol_type = other DNA
ttatgcatcatcgtgttgaatatcagatgaaagaataagctttaatcagcacaagagctgggcagatatttatactctgtgctactgttcctcagaccccaagtctgggaacctaaggaccttgggcggcctctctaggccttcatgggaggacaccccat

SEQ ID NO: 38770 - DNA, 507 bp, Mus musculus
  source 1..507: mol_type = other DNA
ataaggaagtgtgaagtgccatctataacccagtacacagtacaactgaaataagtctttgaagaaataatatttattttcactaaggctggctgggttgacaggtgtgcgtccccacacaaagtagactcctctagtatgctctgggttgtcaccagcgccgggtgcccagagcgctggagcgtgtcccacggctcctgcacctaaccgacccgaggctgggtagatgatgcagggctcgaccggtgccgccgcagggcagagcaccgagagatcgatcgctcccgcccctcgagccgcctctctgcagcacgtcaggggtagggcagcacggctggccggcgcccttcctccggctgcttctccggaatgaggcctcggtggccgcgcgggacgactcggtcctgctcagagcgtgagtgcggcgcgcgcgccctccgctgtcagttggcgcgcgctcccgacgcctctccgcgcgcccccgcgccccccccccccgggctcgcg

SEQ ID NO: 38771 - DNA, 337 bp, Mus musculus
  source 1..337: mol_type = other DNA
atgtgcaggcacaaaagccagcctgggctgcataccaataaggaagtgtgaagtgccatctataacccagtacacagtacaactgaaataagtctttgaagaaataatatttattttcactaaggctggctgggttgacaggtgtgcgtccccacacaaagtagactcctctagtatgctctgggttgtcaccagcgccgggtgcccagagcgctggagcgtgtcccacggctcctgcacctaaccgacccgaggctgggtagatgatgcagggctcgaccggtgccgccgcagggcagagcaccgagagatcgatcgctcccgcccctcgagccgc

SEQ ID NO: 38772 - DNA, 618 bp, Mus musculus
  source 1..618: mol_type = other DNA
aataattctcagcaacgtcaactatctgacccttaaaagtctattatcggtcggctgatgactaagtatatcccgggcaaacctggaactcactatagcccggctttacgtaaacaagcccagcttggccggttgaggccaggctaagctcacagcttaaatttagtcaggacgtgccttaaggtgacgcttccttgactcctgacagggctgggtagcactccacagctcatcggtagagttcgaaagggctcggcagagctcgacagcgctccggcagagctcggcagaattcggtagggctccggtagcgctcgggcaaggctcgttagagccccggtagggctcggcaaagctcgacagtgctccggcagggctcggcagtgtttcgtaagcgctccggctgggctcggccgcgctcggactccttcgggtgcaggagcccagccaaccccacagtagcggagtgcctggcggtgcgcgctccccgagaccccgatccccaagagccccgaggcccgcccattgtgccgcggggttcgccaccccgccagccgcctgacgcagccgaggctccgcccccggcgtgacgctagcgtcaggccagtcccggcatgc

SEQ ID NO: 38773 - DNA, 295 bp, Mus musculus
  source 1..295: mol_type = other DNA
tgtctgtattttttgacaagaagcacatctgactgcagagttttctgagataagttagtaaggttttaactcaataatgtaagaaaaacctgtccaaatgttttgggtggggaggtcacccacccagtaagtcctttgtgcaccccagtgctgggaggacagatgggtccctggggcacagccagccatctagctgtgagagggcctctctcagaaaacatgtatattcagacatgggcatgggcatctgctggcaaatgtgcacataccaatatgacagccctgtggacactcg

SEQ ID NO: 38774 - DNA, 568 bp, Mus musculus
  source 1..568: mol_type = other DNA
gttacgtagccccgtgtgggcttgggacccagacttgaggatgccagggccttgtctgcaacctcataaaaaattgttattttgaactagaattttccaggcatgaacttcaaataagaaaattaattttggaaaggtataaaagaaattacttttaagtagttgaaagtcaatttgaataacacacatgattggactttaaaagtcagagttttccattattcttgtgtggtatttacaaaataaacccggtataatattctcttggaccaggtaaaatgctcataggtcccatgtctaccaaagagcatggcatgtttgtaaaatatagtttgagtttccttaactaagagttaaattgctacattagaaaatttctcagcgactgtgtttctgtttatttcagaacatggtcgcagatttcaacatacccagctctaaatattttgggctttaaaaattaatattgaggtagaaaatttagagagacaagagacacaatgacaggttagcaaacagcattcttagactgttgtgttctagaatgaaatgtcacagactaagtgac

SEQ ID NO: 38775 - DNA, 257 bp, Mus musculus
  source 1..257: mol_type = other DNA
ggccatggaggagcactgtcctctgggtacgtccacagtgagctgggtgcttgtgcaccaaccatttatcaaggggctgagcacagactcttaagaataagttttgctttggtcattctatccactcctgtgaagaaatggtggtgcagggtggatgcataaagatcccactccataggaaaacactctgtagtctaccataccaacaggtaggatcatggagccctaagggatcaaactcaggttgtcagccttga

SEQ ID NO: 38776 - DNA, 322 bp, Mus musculus
  source 1..322: mol_type = other DNA
agggacaatctgtctaatattagaactgtcatttgtgagttctgaggtgacttcccatcgggcagcagctgaaagttcttctgggggagtttcctccacacacattctggaagttggcatctacctggtgtcctaactaagaaagaaaaggggaaatattacctttttagagaattcgatctgtaaggccataaaaaatggcccagagggttttttcatcaaatacactaattttggattttgccaccatagcccccatgtctatcttactcaagagagtgactgtcatgccataatgtcataggggctggagtatgacctc

SEQ ID NO: 38777 - DNA, 397 bp, Mus musculus
  source 1..397: mol_type = other DNA
ggcatagatgagagcttctaaacttttcccccacccctctaccccaaggggtaggtgggtgcggcgggtgtagagcctgcctctggaaaggcagtagaggctttaaaacccgagccttccagtggtgctccagccagggtctgctgaccacctagcttctttaagcatagggcagaagcaggaggatcttgacagggtctccctggcttcggatgccggcgcgcggccgcaggcaggaggtcagctgggttggggggggggggacgacctgcagcgatccgggcgcccgccccgcgccgcccccgctccgccgcaccccggggcgcgcgccggccacggtcaccggcggctggagcgctgccctcgcctgggacaggcgcgcacacacacatacgcg

SEQ ID NO: 38778 - DNA, 312 bp, Mus musculus
  source 1..312: mol_type = other DNA
catttatgtaactgtgatgaagtacctgcttcagttaggctgatattctccatgtttgatgacatatgcaaattatgtcttccaatagccttggctatagggacccctttggaaacaagtctcagaggtgtattatttagctcattaaaatcagtagtgaatagcttctgccacctgagtgcgaggactcaaggtcagctggtggtctctttcatcagcccttcaagggcgaaccataggccgtatggtggttgcatcggaggctaggactgttgcaggagagccctgcgtgcccagccatgcgtgactgca

SEQ ID NO: 38779 - DNA, 330 bp, Mus musculus
  source 1..330: mol_type = other DNA
tttttatacagtgtacttacatataataaataaatctaacctattctctcctagggagttaagaatgaaaatttcacagcaaagccttctgcttagatttactaaaaagaaagttttcagattttcagagagatcctctcctcaactgaatttcacattaaattacttctgtatgtgcacatcaaaggattggtggaaggagagaaccggctcctgccagttggccctttattcaaaatctattatatttatttaaatgttataaaaattagagagaaaaatcactggaggggatcagtgtctccaccctggagtgagccagaggtcgga

SEQ ID NO: 38780 - DNA, 251 bp, Mus musculus
  source 1..251: mol_type = other DNA
ctggtaaccactgagtcatcatgacctctgagttcacagtgggaatatccagtcacagcgagctcgtggggagccagtcatgccacgtgctcatccgaaacaatgctttcattttcaggtcctctctaaagaagtttgagttcctcacagtttctcagagtgacttgtgactgaagtgtcactgaaagctcagggtgttaaaagaaaccacctcagatgtccttaaaatgtgcctttagcctgcgcagagg

SEQ ID NO: 38781 - DNA, 418 bp, Mus musculus
  source 1..418: mol_type = other DNA
tgcatttctcacatcagagccattatatcatcaattatgactcagtgagtaatgtgcttactgaggacccattgtcttaagagatttagacaaaagcaatgtatgtattatgcataggctcatttatacatatatgacatacatgcaacatacatacataacatgcacaaataaacaaatgaaatatttaaattataaaaattggctatgcttgttttcttagatttgaaaaggaggatttgttctggaaaataccttcacttagcatatgctcagaagcattggataaggaattctaccctaggttatttttaaaagatatatttttgatattttaaaacactttataataaattatttttaaataaaatatatattttagacacatgcaaatatgagtgtcccccatgggctcaaa

SEQ ID NO: 38782 - DNA, 275 bp, Mus musculus
  source 1..275: mol_type = other DNA
tgacctctgagttcacagtgggaatatccagtcacagcgagctcgtggggagccagtcatgccacgtgctcatccgaaacaatgctttcattttcaggtcctctctaaagaagtttgagttcctcacagtttctcagagtgacttgtgactgaagtgtcactgaaagctcagggtgttaaaagaaaccacctcagatgtccttaaaatgtgcctttagcctgcgcagagggggtggaaggatctgggcctgctgcgctgagcctacgcttatcat

SEQ ID NO: 38783 - DNA, 367 bp, Mus musculus
  source 1..367: mol_type = other DNA
gtatctgtggctctgacccagagtcagaatggccaaaagtccgaggttttagtataaaaggccgtctcgtttccggatgacacagatgtcaccgggagagctcttctcaggctgtgcatagtcacagcattaataaccctgggaaaaataaggaaattgagttctgtttctgtcccaggtaacacgaacatttaaatgggcacagagtccagtttgaggtctgttaatttgactagcattagctgtctaaactcagtccagtagtaaaattatattgggtttatcagaggaagtatttccatttgcaaagattcttactcacaagagcaagggcttttatgtaaatgggatcctctatttgaatgga

SEQ ID NO: 38784 - DNA, 162 bp, Mus musculus
  source 1..162: mol_type = other DNA
ctgcagctgctgtggtacggctgtaccgacgaccctagggcgctcaaatatataaaccgccagacgcacttgtcactaagcctgtcactaacaagcttcgcttgttgccacatctgtgctcagcagtactgataaccaaggcctcagagagattgggagacc

SEQ ID NO: 38785 - DNA, 310 bp, Mus musculus
  source 1..310: mol_type = other DNA
ttatggagaagggctgaaattctgcaggctgccacaacagaatctgtactacgccagatgactccctgggggacccgcccggaacctatggcgcgccattatcccccgggaaggcaaggctggccgtggcgggcctcggctataaccccagctctcaggaggaagctgagggatgcccgcgagttccaggtcagcctgcgtttcagtgtgagacgcagctcctttgcggcaccacggccgtaaatgctccgaccgtctgccggaagtgggcctgcgattgcgctgtccttcgcaaaacactggagtcaac

SEQ ID NO: 38786 - DNA, 149 bp, Mus musculus
  source 1..149: mol_type = other DNA
ggctgatgacccattgggggtcttgccaggggaggcctacatacttatatcttaaaagagactgaaaagcacctttgtgtgtctctggcttccagccagcaaacacaaatgttgactccagtgttttgcgaaggacagcgcaatcgcag

SEQ ID NO: 38787 - DNA, 605 bp, Mus musculus
  source 1..605: mol_type = other DNA
cgctatgtgcaaaaacatttagcagttaacttgacacagagtaggccccgggcctcccacctggtgctgggagggagaggtagagctagtgtaacagtttcacgcgggggccctggctctcagtctagaggaacgcatcctcggatctgtcctgtggagcgagggcacttcctacaaagcggctctccatgtggtatccgggcagaaggccagcctggtctacacagagagaccctgtcggcttcggacagtccggccaagggaccgcgaggccagcggctggggtccgcccccggcggcgccgcgcgcgcccggaggagcagcagcggggcgggcggccgcgtgcgaacgagcggcgaggcggggctatcgggagcgccagccccgggtcggggtccgcgttggccgacgccctctcggcaccaccctcgcgcgcccccgcccgggcccgtcctggccgccgcttcccgccctcgctctcctgggctcccagcgctgcggcctccttccctccctcccgcgcgcgcggccgaggcagcgcggagcaccgagcgcatcgatcggcctgctctgcggccgcccgcccgcctgccgggcccatcgcg

SEQ ID NO: 38788 - DNA, 921 bp, Mus musculus
  source 1..921: mol_type = other DNA
ccgcgcagggcgtgggccacctgttctgctgtggccgcggcaatgtcacagcccttacaggcgtgggggaggggagcggtcgcgaactccgcggcggacgcctttcccctccgagaaccacgacgccctccggccaccgggtccgagcacctcccgccgcgacctcccccggggccccgcagcccggccaggggaagcggcgtccccgcacagcccgcgcgcccgacaagttgagccgggcgcggggcgccaggcgcggatgccgggtgcagcagaggccgggcgcggaggccgggcgagcgcggagggcccgccgcggccgggaggaggaaggaaagccgccccgtccgggaaacggcggccgcccgacctcggcgccccgcgcccgccgccccgagccggcttcattcagcgccgcggccccgcccggccgcgccgagctccgcaccgggcagcggcccaggagcgccgcccgcgccctacctctctccgcgccgcggagccgccgcgcctcaggctcccgccgccgccttcaggcccgcgccgcgctcgctccgggtccgaaatggcgcgggagcgggactccgggccgagccgccgccgccttcccctgccgtctcagccgccgccacagcgctgccgcctcagccgccgcggccgccgcctgccgaatcgagcccggagtgcgcgatgggcccggcaggcgggcgggcggccgcagagcaggccgatcgatgcgctcggtgctccgcgctgcctcggccgcgcgcgcgggagggagggaaggaggccgcagcgctgggagcccaggagagcgagggcgggaagcggcggccaggacgggcccgggcgggggcgcgcgagggtggtgccgagagggcgtcggccaacgcggaccccgacccggggctggcgctcccg

SEQ ID NO: 38789 - DNA, 235 bp, Mus musculus
  source 1..235: mol_type = other DNA
ctttcttcactgattaaatatctgaggagaaaggaaaaaagttctggccagtctctctgctcctgcaacttgaaatcccatcaagtctagccttggctacgcagcaacacccaatgaaggtttgataacgtcttagccactttctcccaggggagaagctggccccgtctagtccaggatccccggcccagggaatggtcctgtttcataggctcatctcagcaggtgactccag

SEQ ID NO: 38790 - DNA, 200 bp, Mus musculus
  source 1..200: mol_type = other DNA
aagggtgctctaaggcccttggtcttagggaacactgaggcttgacgagactcctgccaggatgaagggctattctcccttgtcaagagtgagaagctagacactcgtagttggtaactggagatacctgaagcccactgtgaatgtggagtcatcacagacgtaggctgctgaattgtggcaactgtttctatggcaac

SEQ ID NO: 38791 - DNA, 363 bp, Mus musculus
  source 1..363: mol_type = other DNA
catttgcctgggcctggtggatcccctttttcaaaatggtgagcaacagatcccagcaggcatatatggtccctctcagtaaccaatgcttacttcctggggagcttaggtctgcattatacaaatgtaaagctagctttgaattcatatgtattgtgaagctagatttcagactcaagttgaaaatcactggcattgtctccatggcagcaaagaaggaatggatgcacacagagcccactgcccaggaagtggtcactgaagtggccacactgctgcagaaagctttcagaagcttttctcagttgataaaagtttcctcggaactatgaaaccatgaataataagacaaatgaggtcata

SEQ ID NO: 38792 - DNA, 535 bp, Mus musculus
  source 1..535: mol_type = other DNA
tgtggctgtctgctggcctgcacagacagaagacgtttactaacctggttttaaaagttagttattattagtgtacaaatatattgaccatcagggcacatcaatgtctgaatagttccataaagaagttttaatacctgatcctgaaaggaagacttcatttttcaagcatgcttgtgatatttctttgtgagagatccaacaggtgttccttatagaattttaaacattaaaagaacgacacatgttttggttttgtgaagttaaatggcattaagtcagttcttcataaaaattaaaggttgtctaattgagaatattaaacagagctctccctgggtgcggagtcctgtcaggcacaagaagcatgagttctgctgaaattcattaaagggtcattcaatatctgcatactgtcagtgaagccagtaggcatgactgtgacccctggaaaagtccaggggtctaccaggcggaatggacctttaaccattgacagttaaaagctgcctcaaacttcagcttgaaggaatct

SEQ ID NO: 38793 - DNA, 357 bp, Mus musculus
  source 1..357: mol_type = other DNA
cttgccagcattgtccaggaacgtaagggagaattgttccgagtattactagcctgcaaaaacaacatatgtatcacttccttaccatcataatgttgaaaagtgatattggcccagtggagcaacaacacagatcctaagctgtgtacttggagtagactcttcgaagaggaccacctttttcagaagtgggatgctcccccatccctttgtaaagttgatgtggtccatacctaggtacaaatgattcactgcttcatgtgtattcattattacagaaaattattagctaaaccaatttccttcctcattgtttctgtaggtgccaacccaacgggtgtggtggtcacaatgatt

SEQ ID NO: 38794 - DNA, 358 bp, Mus musculus
  source 1..358: mol_type = other DNA
tggatttgaactttcaaatagtaaaatggaaattttacaagctagagagaaatgtatacatttatgatttttttatgtaactaggatcaaacaagatttttaaaaccaccttgctgagatttagttttcttactggtaatacaattattcttttctctggcctcctgagtagctggagagaagccatagcttcagattaaaaagaaattatttatttcttgagtcagagcctaagacttactaagctctgtatatacggtattggaatcaattaactgtcagtttgtcccagatcaatcagataggaccctagctgtgcagataaaccaaacaaatcgtttcctctggttagttgctc

SEQ ID NO: 38795 - DNA, 424 bp, Mus musculus
  source 1..424: mol_type = other DNA
aaaagaataattgtattaccagtaagaaaactaaatctcagcaaggtggttttaaaaatcttgtttgatcctagttacataaaaaaatcataaatgtatacatttctctctagcttgtaaaatttccattttactatttgaaagttcaaatccagaagtttatgccaataaaataaaataaaataaaataaaataaaataaaataaaatggcacaacatgctatatagccttcaattcaattatgtgcatttgtctttggaagaagggccatctgcctttctcttaggtctggccagagtcgtggggggagtgcacagccgcaaagccctccccaggtcacgcatgcgcagaccagggaagcttgagcaccccacttgtcctgcgcaaagccggatgtcagggatgcgcagacctccagcaggg

SEQ ID NO: 38796 - DNA, 373 bp, Mus musculus
  source 1..373: mol_type = other DNA
cacacccaacttacttctggtttgatgaatgttcgatgaagccgctttattttagtttccaatcacccagtgggtgacttgagaagtaaattattctttctgaaataaccattgcctgaacacatttgctccagatttgtagcaactgtttcatatctctatatatttaaaaagaataattcaacacaggcccagggcctgagtcattgcattgatcagataaattgtggattatcttccatttaaaccaaaatgttggaagcccaggctatcctaagttacaggggaagttctagggctgccagctactctcccggcctcccggcctccccgactggtggggtgctgctgtgtcacgagtcacagggccttc

SEQ ID NO: 38797 - DNA, 418 bp, Mus musculus
  source 1..418: mol_type = other DNA
acaaagactcactggcacttgtgatcccacaacccagcctggtatttcattgttgagttttaattaattattacacacggagtcaagggttcatctcttcctggtgaggtcagcaggttttcccagctcagtcacctcactggacaattatttttgcgagtacctcaataagaaaagaagttttttatttttcttttctggttcttccttgtcggttggattacattaaaaaaaaaaaaaaaaaaaaaagctcaatttaacttttgtcaatgactttttggattcagtgatctattaattaaacacaagcggtttaattcatcaccttgtcttgtacttcctggaaacaaaaaagtaaccatcacacaggccctgggcgccaggtccctgtgcgttggcagttggcgacccccctcgg

SEQ ID NO: 38798 - DNA, 485 bp, Mus musculus
  source 1..485: mol_type = other DNA
ttgccggccctgtgctggtacccgctggaggtctcgcaggctggggcgggcaggacccggactgcgtggctttcccctcccccgggagcacccgaggccggctgctgcgagtttaggtggcccggggacactgttgagggtaggtctccagcctgacctaaacctcggttctgcaccgagatgctggacgagccgggggagcccctcgtcccgccccgcccccgcgccctgcagcgcctcggggaagacgaacggctcgccgggtggccgctccttccaggtggccccaatcaggtcctccccgcccccctccgggctggaccgcggatggtacgttccgcacgtgagctgggtgctggtctggccggcgacgcgcgtgccctgtggccaaacactgcccggagtgagagcaaactaccagcgcagtgcgtgtgtgcgcgcgggtgtgcgcgcgcgggtgtgcgagagggcgagcgagcgagcac

SEQ ID NO: 38799 - DNA, 259 bp, Mus musculus
  source 1..259: mol_type = other DNA
atattattgggatgactcttctgacaattaaatcaacaagacagacagacataagggatcaatgtccttcagcttattaaaacgaatgtgaaagactctctgaccctgtcctaatggaaaggtcagagagacagagcacatgcacatgcactgagcacgtgctaacgggtcggcgtgtgtggccagccacttaccctgctgagtcacctcggtaaagtcacttcttgttgtgttatagttcacataacacagggagaag

SEQ ID NO: 38800 - DNA, 310 bp, Mus musculus
  source 1..310: mol_type = other DNA
tggtaaggaaataacttgatagccatgtgaggttctcacattaaataaaaaattaattttaatgaaagtggcatgagtaaggtttggactgaccaaagtccaaatgaatcttaaaatgcaatagggtcgctctaattccttgctggtgacatcaacataatgatgcctacagcagcctgcaagtttcgacgtaacttcaggacaagagtggaaactggtcactggacttgaactaggtaccatttcatccaccctgctttccatgggggggggggtgcccatgtgcacatgtgtgtgaacttggagttgg

SEQ ID NO: 38801 - DNA, 296 bp, Mus musculus
  source 1..296: mol_type = other DNA
tcagcgtcaggcaagcttgcctgtcaggtcacagacactcaggcctgctggtggcacctggtggcaccaacaggctcctgcggtaaaacccataatttaaaaccaagagtgttgttttgagcagcctgtgtgggtgtccctgcagaacatccctggaggccagctctgtgcttatgtaacccccctggctgctgctggggaaatgcctgcccaaatgcagccatgcagagcagtggaaagctcaggggacatccactctgccctgttggagcccagataccacagagaacgccctc

SEQ ID NO: 38802 - DNA, 357 bp, Mus musculus
  source 1..357: mol_type = other DNA
ccggttcctggagatggaacccagttaccctttgtgacccactgacggtcaccagggtggtcaccatagcagctgcagctgctggatccttttatccagtcatgaacttaagaaaaacaggagtggtggtgcgaacaccacagccaaataggctgtcgctggctgcactgcacaaggagtcactccagactgtcgctgctggtctcggggctgcccctccaagatcaccctgagcccgcagcgccgcccagcgtggctcccacgcctctgtcctggccgcttcggggtggcccgtcccccgagaactggccccgccccggccccgctccgcccctggccgcccaggcttgattggcc

SEQ ID NO: 38803 - DNA, 461 bp, Mus musculus
  source 1..461: mol_type = other DNA
agaaaacacttctaaaactttttcttatactaaaattttacagaccaaaaaaaaaaaaattttttttttaaacctacattctaaccttctgcacacacctgactgcaaggggggttcggcatcgaggttcgcttactttcgtgcctggtcctgcagtgaatgaacggagctgcttaaacgcaggggcgcgcgcatgcgcgtgcaagcacaagagcgcactcggactcgcgcgtgcgcacggcgctctcgcacagccttgttcccataaccgtagggaagaacggtcaggccacggccgggacaagccagcctcggctctggacaggcagagcctatccgcctccagtccgggccggtagcccctcggagagaggggggcgaggagagaagccccgccccctccccgttctccaatcaacggccagccgtttaccgggggtggggccttcgggaaccagcag

SEQ ID NO: 38804 - DNA, 534 bp, Mus musculus
  source 1..534: mol_type = other DNA
acagtcacagtgcatgtgtctttcaaagaagcagagaactgcactgttcttgaaaaggaaacatttgtctggagaaaaccagtttttcaacttgaaaccgaatttgccgctgagggactccagctccctcaggacgagctcccgagtggcaggggggaacccggaaggggtgtcccgcggcgtgcaggcccagggttttcagggaactttccgtacctcagttcccggcaggacctcagggagagcacggagagccggctcagaggcttcagtccccctggggcgacgaccacccgcgaggtggagtgcccacggagtggtctccgcgccctcgctgcgcctgctcagcgagcggacgcacagtctctcggccccatcccgggcggaccagaacctccgcgacccgcagccgctgagcgacaagcctcgcgagacttccctctgctggttcccgaaggccccacccccggtaaacggctggccgttgattggagaacggggagggggcggggcttctctcctcgcccccctctc

SEQ ID NO: 38805 - DNA, 384 bp, Mus musculus
  source 1..384: mol_type = other DNA
tgatcatcttggaaactatgataaacagtttgtctgagttccacaaaccaggtatttgctctaaatttacattctgaagctgatctttcttaagatcgaagaggcaggcagatttctgcgttcgaggccagcctggtcattttgatttcctggagaatgttaatttctcgaatttaaagctttgtggtatacctgcaaagaggccagccaggactacaccgtgaggcatagcctcgtggaagcaccttcccttcacaggctcggtccagcgtaaacgcgaacccgtagcagctcagcctgcacgcgtcatcccacccgcctgacgtcagcaggcccgcaggctggccccgcccctccccggcagcatgcttcctcataaattgg

SEQ ID NO: 38806 - DNA, 291 bp, Mus musculus
  source 1..291: mol_type = other DNA
tatcatggctgtcattggtatcctacattgagacatatctcagtgatatattattaactcaagtttgcataagtgccttttaagatactaagaatcctatttctcaatatctcaataaaatatgaaattcattagtggtgtcacgctgggtcactctggacccggcttgccccgtgagcccggggagcccagaagccccggcaggaggcgcgcgcccgcaagggccggccggggacgcgcgcggctgtcgtgccggaagcgcgcgcccggcggggctggggcggcaggtgc

SEQ ID NO: 38807 - DNA, 475 bp, Mus musculus
  source 1..475: mol_type = other DNA
gaattatgaggcttatgaattatactggtaagtcattcctgggccaatgaattatctttgtagacaatggcacttgccaccaagtctaaaaaatataaaaaaatcatttatggcaaaacttacagtaatatactctaactatagtcatatttttacaaagaagctataaatcgtagaagaaaatgttagttaaactaagcagacctcaccttctgtgctgtaatacaccattacaaagagttttcaatgaaaggattttattaaaaatggcaacaatcttctcataataatgatctctatgttattactaacaataacagattgtgcagctaaaactctatttacatctagtttggattaaatggtttaatcatacaaagaaacttaagtttggttatcagtctaggtaaaattaaatttggtatcaatctagcttaaacaaagacttggccaaatgatttgttctgagtggctc

SEQ ID NO: 38808 - DNA, 337 bp, Mus musculus
  source 1..337: mol_type = other DNA
aagatttagtgtagcccaggctggtctcaaacttgccgcagctttgaaacactgtaaattaagagtaggtgtgtgtaggacacacagtgtatagtgtagtttagcaaattttcatgcggtgatctctcctctatggagcctcctctctcagggtcaggcagaaccagttagaactcctggaccaacctacacttccgcccgcgaaggtgggggtcggtactggcgctgacgccagaaggacacttccgcctgggtgcagtctcgcgagattctggcgcggccgctttggcaccgcctcacggggcgggacgaggcggggcctggcgcgagagacgcg

SEQ ID NO: 38809 - DNA, 255 bp, Mus musculus
  source 1..255: mol_type = other DNA
aactctaaggcctgtaagccgctccacttccatccctgtcctgccagtggaggagaagggactcgcggtttctgagtccgaggccagcctggtctacaaagcgagttccaggacagccagggcccactgccaactttctgcagggcagagaggagcagcttcccggtggagggagctgaggtcagagcaccccaggtcaccactgctgtcttccctctcaggggagggagttaggccctcaggtgtggaacaact

SEQ ID NO: 38810 - DNA, 471 bp, Mus musculus
  source 1..471: mol_type = other DNA
agaattcaatgcttctagcctccatggctgttcaagaccagtctggtccacacaaataataataaaaaatctttaaaaagcaggttattgctggtaaaacatttacctctcgttactaagtggttgagcgccgctagatgaccacgcggaactagggtggcccgcccgccacgtccgctcggtccgcgacacagaggcgttctttcgggatgagcgtcgcttctgacccgggaagagctgcgagcgaccgcccggctcagcgcagccctttatccgcgccctacggaccgcagcggaccgggcgcgctccccaccgacgcccactcccagctccgctgggctcggccaggaatgtgggagaccaggcgccgcctcggagtgaccgcgcgcccggccaatcagcgggccgcaagcgcgaggccccgccccctccgcccctggggctggttcccgccgggggaggggcggggc

SEQ ID NO: 38811 - DNA, 297 bp, Mus musculus
  source 1..297: mol_type = other DNA
tggtaaaaccattgcacccaaattataagaactgttggccatcaacagtgtccacagtttctaaggggggatggtttctaccatggctcccttgcttagttacatacatgaaatcattaattagttagttaattaattcctgctacaagtggcagaacatagggtctgaaatgtatgaggtatttctgatataaactaagacaagactagattacagatatatactatatggtcatcattaaattttaatgtataaaaagagacagtggaaacctaagtatgacatgatggtaacca

SEQ ID NO: 38812 - DNA, 305 bp, Mus musculus
  source 1..305: mol_type = other DNA
agaggagaggctgagcctcagcataggaggaggttgaaagtaaagtcttgagtgtgctcttgtttgttttaataaaaggggaagtaggtacccagtgcagtggcaaccccccagagcctggacctgatcctggcccacgggacgcagctccggaggtgccgcacagtgtgcgcacggctaaccgctgagttcccagcagggcatctcagaatggcaagtctagccctgtactatcctttcgactaataaatagctgtatgctggtgcatagtatttatcctctctaggaatcattacagtagagg

SEQ ID NO: 38813 - DNA, 523 bp, Mus musculus
  source 1..523: mol_type = other DNA
gcaggttataaagctgttcattgtgaacttatttctaattaaattatcagatgctaacatgctcccattcatgatttcatgacaatatattggggttttagtttaacatgaataaataccaccatttgaaagctcagtttgttattagaacctggttaaaataccagcagactgttacagatgccaaatattctttatcaaggacaatgtaacaactgatgatatgtgataaagttaaaaacttttgattatatattttatttacaaaagtattatgcaaagtttgcattaccttatgagaggaaataaagtcaattgataattgccttgtgtatttgtcattgtttctttgttcagaaaaacaaagtcttcatttctggtggaaacagtaactgatttttggtttgattgagtttttttgaatcagacaaattgagatctctgcttaagaagtaggagtctaacccatacattcacgtgctggttttttttgactagtcatttgtcactttgacaaacgggg

SEQ ID NO: 38814 - DNA, 142 bp, Mus musculus
  source 1..142: mol_type = other DNA
gggtgcagccacactgtgccattgtgtgcatgccttaaggcaggcggatttctgagttcgaggccagcctggtctacaccttcctggagtttaaccctcagaacctaggggtgttatgctatatgacgtagactgtgagact

SEQ ID NO: 38815 - DNA, 232 bp, Mus musculus
  source 1..232: mol_type = other DNA
tctgcccaccttttaggcttacaagaatatatacaattgcatttatcgcaaaattaaacattttaaatatatttctttttctactttttgttttgttttgttttgttttgtttaataataaaaagtcaaacaagtacacgaactggttttctctggaacaaaacaatgtgttgtttctgaaaacagagcctcccttaatctgaggtcaagagactaggtagactctttactc

SEQ ID NO: 38816 - DNA, 413 bp, Mus musculus
  source 1..413: mol_type = other DNA
tgagtgacactagcctcctgaaattttccagcagccaaaatcgcctttgctcttctgggtgctaggtttagtcccctccccaggagaaggccacaccaggcaggaatgcagtgcaatgcgagcttgcaagcgagcttgggactcttgggattctcaggccacccggggttgggacctggactcctggacctgccactcaggcgacagcaggccggttcggcccacgcgggccaggactggggtggggctccgtggctccgggctcccctgtgctccccgcccccgccggcccgctcacccctgcctgctccgccggcgcgcgttccgggcaggttggccccggagcgtgtgaaccttccagggctgggctcaccaacctgcgccgccccagctgggccgctccgccccgctgc

SEQ ID NO: 38817 - DNA, 451 bp, Mus musculus
  source 1..451: mol_type = other DNA
ccaaaatcgcctttgctcttctgggtgctaggtttagtcccctccccaggagaaggccacaccaggcaggaatgcagtgcaatgcgagcttgcaagcgagcttgggactcttgggattctcaggccacccggggttgggacctggactcctggacctgccactcaggcgacagcaggccggttcggcccacgcgggccaggactggggtggggctccgtggctccgggctcccctgtgctccccgcccccgccggcccgctcacccctgcctgctccgccggcgcgcgttccgggcaggttggccccggagcgtgtgaaccttccagggctgggctcaccaacctgcgccgccccagctgggccgctccgccccgctgccggaacccgccctcgcggccacctggcccatccacgacacgcgcgcctgcaacttgttcaagggcgatatac

SEQ ID NO: 38818 - DNA, 419 bp, Mus musculus
  source 1..419: mol_type = other DNA
aatatcttggatatatttggattgttaccacttgactagttccaagtaaatggtatacgttcaataaaaattaagtgaatgttgtctaaacctgtaacagtcatattcccttcaggaaaagatgttgactgacagctttgctgtaaggatgtaacagctaaaaaacaactgttttttacagtcctagcgctgaagatctttaaaatccagtggtttagagaagctttcacacgttcaggaacttgagagttccgctatgagaatcactcaactaggaggttcttcttgtggagtttgttttggctcaggacaaaagataaagacatgatgtagttttcttcagatgaggctcagctggcctcctcttggggggtcatgtgatgcgcccgcggatgcctggagcgccgcgcgcaggcctg

SEQ ID NO: 38819 - DNA, 278 bp, Mus musculus
  source 1..278: mol_type = other DNA
gtacagggactaagtaaacactgtcctaagccactgcttgggtccatggagtcatttcagtccatccagaaactttgttcacagcctttgaagtttgactagaagcaattagctaatagaaaatttccatattttttccccagagccctggatctgcagggtgcttgatgcctggtatctcacatggagagaaagagcaagtaactagcattcatgccttatttcgaatgtccatctgggcagtggcactgtgatgtcatagaggcactgcccagtgt

SEQ ID NO: 38820 - DNA, 409 bp, Mus musculus
  source 1..409: mol_type = other DNA
ccctggaccaaataaattaattaattgatagattagattagattagacttcctctttatagtcctctgaatggaatcttttaatagaatcccacaattaggaagtcttaatttacttcaggattacagaaggctagtgatgtgaggctttaagaccctggtgactgagaggggaaacgtgtcctttttcccagtaaacacacagctctacaaagtggtcatagttatcagtccttcctttaattagctgaatgactggttgattaagttcacaagatgactgacagcatattttgttcctgatctctagaaagatacgaaggctgtgtttctcaaacccgggtgtgctgagtgctgcaatggcaactgtgtcaagcccagcccacagagccttccaagctcagctgggg

SEQ ID NO: 38821 - DNA, 436 bp, Mus musculus
  source 1..436: mol_type = other DNA
ttttttaatggatggagttccttgtttcattaatttcaacttttcacgattcaaaataatgagattcagaataatttttaaatttggaaggttggggggaaatttgctctccctgtctaaaatttaccaataactaaatataaataaaataaaattgttacctggggaagtcccagagatttcctctgcctgtctgcgcatcagatagcaagaatcaggtttctgcctcctctgcagcttccatccacctggcgtgtggtgcggaagatttgccagtgcaataggaagttcctgcacccaggcgatgccatcctcggggcctgtgcgtccgaggccccggcactcctcccgccctggcagaggcctcggctgggcgcccagcagcgaccaggaaggtcggagggagggtgcgctcctcccgccccacacccagttt

SEQ ID NO: 38822 - DNA, 278 bp, Mus musculus
  source 1..278: mol_type = other DNA
accttaagtcaaataggaatttatgattaattggagtacttttcagtaaaggacaaccaagtaaatagtggtatttcttggcaatagtattgtgaagattagagaaaaccgtcataagtacgctttccttaaaactgtttttaaaccaggcgcctgccggtctgtagtgcggagcgccgtggcggaaggtaacttccccttcctggaaagggaccggcggaaagtatcgcgagttctccatttgcgctcccttcggacatcttcgtgtgcgccgggct

SEQ ID NO: 38823 - DNA, 342 bp, Mus musculus
  source 1..342: mol_type = other DNA
gtgcctcttgtccaagaagaaggcactctccttttactctgtgagcattgttgctgaagctactctgccacagtgagttcgtcccaaacctgaggtctggtatgctcttgtcctaggagactatacttgaccctgcttagagatctgtcagggcctctttgaagtttgtgtttgtgtgcatgcacacacaagtacatgtggagaccaaaggacatttttgagacatcaaatagttcatcaaataggccaggtgggttgtctagtgaattttatacaatactatgcatttttatagcttcacttatcttaaaaataagggatttacatggccactgactctga

SEQ ID NO: 38824 - DNA, 433 bp, Mus musculus
  source 1..433: mol_type = other DNA
tccaggaatatagatcatccagatctacactgctggataatcaggtaatatttgtgtaaaaatctatagttcatgccccaaactgtctgcacagaagagggaaaaagatttgttgaaccttttggccagcagaggttctaaacctatggatcatgacccccgggagctatgtatcagatatctgtaatatcagatatttacagtacgatttataacaataacaaagttacagttatgaagtaacaacaaaaataattttatagttctaaacttagggaacagagttcaaggcacgcacacgtacacacgctcatgtacgcacgcacgcacgcacgcacacttaagcatgtacaacaatagtatgaaatatgtcttcaagtgagttttgtcggcctccctccaacagatggcgctaggaagtcccgcctactgg

SEQ ID NO: 38825 - DNA, 477 bp, Mus musculus
  source 1..477: mol_type = other DNA
ttggcattcaaatcaaggcagtctcccaggagacaataattatatcagcctggcttctgtagcctgcctgaatggcgcctccttcattgcttaagagtttaagggaaatcacagccggggatgcacccctgggctttggggaaaggactgctgcgcgcgttgcgttcccaggacgtccagctgcgaatcgctcacgcctccagggagagagggtgtccgggccgatttgcggccgggaggcggcggggacctgcccctccgcagctgagaccggctggggactggtctggcgtacccggtgggaccctgggtggccttcccgcgtgtcccctcaagccctgcggcgacccgctaaacctgcgcgctctggctgtcccggactcagcgccagctggtagaggccaggtgttggggacctcaggtcccaggatccaggaggcggaggcgcgcaagcgggcatgcgcagtgtttatttgc

SEQ ID NO: 38826 - DNA, 578 bp, Mus musculus
  source 1..578: mol_type = other DNA
caaaggtaacatttcaaattgaaaatgcatttttcattctgatggctgtgtgcataatggactgaaatgggcattgctggaagcaatcagtcatatagcatacatcctgtttcttaaatttaattgaaccaatacatcgtaattatatgctccttggaggatcatgtagatggaaacagcataacccttcttgcctttcacagtgaaagcatttttgtgtttttacactctaaagagaaacacacacacacacacacacacacacacacatttgattatctattagattttgagttttcatacatacaaacctgcattaaattttatcttgttattataacatggtgcctgtctgtaaacatttttaacaaatgttcaaagaatgaaacattaaaggaaacctcttctgtaagctacgtaacctaatttgcaacaactgtaaatagaccaattaacttactttggtcacaccagtgggtggacaatgccggctcctgagacgagcatcatggcgtctctggcgggtgctggtcagtgcagggggaagaggcagccgtaaaggagtctccgtttcctct

SEQ ID NO: 38827 - DNA, 439 bp, Mus musculus
  source 1..439: mol_type = other DNA
gttttaatttattaactttattattttatttagtttatgatccctggtattagggagtaatctaccctgttttctgttaactttatgcaacccaacaaataacttttttttgttgttgtttttctctgtgtagccctggctgtcctggaactcacgctgtagaccaggctggcctcgaactcagaaatctgcctgcctcacaaataattttaacaactcttttagtgccaatgaaatgaattgcttcatagcgactgactcattctacaatgaaaaatcagcaagggtgctcttgtattttagaagtgcccatttaaaccattagagcgggggcaccggaaaggacctgtccctcgcaggtcccgggtaccggaaaagggcgcgaagcctccgaggggagctcgcgtgcggtcgcgccgtgcgcggcctacataagttg

SEQ ID NO: 38828 - DNA, 411 bp, Mus musculus
  source 1..411: mol_type = other DNA
cataatttttgagctattatctaagatttatctgaaaaacatcctcagaatactttaaatgcatttatgctttgcggggactcaaaaaacgaaccccagactttcgcgttcagttttgcagcacaaaaaccattaaaatgattttcaagtctgacaaacttcagttcaaaagcagatgttttccggaggatccttctttagaaatcattcttcacggttggggcaagagccggcgccccgaaacttccccgcgtgtggtcctgggtagggcgcggagctccactcctggagggagcccagcgctccggggtccccgggcaccacgcgccatccgccggctggaacaacggcccgcgccccgccggcgccgcccgaaggccgcgcctctgctcccgggccgctccgcacgct

SEQ ID NO: 38829 - DNA, 458 bp, Mus musculus
  source 1..458: mol_type = other DNA
tttgatgttcgattatcgtatattccacaaggaatgtttttctgggcagaggagctctttgaaaacttcagttcaagtgagcaaagcaaaaccactcagttatgggttgggtcatgttacggaattactgaatggaccatttcaaaatgcgactttattaaacaatttatcatcaaagaacgaaaactctgttggagaattgaaattttaatttgaatgctgcaaaagcagcttccagaactttccaagctcagtagcttcctaaggggtgccgtcgcctccttttcccccgggggctggggaggagtaggcaggacccgcccccgtccccgcgggccgccgcgtttcccgcgcctcgccgcttctccccttaaaaggacaatagaggccgcgggaacgcgcgcggacgccctgccctctccccgcccagcccgcggcgcgcacgcgcccgtagtccc

SEQ ID NO: 38830 - DNA, 527 bp, Mus musculus
  source 1..527: mol_type = other DNA
aacaaaaatagaaatactcagtaaaatatttttatgtgtactctgtataatagaagcaataattgcataacattaaatgtccatatacattacagatttcaaagttggttattttcccagtagcaccatcctgatactacctagattatcatcatctatagtgagtcaattaggagtctcactaggtagagaggctcatctccaactccggatcctcctgcctcagtcacaggagtgctgggtgagtctaggatcttaaaatggtttaagcatctgcatgacagccaaattgggctgcaccgtgcgggtgggcacgcacccagacgcgcccccgatcctccgagctcactggtgcgcgccccgaaccgcgcgccaccgagctctgcgggcgctcccgtcgcgcagcgcggttcagttgacccgcgggcgccagacgctgcgctccagcgggcgcagccgcggcggcgcgggcctccctagctgacactccccctgcgcgcccctcccccgccgcggcggaatcccgc

SEQ ID NO: 38831 - DNA, 554 bp, Mus musculus
  source 1..554: mol_type = other DNA
agtattctatatatgttaataaaacaaaactaaatcattactgtttacaattttataaatcagttactgctcaaatgaacagaaagcatgtttcttgattagcacaaacaataaatcagttttctgctatatttgactagcttagaatctaacatcctgcaaacaaaaatagaaatactcagtaaaatatttttatgtgtactctgtataatagaagcaataattgcataacattaaatgtccatatacattacagatttcaaagttggttattttcccagtagcaccatcctgatactacctagattatcatcatctatagtgagtcaattaggagtctcactaggtagagaggctcatctccaactccggatcctcctgcctcagtcacaggagtgctgggtgagtctaggatcttaaaatggtttaagcatctgcatgacagccaaattgggctgcaccgtgcgggtgggcacgcacccagacgcgcccccgatcctccgagctcactggtgcgcgccccgaaccgcgcgccaccgagctctgcgggcgct

SEQ ID NO: 38832 - DNA, 299 bp, Mus musculus
  source 1..299: mol_type = other DNA
tcttctttccttctaccaggtcctgagaaactcccaaatcagattttgaccaggcatctgaagaacatttttcaatttgtaaatttagatacagcaacatggtttttcttgtacatcatagcagattttcggtaatgaggctgaaaacagtcttacgtgtgactttataattatgacacaccgcaactgaatgtcataaaactttacagtatgcttggcatacagtgctagcagttcccagttgccttgggaaccgaggggagccggtgcgtaagcccttcggtccgggcggccccgcg

SEQ ID NO: 38833 - DNA, 466 bp, Mus musculus
  source 1..466: mol_type = other DNA
tacagtaacaacacctaagcccttggtgataagttgttaggctgttggctgattggctgggccaatatcagatcatcctgggagagtaacttcgttccccagagggcccattctgagaagtgttttgtcagtcatttctgcgaaattcttatgagctgccctcagctacgaataattacttctaggaagcacaatctgagaacctgtacttaatttcaccttatgagcaatatggagactaaaatcaaaatagctagtcatgttaaacggaacaggccttaatatgtcccattcctggaatgacccaggactgcatggttgactactgcagtcctgtaaaccccgtgtttgaagtcgcaaaagcagtgacctgccattagcctttgcctggacagcgacttctggcgactcttgggcaggagaagtctgagcagccctcagttctgcccagagagagcgctgaact

SEQ ID NO: 38834 - DNA, 422 bp, Mus musculus
  source 1..422: mol_type = other DNA
cagggtaaagcctcggaggtcttacacccagcttaaaagttagctgataatactttgcctagtaacctgagagcagactaggaatataattatgtttctgagttctgttcagtaagttgcttaactggatcactgttcatatacttttgttagtatatgaacatgaatctctgaagaatgatatccccactccagaagcccttgtagaaatatagttttagcagtcttagcagttctcggagaaataactataacaaataataaaatgagtttaaaaatattctgctgatttgctgacccatcataatatgattgtaaggcctgggggtcttacaccctcagggcacacctgcccggcactaggaccgcggccctggtgcaagcgctcgggggcggagtggggacccagctggacccgcccc

SEQ ID NO: 38835 - DNA, 491 bp, Mus musculus
  source 1..491: mol_type = other DNA
tgttcatatacttttgttagtatatgaacatgaatctctgaagaatgatatccccactccagaagcccttgtagaaatatagttttagcagtcttagcagttctcggagaaataactataacaaataataaaatgagtttaaaaatattctgctgatttgctgacccatcataatatgattgtaaggcctgggggtcttacaccctcagggcacacctgcccggcactaggaccgcggccctggtgcaagcgctcgggggcggagtggggacccagctggacccgccccctgcgcgctctgcgcttggcagaggcctcgtaagcacccgccgggcggcaggtctgccctgggctcggggctgggttttcgccacctctgtcccggcggaggggcgccgcccgggtcctcgctgtaccgcggggtcgctgcgcgccgggcgggcgcggtctgaagcgtcccttccggtttcggaaggagaagcagagctttg

SEQ ID NO: 38836 - DNA, 324 bp, Mus musculus
  source 1..324: mol_type = other DNA
aacctactgagctgctacttatattcctttaaatattatttcaataaaacccgtgaatagatatttgttcacatctctccagtaattacgttatgcagtaaggggactagaccaaatttctatcaagctttggaaaagcagcattctactagaaaacttagcccgttggaggccttcttagtgttctgatctttcagcagtcggctgtgctgcgctgcgaggctcccctacctccctgcattctgagtggctgagaggaagacgcatctgtgtgcactggctgccgcagggcccagcaagcaggtggagctcagcctcccacgg

SEQ ID NO: 38837 - DNA, 298 bp, Mus musculus
  source 1..298: mol_type = other DNA
gaattctggaatatactgtaccattggttgacagccattgtcaaactagttggaccacagcatacatggagagagtccttctaccagttctgttcatctagagaaccttcactaatactcctgtcggttacctaccaggtgagaagtagcttaataactcaagttggcatgctatctaccttgattccaggaggaagtaggtacctggtgagcacagggtcactgcccagctgggtcctcccccttgcagaactggaaaaagtctgactctggactggaagttttgggttagagctgc

SEQ ID NO: 38838 - DNA, 334 bp, Mus musculus
  source 1..334: mol_type = other DNA
gggtatcagagcctcccagtccagggggccaatgagccttaaggtaatatttttacgaaagtagatccaggatttccagaagagagatcttcctgcttcaactttggagatgactagccaggctggcctttaattctactttttaaaaactagagccccttttttaaaaggcaggctagccgcgaactcagccttctgggtttacatgtgtgtggaaaaagagttgggctttttttagtacatttcattaactacgtgattttgagtttcactataccttgagttagaccgatgataactccttgattggagtgaatttttttctttaaaaagt

SEQ ID NO: 38839 - DNA, 320 bp, Mus musculus
  source 1..320: mol_type = other DNA
gattctgagtctctccctttgtcctgaaggcaggaattcaggccaagcctccctccaaatttccaggaatttagctaacttggcccaagggtcctcaggccatgattacagtgtaattggagatatggccccctaaacgaaggaatctagtctttgttttttgggggtggggcttcaggtagacaagactccgttaaacagaggtctagctgaccccgtctaccctgaagatttctttgcagctctgcaccccctcactggtagggcgggagatccaggacccgccttcggggcctaggatagcctgaatgaagggaaag

SEQ ID NO: 38840 - DNA, 422 bp, Mus musculus
  source 1..422: mol_type = other DNA
acaaacaaaaagacagagtctcactatgtatcattggctgatctgcatccactgtgtagatcaggatgacctcagagtcacagagatcacgttaagagcactgactgctcttccagaggtccttcccagcaaccacatggtggctcacaaccatctgtaatgagatctgatgccctcttctggtgtctgaagacagctacagtgtactcacatacataaaataaataaatctttaaaatgtatgaacaacattgtcactagttagacaagtatgatctttttttttttaaagatttatttatttttatttatatgagtacactgtagctgtttccagacacagatggttgtgagccaccatgagtgctctctccatgcagtcagtggtggagcagaacccagggcttcattctgaaaacaag

SEQ ID NO: 38841 - DNA, 146 bp, Mus musculus
  source 1..146: mol_type = other DNA
gaatttaactagggaatttaactagctgaatttaactagcaaaggtgattggctctaaagcctgaagcaaggctcggaggacgtcccctccttgcatagagcccgggcggggggggggggctttaaactgaaaccccgccccttgg

SEQ ID NO: 38842 - DNA, 398 bp, Mus musculus
  source 1..398: mol_type = other DNA
gggcagcctgcccctttaagagtggccccgctgacatcacggcggggggggggggtgctggccccgctcccagctccgcggcggctgcaggacccggctctgctctgcgcctgcccgccagctgctctagggacccggcccgggacgccccttccctggccgtcctcgtcagggggatatcccaggtccctggatttcagtttcctttggtccaaggcctctgacctctctactcccagggcctcaaaatctctgagccgctggagtggtggtgagttccagaaaatatttctctccgcattagccaatgagcggccgctggtccctgctcccggctgcgtccgctgagtgaggccgcgggcgaggcccggagggggccgggacgccgggctcggggg

SEQ ID NO: 38843 - DNA, 399 bp, Mus musculus
  source 1..399: mol_type = other DNA
cggcgtaggcctgcctataggagcagccttagacttctctgggagagttttgacttaggggtgaatttcaaaagaatggaatttagtccagccagcagaaatattagtccagtagaacccagagactcctcgggtggaatttagccagaggaatacctggcttagagtctgggctttaagatgctggagccctggcggccttgaggctcccacatgaccgtctccatccaggcttgagcaagcccggcgagcctggcccggacgaggagaagaaaaaccactactcgtacggctggtccttctacgagcgcagccgcgaggcacactgccaatcacgctcggacctgctcaaggccggcggcggcgcgggcggcagtggcgggagcggcccctcggcca

SEQ ID NO: 38844 - DNA, 236 bp, Mus musculus
  source 1..236: mol_type = other DNA
tgactgacaaccatcacgccctcttctggtgtgtctgaagactgcaacagtgtattgagatcacatctagacataagctcattctggaaattctaaattaatcccaaatatattaaggactgcctgtgctttgtgttactagcataggggcattaaatggtttctcaagctggtgagattacaagcctgagcctctaagataatgcacatcactttttaagttaaattaaagcaac

SEQ ID NO: 38845 - DNA, 327 bp, Mus musculus
  source 1..327: mol_type = other DNA
aagtgatgtgcattatcttagaggctcaggcttgtaatctcaccagcttgagaaaccatttaatgcccctatgctagtaacacaaagcacaggcagtccttaatatatttgggattaatttagaatttccagaatgagcttatgtctagatgtgatctcaatacactgttgcagtcttcagacacaccagaagagggcgtgatggttgtcagtcaccgagcagacagagctctgagccatctctccagccgttataaacaggtggtttaaatctttcacgtcctcgcccaaggggcggggcctcacgcaaggagaaggaccacaact

SEQ ID NO: 38846 - DNA, 412 bp, Mus musculus
  source 1..412: mol_type = other DNA
taagcactatactcctgagccatgggcctagtcttgacaccctggactatatattgagacctagtttcaaaatgtcatcatgactaatgttcactcatgtaggttggtagagtgcttgtctagcaaacacaatggtaagaacactgactgctcttttctgtacgtctgaggacagctacagtgtacttacatataataaataaataaataaataaataaataaataaatagtcatcttcagttacatggtgattttgaggctgccctgggctaagagaaactgtctgggctctgtcacttttcctcagtaaggagaggcagatcatcctaggaaagctagtgactatgatatatgactctcagtttacacacctttgaaaattacttgtgtaaggcctgaaatttgaggaac

SEQ ID NO: 38847 - DNA, 172 bp, Mus musculus
  source 1..172: mol_type = other DNA
tcaatcttcatcatgatctcagcaaactgatgaggaaggagctcagaaagaactgctctccagaaagatccagctggaggagcaccttctcccggatccagcctaaagttatgctgtgatcttgaatattcgctccatacgtttaatattattatttatactatgatttaag

SEQ ID NO: 38848 - DNA, 368 bp, Mus musculus
  source 1..368: mol_type = other DNA
agctctgagcctggtggcgctgagaactcttcaaagcccacggctgccatggtcctgtagggccaagaactccaagtccctcccagggggacttaggtccaggccccagcctggagcccagatcctagccttggtcactgccagggatccaggccccagtcctcgtccctaacaatgaggaatcagaccctctcagactttggagcccacactaagagacacctcaagcctcagagaggtggagtcttgcgcaaaactacctctccccacaggaaaactgggaattaaagtttcctactctgccttcgtgtcgactagccaaagcgaatctctgttctcccggtcgccgtcccgcgaggcggctgcta

SEQ ID NO: 38849 - DNA, 330 bp, Mus musculus
  source 1..330: mol_type = other DNA
ctggcgccgccgctgcggagcgtatcgcgacaggcgaggaggggggagagagaggcgagcgcccgcccgccgccttttctcgcgccccgagcccgggcgctatcgcgataagagggcgcgagcccggcagcggctgccgacggctccacggaagctgaacgggcccggtccaagatggcggcggcggaggcctcccctcctctcttggcgccggcccgccctacgtcgctctgcgccgttaggcgcgccccgagaatgaggccaacctcttcatcaccccttaccctaaatcaattggcagcggggaggaactcataaggggaggagctt

SEQ ID NO: 38850 - DNA, 234 bp, Mus musculus
  source 1..234: mol_type = other DNA
aaagggcaaagcgcagtttcctctacagctggagtccttgcaactccagggaaggtcccagtctttagaaagcactgagttttagagatataccaagcaaaagctcctccccttatgagttcctccccgctgccaattgatttagggtaaggggtgatgaagaggttggcctcattctcggggcgcgcctaacggcgcagagcgacgtagggcgggccggcgccaagagaggag

SEQ ID NO: 38851 - DNA, 309 bp, Mus musculus
  source 1..309: mol_type = other DNA
tttgaggatcctgatattggtttctttaatttacttattcatttaatttttatgatgatgtataccgtagccctggctaactgttacggacgcctcatctgaatgaaaaggtgtgcttcactttcgctcctttttgcgtcttcctggcccagcgagctgtggctctgagctctctggctgaaccttcagcccctcagcttcagtgacttcatatcaagtgatgggactcgttttgaaaccccgttctgaagcctcggacggggtttggggaggggctctcagccatggggcgggagcatcctcgagcca

SEQ ID NO: 38852 - DNA, 280 bp, Mus musculus
  source 1..280: mol_type = other DNA
tttaaagctaaggtaggaccagtggtcgggtcccagtgtttcagagaccatggtcgccccaggggagcttgctcttacagcagcttaaagctttcccaataaagtgttacacatgcatttgtttgtgagtataacaaagacactgacccagaatgccagtgtgcatttgtgtgttcccaggagaccgcagtcacccgggtcacctagtggccaggtgcagacctgtagcaggcccctccctcccttaccgagggcagtccccgccctggggcctccagag

SEQ ID NO: 38853 - DNA, 297 bp, Mus musculus
  source 1..297: mol_type = other DNA
tgaatccacagtcgcactcgaggtgcagtgtgcgtctcggctaaggcggagctggccctacgtagcgcgtcctccgtcatcccgttgagggtacctgaaaaagcattcagctatctgacggaccccggctgattccgactatctccgaagtaagccgaagcatgcggtcccgcctacttcgttctgcgttctcgaatcaagccgaagtgattcggctatccccgaagtaagccgaagctgtggcactccatgccgagggctaagctgaaagtctgtctctgagctccagctcgaaga

SEQ ID NO: 38854 - DNA, 194 bp, Mus musculus
  source 1..194: mol_type = other DNA
caagaccccgcccctcaccccccaaggggcggggctggggttgccacctgcccccccccgccccccagcccgccctttttgcaaagtggggtggtttgctgctgaatccacagtcgcactcgaggtgcagtgtgcgtctcggctaaggcggagctggccctacgtagcgcgtcctccgtcatcccgttgagggt

SEQ ID NO: 38855 - DNA, 360 bp, Mus musculus
  source 1..360: mol_type = other DNA
gaggccgcctcggctcgcgccacgcctccccagctcagcacgcccccgcactgcccgttctggagggcgccggcagggctgcgcggtccaggccccgagagccgcggctgtacgaccccgggcaatcttcgagctggagctcagagacagactttcagcttagccctcggcatggagtgccacagcttcggcttacttcggggatagccgaatcacttcggcttgattcgagaacgcagaacgaagtaggcgggaccgcatgcttcggcttacttcggagatagtcggaatcagccggggtccgtcagatagctgaatgctttttcaggtaccctcaacgggatgacggaggacgcgcta

SEQ ID NO: 38856 - DNA, 194 bp, Mus musculus
  source 1..194: mol_type = other DNA
accctcaacgggatgacggaggacgcgctacgtagggccagctccgccttagccgagacgcacactgcacctcgagtgcgactgtggattcagcagcaaaccaccccactttgcaaaaagggcgggctggggggcgggggggggcaggtggcaaccccagccccgccccttggggggtgaggggcggggtcttg

SEQ ID NO: 38857 - DNA, 404 bp, Mus musculus
  source 1..404: mol_type = other DNA
agttgcatgtgtaggaattcatagtcatttgataggaagttcctctttcagtttgtgtcaagctgtcaagacaaattcaatattaaaataagcccagcacgacatatttatactattttcataatgtttgtattttttattattgttaaaatcttagcacttttaaaagaagatttatttatctattatatctaaatacactgtaggtggtcagatctcaacttttaagggcaagggcactaagtttttaccaagagtttttgttgaaacaaaaagtgacaactgtggttactcaatcaatgctttagccctggaaggggcagcctcgttaattcttggattaaccaaaggcaagtcggcccagcgaagcgccgctctagccggcctgctcgtcgatgacgtca

SEQ ID NO: 38858 - DNA, 162 bp, Mus musculus
  source 1..162: mol_type = other DNA
gatacatgtgctttgacacacatgcatatgtatatacaaacaaacatacttctcaactgttaaagaaaaccacatttacatttttactgttgtgtgaaatgttcacacatgtttgctacaatatggccatgacagtaatgtgcacatatgaccatgtcatgg

SEQ ID NO: 38859 - DNA, 270 bp, Mus musculus
  source 1..270: mol_type = other DNA
tcatttgagatgtaaacaaatggaatgatcatgacaagataatttgttaactaagcaaaaggacttacagaacataagtgtctgctgccacctgactctgttgacaggattccatacatgtgctttgacacacatgcatgtgtatatacaaacaaacatagcttctcgttgaaaaccacacgtaaatttgtactgttgtgtgaaatgttcacacatgtttgctacaatatggccatgacagtaatgtgaccatgtcatggggaagaaagg

SEQ ID NO: 38860 - DNA, 161 bp, Mus musculus
  source 1..161: mol_type = other DNA
atacatgtgctttgacacacatgcatatgtatatacaaacaaacatacttctcaactgttaaagaaaaccacatttacatttttactgttgtgtgaaatgttcacacatgtttgctacaatatggccatgacagtaatgtgcacatatgaccatgtcatgg

SEQ ID NO: 38861 - DNA, 211 bp, Mus musculus
  source 1..211: mol_type = other DNA
tcatttgagatgtaaacaaatggaatgattcattttaaaaaaaaagaattatggtcatatttgtacacctacatgccaaaataaggcctgactatgccatacatgtgctttgacacacatgcatatgtatatacaaacaatacccttaaaattggaaggtatccttctctatgtactgttgggtgaaatgttcacacatgtatgaccatgt

SEQ ID NO: 38862 - DNA, 113 bp, Mus musculus
  source 1..113: mol_type = other DNA
tgtcattgggaatgcaacatacatgtgctttgacacacatgcatgtgtatatacaaagaaacatgaatctcacccacaaagaaaaccacacttacatttgtactgttgtgtaa

SEQ ID NO: 38863 - DNA, 309 bp, Mus musculus
  source 1..309: mol_type = other DNA
aatatatatattagattataacataatctaatatcagaaaacctggaggaatccatggactctctcacagcaatgggagggaatttgagatataaacaaatggaatgattaatttaaaaaaagaattatggtcatatttgtacacctacaaccactgattagctcagtacataagtgttaccaaaataagacctgatcctgttgacaggatccacaccatacacgtgctttgacacacatgcatgtgtatatacaaacaatgaaaaaatgttcacacatgtttgctacaatatggccatgagaaaggct

SEQ ID NO: 38864 - DNA, 469 bp, Mus musculus
  source 1..469: mol_type = other DNA
tgctatttctaaagaggaagagcgttcttccctgtacagcttacccaaaatgattctgactcattaactcagaggaagtttcttcagaacagtttaacagtaaaaaaaaaaaaatccaatttatacacatttctgacaatatttattagcttttaaaaatattatctttgtcactgagatggctcagtgggaaaaaatgcttgcttctgagtctgacttgttctgtgactgcgtgcgtgcacacacgggcacacacacacatgcacacattatttaatagtaaaagcattatctatagaaggacacatttaatgtgtgaaatatctggtcgagatcttttacaaaagtcgtaacatcaaatgtttctcattttaaacccaaggaaatgtgagctttgggttgataggggcccgagacactgttttagaagctaacaccttctcctgaagaagagaaacctcttcctctc

SEQ ID NO: 38865 - DNA, 352 bp, Mus musculus
  source 1..352: mol_type = other DNA
cgttctaggggcaaaaattaggcctcctcatggtggccagggtccctccagggatacctggagacccaacacaaatattttggctagttggagaaggtctcaaacatgtgggaccctatatagatagataattaggatcctaatctttctaggaagatttctgtctagaaactgtgtccatatacaggtaatgatcttcccagtatcctggctcttatacagtcacctgcacaggcagcaggtgggagcccaggagagggcggagcaacggggaccactgctcacgccgcattgcctccggtgaccgccagaggcagcactgaggcgctgcctcgcctcccccctccgggct

SEQ ID NO: 38866 - DNA, 461 bp, Mus musculus
  source 1..461: mol_type = other DNA
tgtcaatttcttacttttaacaaatgaatttgaggtgtggggaaactgggcatagtgtgcccaattcctgtattacttttgtaatttctgtaaacttaaaatttattctaaaataaaagttcattataaaaaagagcaaatgatacagagttatccaagtgttgtttaattaccaaaagttgcttgtacaataactggtcaattgatgaacaataattgataagaaggtagtcttatcaattattcccaagttgggctgcataattagtgagctttaagtggcggcccacaccttaatcccattaagagggaggcgggtttctgagttccaggaaataaaccttccaagggatgactgctgagtcaaaactaagctgttgtgagcgcgcacgttgtccccacggggcccgccaacacgcgactgcgttcgcgagacgtctgtacagacgtccgggtaacgt

SEQ ID NO: 38867 - DNA, 567 bp, Mus musculus
  source 1..567: mol_type = other DNA
cttataggaagcctaaggggcactgacaggtctcaaaggcctttaaaaaacccaatccgaaaagagagcctcgtgttcgtaactgggagtccacgacgcaggtggaggttgaggccgccctgaacacaagcgacctcccttgtcccccgcgaccagccaccggccgggccgcgcttgcgcaccacgctgcgagggtggcctctctgggttgccctaggcaacagggtctagggcactagggaccgcagggttcccagggccagtagcagagcggacgcggacgcgcacgcgcacgtaggggagccgccccctcccccccccagcgtacacccggcgcgcatgcgcagaggcgctccggcggccacacccttcaaagacgcagggcgcggcgtcggttggccttaccaaacaggccagggctcgcggagcgcggagcccgaaggcgtccctgtgctcgcccgcctccctcgtctggaacgtcctgaccgtggcgtgatgacgttacccggacgtctgtacagacgtctcgcgaacgcagtcgcgtgttggcgggccccgtggggacaa

SEQ ID NO: 38868 - DNA, 244 bp, Mus musculus
  source 1..244: mol_type = other DNA
gttgtgaacaccagtgtgtagtcttcaccacagacagggaatcagagtgaagacccttctctggctctctctctctctctctcacacacacacacacacaaacagccagactcaggacattccaggctgggccggggaggggttgggctgggggcgtgcccgtccatccccctagctcagggaggctttctagtcctttaaatcctagaggcaaacttttaggctcttcaagggtgcaggaccc

SEQ ID NO: 38869 - DNA, 179 bp, Mus musculus
  source 1..179: mol_type = other DNA
caccatggtacaaactttaaagacggttgggggcggggccaagaccgctgagtcccactcctcctgccaggctccctagaggtctcgagaggcgaggcggccggaggggttgtctaagccctacccccacccaggctgcggcaggctccccctgaggggctggacatatgtaaatcatt

SEQ ID NO: 38870 - DNA, 204 bp, Mus musculus
  source 1..204: mol_type = other DNA
ctgcagtgcatcagcttttgaaggatgttgtgaacaccagtgtgtagtcttcaccacagacagggaatcagagtgaagacccttctctggctctctctctctctctctcacacacacacacacacaaacagccagactcaggacattccaggctgggccggggaggggttgggctgggggcgtgcccgtccatccccctagctc

SEQ ID NO: 38871 - DNA, 277 bp, Mus musculus
  source 1..277: mol_type = other DNA
tttgagatataaacaaatggaatgattaattaaaaaaaaaagaattctggtcatataatataatttgttaactaagcaaaaggacttaggaacagtagtgtctgctgccaaatgactctgttgacaggattccatacatgtgctttgacacacatgcatgtgtatatacaaataaacatagaggcatccttctcagaaacatcttacacttaaatatgtactgttgtgtgaaatgttcacacatgtttgctacaatatggccatgacagtaatgtgc

SEQ ID NO: 38872 - DNA, 297 bp, Mus musculus
  source 1..297: mol_type = other DNA
aaggtggaaccttagcgatgagatgctagtcttcaaactcagctctgagtattgttctcagaggggacagtgacacccactcccaagctccctgtgaggggcacagttaaatgctcagtgtgcctgctactctgctcatgaacatcaatctgcatcatcccagaagaatgtttatggaaagatcaatctttagccaccctcagctggaaggggccagcaaaggaaggtaatgtttctgctgcactcttaataattgagaaatgagaggcagttgcctaagggtgtaatcatgtgatt

SEQ ID NO: 38873 - DNA, 465 bp, Mus musculus
  source 1..465: mol_type = other DNA
gtgtggcagcacacgcttatgatatctgtgctgggagaccaaccttgcatacttggcaagatcctggctcttatgggacattaaaataagtggacatgtgtgcaaatacacataaacctaatgaacccacataaaatgtcaggtggatatggaatcctacttataattccagcctccctgcctcagtgacatgcacacatatatacaagcaaatatacatacttatgcatgccatagaataatagcattttactgagtcaaaatagaaaaattattaatatagtattactcttggtttcctgttaaactaacacgtgcatgttacacatgggaatgcaaagactaaaatccccatattgggtgaatttaaatgttaacccagaaatgggttattgtcagaataatcttttagatccaaaatgtggttaaatgtgttatgtgaacaacctttctattaaaaaataa

SEQ ID NO: 38874 - DNA, 219 bp, Mus musculus
  source 1..219: mol_type = other DNA
aagatcactaagtgatttgaacttctaaaaatcactccatatgtcaggaatgaggtatgtttttatccacctaaatttttttttttgagcaagtcagactaaatacacttctagatatctagaactgtttcacaaattcttgagaaatgctgacttttacctcagaaattgctttccctagtaaccattagggattttatgggagtctaagattgattc

SEQ ID NO: 38875 - DNA, 123 bp, Mus musculus
  source 1..123: mol_type = other DNA
tatgttttaaatatattaagtgtgtggacacatacaaggaatcaaacacaagttgcaaagcttgtatgacaagcagacccaggggttaactattatggaaatgcttggtaccaaactatctat

SEQ ID NO: 38876 - DNA, 244 bp, Mus musculus
  source 1..244: mol_type = other DNA
cgggttcaagacccttggaaaggccagtataacatgtaaagccattttccactttacatttcaatctgaattcatacagttgaatccttcttaacatgagttctgaattcggcagttgaatccttcaactggttctggaatgaagtatccctcctgcgccagtcccggaattcggcccctttcctctttactgcagcccatatttgtttaccaacttaggatgtcagcgccatcttgtgacggc

SEQ ID NO: 38877 - DNA, 281 bp, Mus musculus
  source 1..281: mol_type = other DNA
tgcatagtgagcttcaaaccaggcagggctacatactgagaccctgtattaatgagttcgagcaaacaaatcgtaaaaagtatgcaaaatttatttccctggaactcaggaccaggatcagacccctcgaactcactgcctcccaagtgctgggagccggcctgccggcaggcaagtctcaggcgggactcggttacccagagggctttgggtcggcgccgtgacgtcaccgagcgggggctggggcggtgcttgtcgcgcggcggttcccggcggccccc

SEQ ID NO: 38878 - DNA, 227 bp, Mus musculus
  source 1..227: mol_type = other DNA
cagtctagcctggtttacagagttctgactagtcagggcaacataataagatgtcctgtcttggaaacagtgacactgttattccaggaattcaaggttatccttggctctgagggtctgagactgttagagctttgaagatctcaacctgggggctttcaggcctagagtggggctggggtggggggagccccacttctccaactcctaaagaagtggggcagcta

SEQ ID NO: 38879 - DNA, 139 bp, Mus musculus
  source 1..139: mol_type = other DNA
tacagtgacaggcattcaaagttattttatttatttatttacttggatcccagggatagaacaaaacagtgactatctgcagtttgcagctgctggctacctcagctctgtcgctcgcggggcttaatgtatacagcca

SEQ ID NO: 38880 - DNA, 178 bp, Mus musculus
  source 1..178: mol_type = other DNA
actgctgaagcaggcccagggagctcagccccccagggatatgactagaacttcaaattcctttcctggatatcggataaggctgaagggacaaccctgggctccagggcatgccttccttgaatgtgatttctagactatcgcttatcctgggcaggggaggagacagcagtatatt

SEQ ID NO: 38881 - DNA, 259 bp, Mus musculus
  source 1..259: mol_type = other DNA
ctccagctcccagctccaggagggaggatatggcaaactggtcttgaaccactgatttttattgagtaatgactgtgaaaacagagatgtgaaggcatgtcttggcttcctgttataatttggattcacagagatttcattagaatccagcggagtaactccatttcgttcagttctgatttaatttgaagcagcaaggtagatcctccggctgtcgttatgacaaccgcgtccggtgtctcccattgggtgatgactc

SEQ ID NO: 38882 - DNA, 211 bp, Mus musculus
  source 1..211: mol_type = other DNA
catgtgtgtgtgtgtgtatgtgtgtgcacacacacacatacacagagagaagggggcgagaaagcttgccttgccaccactagcttcccgggagagtgagggctctccagtctgacatctcatccacagtcttgggaactccaaagcaggatggtgtctgaatatcggaatcctcgccccctcctccaacctggggcggggctcagcacct

SEQ ID NO: 38883 - DNA, 405 bp, Mus musculus
  source 1..405: mol_type = other DNA
agggcgttctctcttctccggggcagaacacgcacgcacacatatgcacaaatacacgcgcgcgcgcgcgcgcgatctcacacaggggcgcagacattagcctggctaggctcagccgcgcccccaccctgccaagcgccatccacccacgtgctgggggcggggtcccagcagcccacaacacctccagaagtgtgacacctagcaggtacaaggttcaactttctgatgtgaaggcccagcagaggtgccggggcaggttctccactcgctgtgccacgggatcccggacctgggtcccatggaccggcactgccttggcaacaggctcgttgcccagcaaccagcactgctatcaccctgcctggagcctggcggtcgctcagggcaacagtggtctgctgg

SEQ ID NO: 38884 - DNA, 262 bp, Mus musculus
  source 1..262: mol_type = other DNA
acaactcagggctgcctggtgtggaccctgcctgagctgaatctcgagactgcatctgtgctacaggtgtgtgtgtgtacatgtgtatgcatttatgcatgcaaaataagtgtgcacgtacacttgtgtcaaagtgtatatgtgcttataatttatagactggacagccagatggacatttggctctatttacatttggaaatctgcatggcacactacctaggggatctgaaggtacccctctggcctcaccaatgggctg

SEQ ID NO: 38885 - DNA, 280 bp, Mus musculus
  source 1..280: mol_type = other DNA
agtgtctactcctgtcacagtggcacatcctgcaagaaatacaacagcctggtgtggtttggccttcattcttaacactctaggaaagtgagaccctgtcaaaattatatcagggaataaaattctgttaggaagattccccaactagttaaggaacaagcctagctaataacgtaggcattcattcataaataaataataagccttcaagtcattattcagaagtcagggccatacatcacccaggctggactctgacttacaggtgtgattacacagt

SEQ ID NO: 38886 - DNA, 264 bp, Mus musculus
  source 1..264: mol_type = other DNA
gttagggctgtgctgactcagctctatcctctaacaggcctgctaaaaggagcaagaggtggatctgtgtagcccagccatgtctacaaactgagttccaggacagccagggctgggagagcacccgactgctcacagtgtacttacatataataaataaataaatctaaatccccaggcacaatgcaggatttatttaaccagtgtggtaccttatcagcaagtgccagacaagagcaggccttgcgtgacaggacacttggg

SEQ ID NO: 38887 - DNA, 369 bp, Mus musculus
  source 1..369: mol_type = other DNA
agtgttcacttttaatatgaaggtgctctcttacatcccttgaacctaatctgctgttttaaaaaaggaaaactaatgtttcttacatgcattagaaaaggccctttagtgactgaatcccggcgttaagcagcaactggcaacggagttgactcgagtcaaagaaataacaatcggatttccaatattcagcctggctgcagcagcgcctgcgcactggggacagccgcggagttccggagtgggcgggttctgggcgccagcgctcaccgcgcacgcgcctcgccaggccgacctagcggcctctcgcgcacctgcgcacggagagcgaccacgagagggcggagcctgtcttcttgcgtcctcccg

SEQ ID NO: 38888 - DNA, 235 bp, Mus musculus
  source 1..235: mol_type = other DNA
acattctcttaggaccacacttgtgagagttagggctgtgctgactcagctctatcctctaacaggcctgctaaaaggagcaagaggtggatctgtgtagcccagccatgtctacaaactgagttccaggacagccagggctgggagagcacccgactgctcacagtgtacttacatataataaataaataaatctaaatccccaggcacaatgcaggatttatttaaccagtgt

SEQ ID NO: 38889 - DNA, 293 bp, Mus musculus
  source 1..293: mol_type = other DNA
aattaaaaacaatctttaaaaataaaatggcaggcagatttctgagttcgaggccagcctggtctacaaagtgagtttcaggacagccaggaaataaataaataaataaataaataaataaataaataagtaactctaaaaatatttttaaaatgattggaagatcgacagctgatgttgacatgggacttcccagaaacggtctcccgtctgagcagcagcagcagcagcagcagcagcagcagcagcagagaaggccttgtttgctagctaagtgccgcatccgctaagag

SEQ ID NO: 38890 - DNA, 222 bp, Mus musculus
  source 1..222: mol_type = other DNA
ctttatagctataatggcccccctccccctccgaaagggttaactgtggggaagggccgggagggggcgggggggatctcggcctgcagcatccgccggccccacacttcagaccccccctgcagggggaggcacaggaaggggggggccggccagggacgggctggggagggggggccgcgcagccccccccgccatgctgattccaggggcctgaccccc

SEQ ID NO: 38891 - DNA, 175 bp, Mus musculus
  source 1..175: mol_type = other DNA
gattgcagatggggatcttataaccactatcaccttcccctgggaatttttaaaaaagatttatttatttattttatgtatatgagtacactgtagctatacagcctgctcgctcagggcagtcagtgctcttaaccgctcagacatgtatgtatgcattcagtgtcccttttac

SEQ ID NO: 38892 - DNA, 337 bp, Mus musculus
  source 1..337: mol_type = other DNA
agtctgtagtaacaaaacattctgtcaaaagtaagcttacttgtttggacgtaattatgatatcctgctaattatacttgcaattaaggggtttccccaggggagtgcccctgaactgttcacaggcaggacaagaaaacttcacagagttcttgtaggtacaattttccaaagataaggaatactgggaaagagaaaagatcttcttgctaagcagggttggcactgaagttttgttgccatggcaaccaatggtctcctggggccgggagccgaagtttgtctctgacagaagtttctgttggagcgacccgagccattggctgtagtcgccggc

SEQ ID NO: 38893 - DNA, 304 bp, Mus musculus
  source 1..304: mol_type = other DNA
taactatactgactgtttttaaggcctaagtaaacagctgtagattatatatatttctgcactcttgggtagtagaaatatatataattctttctgctagtctgatccggaagacccggacataaaggagtgggtgtcaggggccaggaaacatatcccctttcctccttccagggtgctggggggatgggatcctccttctctcctagtctgagactcttgtgcgcggttctcacaagggagggggaggggccgccactgatcccacccccgcggctgggactccctgggagccagccaatcc

SEQ ID NO: 38894 - DNA, 178 bp, Mus musculus
  source 1..178: mol_type = other DNA
ggggaggggccgccactgatcccacccccgcggctgggactccctgggagccagccaatcccacgaggcgccctctaggccccacggagccctgcaccccttcctgcaggaattgctacttggagggcccagaagccccctccgggccgccgcggccttgcctgggcatgacttgtct

SEQ ID NO: 38895 - DNA, 328 bp, Mus musculus
  source 1..328: mol_type = other DNA
atgtcctgggtcatactgagccacacacacacacatatatatatacacatatacatatatctccttaagaagttgtcttaagttgcctgctttacaggtagtatcattatatttattattttgagacaaggtattgttacatagcctaagatggtttcaaacacgaccctagtgctgggataacagctgtgatggccatgcccagctatctgaggctcaatagcctttgggttaatgatcccttctgatagaggtctgagtcacctatcccagccctattctggaatggtgaggcccctaggcagttcccaggaagcagcctctaggg

SEQ ID NO: 38896 - DNA, 235 bp, Mus musculus
  source 1..235: mol_type = other DNA
aactggcaagtaaaatggcaggttagcttcagtctcactgtgtagctaaggatgaccttgtgagagtgcaggtgtgtatgtaccatcactctgccaatgtactagtcctggtccatagagtggaggtggagggaggggacgccaatgacctcaccggcccctcaagcaaggcggtgtgcctgctaggcagccgggagggtgagtcaggatgtgtcaggccgccctcccctgctgc

SEQ ID NO: 38897 - DNA, 341 bp, Mus musculus
  source 1..341: mol_type = other DNA
catgggtgccccagccatcccatgagcccagatactgcgctcaggagtgacatagctccaatctggctggctggaagctaggaaaaacaaacacaagacaactcgagttgctctagcttgtgttccctcataaaagggaacaatggggctcagtgagaccccactattttttttcccccttttttcctggttgctaaaaggaaaaataccctatggagtctgcaactcaacggatgaacatggagagacctctccagccctgctcctaagtaaggagctacttcctagatagaatgtgaaccccttgctgaggggatcccttagcaacagaactaagaatt

SEQ ID NO: 38898 - DNA, 407 bp, Mus musculus
  source 1..407: mol_type = other DNA
ggcggcgccaccacgcccggcttcgtctgaaggcagctacagtgtacttacatataacaataaatatatctttaaaaaataatagcaaatagaccaggctggcctcgaaatcaagactttcctgagcacttcgggatctgagcactaacagagccctgagctcagtatattgtgtacacaaggtgtcagctggcacctgggagatgggttcattgtattcccaggttgggagacagcttcagggctctggctgctgttatgctgtgcagggcatgaaatcaagaacttaccaacatgcccggttggcactaagtagaaacactatctagctacattgacagggtccaggcactgggcacacctggcgccgggccctaactccgccccgggaagccgcaccccgggac

SEQ ID NO: 38899 - DNA, 262 bp, Mus musculus
  source 1..262: mol_type = other DNA
cagtaatgaaattctcttccctgcaagccctcggagtcaaccaacctgattttgagcaggtgaggtagtcgcgtgcgcgtctttctccaggccggagcgcgcgcgcgcaccccaagtcgtggcggcgtcttcaaacggtccaatcagcggccacgtcgcctcggcgggcagccctcattgtgatagcactcctcacaaactgggttcgaacttctgctactatgaccgcccagcaacgtgcgcgttgacgtacgcggtcgag

SEQ ID NO: 38900 - DNA, 265 bp, Mus musculus
  source 1..265: mol_type = other DNA
catagcattcatatatatatccaggcagagcactggctgtaaataaatcttaaaatcaattaagctccacttaatgttcaatatttgcatccacaggctgaggctggaggatcccaaaccgtttttttttttcaaaatatgtattagtgccctgcgctaagtgcagactgaacagatcaggttttggatcctcacgaaaaccgagacgcaccgcgagaactcgccgggaccttcagacgaagagctccgaaggttcccgagtcaa

SEQ ID NO: 38901 - DNA, 295 bp, Mus musculus
  source 1..295: mol_type = other DNA
atgaagaggtgctcctcagattctctattgcagattcagaagatccccagacgttgatggatgacttttccttcatccatggatccgcagtccgccaggagaaccgcccccgtgggagaggtggggctgggccccgggccacttcacgaagctgggaccctgtccctccaggtggggtgggggaggcgcctctccaagctccaagccggcgcgagacacaggcgagggctggcagcggccacatctgcactggggccggtgcgcatctggcccccacccccatcagcgcgcgcgc

SEQ ID NO: 38902 - DNA, 245 bp, Mus musculus
  source 1..245: mol_type = other DNA
gtatatatatatggtgagaactttcattgaactcaaggcctcagcttctagaacgcggtagagtcagaattatgcctgttaactaaatcatcggtttatgatgattactggaactaaacatggcgatactcgtgcttcagccttcctagagctaggttacagaaagcatcacctccggtcgccccggatggagtggatggtgccatgaactcttcagaccaatcgaattaacaggatgggcgcgg

SEQ ID NO: 38903 - DNA, 275 bp, Mus musculus
  source 1..275: mol_type = other DNA
tcctgtctctgagagagctccctccagaggggtgaaattgaggcccaaatgactcctgggaacaggaagcctggcctctgtagaatccatggaatcctgagattcatcaatggcatgcctgcttccacatcaggtctgcagaggtcagaagacagggttctagagatttctacagaaatcaggtccctgcaagccagtcttttagtggggttcagctcagcagaggccgcctctcaagcgcccctcccccttacagggcgcagccgaggcgcgag

SEQ ID NO: 38904 - DNA, 250 bp, Mus musculus
  source 1..250: mol_type = other DNA
ttccaggctggccttggactcaaagagatctgcttgcttcctctaagttagcagacatgcatgtgggagaattcgagtccagcctggtctacagagttccaggactttggcaggaaggttgagtgcctcagtttccttcccgcgtgtacaccacgggcctgaggcttggacccccgggattctgcatctggcgaaccccagcagtgggtggggccgggccgggcttggcgcgttgcgtcatgacgcacga

SEQ ID NO: 38905 - DNA, 383 bp, Mus musculus
  source 1..383: mol_type = other DNA
gtagcgccccagctactgatctgctagaaaatagcagcgttgcaggctggccccgtcagcacctggcccggtctctgcccctgtgggggtgcccgtagctcccccgtcccagatggtacaagtggtccccgcagtggctggaccaggggtcatggctcctcagctgggctggggtcagccccagagtcaggggggcaataaagacccagaatctctgcataggggtggggtccagctcccccatcctttaaactgttaaggcttttactgtgctgggagtcacccttacctcacctgaaaggtaggtagaggaatattattaaaccccctcagctgatggggatgcttgatgctacccctcatcccttcccttgctcaggtcg

SEQ ID NO: 38906 - DNA, 349 bp, Mus musculus
  source 1..349: mol_type = other DNA
tcctcagctgggctggggtcagccccagagtcaggggggcaataaagacccagaatctctgcataggggtggggtccagctcccccatcctttaaactgttaaggcttttactgtgctgggagtcacccttacctcacctgaaaggtaggtagaggaatattattaaaccccctcagctgatggggatgcttgatgctacccctcatcccttcccttgctcaggtcgcgtgctaatcctcccaggcaggccgggtaagaaacccgcccctgccccatagtgggggaagcttggcaacagttgctaaggtgccggtcttgcctccagtcgggagcgtggacgtcacttcc

SEQ ID NO: 38907 - DNA, 175 bp, Mus musculus
  source 1..175: mol_type = other DNA
tggggccaggagcacagtgtctccaagcccatctggttttttacactgtttgttaataaaccctctctccgaagaagttgatcacagcggcagccagtttcccatccagatttaccaaagaggcagaagggtgtgccctcagccctgtgagcctggctggccgcctccctccagt

SEQ ID NO: 38908 - DNA, 114 bp, Mus musculus
  source 1..114: mol_type = other DNA
tctctgtctctgagctgtcacacacacctctggctatcccaaaagggtgcctcaggctgcttccataagggccagctgataccaggcaactctgagatggagcgcagggtcctc

SEQ ID NO: 38909 - DNA, 366 bp, Mus musculus
  source 1..366: mol_type = other DNA
tgaagggtccaagggaccttggcaaacctttgtgattgtttttgtaaaactaaaaatatctacaaaataaaaagtgtattttggacaatgcagtctgaggtcatttctcatgacatcattttagaatcaacaggatttgagggaagaggccaggggctgcacccctagatctccttattcctgagtttgaggaaatagaatccagaggatggtacctagaccctctctagtctgaaataggagggatgcattctagattcttccatctgaggaatgaagactcctgaacccttgggtccaagggatggtgtggtccagccacagccaggtcgctctgcccccaatggggggcagaaggggcggggc

SEQ ID NO: 38910 - DNA, 149 bp, Mus musculus
  source 1..149: mol_type = other DNA
taaagaaaagctgaggccagcctggtctacacaggactgccaggtctcagtgaagatttaacttagaaaagtcaagttaactaaactgctcagtttcccatttcattggtaaaaaggttttgtttctgaaactacagaacccaagcaac

SEQ ID NO: 38911 - DNA, 294 bp, Mus musculus
  source 1..294: mol_type = other DNA
gtttggcatgaagttaaccctaaatgtggcccatgtagcaggctgaaacattaaacaagttgaatggcattcactcccattgaaagtcgatcatagaggtgcactccgcagccagcacagtgcctggcaccggcagggcttgataagctggatccagattcccaggcttgcagccgggtccaaaggacaggccttcagccccttcccctcccgggatccaggagccgcagctccctccctccgaccaagcaccgggtttccggggggaaggcttaggctgtaacaccgagccca

SEQ ID NO: 38912 - DNA, 373 bp, Mus musculus
  source 1..373: mol_type = other DNA
tgccgggtgcgcgcttatgcgcgcgcgccgggaccacctgcctgggctcgcgtgtgtacgcgcgcgcgcgccgggggcgacgggccgaagcgtgggggggcccagcccctaggcggcggcggggcgggggtgtgggaggtgcgtgagctggaccccgcccctcggcacggaagccgggggcccctccctcccttccctgctgccagcgcccgcggggaacaaagaggatgccctgggtcccaaggccccgacacgctagcaacaaatgcgcctgcgtatcaggcgccttcgtgttaagtgcccctaattaatatggcgcccatcagcgaaatgctgcacgctgagagtagcctagcctagcttctttaacctc

SEQ ID NO: 38913 - DNA, 362 bp, Mus musculus
  source 1..362: mol_type = other DNA
gcccaggaactaggcaagaccaccttgcttttgcgttgcggaggtcctggagaccaggcaggcctccggggggccgggaaagtctggaggttaaagaagctaggctaggctactctcagcgtgcagcatttcgctgatgggcgccatattaattaggggcacttaacacgaaggcgcctgatacgcaggcgcatttgttgctagcgtgtcggggccttgggacccagggcatcctctttgttccccgcgggcgctggcagcagggaagggagggaggggcccccggcttccgtgccgaggggcggggtccagctcacgcacctcccacacccccgccccgccgccgcctaggggctgggccc

SEQ ID NO: 38914 - DNA, 553 bp, Mus musculus
  source 1..553: mol_type = other DNA
caaagctgtggttctcatctaagagtgcatcagaagtgtttcaattcaaatggattctatattcagtaagtctgggttaagagttaaagagcattgagctaattgatgccaatggttgctaacaactaactttaaaggaatgctttcaaggattaaagagtcatcactataatcccagaattcctgaaggctctggtagtattgctgcaaaagccattatagcctatacaagagttcaaggccaccctgaagcccggcgtggtggcgcacgcctttaatcccagcacttggtatccaatggcctgagttcgagaccagtctggtctacaaagtgagttccaggacagccagggctatacagagaaaccaccctgaccacagtgtgcaacaggctgtacaaagcttttttgcctataacgggacgttcagagcagcctaggaagcgaggctttggcttgagacccgagtctagggtgcgtcctaaccggaagcctgggcgggcgcaatgggcgcatgcgcactaggccccgttcgcccaccggaagcagccttg

SEQ ID NO: 38915 - DNA, 533 bp, Mus musculus
  source 1..533: mol_type = other DNA
tgagctaattgatgccaatggttgctaacaactaactttaaaggaatgctttcaaggattaaagagtcatcactataatcccagaattcctgaaggctctggtagtattgctgcaaaagccattatagcctatacaagagttcaaggccaccctgaagcccggcgtggtggcgcacgcctttaatcccagcacttggtatccaatggcctgagttcgagaccagtctggtctacaaagtgagttccaggacagccagggctatacagagaaaccaccctgaccacagtgtgcaacaggctgtacaaagcttttttgcctataacgggacgttcagagcagcctaggaagcgaggctttggcttgagacccgagtctagggtgcgtcctaaccggaagcctgggcgggcgcaatgggcgcatgcgcactaggccccgttcgcccaccggaagcagccttgctccgccaccatcctccacgccggcgcttgggggaacgggcgcgacttccgcttccgggcaggaggcgcggggc

SEQ ID NO: 38916 - DNA, 216 bp, Mus musculus
  source 1..216: mol_type = other DNA
ggccagcctggtctacagagtgagttccaggacagcctcctgacttatcaagtcacaaagtcaggccctagagtgagtttaactctcaaaagagaaatacatttcaaaaatgagtctcattcttacgttagaggcaccttccagctgcaagttcagtcagtgccccgcgcttgcgcagcgccgccagcccggccccgcccttcgcggagcaatctt

SEQ ID NO: 38917 - DNA, 204 bp, Mus musculus
  source 1..204: mol_type = other DNA
ccagctaccataggcagtgggtgctggtgacttcagcagcagaatcacagctgctctcggccggcctccaactcaatatattggagaagatagctctgcggggaaatagtacatttgagcatatatacaacagagatcgggcttctggacctctgtctgtttacatggaaactgtccttttgcagactccagcctcggaaccta

SEQ ID NO: 38918 - DNA, 253 bp, Mus musculus
  source 1..253: mol_type = other DNA
ctttatacagttcacctggctttatacccctttgtaaaaatgaactgcttcttagggcttcagaaccccaaagaggatgcttgtatgtgccctatgcagatagcctaaaggctgtgcatctacaccacaaccatcctctcaaaggcttttcacaggtggcccagtgtgggctattcctgacccacactttgcggtagggatcattaaaggagactcaaatttcacttcaattttccttggatgagaatttccc

SEQ ID NO: 38919 - DNA, 334 bp, Mus musculus
  source 1..334: mol_type = other DNA
caagctgagctcgcagcggaccctttgtcgcactggctgctactgtttttcgggtctttaagccgaaaggagccgaagcaagagcggaaagaccgaacttccctcctgggcgtgagaccttcccgaagcagtggcggagtgaccctgtggcgcctccggaaagagccgaaccttcggaaagagccgaaggcccgtctagtttccgaaaagttaccgaaactcgggcagccggcataatcctcgcttcgggtgattttgacggcgaccgccgccttccgactgctccgtccgagaacagccgacaggcttcggagccgagctcggggccggcggg

SEQ ID NO: 38920 - DNA, 348 bp, Mus musculus
  source 1..348: mol_type = other DNA
gggagggtgggggcagggctggctggggactttccccccacctgtcccctcctcctttcccccctcttgaagaagatgggcagaggagtgacagccgaatgacagccggcagcaactggaagtactgtgtgcacagcagggcgggtaggacctccacagcccccatggtaggaacatagcgtgtttatattttatggccaaactattttatatttgctaatacgaatttgctcattaaacattaggcctgagggtcccgcgagggtagccacagtggaggcttcaaggcttggacctttacgcgtctccactgctgcgtagatgcggaagtgacgcaagtcccgtgcg

SEQ ID NO: 38921 - DNA, 479 bp, Mus musculus
  source 1..479: mol_type = other DNA
atcgacacctgtaaatgtattcattctttaatttatgtaaggttttgttgtactcaattctttaagaaatgacaaattttggttttctactgttcgtgtaaagaaattaaagtgcttcagtaactgaaaaaaaaagatatcaagcttggctttctgatccattccttcacacacatatatatatatatatatatatatatatatatatatatatatatacttttttttttttttttttttttgtatagccctggctgtcctggaactcactttgtagaccaggctggcttcgaactcagaaatccgtttcctttgtctctaaaaacaaaggcaaaaggagttttgtcagaaaagttcagatctaacagatctgttcaggatcagttcactgagccaagctgccttgtccttcgggtgggcaccgcagcggcgggcggtgcccagcttcccttccccctcccggccgctgcctttagagg

SEQ ID NO: 38922 - DNA, 367 bp, Mus musculus
  source 1..367: mol_type = other DNA
aagagcagtcgcccaacaaattattaataataacttatagtaaattagagcagcattaactatacatgtaaatgtcaattaatactagtgagttctttatttctgggatttaccacttaattgtttattacgtttatgaatacatgtataaattggaggacaacttgcaggagtaagtcttctccttccaccattcgggtcttcaaggcttgatgtcaagtttttttcaaatattgccaatttttgacagtgggcgttcaaggccagcctggactttataagggatccatctcagcttcccatccatctcttcagggagatgctggagggattcagatgccgtatccggagtgcatccggaatcctt

SEQ ID NO: 38923 - DNA, 193 bp, Mus musculus
  source 1..193: mol_type = other DNA
tacatgtggctcacaaccgtctgtaatacaggtctgggtactgcgagcacatggtgcaccgactcttttctgaactgaggcttcagtgtccgtacccacctcctctataggcgcttaaaggtcctggaggcgggtcacccgtccgcgtttgccagaagtcagccggcggggtctcgggacgcacgagcgtaca

SEQ ID NO: 38924 - DNA, 431 bp, Mus musculus
  source 1..431: mol_type = other DNA
tgctaaggagatgatttgtttaaaaagtccatcctgtcagcagcacctgacgcctgcttttgtaaagactttcaagtttcaaattgggtcacttagcaaaacaggccgatttcaagatgaggtcgtcccaaaatgcattttggggaaaaactccagatctcgtgaaccgaatttccccggggtgggagcgtcgccgcgggcagctcaccgcgcaggcgcgagcgacgaggctgggttgggggccgccccgacacccggaagtgtgcgccacgggtcgagcccagccttctgtccggggagggggcggggcccgagcccctcggagcgaggcgccgacctgggtcctagataattccggaagtagcgtcccgaggcgcctttccgtaccatagagccggagggggtgggtcctggagctcctctgcctagag

SEQ ID NO: 38925 - DNA, 338 bp, Mus musculus
  source 1..338: mol_type = other DNA
ttcctatatagctataaatgactttaaaggtttatttgtttattttatgtaagatccacaatgtggagcagccagtgttcttaacctgacgcagacaaaaacatttttttgtttttcttaagctttatttatttattaattatatgcaaatatactgtagctatccttcactttgtagaccaggctggcctctgaaagtgctgggagtgtgtgtgccaccaccacccagctaattttttaaaagttttgagatggcatctcattgaatttgctcagctggccttatactcagaagcccggcaagtaatttaatactgggcagactagtaaccggaaga

SEQ ID NO: 38926 - DNA, 120 bp, Mus musculus
  source 1..120: mol_type = other DNA
aggaccgagcgaccaatggcagccaggtcagcaaatggccgtgggcagcctgaccatggctgatgtccatacatcggtgccactctctcagtcagtaagaggctctgataatgagaggcc

SEQ ID NO: 38927 - DNA, 222 bp, Mus musculus
  source 1..222: mol_type = other DNA
caccacttgttgcgcgcactcaactggccaggaagaacgacgctgcaacaggatccttctgcacaattggattcacctgtatcctgccctggcgcctttgggactgccgccacagatttaaaaaactttaaaaatacccaaaatatcattagatgttatgttgcatttgagccactggaatacaatcaccagctggctgcctccaggtcgctggagggcatc

SEQ ID NO: 38928 - DNA, 362 bp, Mus musculus
  source 1..362: mol_type = other DNA
gcagctgacagcatttcacttgtgcacacaccaatgactgtgttcttgctaagggatgccataacagggtcggttgctcaagaggtttagggcaggcctttgagttcctagaaaatttcaggtttgacagaagaaagtcctctcctctgaaggcgacaacgaggatggaaacacccttttgggcgtggatatccttagtctcttgccaaagcctgaggttggcggtactgcttggccgaaccccttagaaaagcgcttagcagggggcgtggctccgcgctccgggggaagccctgggggcggggccgcactggcctgcgtccttctggggaccggggagaggccctgaagggatccctggg

SEQ ID NO: 38929 - DNA, 338 bp, Mus musculus
  source 1..338: mol_type = other DNA
gcccctgctcatatgtagatgagcggcttggtctttgttgtaaagagaataaatttaattaaaaaaaaagaatattatccaaaatactaggcaggagctctatcattgggttacagccctaccatttcagagtctgacatacagttttcatccgctgctctggacagggcaccggccagctagcactgcgcatgcgtgctcgagcacagtcctcgtctaagagaccgaggagagcaagcagctcctgcgcagcctgagtgagttctggttctgacccccgaaagccgcgccctaaaaggcgttcccagcatgccttacgccgctccagtcaagcgcag

SEQ ID NO: 38930 - DNA, 120 bp, Mus musculus
  source 1..120: mol_type = other DNA
tctgagaagccagccccgccctcacctcgggctgcggggagaacctcccaggcgtgaggtccggaggcggagggactctgctgagaacagctggcagaggctgcgcttgcgcacacatag

SEQ ID NO: 38931 - DNA, 163 bp, Mus musculus
  source 1..163: mol_type = other DNA
gatacagtatatatacatcagatcaggttgtcccgcggttctcccacagggtcttgtaaaaaccagctgggctctaaaggatttctccgctggggactacacttcccagggggccttgtgctcaagcaaagtccacttccggtgcgttccggaggaactgcct

SEQ ID NO: 38932 - DNA, 290 bp, Mus musculus
  source 1..290: mol_type = other DNA
tcatatgtagatgtgtgtatgttcatgcatctgagtacaacttaattaaaaaaaattttaatgtataccactaacagctattgaataagaatcacagtcagtctgaaacaactctgcatgtatgattttcttatttgactcggactccaggctgacatctcctctcaccctagagaagcatgtggggtgcttgcaaaaatcttggctatagcagctgtctgcgcatcctccctgcagggaggaggaggaagagagaaggccgcctcctttccccccccccccagcttccg

SEQ ID NO: 38933 - DNA, 330 bp, Mus musculus
  source 1..330: mol_type = other DNA
tcatgacccatggttgactaggaggtaaatttcatctagtatttgttcaattacaactacagtcagaaagtataaatagtaaggccctcagaatgtgccatgtgatgtcagagagcatcttacacctggagactgagaacagtctaacagtgtcccctgaacagtgcaaagactctgaggccgtgttcatctgctggagggtcagcacatgaggtcactccctttatcccacgggttaactgagatggttttaaagactagactttcctttgactataggagattgaacctatgggaagcggagccgagcacgcgagctggagttcgtgc

SEQ ID NO: 38934 - DNA, 329 bp, Mus musculus
  source 1..329: mol_type = other DNA
agctgagaaatactccctgtactggctagttttgtgtcaacttgacacagctggagttatcacatagttgaggaaatgcctccatgctttttctgaattagtgatcaagagaaagagtctgacttcttcagtgatgaacagcaatgtggaaatgtaaggtgaataaacctttgtgcagcctgaggttgaggtctacatagtgaattagaaattttactaccgaaggaaatttttccaccaggagacattacatttcccacaggtcccagcgcgctgtgccgggtgctgggcgctccatagcctggagcctcaggctggacggcgtgaga

SEQ ID NO: 38935 - DNA, 288 bp, Mus musculus
  source 1..288: mol_type = other DNA
aaattttttttttcaaattgtactttgcccacatttgtatattttttaacaaagaaataaatgagagaaaaaccacttaccatttcgtttcttctcagttggcggcagactaaggaaattagcttagtttgcaggcagaaaagtcctttcttggggggctgcatcctgcttgggggcccctaacactgactccgttgacgtcaactccgtgccttggcgccaagctgttgccttgacaacagcagtctgaaggaagctccgcctctgcagaggaccctgacaaggagg

SEQ ID NO: 38936 - DNA, 261 bp, Mus musculus
  source 1..261: mol_type = other DNA
tgctcctcttggaagtgaccaccgggtgggacagacctgcaggtggggacacattctgcaggacagacagttgcccaccttcagataaatgaaaaatatgtacagtacttgtgcacacctgcctgtcccagaggcaggaacaatgtatgtcatgccggatctggcaaatcgacttttgtcatctacttgtggatggacatttgtaaagattttaattccctattctaataaacataaatttcatcgtgtttgacagaggag

SEQ ID NO: 38937 - DNA, 306 bp, Mus musculus
  source 1..306: mol_type = other DNA
ttttagtaaaaggggaaatctctgtagagaaagttagccttgaactccaagatccatttcttctgcggacactgtcatgattacagataaatgttcctaaatgttcctttaattttctcttagcacaatagaagcattaatgaatctttgaatcctcatttcacacaaggcaaatgtctcaaatgcaaaattcaactttatcaaataaaacaaggttttgcctgcagttctgtaatttaagagttccagcaagcacctaaggtagaaagcagaaatttgctcctgcatgaactacattgccaatga

SEQ ID NO: 38938 - DNA, 363 bp, Mus musculus
  source 1..363: mol_type = other DNA
accagcccaagaaataattcactttttttgttgttgttggctgtcctggaactcactttgtagaccaggctggcctccatgcccggcgcatattcttctagatcttcaaaagtaaaatcgggcaattgctattttgttttttaaaaaccaacaacaatgatttatcttgagttaagaatcctcatggcacactgtggcctaacagggctcctaccagacctgttttcaaaattcggactgttttaacatcatctttcttctgccaaaggaactttgctaatgcataccgactttatccttgatgatcagggagttgaaacactggtgcatctgtaggcaaggcagtgtctaaatccttacata

SEQ ID NO: 38939 - DNA, 383 bp, Mus musculus
  source 1..383: mol_type = other DNA
tgtgcccagagtgatggcccatgcctttaagccttgtcttaaaacaaagaaacaaataatacattaataagttattgtattgaaaaactcagtcaggaacacattgttctgcgggggatctccccatttaactcactcattctaaatgcagagtggcttacaaaacctctcaagagaggctcgaaaagtttttcctgtctgtgttttaactttcaaaatttgggctaaattatctctatttaaaacatgctacagtgtgtcgaatatctttccataagtagcaacatatttcttcactaagcatggtcagagatgtgcctttataaatacatatactgcagaaatattctgaaacaaatgcagtttctgcctgggaagggaca

SEQ ID NO: 38940 - DNA, 292 bp, Mus musculus
  source 1..292: mol_type = other DNA
ggctgaatcccgtaatgcatccccaaatttctcttagcatgggaatgcataatagaaaagttattcgtgatgacctcctgtctgatgtgtatgagaagataagttttctttgcaagaagacctgtcaggtatcattcacacaaagactataacctgttgggtcttaaatccaaggtattaacaggacagtggcctgttcctggctggcatgctgtgacaggcgccagcagttctggaattcaggagtgtttcagcaagcccgttgagttgttctggatctgtcagtctgctt

SEQ ID NO: 38941 - DNA, 571 bp, Mus musculus
  source 1..571: mol_type = other DNA
gtttatgttttattttacatatccagtaacataaaattaagagtagagtgtccttatgtaagtcgggctaacccaaacatattaatgggaatatactataatgtcttacttcatttcttatactaagaaaataccttatatttggacttaccctttataaattgattacaatcttaaaattgaaaccactttaatgtatatataggttgacatattctgggttcacacatatgcagataataaaagaaaaatgaatgtgcacgtagattcttttaaaaagtatcaaacggatgtgcctgcttcatcccggccagggtgaggggaagccggccaggctggtggatccgaccccgcgaggcggtcgcgtactttgtgagatacaggaagtgcctccgcccaggcgctcatgggagctgtagtgcgtctagggcccagcgccgatctccggggccacccggtggcgaaaaacgcgcaagtgcacccccggttctctgcctcgtggggacggatctgggacccgcggtgtggccgtggcggcggcgtccccgggcagacgggggttcaggtccgc

SEQ ID NO: 38942 - DNA, 427 bp, Mus musculus
  source 1..427: mol_type = other DNA
gcctcgtgcgcctcgtagccggaggccgaggcgggcagcgaagtggccgagggcagggcggctgcagcgggcggcctgtgagtgattttgtcacagtcaaagcccctgcctcgtgacagctttcccagtggctgtccgggtggacggccacgccgcaagacgcggccctgcatgcccggatgctcttccgggagccgccagcgggccagaggctgcgggtggagcccgggtcgggggtccgcggcccccgcagcgtcccctgaaaccggaagcggggccggcctgtggctgctgccgtgcctcccgcccacagctgccgctcctcccgctgtgtccgccgtggcgagcatcagacggggcgtggcctggagacggggcgtggcctggagacggggcgtggcctggcgcaggtccgggagtgagccga

SEQ ID NO: 38943 - DNA, 318 bp, Mus musculus
  source 1..318: mol_type = other DNA
tatccacacggaccgtctggacccccggcccctcccgtctgcagcgcggccgccatcgagcctcccggtggtggccgcattctcctcggtcaccaccgggtggcggcagagagcacgtccgatccggaagtcctccacacacattttgtttaaatggtctaaactgcctgtttggtgtctgtgcctaggcctcgtgcgcctcgtagccggaggccgaggcgggcagcgaagtggccgagggcagggcggctgcagcgggcggcctgtgagtgattttgtcacagtcaaagcccctgcctcgtgacagctttcccagtg

SEQ ID NO: 38944 - DNA, 530 bp, Mus musculus
  source 1..530: mol_type = other DNA
tacattttattttattgaatgccgttatttttaaatctattttaaaatacattcggcattgaagtgccggaccctggcacgatcccgccaaaccgatttagatggcagcaaacgcctttatgccgccggcacgatggcagaaggaacaacagaatcccctccccctcctagcgagaggctgaggtctctctgtccggccccggcccagcttctgcgggtgagcgcgccgagactcggctcactcccggacctgcgccaggccacgccccgtctccaggccacgccccgtctccaggccacgccccgtctgatgctcgccacggcggacacagcgggaggagcggcagctgtgggcgggaggcacggcagcagccacaggccggccccgcttccggtttcaggggacgctgcgggggccgcggacccccgacccgggctccacccgcagcctctggcccgctggcggctcccggaagagcatccgggcatgcagggccgcgtcttgcggcgtggccgtccacccggacagc

SEQ ID NO: 38945 - DNA, 202 bp, Mus musculus
  source 1..202: mol_type = other DNA
tctggtcctgagataacacaaaacttttcatatgctaggagtttaagatttgcttgtataagcggcgccctcaggagagggcgagttgcagactaggaggccaagtgccctgagctagttcaagaggctaggcatgggctctccaacacaagccccagaggttgtttgctagcgtacacaggtgatgaagttgcacagcttc

SEQ ID NO: 38946 - DNA, 248 bp, Mus musculus
  source 1..248: mol_type = other DNA
agtgcaagatcattctgaacaagaatgcacattctacagagttcactgaagagaaaccaggaaattttaacaagttttcattgactactatgtgattggaattccttccattcataagtgactaggagatgatcttcttccaaagaagagtcaatcattgcattagagatgcaaaactagagctgagttaggattccttatttcaatcagcaggaaaaaatgtctttccttattttcagtaactgact

SEQ ID NO: 38947 - DNA, 471 bp, Mus musculus
  source 1..471: mol_type = other DNA
atttcagattttagaagttgtaaatcactgatttttatgttttagactgaagttcagcacaaactcagtgttagaagatcatcaacatgtgaattttcacaattgaacctatcaattagcatgattggacaaatctaatggcaaggatgtgtcaatccatactgtagggctattatgtctaggcataaaagacataagttcccttcagcctctatctttacggattctacagagttcactgaaggaaaccaggaaattttaacgagtttccattctacagaggtcatagaatataaatgccaatcttggaattcctcttaagtgtggtactatttccattcaatgactaggagatgatcttcttccaaagaagagtcaatcattgcattagagatgcaaaactagagctgagttaggattccttacgtgattcaatcagcaggaaaagatgtctttcttgatagaatcact

SEQ ID NO: 38948 - DNA, 556 bp, Mus musculus
  source 1..556: mol_type = other DNA
aaatttagttatcaatgattttgaatgaaagcgtttgaacagcaataaaaatgcatattatagccaagccaacagtttttgcacacatatgtgtatgtgtacaagtacgggtacaggcatgggtataggtatgtatgtatgatgtacacacacacacacacacacacacacacacacagagagagagagagagaggaatatctgaaataccataaagtctcatccatcatggatgggatgacctcttgagaactgcatcatggagtccctgagtgtatacataaatatacagatacacaagcacacatatagtgcctaaactactatacggaatatgttcatttgcctcttgatgcacaaagaacttcatggtgtctgaaataagaatactgaaacagttttatttaagtaaagcatgcctgttttcttttaaactactacatttcccggctcggcgaggggcagttcttatggcagagcgcaaagagctgctctgtgttacagaggccctgctgaggcccagcgactccgcccccgagccaggcctagggaagag

SEQ ID NO: 38949 - DNA, 601 bp, Mus musculus
  source 1..601: mol_type = other DNA
tactacctaaagaaaagaaattttagtaatgatacatgtatttgctcaagaaatactagaaactgcaagttactatgccttttgcaactgacgtttcttaagaccaagagacaaaaggaaaggggaaaagttagttcaaagctatcactttacattttcagggactgataataaagaacctttattgtcttttaaagatggtaaattttatgaaattcaatcacttaatgccagtttcaaaaaattcagtatgtcagtatataagacttgatggctctgttcaagtttgaactctcatgtcatatttgatctaaaggaaacaaaaatgaagataaagattatggtttgtatatttttgtcattgaaatttaatctccaattatgttcttcgtctaaaaataaaataaaggtataataacaaccacgttctcaattttgtcaaggttgagggaagtgcttcctagagatcactcaccctcatcaagctccgactttaaagtagctaccttgcttgagctgcaattttactgagactcaaactgatgctgtcatcacctggggagtgatgcttccggtagcagcgagaagcgcgtcttctggg

SEQ ID NO: 38950 - DNA, 425 bp, Mus musculus
  source 1..425: mol_type = other DNA
ttctagctgcctggaagtcagtattctgctagcagccttcagagcctgcatcatgtctgcctagatgtgtttgttcacagcagttaaaaccctaagacataagttatattttagtctaaaaggtattaagcttaaagaagaattatgataaaggtatttgtatatttatgtatgttttatatgtaatatatttctgtaagtataagaaattatgaaagaataaaaggtttagaatctagactttaaaacaacaacaattgatgtttgaagaaaaggtttcatgtatgaagttcctaacttgctatttagctaagtgggattacacgtgtgatgccacaggtgccttctgtcaccctgtctgcctcacagaaggacacctggtttgtttcagtcaccttggctgcccaagggtaagctgacctcac

SEQ ID NO: 38951 - DNA, 498 bp, Mus musculus
  source 1..498: mol_type = other DNA
ggaagtgcagccagtgctcttaactgctgagccatctcttcagtactgttttcttaaaaacaaaagttaaaacaacaaaacaaaacacaaaacattttatttttttgtgttcaaaatggagaaatttagttgtaacttttttgttcagaaacatatattggtgaagagacagcttacaactgtctgttattccagccctcgagaatctgacacccagcatgtgatgcagacatactaatgattgtaagaaaagaggtgtatttggctgaattttagtatttttcacctataatcgtgtttttgttaaattatgcagtaaataaaaaataaggctctgaggtaggggactctcatactctgaggaaaatgaatatccatgagtcatcagtaacttagttataattctataaataaaggtgaggagtgctcctgcctctccgcagctgcaggtactggtgcaagactctcagatcagagtgcacacgcgtgcgcgtcgca

SEQ ID NO: 38952 - DNA, 233 bp, Mus musculus
  source 1..233: mol_type = other DNA
tctctgaaaagttctcagaattccaccctggaatcaaacaaaatattattttataatatttgtttgttcttccaagaaaccaaaattccaggatggggaaaactagagaggacatttagtgtagcctaccctccctttaagggtaccggtgaaacttcagtaagatctacactagtagagtctgtccacagaggtactggtgctcagcgtcttagtatccttcttcaaaagct

SEQ ID NO: 38953 - DNA, 275 bp, Mus musculus
  source 1..275: mol_type = other DNA
tctctgaaaagttctcagaattccaccctggaatcaaacaaaatattattttataatatttgtttgttcttccaagaaaccaaaattccaggatggggaaaactagagaggacatttagtgtagcctaccctccctttaagggtaccggtgaaacttcagtaagatctacactagtagagtctgtccacagaggtactggtgctcagcgtcttagtatccttcttcaaaagctaaacgccgcctaactgctgccgctcgacgtccgcgggggcgt

SEQ ID NO: 38954 - DNA, 311 bp, Mus musculus
  source 1..311: mol_type = other DNA
actgcagctctgtattagagcactttcttgcataaagacctaggttcaatatccagtactgtagtggaggaagggcagagcctgctgttctacacctgaaaacctgggcaggaatcagaaatctgcctgccgggcagccgggtgtggtggtgcacgcctttaatcccagcactcagggcaggcagatttctgagttcgaggccagtctggtctaagacagggtgcagatgcatatatgccctgaactcagccgtcagggcgggaggattattttccagggccaggccttccccgattggtcaacgttgggc

SEQ ID NO: 38955 - DNA, 375 bp, Mus musculus
  source 1..375: mol_type = other DNA
cttgtctcacagtctcgtgtagttagtgttagttagctaagactggctacattcaaaaaagtacttgctgccaaaactgagtttgacctgcagaactcacttggattgtggtacgtaccccacacacacacaccaaataaatgtgattttaatatatatatatgtgtgtgtgtgtatacatatatacatatacatatacatatacatatacatatacatatacatatacatatacatatacatatacatatacatatacatatacatatacatatacatatacatataacctatgtgggtattttgcctcgggaaggatggacctcctcacttgcaccgtgtttgggacttgtggtccctgggcacgaaggcgca

SEQ ID NO: 38956 - DNA, 289 bp, Mus musculus
  source 1..289: mol_type = other DNA
tttcatcccagcagttgggaggagcagagcccacccctgggggtgaacctgctggcaaggtctcttattagtaccaaatcactgggatctcagataagtaagtcacctaggagatccccgggctgatgtatccctccccggggaggttcacgaatggacccgccgagcatggcttgccggatcggtggtaaccacaggacccgactccaatccaccgtccatggttcctgggctacttaaccaaagtttctgcgcatgtgcgccgactcagaagcctagccataaaagc

SEQ ID NO: 38957 - DNA, 356 bp, Mus musculus
  source 1..356: mol_type = other DNA
atgtgcaagggtctgaaataagagctcgcaacattgaccttcactctttccaagactgagataggggaatagaaagagaggccgaaacccaactctgtctctgcagctggccacacagagggaaactgcctgaagaaaatcagagagcctccgaggctagtttccacttctgaatcttcaggttttggtcctgggccgcttgcccagagcggggacctacccaggagtctctgttagtgctcaggcctggctgaaaccggacggtggtggtaaacttcactttccagctaaggctgggccgccatggataccaggaaggcaccctcctgtcccgtgctgtgcattgggccaacgcg

SEQ ID NO: 38958 - DNA, 314 bp, Mus musculus
  source 1..314: mol_type = other DNA
ttccaagagagctttctgggaacccccttaggcccccttacagagaatctgtaaaagacaaattctaccgacagaactgctcaggagttttggatgtagagaaccgctgctctctacagtagctgccaaaaaataaatataagtcatcttgtctttttcagtaatgttatctgaagactattagtgacagtctggactcaagaggccaaggagcctccacctaggccttctccgaggcagggggaccctttaactcagagaacagcaagaggccctaagttgtgcgctagctgttacctaggagacacaaggag

SEQ ID NO: 38959 - DNA, 230 bp, Mus musculus
  source 1..230: mol_type = other DNA
cattcaccagtaaacaaaaagaaaattgtattttcttaaagatttattatgtaagtacagtacactgtagctgtctccagatacggttgctggggacttgtactcagctcggaagtgcaggaactattatcttcaagtgcccctatggagaccagtactaaaggctttgaagagtggtccatggtcttgttctattagcaaggtcaggtgtactccttcagggaggagca

SEQ ID NO: 38960 - DNA, 350 bp, Mus musculus
  source 1..350: mol_type = other DNA
gttacaaaacttttaataaaggactttcttgggaccttaccaaccaggatggcagttaccttaaacgttacttgacctttattcaaaatgcaagttttactgaaaatggcttgtttgatgattctaagtatttactgagttgtcaactgtctacctgacaggcagcctgtttctgagttctaggccagcctggtctacagagtgagttccaggacagccagggcaaaacaaaaaccccacaggctgtgtatcttatctggctttgagtcacctcatatcccatacctaacaggagatggccggctgggggctggaactgtagaattccgacagagtccatgggtcacatt

SEQ ID NO: 38961 - DNA, 171 bp, Mus musculus
  source 1..171: mol_type = other DNA
gccaacccaccacttgagaggtttgccatgactcaagagaaacttctttaataatgtactcgcataaacatccagcgccctctccagacccgctgagagtactgagggcgtggcccgacctggagacgacggactcctgttgtggcgcggaccagaccggaagttctgctc

SEQ ID NO: 38962 - DNA, 417 bp, Mus musculus
  source 1..417: mol_type = other DNA
agatcataccctcctttcttgaggtaggaagtgaaaggctggggcggggcaaagccttgggcccccagcctgattgggagcacacccgggacagtggcgggatactcctcgtctctccgctgccacgtgggtgaacacctggttccgcgcggaaggggtagcctcttgccgttgagagcttgcccagactgacggattgccagtgcactgcaaggctgcagaggcatccactctcagcacggcagtgtttgggaagggggacaggttgccttttcacctcagataagatttatcaatcagatccaactttaattccttagcgttaaatggcagagttttacagtcccgagtttaacaagggaacttcctggcataggccaggctgccgctgcagacgtcgccacgcctgctgaggag

SEQ ID NO: 38963 - DNA, 468 bp, Mus musculus
  source 1..468: mol_type = other DNA
ccagactgacggattgccagtgcactgcaaggctgcagaggcatccactctcagcacggcagtgtttgggaagggggacaggttgccttttcacctcagataagatttatcaatcagatccaactttaattccttagcgttaaatggcagagttttacagtcccgagtttaacaagggaacttcctggcataggccaggctgccgctgcagacgtcgccacgcctgctgaggaggcggggcctaaggttcggctctgcaggacctgcgcgctcaagcacgcgggttgccagcctgggtgcaccgtgcggtgggcatgggagacgtcaagcacgcactctgcgggtgaattcctcaccagcagcattgctactctggatcagggccctggcgcgtgcgtaatctgcgccccgcccccaggctgcggtgcccaacgcgcgtgcgcggcgtcgtcggcgccagatatctgt

SEQ ID NO: 38964 - DNA, 388 bp, Mus musculus
  source 1..388: mol_type = other DNA
ggtcctgcagaacaaccggcggctgtttgaacaagaggtggacccatccctgccagggttaccggcccaggcatcccctgcaaatatttattgggggcccgggtaaggtgtgtggggtagccttggcccctgccttggccttggtgctgtccaactccccactcttgactgtggggtaagtgggcaatgggcctgggtcgctaggcccaagcaacccacccccaagcacggctaatttcagctcctggaccagagcctacaagtcatttccaggcttgcccctttatgccatgtgtgggcctaatttggttcgagccaagcacttgctaaaatgccatttattaagtgcgcgtgcgtcctagcacttcccagcattcccggagagggt

SEQ ID NO: 38965 - DNA, 434 bp, Mus musculus
  source 1..434: mol_type = other DNA
gcacaatagaaatctattttaaggaacaagactagggtatccctgagcgcctgggctcaagccaacttgatgcctcaagaaatttaaactagtttacatcaatccgaatctgggagctgatcctcagagccagtctacgctggggtgcgcgtcccaggaagtatgccgaagcggcggggcgcccgaggccgttgccgacctccgcatcgaagccgcgcctgccgcggaagctgagcctccaccggtaccctgcggtaccctgccgccgcaagcgcggctaccgcctcctccttccacctcaccgcagcctcctagcagagggagcaagtaggcgggagagcggcggacctgtaaaggccggcgtccgcagccgcagcggggcctcaccaggggcggggccgaggatcgccgagtcctcccgagcacctccgcac

SEQ ID NO: 38966 - DNA, 284 bp, Mus musculus
  source 1..284: mol_type = other DNA
aacagagtccgaacctgttctggccatgtttttactctggcttcggctggattcctagatgacagcctgaagtcactgaccatcgagaggcacaatgccactcgagagagccaagcacaatagaaatctattttaaggaacaagactagggtatccctgagcgcctgggctcaagccaacttgatgcctcaagaaatttaaactagtttacatcaatccgaatctgggagctgatcctcagagccagtctacgctggggtgcgcgtcccaggaagtatgccgaa

SEQ ID NO: 38967 - DNA, 266 bp, Mus musculus
  source 1..266: mol_type = other DNA
agccagtgtcccgttccgctggccgcacccggaaccagcgctcggcactctcgccccaaattcgcgccacacagatttcgcgcgcactttggcgggaggggggcctgcgagtagcgcgtgccgcaactatcgcccggaggctgctgggagttgtagtctctagagcggaggggcgctgtcccgcacagcatgctgggaagcggccccaagcctgggcgggataccgcgcggggcatcccgggagcaagggccgggctgggcttggg

SEQ ID NO: 38968 - DNA, 170 bp, Mus musculus
  source 1..170: mol_type = other DNA
aggcagccagtgtcccgttccgctggccgcacccggaaccagcgctcggcactctcgccccaaattcgcgccacacagatttcgcgcgcactttggcgggaggggggcctgcgagtagcgcgtgccgcaactatcgcccggaggctgctgggagttgtagtctctagagc

SEQ ID NO: 38969 - DNA, 302 bp, Mus musculus
  source 1..302: mol_type = other DNA
tctacatttgagtgtaactcatatctactctcatagctataggtgtatcaaatgtgcagctgttgcccctcaggatcattcgcctacaggggtgtggcccacttgtggcaaattcaactcagaagtgtcaccaatattggtccacccaagcccagcccggcccttgctcccgggatgccccgcgcggtatcccgcccaggcttggggccgcttcccagcatgctgtgcgggacagcgcccctccgctctagagactacaactcccagcagcctccgggcgatagttgcggcacgcgctactc

SEQ ID NO: 38970 - DNA, 405 bp, Mus musculus
  source 1..405: mol_type = other DNA
ggcaacctgaatgaactcactggttcacaaagtttatgtagaataaacatgtatttatgtctccttaggaggtcacataacatctgaaatcaagtggttccttatggatataatgtatactaagcatatcctcaattgttcttgttcaaataaccatagatgcctccttaatgtttcctgagtcttaaggaaggggttgttcaaatacttagcactttggctgattattatttcagtatttttagtcattgtcaaaagcagaactaatttataggtataaaaataagtatttagaaggcagtttagcaaaatacctatttagaaaaacaacagtatataagtttctaatctttcactcactaaaggtaattccattctggggatctcactccagccataaatggg

SEQ ID NO: 38971 - DNA, 179 bp, Mus musculus
  source 1..179: mol_type = other DNA
tacatctacacaatggagtactactcagctattaaaaagaatgaatttatgaaattcctagtgtggacactatgcccatccttgaaaggctactatgccggggcctagctatatatcaaaaatggcctgcccattggacttgcaaactttatatgccccagtaaatgtaaatgagctaa

SEQ ID NO: 38972 - DNA, 532 bp, Mus musculus
  source 1..532: mol_type = other DNA
tattaccttcagtacaaaaaagggataataggtctagtctcagatcaaaatgtcctttagcatgtaacatgaggcaaatctttggagcatgcctcactcattatgtatatgtttatcataatttccataacttcatgaatattcaggatcatatcgaagaatatttttcaacaaagcaggaaaaagatatttcaaggatatagccacaaatatcattctataaataagagatatgggaaaggctctttattatcgtgctatgatggaaaatcataatcaaaaagagcacccatttctctcccaaattgggttccgaatagagttagtggcaatgtttaaaaagaaaataaattttgtcttctgagttatatggaatgagttctgtaactgcacaaagtcaatgatttcaaaagaatagatgggtataacttaactattttatgtcttaaagagaaaaagacagagagaacattttaaagtagatgtttctaatgtgttgaataactctatgaaatttaggacaaagaattca

SEQ ID NO: 38973 - DNA, 514 bp, Mus musculus
  source 1..514: mol_type = other DNA
acaatatgtctctcttagacacaacaggaaaatagacacatgaacttttaacagtatagttacccaaacaaaccagcataatggtactagtaggtatattagaaattctatatatttttaccctataagaagaaatacttcatatcaattgttgctacgagaagatgaaatctcacattgatttttctaatctcaactgtacacctcagtgttgactatacatgtgtgcatatagaaaattagtttctcaaaaagaaattccatggaaaggttctgtatgatctctatcatttttctgcacattcaaaatcattttgaaagctaaattatattactagacattttaaattaacttacatttctatgtcctaacaaactctgcagaatgttatttgtacaactttaaaatttctcaatatagtaacctttgactgtaggtgacaatatttatttctccccatcagtaaatatttcaaaacacataagagaatgttaatgattttttacctgtact

SEQ ID NO: 38974 - DNA, 516 bp, Mus musculus
  source 1..516: mol_type = other DNA
acaatatgtctctcttagacacaacaggaaaatagacacatgaacttttaacagtataatagaaattctatatgattttactgtataagaaattcttcatatcaattgttgctacgatagaagatgaaatctcacattgatttttctaatctcaactgtatacatcaggatgcatacaagctcaaatgcatggattcagtagattgactatatatgtgtgcatataaatagcaaaaaatattaatactatgattttttcaaaagcaaccactttaaaaaacagaaaggttctgtatgatctctgtcatttttctgcatattcaaaatcattctgaaagctaaattatattactagacattttaaattaacttgcatttctatgtcctacagaatgttatttgtacaactttaaaatttctcaatagagtaacctttgactgtaggtgacaatatttatttctccacatcagtaaatatttcacaacacataagagaatgttaatgattttttacct

SEQ ID NO: 38975 - DNA, 492 bp, Mus musculus
  source 1..492: mol_type = other DNA
tatgtctctcttagacacaacaggaaaatagacacatgaactcagtatgaaattctatatgattttaccgtataagaaattcttcatatcaattgttgctaagatatggagactgaagatgaaatctcacattgatttttctaatctcaactgcatacatcaggatgcatacaagctcaaatgcatggattcagtagattgactatacatgtgtgcatataaatagcaaaaaatattgtttgtcaaaaaaattccatggaaaggttctgtatgatctctgtcatttttctgcatattcaaaatcattctgaaagctaaattatattactagacattttaaattaacttgcatttctatgtcctacagaatgttatttgtacaactttaaaatttctcaatagagtaacctttgactgtaggtgacaatatttatttctccacatcagtaaatatttcacaacacataagagaatgttaatgattttttacct

SEQ ID NO: 38976 - DNA, 543 bp, Mus musculus
  source 1..543: mol_type = other DNA
cccttgcaggtgtcaggcgactccgctggcaaggtaccctggggctcgagtggagcagaaggggcttgtgccccacagtctcaggttccgtgcgattgactcaccaggggtcttaggatcccatggggaacccggcgcctccgctggcaaggtaccttggggctcgagtaagggcctgacctggggcacaagtccctcccactccactcgagccccgggctaccttgccagcggactcccacaggatcccccatgggattctaagacccctggctggggcacaagccccttccgctccactcgagccccgggctaccttgctagcgatcccccacgggatcctaagacccctggtgagggggcacgctccactcgagctgatttcgagtcatgaacttggtctcacaaattctgcagaatgttatttgcacaactttaaaattgctcaatagagtaacctttgactgtaggtgacaatatttctttcttcctatcagtaaatatttcacaacaaacaagagaatgttaatgattttttacctg

SEQ ID NO: 38977 - DNA, 522 bp, Mus musculus
  source 1..522: mol_type = other DNA
agaagagggcttttttgtagattatgtcttttttagatacaacaggaaaatagacatattaacttttaacagtgtagttaaaattctatatgattttaccctataagaagaaatacttcatatcagttgttgttaagattcaaatgcatggactaagtaggttgactttacatgtgtgcatatataaatagcatcaaatattgagtttctcaaaagtaatcactattttaaaacaaagaaattccattggaatggttctgtatgatctctgtcatttttctgcatattcaaaatcattctgaaagctaaattgtattactcgacattttaaattaacttgcatttctatgtcctattacatcttacaatttttgcagaatgttatttgtacaactttaaaattgctcaatatagtaacctttgactgtaggttacaatacttctttcttcctatcagtaaatatttcacaacaagcaagataatgttaatgattttttacttgcactttaaatactataagc

SEQ ID NO: 38978 - DNA, 591 bp, Mus musculus
  source 1..591: mol_type = other DNA
aaataaatacctgtttttatacctacagaaaaaatcagttcttatgccttgtcaaaaatacttccttttttaaatttgggtactctggcaaagatccacaattaccaaaatatatttctgttgatagaatatgtctctattaaacaaaactgtgaaaatagaccttaataatatagttacccaaacaaatcagtattttactctataagaaatgcatcatatcaatgactgctaagagatggagaaactcaataggttgaatatagatgtgtgcatatacaaataacaacaaaatgtactatgaaattctcattttaaaaaataattgccatggaaagtttctgtatgatatctctcatttttctgcacatttaaaatcattctgaaagctaaattgtattagaagacattttaaattatcatgcatttctatatccttttaatgctgcagaatgttttttgtacaactttaaattttctcaatacagtaaccgttgactatggattataatatttacttattcctatcagtagctagtttcacaacaaactagagaaagttaatgattttttaacttcactataaatatt

SEQ ID NO: 38979 - DNA, 430 bp, Mus musculus
  source 1..430: mol_type = other DNA
aactcacgactttctcttgatcactaattgagaaaatgtcttacgatatcattggaggcattttctcaagggaggctcctttctctgagataacgtcaagttgacacacaaataatgtaggaagtagttcgcactagaaacctgtaatttaaatttctcttagctccagaaaaaaaaatttataaagaaggaaagaaaattgtaaagtggagaaggcttcctccaggatggatttatacggtataacaaatgccttctttcacaagctgtttttgatcaggctgtttatcacagcatatagaactatggaatccaatatttcaatagtttaaaggtcatattacatttgatcaattctggtttggaaacaacatgacatggcttatctagaatccaggcatctctgaattcaatcctcagaggcatataa

SEQ ID NO: 38980 - DNA, 532 bp, Mus musculus
  source 1..532: mol_type = other DNA
aacctccacataatgcaagttgaagacgtgcatgcttgcatatatgtacacatgcaataatataatcagttgtgcatgtatattatacatgttaatatacaaacagacacacttttaaaatgatgctcccagtagaagtattttgactgctacagaagttattaatatacctatggtttatgagtagtagagatagatcaatagttaaaagtactggttattctaccataggtactgagatcaattttcagccctcagaatttagctctcaaactagtcacatgccattgaaagcttacttttgcagaaaaaccatatgaataaaatacataaataattaaatagtaatatgattataacttaggtaaactactgggcctgtaggcctacaaattccacgttgacatcagagaacaacttgatatatcagttaccttttaaaatcatgtgatttatattgctcaaattcacatcaaagtatctcttacaaattgtaatttggggatcaaaatttgatcaaacagagctggat

SEQ ID NO: 38981 - DNA, 521 bp, Mus musculus
  source 1..521: mol_type = other DNA
tgggagctcccagatactgacaagaggtggtccatggtccctggcacatatataacagaggacggccaggtctgggttcagtgagaagatgtgcctaatccctgagagactggattacaaataataatagtagtagtagtcgtagtagtagtagtagtagtagtagtagtagtagtagtagtagtcgtaatttcatttggtggtactacacatttgaaaccagtttgaaagttagattttatttaaaatcattttaaattgaaacccattttaatgtcatagtacttgcaattgagtttctagtgtgagtcattaactcagtctcacatacatataaataaaaattggattaagaacactgattgctctaccagattttgtctgaaaacagctacagtgtactcatatgcataaaataaataaatctttaaaaaaaattaaaacaaatgatctctcaatgagttcacaatttgctcaatagaacattcatatcagtaagtggtttcacaaaataattcttt

SEQ ID NO: 38982 - DNA, 820 bp, Mus musculus
  source 1..820: mol_type = other DNA
cggccacccacccctcccccggcagatgacagggccgggcgcgctcccaccgcacttactcctggagtcccaggtgaagtcgtggcgagagccggggaccatgcgcacgggcgcgccgcggcgagctggtccctgacacccaccagctgtttgtcctggccgagccggccccgccccgagaccccgtcccgtgccccgcccgtcccgtggccgcacccccgcccgcgggcccgagcggccggcccctttcccggtccccgggcgccccaggcgcagcccagcccggcccagcccgccccctattcgacctccgccagggcctggtcggacggaaacgggcggagcctggcggcttagcgcgcttctcgcatccgcgcctcggcagccggcggcggcgacacgactccccctgaggacggagatctgttggcgggccggtgtgtgcgcgcagcgctgaagcggggcagcggaggggcaacctcactcctcctcaacgcacgcgcccggctcgccgctccgctgcccgcccaccgctccgcgcgggacgctgcccggagcgcggcgcggcgcgggtggagaggacgcggctgggacggcggcggcagtagacgcttgcggcggcccgggagcgagcgggagccggcgggagggtgaggccgggccggcgggagcgcagtgcagagcggcgcagcgcagcgccgggggcgggggcgggggcgaagctttgggggagccgcggggagcgcgcgggacgcggccggagcccgggcgcgagccgaggcaccgggcggcggcggcggcggtgaccgcggagcgcgcc

SEQ ID NO: 38983 - DNA, 169 bp, Mus musculus
  source 1..169: mol_type = other DNA
tcttcatgggtcacagatctctaacaacccaggaagtcctgtgcctttctgacccaaggaaagacttccctgagaagtgggggctcctggttgcaggcaggagttgggtggtgggattaagcagacggtgcccttcccccatcactcccagcccaggcttaaagtcgcc

SEQ ID NO: 38984 - DNA, 211 bp, Mus musculus
  source 1..211: mol_type = other DNA
ttctgactttgaagccagactggtttccatagtgagttccaggataactaacatgtgcaatgccacagcttcgattaaagttgctcaaacctataaactcacaaggttgaaagttccaacccaaaggagttcctggactcatgccctaatttttaaaagtaaccccaaaccaggggtccatttcctcctacaaaggagacactgggtggag

SEQ ID NO: 38985 - DNA, 318 bp, Mus musculus
  source 1..318: mol_type = other DNA
atgtggtatgagactcatactcttcatctccagtgattgaagcatacatgcctgtaatcccagcatgaaatctggaagatcagcccttcaaggtcaagcaatgctcacattaccagaaagcaaagatggcctttgatccaagcacctccctggtctacatattgagtccagggcagccacagggacataacattcctagtgtccttgggaaccagggtccctgctcttcttatagagctttagaaagaaaatacctggaatcaagatcctagtgaggccatgctgccctctgggctctggaggattgaggaggccagt

SEQ ID NO: 38986 - DNA, 274 bp, Mus musculus
  source 1..274: mol_type = other DNA
gctggcattaaaggcaacgcctggaggcttgtaccacagcccccagataacatccttctgctggaaggcagcaaagcgcacactgggactcctagtttcagttttcaggagggatccatcccaattgttactggtcccagagacgctgtctatggagacaaccccagatatcaagagaaccccagatatcaagatatcatggagtcttgcgttgaggttcgcgcccctggccacagaccccgccgtgctccggaacctcgtgaggcagtcggct

SEQ ID NO: 38987 - DNA, 278 bp, Mus musculus
  source 1..278: mol_type = other DNA
tgattctgccagactggctggccagcaagctccaggcatatgcctgtctcgtatctagtgacattctgtgtgtggcactgcaagatactccctaccttctatatgtgggtcccaggaacttggtagcaaatgcctttagcagctttcactgcacagttcacatgagcgccgcgacactggtcaggtgattagtgtgacccagttccgccgaggcgtggcagaacctgggtgacgtcaacgcagcgggcggagctccgctgagtgcgcggtgtccgggg

SEQ ID NO: 38988 - DNA, 397 bp, Mus musculus
  source 1..397: mol_type = other DNA
agatacaatgaagatcaggctggctttaaactcatacccaaatgctgggatgaaaggcttgtcacttacattttaataatttacttttatttatatatctgaatccaagtcctctggaagagcagtcacagggtttctctgtatagctctgctctgtatagctctgctgggctgacctcagaactcaatgctgaccatctaactcttttaagattttaaaattactgttgttacagttcaacttatttgctaagagagggagccaaaagctggaggatggggctcgagtgcacgctcgaacctgtgcgcgttttcacagtgcccgccagggggcgcccgaggctggcgcgggctaggacagggggcctggggcccgccctgctcgccgctcctagcg

SEQ ID NO: 38989 - DNA, 301 bp, Mus musculus
  source 1..301: mol_type = other DNA
ttctttaataaaaagagttaaagaaaatttgactggactccgtcccttggcatttagaaaaacttgtataactaacaaaatggtttgagtaaaattttatgataccgggtaaggtaaattactcgaaattgcaggtcgaatctctgaattcgaggtcagctacacaaagaaaccctgccttttgttgttgcgctgtcctggaactcagtctgtagaccaggctggcctcgaaaggcgtgcgtcaccacgcccggctctttttaaaagatttatccttttgccaagacgtaaaactctctat

SEQ ID NO: 38990 - DNA, 321 bp, Mus musculus
  source 1..321: mol_type = other DNA
ggacaggttaactgatcttttccctggtacaagaatacactttactgttttaaagataatattgcttaaagaatttacttaactcagttggcctatataatagcagttcaattgctgagactgttctctgatcacatgccatggtacatgtgcccatacatacacataagtgttttaaaaatattaagaatacctactttttgacagaggtaagaggattgtcacaagtttgttgccagccttatgagtttaaataaattggcagatcttagctcatgtactcacaggagtgtgtgcccacccacagttcagggttgccct

SEQ ID NO: 38991 - DNA, 69 bp, Mus musculus
  source 1..69: mol_type = other DNA
ctctgagcaggctgagcctgtgaaagcctgtggctatgttctagtgctgaaccccaagattgggcaacc

SEQ ID NO: 38992 - DNA, 302 bp, Mus musculus
  source 1..302: mol_type = other DNA
ctggaatttcactccaaagcttgtcttggggttccgcaaggctcggaggtcccaggctgctcccctaggggcagctgagagggcttcatccaggctaagggccttcctgaacacggagcctcgggccgacagcccccttgtccccccaggggagacaagggaagaagacaaacgaaaatataagcttggttctttcctgtgccccgtctcatggttagacctggcggccaggcaagaggggccgctcgggaggaggccccgctccggcagacagcgggtgcgtctccgcggaacttccggat

SEQ ID NO: 38993 - DNA, 420 bp, Mus musculus
  source 1..420: mol_type = other DNA
cctagaatcccccagtgagggggctgggggcgtggctcagtggtagagcccctgcctagaatcccccagtgaggggctgggggcgtggctcgggggtagagcccctgcctagaatcccccagtgaggggctggggacgtggctcagtggtagagcccctgccttgaatcccccagtgaggggctgggggcgtggctcagtggtagagcccctggctaggatgcaccaggcctgtgcatatgcaggtcctgaacaggactctctgaatactgaagtacacattgtgtgaccttgggtaaggagactgagccctggggaactaacctccccggggaggcagcgccttcagtacctagagcccctgggccctaagctccaagctccaggcttggacagcggcaggggctcccccagagtgtcc

SEQ ID NO: 38994 - DNA, 419 bp, Mus musculus
  source 1..419: mol_type = other DNA
tcccctggaaatttcccctggaagatgaaagtaatgacactcttcagtcccaatgggcagctctccagctgccgcctatgttcacgtggcaggctgtgtgggcagcgtgtcactgtggtcactgggagtgaggacagagctgtgcgctccactgttgtgttacaggaagcctggggtagcccatggcctcgagggccataggactcagaaaccttgctaggctcccaggtctgacaggttccagaatcttgtgggaccttgagggccccatgctagccctcaagtgagcctgcaggcagctctgggaatgaaccatctgtgcctgaccagatgttcatgagtaagagctgttcccagggcacagaactcaagtctggggccaaggactgacctccccgccccccgcctccacagccttg

SEQ ID NO: 38995 - DNA, 442 bp, Mus musculus
  source 1..442: mol_type = other DNA
ccagcctggcctatatatttttatatggggaaactgaggctcagttccccagtgattggcacatcgaggagttaatttaacatgtgtggctctagagagacacaagactgatcagcttagtgagttatagtgataggaccacatgactgtcttattaatttaattaggtttttgagatggtctagatatgtagtcctggatgacctgaactcactatgtagtccaggctggccttggtagaccaggctggcctcgaactcagaattgactttctagtaattctataacccctcctctggcctctagagggccaggtgcccaagagcgctttgtgcgatgggcattggcccgcccgctactccctattgggcttacggagaggccaggtcgcgctttcgcgatctgcgcatgcgcagtctggagagtggcgggagcgtgcgca

SEQ ID NO: 38996 - DNA, 371 bp, Mus musculus
  source 1..371: mol_type = other DNA
tgtctttgctaaaaagcacaggttctcaacctgtgggtcctgacccctggggggagggtgtcacatctcagatatcttgtatatctgatatttacattacagttatgaagtaacaatgagtcaccacaatatgtggaaccattagaagttactgtgcagccaggaggatggctttgaacttattctcctgcctcagccgcctgggtgctggggtcggatgcagcactacatgctttgcacatgctaggcaagtgtttaaccaaccaagccatgatcccagcatgctttgcttgtgtgctttcttgctataaaagccaccaggctggggagctcctcctcagattggggtggaaattgccttttccccttct

SEQ ID NO: 38997 - DNA, 212 bp, Mus musculus
  source 1..212: mol_type = other DNA
gtgagacttggtttcaaaataaaacaaatattctgcatggtgtgtggctagcctgggctacatgaggccattctgggctacatgagcctctgtctgtagctccagttccaggggagctgatgcagtttccttgcctccacgtggtcatgttgagagacccccaccccaggtttgcagagtccaggggattgccaaatgtgtggcctgggtct

SEQ ID NO: 38998 - DNA, 688 bp, Mus musculus
  source 1..688: mol_type = other DNA
atatgaatttattgtacttttattgttttgccagttgataaaatagacatatctgataagttatttttaattattataaatacaaaaaaaggcatgctttaaataacttggaagattctactagctcctttttgttgcttcttcaaatcagaaagaacattgtgtagtcctggctgtcctggaactcactctgtagaccaggctggcctcgaactcagaccaagtgctgggatcaaaggcttgtgccaccacgcctggataatgttgatttaaaaaaaaaaaaaatatatatatatatatatattttaaagacttcatgtgagtgcactgtcactgtcttcagacagagggaattggattccattacggagcagacagtgttcttaactactgagcaatctcccctatatagttgattaaatttttttttctatttttatgaattggttacagtttctataattaaggtttcatttgcaagaagaggtaatgaaactctgatttctacttagtaaaatcggaaatcagtaagcaaaaaggagcccagagatttagggctacatgtctgtgggttcagaaagaagaaacaggcttctgctaccttctgcagagcgggtgcggaccctttaaggcacccggaaatgggatgtcaagaccggaagtgccctacttatttcctctcttcacg

SEQ ID NO: 38999 - DNA, 345 bp, Mus musculus
  source 1..345: mol_type = other DNA
ggctgcccgggcatgtctgtgccaggagcacagggctgcctcttccccacactgtctgtgtgtgacccagtgagccagtaagtaagatgtggctcagtcatcactgactcagtgcaccctgtgtccggacaccctaggtctgggctgtccccaccctgcctggaccaggcctcgccccgcccctctggctgccgggaaaccccccgcgccgaggtagggggcgcggcgcccgactgcaagccccgacttgtccccagccgcgggcggggccctggcgtcacgcgggggcggggcgtgggagccagcgagaggcggggcggggcggccgccgagcgagcggggccc

SEQ ID NO: 39000 - DNA, 377 bp, Mus musculus
  source 1..377: mol_type = other DNA
tcactctgtagaccaggctggcctccaactcagagatctccagagtgctgggattaaagctctggtacaaatctgcactacaaatttgtttgtttgtttgttttgtttttgttttaaataggaatatagatattaaactcaggcaagcttgtgaaggcatgaatgctgggattacaggcacgagctcataaatttaggtttgcttctgttaacaggatcccaaaagctgtgattacaggcgagaggagtccttcctctttttctgtccatgttattttaaagtagtatctttatttcaccacacctcgaggaatcaaaactctccatcacgtgagcacggaggtggcactgcgcaggcgcggctctctgcgcaggcg

SEQ ID NO: 39001 - DNA, 458 bp, Mus musculus
  source 1..458: mol_type = other DNA
tgaccgcggcgggggcccggcagctggggcatctagggcgggcagacagtcggcccattgctccgtcgcgcgcgggcccgcgctaatccgtgtcccccgggtctcaggccttggggggggaaggggacctctcgtcccgatgagggtcccgtgcccgtgagcgagtgacaggcggaaagcaggcggcgggcggccttgccggggcctaggcctcgcggcctacgtggaagtcggctcagaggtgaatactcgatatcgatctatgtatctatatgcccggagcgctgaagtacgatggaggccgtgcccgggacccccccgccgccgccatcagagtcgccaccgccgccatcgccacctgttcccccgacggccgcgcggccaccccgctccctgacgacaggtcaggccccccggcctgggccgggcagcgtcccccgtgggagggggggagcgcc

SEQ ID NO: 39002 - DNA, 404 bp, Mus musculus
  source 1..404: mol_type = other DNA
ctggctctagggaggtcacctgtagttagcaaagtaaagccttcttagaggaggcacaatagtccgaacttttcagggcccctaagaggtcttgctgaaagtcacttataaactgatgaggagactttaccttcaggttttagcaaggcagaaagttcaactttattatctacaaacaagtcactaagtttgagtcccagtaccggtaaaggaatgaatttccagaaatgacatcttattaaaatctgcatagaatacaacaaaatagttatgtgtcctctttagtttgcaactagtctaagcaactagtacaagttttgtttcctggccaggtcgaactgcctgatggttgtgtcgctcctcatgagtgatgtgacctccagcctacagtaggcccgtggggc

SEQ ID NO: 39003 - DNA, 326 bp, Mus musculus
  source 1..326: mol_type = other DNA
ctgtgtgtgctcacacgcattccatgaggtcagaaggcagtctcgtctcttctcgccagtctcctgtcaggtaaccaggctggcctgccagcttcccagggcctgtcggactgctggtgtgacagacacacagcgggactaggatcccagactagcccaggctcacttaacacaagttggggctctagttccaatgggaggcatagagacaagaccttggggccctgggctatatcgtccaagacctgggcagggtgcagattgccccaagagttccaggcaggggccgctgtaggcggggcgaagacaggcaccgcccctcgccg

SEQ ID NO: 39004 - DNA, 393 bp, Mus musculus
  source 1..393: mol_type = other DNA
atcatgacttgcttagccagctttcttttagaactcaggaccactaacccatggatggtactatccacagtaggctttacattaatcacttattaagaaaattgcttacagcaaactctagcttgtgtcaagttgacataaaacattaacattttattcactggttttggctatagccagatctgtctacgtggtttcattcatactaggtaagtattgtactgaaaacagatttagtatgacttctctaaaagtagggatactttatctcagtatagccatccattttatatacactagtcattgattgtactgtgtgaaagatgtgtaacacaaagttacagtcttcattttagtagacatttcataagtgttcaatctattcataatatg

SEQ ID NO: 39005 - DNA, 572 bp, Mus musculus
  source 1..572: mol_type = other DNA
gttatcccactttacagatgaaaagcctggctgtgaggcgccgggaaagcctgtctttcacaatccatccttccggagggctcccagaggaatacagagttagaggggagccctcttacatcaaagtgacatgtgggggagactagggctgcaatgcagggcctgtccttcctctgcccgagaccaagcactgggagaaatcaccacttggtttttcttcagcgcccgggaaagagcacgtgccccctgtccccgcccactcttttgggctggccaacggcgagcctgggttgggctgtgaaggaccaccgaagctgcggctccaggaggcgaacccacctccctctgccttctggttagtgaggtcccgcgcgagcgggatggagccctaagtccccgccctcacgagccgggccaagcctctcagagatggctttctctcggcgggtactgcagcctggaacgcgcgacgccgtgcgcgccccccttgcgggctccgcaggctgcagccgtctctgcgcacgcgcactcagcccaccctctggcgccgcagccgctgaggtagcggcgtt

SEQ ID NO: 39006 - DNA, 398 bp, Mus musculus
  source 1..398: mol_type = other DNA
aagaagtgggggctgccagctggggcctccaccaagattccccagtgtgactctggagacctgctgagccagagccctagggacttgggccagctagccagggctcacttcctgaccaaggagagagagagagtgtgcacgcacattcgcgcacagtggttgaacttcctggaacctcaggaaccagtcagtcacgacttatttttatatctatatgaatttaatcatcatttataaagtaagaaatctgaacatattaaacaaataccagcactaggacagcctgggctacacaatgagaccctttttcaaacaaaggagtaaatcttaaacagatcatggccttgggcagattccctgcacacagcccatgtgactctgggagatgcccctggggt

SEQ ID NO: 39007 - DNA, 258 bp, Mus musculus
  source 1..258: mol_type = other DNA
gctgaaaagcgggcttcggggctgccagcttgagcctccaccaaaccagagccctagggactgggtagagcttgagatctggatgggacagttgccctctcccgtgtcacagggactcacttcttcagaaatcaaatgtgaaatccattcatgacttttcttaatattggaaggtcttcgaccattatttataacataagaatttctgaatgcattattacaaaaaaaacccatgagactctgggagatgcccctggg

SEQ ID NO: 39008 - DNA, 261 bp, Mus musculus
  source 1..261: mol_type = other DNA
tatctgagtacagctacagtgtacttacatataataaatatttttttaaaacccgagtttaaaggaaaaaaaaaatgcagctgggagttactgctcaaggcagcattcaccacaggtggctactctagcagatacatgcaggtgtaataatggggaaatattatcaaagcacattatatgttataatttaaagcaaagttgaaaagaaaaaactactattcccagcatgtccttgcgcatttgtaggccacccttgccaac

SEQ ID NO: 39009 - DNA, 259 bp, Mus musculus
  source 1..259: mol_type = other DNA
ctgttattcttacagttgatgggtaacagtaactggccatttaaatattttttgctacatttatttatatatttgtttaagggcctgagttcaaatcccccacattcaatgttggggcgaccaaccaaggctgatcttgaactcacagagatctatctgcttctgtggaatatcagatatgatccacaattaggtgggtgtgggttggatagtttcccaacgccccgcccctgccccggccccgcccctggggcgccga

SEQ ID NO: 39010 - DNA, 408 bp, Mus musculus
  source 1..408: mol_type = other DNA
agtgacagcaactgttaccatgacaatcccctatcttacaggacctgattgctaaccagggccctggaaatggtccaggccctgtaaccatagcaattctaaataaaaacacctggttggtttatccatggactttccataagggatacattcctcttaggacttgggttaccttaggtccggtctggtctctcgaccgcaaaggagacaattgcgagggaccctgggtcctttgcctacgtagaggcagtccctagcacccccgcccgcgcgcaccaccggggtcgacccgggtgggtgggcgaggctcgcgcccagccccgtgcttgtccccgctcccctcgcccgcccagcgcgcgcgcgcgcgcacacgaggcgggggtgtaagctgcgcgtccgcgcaggcgc

SEQ ID NO: 39011 - DNA, 207 bp, Mus musculus
  source 1..207: mol_type = other DNA
ctcacaggctctcagttgatgaacccacagtagctcagctgttgaactcaggccagtgattccctttcctctgcaaaatcaaaggtcatgacagccaccttgctctggagagaaacctgagaaaagtcaactttccaggctggactgtgcagaggaaacgctgagtaaggcccgccctgtgatgtcacggtgccctgctttgattgg

SEQ ID NO: 39012 - DNA, 290 bp, Mus musculus
  source 1..290: mol_type = other DNA
gaacagttcaggggtttctcctgggggagcccaacattgtagccacacgtgcccaaagtgtccttcttggacaggaggccactccctgcacccagtggatgttaagagtgtgctctggttaggatgtcccccgggaaccccgagtcgcatcgcccagacaggctctctgggcttgggccggctcccggcagactcggccctgctcagatcctctgaccggtcccggcccgcgtccgccccgaggccccgaggaccccgccgccggcccgtcgccggccctgcccgccccc

SEQ ID NO: 39013 - DNA, 165 bp, Mus musculus
  source 1..165: mol_type = other DNA
ttccctttcctctgcaaaatcaaaggtcatgacagccaccttgctctggagagaaacctgagaaaagtcaactttccaggctggactgtgcagaggaaacgctgagtaaggcccgccctgtgatgtcacggtgccctgctttgattgggccgacttaaaggggga

SEQ ID NO: 39014 - DNA, 377 bp, Mus musculus
  source 1..377: mol_type = other DNA
cgcgtgagggggcgctagcccggcttgctgcagccttcgaaagcaggcaggctcagatttagaacttcagaacgtgtaatccaaactagcttgaaattcactatgtagtttaggcagagccggtttgaacaggtcctgcttaaaagcataatcaaaccgtaagatgttcaatccgctttatgatccggattcaatcatcactgatgatccttctgcgcagactcagaagctgaaagtttggagagcccaatggcagccagcgctcgcccgcaagggggcgaaattggagcaagggcgggcttgcttcattgtgattataaagaaggcgtggccacccctgcgtcacggaaggcaacaaccaatagtaggtggcggcc

SEQ ID NO: 39015 - DNA, 391 bp, Mus musculus
  source 1..391: mol_type = other DNA
cgagttccaccctggcacccgcatggagaaaaccgctgtggcatgtaaatctgcagattagaggttatccagacagtggcggccgaggccagatctggggatgaaaaccagctgcgggaggcgccgggctcggcgcgcgcccaggcccctcctaggcgccggcagacaccttccgcagtcccggccccgggccctggcacgtccggcgcgcctgataccaacctggccctgtgaacccacgagggagggggggcagggagccagggttccatactcccgctctgacttgtcatcccagctcccttggaatggccaatgcaggaaggtcccaggtgggaactatcagaggctggtatctttccaaaagaaacgcttctccttactccacccc

SEQ ID NO: 39016 - DNA, 175 bp, Mus musculus
  source 1..175: mol_type = other DNA
actgttatcaaatgtcaacaatgtatgataccaaaagacactggtatgtggttgtgtgagactccaagagtaggtaacaatgttgggttactcagtgacccagcaaaataggatgcatccctctgaggggctgcaccccgggggagggggcggggctgggaagaggaccagccac

SEQ ID NO: 39017 - DNA, 261 bp, Mus musculus
  source 1..261: mol_type = other DNA
gtcaacctttaatggtgggtcaccagaactgcagaccatgcatggactgtgcgtcctgagctaggagcccatggatgaggtctggtcaggcggcctccttcttcaactcctggaaggagtgaattgtgtccagggaccaggactctccatggtgtctggaaaacactacatcatgggggaatttcctggtcatttctcaatcccagggccagggcctaaccccagggcctgaagcccagcccgagggggcctctggagacc

SEQ ID NO: 39018 - DNA, 299 bp, Mus musculus
  source 1..299: mol_type = other DNA
ggctgacagatctctatgagtttgtggctaacctgagctacacagttctaggctaaacgcctagtacccatactgagttacacctccaaaggacagtttgacatggcaagttcaaggctagcctggccttgcttcaaaaaatgtctatcccttgaagtgagactgatcaccttcagtgtttaagagcagctgctgcgaccgtacccgggcagaccccagctgcagcctgcagtgttactatggaggtccgcgcaggcgcagaccgaggctgccgttccgcagcggccccgctgagcgtc

SEQ ID NO: 39019 - DNA, 440 bp, Mus musculus
  source 1..440: mol_type = other DNA
aatgaatgaatgaatgaatgaaaacattctgcatccagagattgttctgggtacagatcctgagatcaagagtcaagtccagatccacaccaggtgatctgcctgcaaagggtggaaccttcaggaaagggagagagaagaaagtccttctgcttcttccacacaggtcgtgctgccccccgcacaccgcgcggtggctcgcccttttccgccacgaggcgggtccaatagcggcgtggctcacacagagacgtgtcactctccgtaaaccggtgcccttccgccagagaggtccccgcggtggggaacgcgcgtgcgcgtgcccgtgcggcagcagattcaaggggcgagccgcacgagcccagtgcagcgggagcgcgcgagccgtctggggcggggccgggcgaggcggggcgcgcgcggcggccgttgagggaccg

SEQ ID NO: 39020 - DNA, 318 bp, Mus musculus
  source 1..318: mol_type = other DNA
cagacaaagggcagacgatacacatttgctttgtataaggaattccacagtatagtctatctgggaaataaatactggattgagaaataaattactttctttactagagcttttaatttttttaaaaattttcatctaattataaaagttcacaagactttaattctagcaaagccaggcagggctacacaggaccctgcctgtgagggtgggatatatatatatatatatatatatatatatatatatatatatgtttatgtgtgtgtgtgtgtgtattttgtctgtcttccatgttaagtgattgcagaggccagc

SEQ ID NO: 39021 - DNA, 160 bp, Mus musculus
  source 1..160: mol_type = other DNA
cactctaaagagagtgcgcagttatgtggaagctaaagcatatttacttgacagaagcttaattattcatccgccacagtggggccacagcccggcgggctccggactgccaaggaagtctgggtgggggtgtgcattacatcggattccccaacccctt

SEQ ID NO: 39022 - DNA, 494 bp, Mus musculus
  source 1..494: mol_type = other DNA
aaaaaaaaaaatccctttggtgtggttgtttgtattatatagtgctggaattggaactcaagcctggagcactctagcatgaccctttaaaaggttttttctaggacttgacatgatgatgcaaatgggtctttgaattcaaggccagcctggtttatatagcaagttccaggctagccagggttgcataattaaatcctatctcaaaataaaaaataaaataacttgtcaagacttgaagatcgggatgccttgttaataattcaaaaagagccttgatttgcaacgttcaagtactacccattttccaaaagggttactaactccgggttgggcagggtgctggtttgaaagcagccccacccgcctttgggagtaggcgccctcccggcctgcccccagccttgtcctcccggcgctctgggggcgggggcggggggggggccgcgcaggcgcgtcaggagtgcctttggggcccgcgctttacgacactt

SEQ ID NO: 39023 - DNA, 320 bp, Mus musculus
  source 1..320: mol_type = other DNA
ctgggttacttcactcagaatcattattatttctgaaacaaggttaaaataagactcagactcaaaatatatttatagctaggctcttctctgactagatcttaacttaaaatagtctatttattctaagaagtgacaatgggattttaattccactcttgtttttcctgcatgtgtgtccaagaaccacatactaagagtaacatgtatcataagtaactactgaagacattgtttattactaacattttgccattgactgtcctttcctcacaataaaagacacaagaaaactgggctgcttttaaggtgctcttgtt

SEQ ID NO: 39024 - DNA, 359 bp, Mus musculus
  source 1..359: mol_type = other DNA
agggaaggtcacatttgacctgttaaccatgcctgctgtcatgtagacattaaatcacagttttcctggtgacctagatctccctccctagaccttgctaggggtatataaggatacccctttgattggggaacctcagtcctggactctctcctgggtcaggaacttgactggtgacattagtgataaagggtttatcttcatctccagagcactgaggacacatggcagactgggtgctcagctgagtctctgtgtcacagggacacataggcagcatggaggctccctctttgatgcttatcagctcagctcctcaaggtgctgcttggaggagaccaccacccgattctgggaat

SEQ ID NO: 39025 - DNA, 394 bp, Mus musculus
  source 1..394: mol_type = other DNA
ttactaaagggatcaaggggaggtcacatttgctcaccttgttgaccaactctaatgtagctctatacagtagtttgccccatgagaaaattgtttccttgagcaatgatcctagagtttccacacttaggaacttgaaaatgttctgccttttgacatctctaataggaaaagacaagcaaagattttccaggaatgaaggttgcgcaacctcattgcaacaaggaggacttgaagtgacattagtgataaaggacatctttatccttagttatcacttctttgtaactgtcacagacatttctgcttggatgatctaagacccaaggacagattacagcagaagtcagtcctgggatgagctgtcctcaatgtgttgcttggaggagaaaca

SEQ ID NO: 39026 - DNA, 377 bp, Mus musculus
  source 1..377: mol_type = other DNA
ccctgccaaaggggtcaaggaaggtcacatttgacttgttgaccatgcccagtgatctccaggagacaattctctcagaagggtgataccactgagaaatcacctagtttcactgaaactctctgtaggaaaaatgagcacaaagttctttctagaacgcataactgctatagaacatttctcctgcatcaggaatttgactggtgataaataattgctattcattcctagtcttctcagagcactcagtacacagagcagactgtgttcttggttgagtctctgtgtccaaaggacacctaggtaggatggagactccctctttgatgctgacagactcaaggccatgattcagcagatgtcagccctaggatgag

SEQ ID NO: 39027 - DNA, 336 bp, Mus musculus
  source 1..336: mol_type = other DNA
agatctgtctctgaaggtccagctgtctgaggctgtacacttcctctttcatagattactttgaagatctctgtgtaccagtgaaagaccttctcagttagtgactggcctgaaaattcagtgcactcttaagctgcttttgataaggctgtttatcatagcaacagaaaattagaacaatcagttttctaggaattgtataaagcatattcatttatatcatacatggttttcacagaggactttatcagctttattgctcaatgtgcagtaactgatgtgttttgtatatacaaaatgtcaccagctcatatgattctaggatgagctcctacc

SEQ ID NO: 39028 - DNA, 276 bp, Mus musculus
  source 1..276: mol_type = other DNA
ctgcttaagtgatcagagcaggtcacatttgacttgttgatcatgcatactgtatgactagacatgtataaggaaagtttcattgaaacccaactgctataggacatttctcctgcatcatgaatttgactggtgataaataattgctattaattcctagagaccgaatctcaccttcccagagctgtgagtacacaggacaggagtggagactccctctttgatgctgacagactcaaggccatgattcagcagatgtcagccctaggatgagct

SEQ ID NO: 39029 - DNA, 298 bp, Mus musculus
  source 1..298: mol_type = other DNA
aagtgatggtcacacaaacagtgatgagcacttcctttcttttatagatccctttgaagaactctgtggagtaatctcttaatgacgctcaatgaaaacttgaacaataagtttctgagaattgtataaaacagattcatttatattctacataattttctgtttgtatgcaaatcaaatagcaccatatgtccatataaggccatataagggccggaggagactttattgctctgatgtgttttatacataggaaatgttttcagtccatataattctaggaggggctccaacctgg

SEQ ID NO: 39030 - DNA, 408 bp, Mus musculus
  source 1..408: mol_type = other DNA
accgggtgggctgcttctgaacagcacaagtgatggtcacaaacaacagtgatgagcactagggagcttccagtggtagttagcatttactgtgaaatgcgggactcagttgagtcagtgtctttcatagatcacagtgaaggaatctgtggattaatcgacatttttaaaaagtgtcccagtgcaggttgtttatcatagcatcagaaggttagaacaatcaatttgtatcctacttggttttccggttgtatgcaaatcacacagcaccatatctccatataaggccaaatgagggcccgaggagatttatctgctttatcgctcagtgtgcagtctggtggagtgttttgtacacaggaaatgtccccaggccatataattctaggagggactcctacctgggag

SEQ ID NO: 39031 - DNA, 322 bp, Mus musculus
  source 1..322: mol_type = other DNA
tccagcggtagttagtatttactgttaaatgtacaagactttcatagatcacattgaaggaatctgtggattaatctcttgagtgtcttaatctcagaaagatagtgaaccatgtatcccagagttttagtgaatgacacattaaacaacttcatacagaagaaagttagaacaatcaggttttttttttttggctgaatgtcaagcatattcatttatatcctatatgatttcctgtttgtatgcaaatcacaaagcaccatatgttcatataaggtcatgcgagcatttaattctaggaggaaatcctacctaggaggag

SEQ ID NO: 39032 - DNA, 219 bp, Mus musculus
  source 1..219: mol_type = other DNA
gagcagaatgaaggtccctgtatcctacatatgctggttggatcagggcaggtcatatttgatgtcttgacctgttgtagtcctagaggccaagggaaatgattcaggaacttgactggtgacattaatgataaatggcttatacctcagctgggtctgtgtgtcacagggacacgtaggactcatgtccaggagtcagcagatgtcagcccatggatg

SEQ ID NO: 39033 - DNA, 294 bp, Mus musculus
  source 1..294: mol_type = other DNA
gaacaattgtccaaggattgaaaacaattgtacagttaaatctgactctagaactaatccttgtgtatctgaagtatttctgaagaattccaggactccagtacccaagaactagacaggaagtcgtgtacaattgtttccctgagctataaaggttgcctggaaacagttcaggaacttgactggtgacattaatgataaatagcttctcagctgggtctgtgtgtcacagggacatgtaggagatgctgacagactcatgtccaggagtcagcagatgtcagcccatggatg

SEQ ID NO: 39034 - DNA, 404 bp, Mus musculus
  source 1..404: mol_type = other DNA
tggagctgatgttaatcttggtcatcacctgcttaaggggacaattgtccaaggattgaaaacaattgtacagttagatctgactctagaactaatccttgtgtatctgaagtatttctatagaattccaggactccagtacccaagtactagacaggaagtcgtgtacaattgtttccctgagctatcaaggggatgcctggaaagagtctgtgtgaggaacccacagtcctttccagtactgtctcaagtcaggaacttgactggtgacattagcaataaatggcttcagattaggacctcagctgggtctctgtgtcacagggacatgtaggaaagatggaggctccctctttgatgctgacagacttatgccaggagtcacagatgtcagcccatggatg

SEQ ID NO: 39035 - DNA, 427 bp, Mus musculus
  source 1..427: mol_type = other DNA
atgagatctgcaaagcacatgagcaggatgatggtccctgcatcccaccttgctgaagggaccagggtcagttctcccagaaaactctattctgaggtatcaggcctggcatctcccaaggggaagtcaggacttttgctgcagaatcaataggtgaccccaaagagcagtttggctccagctgcttcaggaactcagtcttgagtcaggaacttaactggtgacattagtaaagttactctggtttcttccaacactcacagtaatatttgtcaccatcctgttgggaaatcccaccttcccagagcactgaggacacagggcagactgggtgctcagctgggtctgtgtgtcacagggacacataggaaagaacagacacatgtccaggagtcagcagatgtcagcccttggatgagttgtactc

SEQ ID NO: 39036 - DNA, 365 bp, Mus musculus
  source 1..365: mol_type = other DNA
tatttctgaagaaagcccatctactagacaggaagttgtgtcttcttgtgtggggctctcactcaacactcagacaattgtttccctgagtttcttgcatctcccaaggggaagacacaggatcatccaggtgaatgctggaaggttgcctgcaaactgtccataggatagaagccaacagtctagtgataaaggctcatctgggtctatgtgtctcagggacacataggaaagatagaggttccctctttgatgctgacagactcatgtccaggagtcagcagatatcagcgcctggatgaatcattgttctctgaagcagtgtcgtggtcacagaccccaccacacacatgctcctgcctgag

SEQ ID NO: 39037 - DNA, 409 bp, Mus musculus
  source 1..409: mol_type = other DNA
atcatggagaagctgatgttaatcttggtcatcagctgcttaaggggacatcttgtccaagaactgtccagacttttcatgagtctctcaagtatttctgaagaaagcccatctactagacaggaagttgtgtcttcttgtgtggggctctcactcaacactcagacaattgtttccctgagtttcttgcatctcccaaggggaagacacaggatcatccaggtgaatgctggaaggttgcctgcaaactgtccataggatagaagccaacagtctagtgataaaggctcatctgggtctatgtgtctcagggacacataggaaagatagaggttccctctttgatgctgacagactcatgtccaggagtcagcagatatcagcgcctggatgaatcattgttctctga

SEQ ID NO: 39038 - DNA, 380 bp, Mus musculus
  source 1..380: mol_type = other DNA
cagggggaagctgatgttcatcttggtcattagctgcttaaggggacatcttgtccaagaattgaaaacaagtggacagttagatctaactcctgaagaatacttactagacaggaaattgtattttcttgtgtggggttgtcactcaacactcagacaattgtttccctgagctatgagttgctcaattagtgatcctattttcccagtgcactgaggacacagggcagactgggctttgagtctcagggacacttagggaagatagaggctccctctttgatgctgacagacccacgtccaggagtcagcagatgtcagcacctggattaatcaaatcatgtcgatgcttatcagccctgttgcacaaggtcattttg

SEQ ID NO: 39039 - DNA, 371 bp, Mus musculus
  source 1..371: mol_type = other DNA
gctgatgttaatcttggtcatcagctgcttaaggggacatcttgtccaagaattgaaaacaagtggacagttaggtctaactccagatctctcaagtattctgaagaattactagacaggaaattatattttcttgtgtggggttgtcactcaacactcagacaattgtttctctgagctatctgtgctggaaggttgcctgcaaagaaatcctattttcccagtgcactgaggacacagggcagactgggagctatagaggctccctctttgatgctgacagacccacgtccaggagtcagcagatgtcagcacctggattaatcaaatcatgtcgatgcttatcagccctgttgcacaaggtcattttg

SEQ ID NO: 39040 - DNA, 374 bp, Mus musculus
  source 1..374: mol_type = other DNA
tgctgtgattctctcaagaatttctgaagaatttcactactgagacaggaagttgtgtcaagtttccctgagctaagaccttgcctaggagatcctgaaggacttatgctgcaggatcacccagacaaagcctttagctgctacctggcatctgtctgtcacagacatgcatgtcacctaaggaagacccagggcagacttggttctgatccgggtctgtgtgtctcagggacacattggaaagacagagcatatcgaggagtcagcaggtgtcagtgttgttcaaggtcttgttggagaagaagtgactgagcagtgccctggacacagaccccaccaccctctgggaagtgctcctgcctgagagaacactc

SEQ ID NO: 39041 - DNA, 444 bp, Mus musculus
  source 1..444: mol_type = other DNA
agctgatgttaatcttggtcatcagctgcttaaggggacatcttgtccaagaattgaaaacaagtagacatagtatttctgaataattccacttactagacaagaagttgtgttttctcttagcctagaccttgcctaggagaaaatttccctacttcttggaaacttccaagagacaaagtgcataggtgaaggagcccaccgtcctttcaaggacacacaggtcaccagctgtttcctgggacattagtgataaagagtttatttcccagagcactgaggacacaaggtagactgggtgctcagctggggctgtgtgactcaggggcacataggaaagatagaggctccctttttaatactgacagacttatgtccagaagtcagcagatgtcagctcctggatgcttgttgctcaaggtcttgttgaagaagaaacattta

SEQ ID NO: 39042 - DNA, 439 bp, Mus musculus
  source 1..439: mol_type = other DNA
ttctgaataatcacttactagacaagaagttgtgttttctcttagcctagaccttgcctaggagaaaatttccctacttcttggaaacttccaagagacaaagtgcataggtgaaggagcccaccgtcctttcaaggacacacaggtcaccagctgtttcctgggacattagtgataaagagtttatttcccagagcactgaggacacaaggtagactgggtgctcagctggggctgtgtgactcaggggcacataggaaagatagaggctccctttttaatactgacagacttatgtccagaagtcagcagatgtcagctcctggatgcttgttgctcaaggtcttgttgaagaagaaacatttactgagcagtgtcgtggtcagagaccccaccaccctcagcccataggattctgggatgtgctcctgcctgagag

SEQ ID NO: 39043 - DNA, 332 bp, Mus musculus
  source 1..332: mol_type = other DNA
ccctgcattccacctgtgttgaaggaatcagggcaggtcatatttgacttgttgaccatgcctgatgtagccctagacatgggactgcagttgtcccagagaactccagggggcgatatcctcaacacgcagacaattgtttccctgagctatgacctcctcttggaatctcccaaggggaagcgtccttcaccttcccagagcactgaggacacaggccagactgggtgcttagctgggtctgtgtgtctcagggacacataggaaagatagaggctccctttttgatgctgactcatgtccaggagtcagcagatgtcagcccttggatg

SEQ ID NO: 39044 - DNA, 367 bp, Mus musculus
  source 1..367: mol_type = other DNA
gtggtgttgaacttcagttctccctgagaactccaggaagttcagcaactcatgttgctcactcaacactaggaacattgtttccttgagctaggagactcccaagtacaagacagggtcaggatcttgactggtgacattagtgacacccagagcactgaggacacagggcagactgggtgctcagccgggtctgtgtgtcacagagacacgtaggaaagttggaggctccctctttgatgctgacagcctcataggagtcagcagatgacagcccttagatgagagtgagcagtgctgtggtcacagaccccaccacccacagcctataggattctgtgaagtgttcctgcctgagagaaaactc

SEQ ID NO: 39045 - DNA, 285 bp, Mus musculus
  source 1..285: mol_type = other DNA
gtggtgttgaacttcagttctccctgagaactccaggaagttcagcaactcatgttgctcactcaacactaggaacattgtttccttgagctaggagactcccaagtacaagacagggtcaggatcttgactggtgacattagtgacacccagagcactgaggacacagggcagactgggtgctcagccgggtctgtgtgtcacagagacacgtaggaaagttggaggctccctctttgatgctgacagcctcataggagtcagcagatgacagcccttagatga

SEQ ID NO: 39046 - DNA, 307 bp, Mus musculus
  source 1..307: mol_type = other DNA
cagcccagggttgtcaccacccacagtgggctgggccctccctcattgatcactaagtcagatggatctcctggaggcccctttagctaaaaatagagcattattgtcatcataagaatgttagttcaaggctagcctggagagagctctgggatagccagggctttaacactatttaaacaatgttagtttagatttgttaattctcaggcaatctgttcaaactacttttgatcatttgacaatcggagtgtcttagaagacattcagatgtgagtaactcatctgactgagttctgaagacagc

SEQ ID NO: 39047 - DNA, 228 bp, Mus musculus
  source 1..228: mol_type = other DNA
gtcacttctctccagagcagaactgcgatggtcagacacaatgtgccagacaaggcaccctggctgattcagacactggacaggaagcactactgcctgccgtttcttgggaagcgggatctgcagccaggtgcagaggctgtgcacacctgtaacgctgaaggtctatgtgagacactcatacaggaatacattcttaaaaggaactgaatgtccaggagagcctct

SEQ ID NO: 39048 - DNA, 381 bp, Mus musculus
  source 1..381: mol_type = other DNA
gggggtctcggtgacttcgaggacaacctgatctattcaggctagccaaagctatagcgtgagatatgtctcaagacaacttcagcactggctgctcttctaaagggcctggagctctcctgacgccgtcttccgacctctgcaggcaccaggaaataaataaatctaaaactattaaagccagctgtttgtcatgcatgcacaaagccaaggtatacttaggctgtccttacagttgagaatatcctctaagcctcctgacttgaaggctcggaccttcctctgagcaagttccaccccttccttctctgtgggcgaggcctatgattggcagaatatctacccaatgcctcttccaaatagaccaattgtaaacttcgg

SEQ ID NO: 39049 - DNA, 252 bp, Mus musculus
  source 1..252: mol_type = other DNA
aagtgcccagcaccaagcctgatgacctggggggaggagctgctgcctccaagttgccctcagaaatcatgcaagctactgcagcatgtttcctcaccccactgttaagtaaataggccagcctggagcccagtggacttgaaggtccctcccagaaaatacacagtgctttggaggagctgcttccaatctccctgggagattgtctttagtggaagtgggccctttaaatctaagctccacctttgctta

SEQ ID NO: 39050 - DNA, 463 bp, Mus musculus
  source 1..463: mol_type = other DNA
aagacagaatactaaaagtatatcctatcgtttttccccggtgggattcaagtaagaatgtgcacaagtgatgctcattaggcacatccctctaatcccagcgcttggggggccagggaataaagccagcttgcgcggtccttattataccctgcaggggggggtagtccaagcgtgatgggcgtggcccaggcttcaaggatggacaagggcgtggccttgactgccatgggcgtgacctttgctcgggccagcaaccaccaccagcagcccggtctctgctgctgccctcgcccgccgccccccgggcccccactagctctccggccccccgccctgagcagggccttgggaggggggctcggcccctcgcatctgtggggagccctcaagaaagggtacagagagggtgtcctgtctacacctctgcaccccactggctcagtgaccggcttcggtgatc

SEQ ID NO: 39051 - DNA, 369 bp, Mus musculus
  source 1..369: mol_type = other DNA
gatactgctgttagtaagatgccctcagaaacaattttttggtagtgaacacaatttgccttttatatggatgagccatgacgtcaaattgtggacagggggcctcccaggcaccattgggaggttgctgggcggggaattgggcgtgggcaaggtttcctaacgcccccagcccccttgcttagtaggctaaaactgggatttagtcctgggtaccatcgcaggcaaggtgccagtgacattgcacatgcgcaattgagcacctgcgcagctggcgcttgcgcagtgctgggagacacggctcagagaacgcagctctgtctggagaccgcgttcgcccggcgcgcatgcctactgggggcggggccc

SEQ ID NO: 39052 - DNA, 262 bp, Mus musculus
  source 1..262: mol_type = other DNA
aaggcagccgcctggctcggaagcctacagtcttatcatcctgtagcctctgggcccccttcttgaaggggcgggattctaagagagggcaagactcttctagaactgctcacaggccagcctagactacataggctagccttctaggccaacctgagctactaagtcgagcacccgactgctcttccgaagagtgtacttacatataataaataaataaataaataaatctaaaagcgcgcgcccagcagccccgacggga

SEQ ID NO: 39053 - DNA, 446 bp, Mus musculus
  source 1..446: mol_type = other DNA
ccctcagcagcgcctctccgcagacgctgccgccgccgccatcttccgcccgccgccgtgacacggcgcaggcgctgcactagtagggccgccgggaaatggagtccggcaccgcggccggtccccgcccctaaggcgtgccgcgtcggcagccgcccgccctccccgggcgtccaccggagcggccgccatttccggcctccgcgctgcgcaggcggggaaatggagttcccagcggtccggagtccctctccctagactctgagcagaagccctggagcctgcaacattcgcagacgaccccagggtgtgaggtgccaggaccgaggctcccagtgcctgaggtctctcttcttgagatcccgcagggggcgccccaatccgagggcgccgcgctcggggaggcgggcggggagcccggggcgggcccgggagggggtgtcccg

SEQ ID NO: 39054 - DNA, 493 bp, Mus musculus
  source 1..493: mol_type = other DNA
acccaggctgaggcccccctgggggaaccgagtgcttcggtctctctacaggcactagccccgagttccgacctgaggcacacagcccgggagtcccgctggcccaggcgccttgggaggccgggacaccccctcccgggcccgccccgggctccccgcccgcctccccgagcgcggcgccctcggattggggcgccccctgcgggatctcaagaagagagacctcaggcactgggagcctcggtcctggcacctcacaccctggggtcgtctgcgaatgttgcaggctccagggcttctgctcagagtctagggagagggactccggaccgctgggaactccatttccccgcctgcgcagcgcggaggccggaaatggcggccgctccggtggacgcccggggagggcgggcggctgccgacgcggcacgccttaggggcggggaccggccgcggtgccggactccatttcccggcggccctactagtgcag

SEQ ID NO: 39055 - DNA, 473 bp, Mus musculus
  source 1..473: mol_type = other DNA
tgcgctctttgctttcagcagcgctgagtgctctgctagcccaccccaggatgacctggagcccttggctctggctttggccccggctccggccccggccccggccccggccccggccccggcccctgccccacggccccctcaggacctcatcggcctgcgattggctcaggagaaggccaggcatcggagcgcccgctgcctgtgtgtcctccctcggtgccagcagcagcccgagctgggcccaccccagctgaggagagaccccggccatcttcatcagcatggcgactcggctggactctagtctcgaggggcccctgcgtaactagctcttgacccactgcttcttgccctctcccgccaccaggaggcagcagcagtcgggtcgagctccaaggcccccagaacctcagccatgctgtggagcttgactgcgcctgcgcacaccgtttctcaccctgagggcgccc

SEQ ID NO: 39056 - DNA, 190 bp, Mus musculus
  source 1..190: mol_type = other DNA
agcctgtcagatcgcaccctctggggtggaggacaggctgacaggatcatccttgcctgcatcggccttgctcaataaagacttcctgattcagaggcagctcctgggatcgacctcaagcaaggcctgctccatgcttaggcaggccccagggtgtggcagcatactctgccagaagagccctcataaa

SEQ ID NO: 39057 - DNA, 393 bp, Mus musculus
  source 1..393: mol_type = other DNA
gttccggactccctgactagggatggactgagtcttcctgtatcaattaaggcaatctccctcagactggtctaggcaaccccaagtagacttcattgcgattctaggtagcctcaaattgggaccacaggtgggcctgagactccttgctgccaggtaggtagcttgaagacctaagctccatctttaggatccacatggaggaaggcacttggctccctctgagcacaaatacacgcaaaaataaatgcattttttttttattatttaaaaaacaaaaccaagaatcgacagatctgctctgggtgccaatcgtagaggcgtcacccggacgacgacccccggtgctagcccctcaacttccggctggggggtctggcggtgggcggtcgg

SEQ ID NO: 39058 - DNA, 246 bp, Mus musculus
  source 1..246: mol_type = other DNA
cctctgaaagatgagtctcgacccttggagatgtttgaaacttgttttaaacaccaggactatccaagcatgctctccttggggagaggaggatgctggaattgactgcactccctgcctcccaagtgccagctggagtctagaaagaagctaacttgtcgcctggcttgctgtccaggcagctctggatccaccacttgcctcccccaggctggggccagcaggtcacccctggccctggcggct

SEQ ID NO: 39059 - DNA, 235 bp, Mus musculus
  source 1..235: mol_type = other DNA
agacccagctggggggttgggccagcagcgggcacaccatcttcccactgcgcctgcgcaagccacgcgcaacactccagaaaagttgctgcaaactttcttccaccgcctacccgcggggccgggaattccgaggggcggagggggcccttcaagggacccgggagatgggagcggcttcgcgttgctctgatagggaaactgaggccctgagtcagagagctgggtctagtct

SEQ ID NO: 39060 - DNA, 297 bp, Mus musculus
  source 1..297: mol_type = other DNA
gctctaggggcatctgatgcctctggcatctggggacacctgccctagttaaaactaaaatgctttttaaaaataaattgtgtagtttgtaacctgagttacaaaaaggttactttgtttgcagctacaggaactggcaaggtgggagcgcgggagcgggagcacgtgtcggagctgtggcccgtgccctgccccgggtgcgcgtgcgcactcgccgcactctgctcgtgcctggcaccgcgtggcgggaacgtggagggggcgtggcctcgcctcaggcgctctggtgccttcgcg

SEQ ID NO: 39061 - DNA, 285 bp, Mus musculus
  source 1..285: mol_type = other DNA
ttgtaactcaggttacaaactacacaatttatttttaaaaagcattttagttttaactagggcaggtgtccccagatgccagaggcatcagatgcccctagagcttggaaatgccaagtttgggaaaactcatatattattaattatttgtcaactaacatgataaatcaataaagttgtttcgattctcttttcaagggcctcggataccctcgcgggagaattttctgcgcccttgggagctgtagtccatggccgcccgtactctaattcccagtgggcttc

SEQ ID NO: 39062 - DNA, 229 bp, Mus musculus
  source 1..229: mol_type = other DNA
agatccgagctccagcctttggcgtacagggcgagaagggcgggacttccgtctcctgcggctcacttccgtcggcgcctgcgcagcttctgcggggtctgactagaattattttcccgtcaaaccgtccagttggaagatcaggtaaaccaggggcgtgaccccgcgccttggaacgtggaggcgggccttaagggcgcttaggacagccaatcgcaaaactcaaacc

SEQ ID NO: 39063 - DNA, 337 bp, Mus musculus
  source 1..337: mol_type = other DNA
ggctgggcaccagccagggctcacccgcagatcccggctcccagcgccagcagcagcaggggcaggaactgcactcgcggcgccacgatcctcgagccgctgccggggccgcccgcggctcccgggactcatggtagctttgctctgaaaccaatcccggtatggtggtttgagttttgcgattggctgtcctaagcgcccttaaggcccgcctccacgttccaaggcgcggggtcacgcccctggtttacctgatcttccaactggacggtttgacgggaaaataattctagtcagaccccgcagaagctgcgcaggcgccgacggaagtgagccg

SEQ ID NO: 39064 - DNA, 338 bp, Mus musculus
  source 1..338: mol_type = other DNA
ggattggagcaatggttcacttggtaaagtccttgttatgcatgcagcaagataaattaagggaggcagcagatctctgttgtctcatccgactgccctttcgaaggtccgaagttcaattctggagtgtctgaagacgtgtacttacatataataataaaaaaaattttaaaaaaagacacgcatacacatgtacacgtacacacatatacaatgtgtgtttacacatatgtgaagtgtccacgtcccagggcacacagccgcttaaagactggctctctcagcatagtcctagttgtagagactcacggagtctcactctgtgagtctctgtcgct

SEQ ID NO: 39065 - DNA, 277 bp, Mus musculus
  source 1..277: mol_type = other DNA
cctgctctgactgacaccgccagctggtcccgggtttcacaacttgagggcgggctctaaattctagaataacctgtcatatttaaggtttcctccttccagagctgaggggcgacgcttcaggatgaaaagcaggaaggaccctgccccttcaaacggaggagcctgcggcagtctctcgacacccttcctaggggatgacccctgtgccaggctcagagccggccgcctgatgctgggtgaggcagggcctgggggggggaccgggcccgagctg

SEQ ID NO: 39066 - DNA, 378 bp, Mus musculus
  source 1..378: mol_type = other DNA
tggctcaagcctgtaacaactacactttaagtttcagtccagccttgattacagtgaaaccctgtctcagatttatacatacatacatacatgcatacatacatacatacttacagtttgaagacaacctagctacttgagactctgtcttaagagacagagaggctatagtaagtctaaaggaagttgggcaacttgttcatactttgaaaaacagaactggggagatctgatctcaggccacacctatacaaagagtcttgtgtctagattccttggtcccggcaatgggactcagtgacacctgacgcctgcaggggtcagccgcggggggcggggcaggggcggtggcgcgggcgactcccagggccggaagcg

SEQ ID NO: 39067 - DNA, 393 bp, Mus musculus
  source 1..393: mol_type = other DNA
atttatacatacatacatacatgcatacatacatacatacttacagtttgaagacaacctagctacttgagactctgtcttaagagacagagaggctatagtaagtctaaaggaagttgggcaacttgttcatactttgaaaaacagaactggggagatctgatctcaggccacacctatacaaagagtcttgtgtctagattccttggtcccggcaatgggactcagtgacacctgacgcctgcaggggtcagccgcggggggcggggcaggggcggtggcgcgggcgactcccagggccggaagcggcggggccggtccgggctccaccccggacccgaagctccgccacctcctgcccttctcgcctcaggaagagaaggtggagacacg

SEQ ID NO: 39068 - DNA, 194 bp, Mus musculus
  source 1..194: mol_type = other DNA
ggcagactagggtgtcctggacagccaagtcgaaacgttttatgagagacttttttaaaatagattttacattatgctctctgtgcgacttgaggtcctggctggggcggggcctgggttccgactccagccccgggccaggggttgtcgctgctgtcctgccccgcgggggcgcccgccgggtccctgtgctg

SEQ ID NO: 39069 - DNA, 558 bp, Mus musculus
  source 1..558: mol_type = other DNA
catgtagttacttcctgtgttttacattcaggattcacacacaccactcagtgagcatggcgcagcgatagagtcaccgcctaaccccctcccccctgggaggagctggagtcttttgctcagtggtggagcccccctcctaagaacaacacagaaaacacaagacaggtactgttatgtgtgacgggccgtgtagcgcagggctgtgatcccagcaccgcactgcggcacacgcttttaagagtcactcctccaatcagagagtgagtaaagcggcaggtctgtatgactacgcgctgactcgctcccctccccggcgagggcactaaccgccgggaaggcgccagggcggtgacgtcagtacgtcgggactgctcccacgagcggccgtttaacggcaccgcccacccaacgtacggacgtcgaggcgtcgacgcggcgacgtcacgagcgcccgcccccgcgagcgtgcaaacgcacgctcctacgtaggcacgtaggcaagtccttccttacgcaagcacgcacggcccacgggcgggtgggggaggaacggcg

SEQ ID NO: 39070 - DNA, 452 bp, Mus musculus
  source 1..452: mol_type = other DNA
actcagcccgggtctccgggcctctgagcctgccggattgttgggacgatcctactaccctccgtgtagctgggcccgcgtggggagcagatcggggtctcaccaccaccccaaccacgacccggccgcggtgagtcagcggcccgccgcgccccctcgctcacttcctccacaccttccccgggagggtggggggcggcgagggtgatgagatcccttgcttaaccaagggcccccagatctctactaaagaatttgatagagtgaggctcagggtgcacccccgcctggaggcgtccacggcccctttaaggcgcagggccgagggggtgcgccggcgaggttcggacgctgcaccccgctttcacaccggtgggaggaggcgcctgaagacccgccccggcccggtccacgttctccccactggactctatggggcgggaccccgagag

SEQ ID NO: 39071 - DNA, 421 bp, Mus musculus
  source 1..421: mol_type = other DNA
agtttgggagcgtgtctctgagcctcagtttctcgatcagtaagtcaggaactgccattaggtagaatgggtcccactaggcttgggggagggggggctcgactcagcccggggtctccgggcctctgagcctgccggattgttgggacgatcctactaccctccgtgtagctgggcccgcgtggggagcagatcggggtctcaccaccaccccaaccacgacccggccgcggtgagtcagcggcccgccgcgccccctcgctcacttcctccacaccttccccgggagggtggggggcggcgagggtgatgagatcccttgcttaaccaagggcccccagatctctactaaagaatttgatagagtgaggctcagggtgcacccccgcctggaggcgtccacggcccctttaaggcgcag

SEQ ID NO: 39072 - DNA, 450 bp, Mus musculus
  source 1..450: mol_type = other DNA
tctaggccagccttggatacaatagtgtttgagtccagcctgggctacctttagtccaagacgtgggttctagagttgaagtctctgccactgagctgagtcccaggcacacatatggtacatatgcatgaaggctaaaataaataaatttaaaattgagtttgagagcctggtttacatagagatttcctagccaaccaaggctacacaaaaacaacaacaacagtattactattattatccatgtaaaatcacgcattaaatgagtgtaataaacttttaaataatgtgttatacctgtaaaatagattgcaaataacttgcttttatgtggggaaagaaaagaaatattatatatgtatatttttttctttacatatattttacatatacattacaatatatttcttctacactaagagatatatatatctcttagtgacccgactt

SEQ ID NO: 39073 - DNA, 309 bp, Mus musculus
  source 1..309: mol_type = other DNA
attgtatattttctttatttacatttcaaatattccttcataggaccaagggcctctcctcccatttatggccatcctctgctacatatgcagctggagccatgtgtagtccctgagagctctcttggcatccacaattgtgtctggaaaaaaaaagatttatttatttttttaaggataaaaaagcaaagcaaagtgtgtgtgtgtgtgtgtgcgcgcgcgcgcgcgcgcgttcgcgcgcgcccgcgagttccagcaccacttttgcctgggctgggtggccagccattggttgggttgcaaaggggc

SEQ ID NO: 39074 - DNA, 292 bp, Mus musculus
  source 1..292: mol_type = other DNA
tgcttaactaaatgttattggcattatatacagtggttaagagcactgtctgctcttccggtggctcacaaccagatgcttctggtgtgtctgaagacagctacagtgtactctaaaataaataaacaaacctttttttaaaaaagaaaaaaacgagttttgtttatttgttttgagacaaggctggccatcacagagatctgtctaaaggtgtacacctggcagaaaataagttttaagttttagttctttaggccccgccccaggcccccgcgctgcagtgcttgctcct

SEQ ID NO: 39075 - DNA, 494 bp, Mus musculus
  source 1..494: mol_type = other DNA
gtgtgctgctgccgcagctgccaccaccaccagacaccaccaattattattgttcaattattattgtatacctaagtgggaagtgtctgcaggtcccccagattcagggacccggactttgcttagctatgagtactgctcaccgagtcacacagaatccgtgacaaagctagtggggaggggactgcatccttacccatcagcgggacctgggatctggagttgcaccttctccaacccgggtcagcaggggcacagcgtggaactgcgcaggcgcgggcgggttccgcacagcgcaacagcgggcgcgcgcaggagcgagggattccctcccgagctggaactccggggagggcggggcgggatcccctcccgcgaagcccctcagaacgcagccttggggacccccgagacccccagggtcacactatgggcaggtggcaggtgcacgaggccctggagggcgccaggcgggtcccggaggcataaattca

SEQ ID NO: 39076 - DNA, 349 bp, Mus musculus
  source 1..349: mol_type = other DNA
atgcatgcaaaattttaaatggagaatttttaaaagtatgagggcggtaatcaaaagatgctcatctccttttcctccccctttttaatttaaaaaaccgttgaattgctcatttcgaaaaaatgggcaaaggatatgagccaatctttgttaaattcatggggcccaggtctcggaacacaggtgtcccttccttcaggaagcccgtcctccagctgggtcaggtgttaagccacagctgtcggtatcagtccctgagtgagtcaatgtctgtgggctgagtccacccacgcttacagggagggcgtcctacttgaagtcaagaccccgctctaactcctccggggag

SEQ ID NO: 39077 - DNA, 424 bp, Mus musculus
  source 1..424: mol_type = other DNA
ttctcaaagctcagaagaagctgggacgctgacacaccggccaggaatgcagtcgagtctccctgtctcgccactccacccgccaccccatgcgctgcagtcctgctgggagggggcgtgggcacgtcccccaaatcccacgtgcacgcgccgctgtttacttgggccgcggagcagacagggaccgaccagctgcacctggaaccgtgaggaatacttcccccaggctctggggctctggggtccgaggctcctcccatgactaagatacactctagctttaaaagtacaatcgagaattcttacctagcttttgcaagaatgctgcaaatacaggcaccctagatccgagctagcttgcgtcccgagccacggcccagcaggacttggatgcttccgggtgcggctccaccccttggatcca

SEQ ID NO: 39078 - DNA, 324 bp, Mus musculus
  source 1..324: mol_type = other DNA
ccagcaggactgcagcgcatggtggcgagacagggagactcgactgcattcctggccggtgtgtcagcgtcccagcttcttctgagctttgagaatccaccctcgcgcgtgggcgagaaactctggggctcgccctttgtgggcttcaaaactccaattcccagataactcgaaggtggctgcctgtcttgcttcttaagtactaggattagaggcccctttagacagataacccggggttcactcaggcaagggtgggctcaggggttcttcccccgtccaggacgtccatgatcttctgggcggcgcctcgcccattcggga

SEQ ID NO: 39079 - DNA, 583 bp, Mus musculus
  source 1..583: mol_type = other DNA
cagaagttcggggtcatcctaaacgacacaaaagctttaaacctttctgtgctacatgagcacttgctcttgaagaggacccagttcagctccttatacatataaagtaagttaaataaatgtaaggcctgtaatccaagagtcaggcctaaatagttttaggctacataaagttttccagtctatactgggatacataaaaagaccctttcttagtatggatagtacatagctcagggctagagccctgcctaaaatcccccagtgaggggctgggggtgtggctcagtggtagagcccctgcctagaatcccccagtgaggggctgggggtgtggctcagtgggagagcccctggtatttagtccttattacagcaataaacaaaataacaacaaaaatcaacaacaaatatctggtgctgttccttggtccctagtagacattcattaaagtaagttaattattttagcctccgttcaatagcatataagtgatggatgaggaactgacatttccgaaccctaatgactgaggtccccgccttccctggggaggggcctggaggggcgtggcctgaaggg

SEQ ID NO: 39080 - DNA, 359 bp, Mus musculus
  source 1..359: mol_type = other DNA
tgttgtatttctaataaggcaatacaaccagaatgcccatcctacgtgtgcatagcatgtccaggacccgggttcgcgagaactgtcagcaggtcaaggccgccgatctcaaaaaattaattgaaaatattaattttttaaaaggctaggaggtgcacggatttcagtgaattccaagccagctggagagagtagtatcagtgaggttacccctctaagcctctcccagcagtgctcaggtgtcacatggacactgccatccgtgaaccacggccatcacacaaggcctcatcaagcctggctgcggtggtcgggaccccgagtcctgtccgtcaggatcccgcgctgtcctgggagcc

SEQ ID NO: 39081 - DNA, 312 bp, Mus musculus
  source 1..312: mol_type = other DNA
tcaggtgggttagccacaagctggggccagccacccaggctatacctcatgagatggctcatggaaggaaaggacttcctaccctgctcctcttcaaattaattaattccaacccatattaataaatgcttaaaaacacgtgcttcgaggccagcctgtactacagagtgagttccaggacagccaaaaaaaatcaagacggtctccaatttctctgtcaatgaactctatcgattctctcggcgatcctcagcgatgcctcgggcaccactgccaattttccgattggcagagtgacgggaggacgggtca

SEQ ID NO: 39082 - DNA, 669 bp, Mus musculus
  source 1..669: mol_type = other DNA
tacttatgtgtccgtatgtatacacaaatgcacgtgtgtgggtgcccacgttccatccatgcatgtgaataattcccatgtcaagcttggcagctagcgccctcttcaggttgtaattattaaaacaatattttttggagatttttatcttcatgtgggttctggaaatcgaacctgggtcctctgcaaaagcagtgtatgtatgactggacacatgtagaagtcagaaaacaacatgtgggagtccgtctctgtccaccctgaaggtctcagggactgagccttctcgaaggcccccagataaagttttcagaagttctcggaacccgaatgctgcggcagagggcgtggcctgggcgcctgcgggggcgtgcgttgcctccatcggccccgccccgcctctagaccacaggtttctcaatgtgtgctggcggagggcgcggcctgcgcacctgcgggggcgtggctttgccctgccccacctccctcaggagcctccgggaaggcggcggccgcgcagcgggagcagcccggtctccgcgcagcgaggcggctcgggcgggcggccgtcaggtgggcacgggggacggcggcggctgcttcgggattcccgagggggccagggacctggtggccgggatgagcctcggggtccccgcggagccccgc

SEQ ID NO: 39083 - DNA, 553 bp, Mus musculus
  source 1..553: mol_type = other DNA
cccagcagtgcacacactactgttcaatactccagttccagaggatctgatgctataaatctttaaaataaagaaaacccctcttacttatgtgtccgtatgtatacacaaatgcacgtgtgtgggtgcccacgttccatccatgcatgtgaataattcccatgtcaagcttggcagctagcgccctcttcaggttgtaattattaaaacaatattttttggagatttttatcttcatgtgggttctggaaatcgaacctgggtcctctgcaaaagcagtgtatgtatgactggacacatgtagaagtcagaaaacaacatgtgggagtccgtctctgtccaccctgaaggtctcagggactgagccttctcgaaggcccccagataaagttttcagaagttctcggaacccgaatgctgcggcagagggcgtggcctgggcgcctgcgggggcgtgcgttgcctccatcggccccgccccgcctctagaccacaggtttctcaatgtgtgctggcggagggcgcggcctgcgcacctgcgggggcgtggctt

SEQ ID NO: 39084 - DNA, 323 bp, Mus musculus
  source 1..323: mol_type = other DNA
tgtagatcctgggagagtcacggctcccaagaacagtgcttgcctggcatgcatggttctgggtggcatagttagaccctgtggcaagtaatccagcctggactacatagggtttcaggctagccctgtctacagagtaaggcctctgtaacaggcttggggcctgggtcccggcgaagggccagctgtcccccgccagctagactcaaggccatggggctgggcaagctgcacgcctgggtccggggtgggcacggtgcccgggcaacgagctgaaagctcatctactctcaggggcccctccctggggacagcccctccca

SEQ ID NO: 39085 - DNA, 414 bp, Mus musculus
  source 1..414: mol_type = other DNA
aggccagcctgggctacatagtaagtttgaggccaacctaacgctatcagagaacttaagtttgggtcatcattatcagccagaaacaggctgaccctgggtcctgggtgacccttcacttagctgagacagtgagtgtcaggttcaggtgtggtagcaagagatagatggatctctatgagttcgctgcataaaaataataataataataataataataataataatttgagaataacaagtgtgtgtacctgtgcatacctgtgccaagcatggtggcgcacaaagcagaggattagaaattcaagccacggacttttatttaaagccggcgctccggagcgcctgagaagcaggtgggcggggctccggagaggcaggttctcacggggcaccagcgcacactgcaggctg

SEQ ID NO: 39086 - DNA, 236 bp, Mus musculus
  source 1..236: mol_type = other DNA
gtttctctgtatagccctggctgtcctggaacctctgtagaccaggctggcctcaaactttggagggaggaggttgaaaccctcccttctgccaggaagtggctgagcacggcatcgtgggcacactcggcgcccaggccctggccctgcgcagaataggcttttctggaagcacataggtggctcctcatctggggcctgcagagcctaggttgagagtctgactaacagagggt

SEQ ID NO: 39087 - DNA, 275 bp, Mus musculus
  source 1..275: mol_type = other DNA
cataagtggtggtaactattattgattacaatatttcatcattacagggctgtgtgctggggtgtagcacgacgaggcctagaactgagcgccttgacccaagccgaggccacggcgtgccgctcacccccgagcctgggtccgggtccggggcccacagctccgccggccaggcccgatctgtccgcctgcttcttgaaagccaggaggcgggtccaccgagccccttccttgaaaaaaaataaatttacgcgtcaaacggaattttcctaaat

SEQ ID NO: 39088 - DNA, 396 bp, Mus musculus
  source 1..396: mol_type = other DNA
gccaagagttcgaacccaggagctctacacgcgtgctagagacgcacgcgtatatatacattaactaatataaaataataataatgactttaattcagatctctgtgagttcgagatcagcctgatccgtgagaacttgtctcaaaataatactgacaataataaagtaagttttaaaagctttgtaaccaaggtcctcctggccagcgagcacttggccgcgccataccgggtctccgaggctccgagcccaaggggtccgctgcctggcggaagtgagccggtctctcgcaatttaggaaaattccgtttgacgcgtaaatttattttttttcaaggaaggggctcggtggacccgcctcctggctttcaagaagcaggcggacagatcgggcc

SEQ ID NO: 39089 - DNA, 312 bp, Mus musculus
  source 1..312: mol_type = other DNA
gggttgctgtggactcccaccccctcctgtcaggggcatccagtcctcgagagcagcatcccgggcgcctgcccaaagggcggggacacacgcaggagaaccggccgagcgggcgccactgggctccagccaggcctgcgcggggccacgggcagggagctggggccgcggggccaccaccaggggcgtgcggtggcaggtggggccactgacctggccccccaaccccagtatcacgctgcagaggctgcctgagaaggtctcactgtgtagctctttccctagcttggtggctttcagatcaggctgcat

SEQ ID NO: 39090 - DNA, 262 bp, Mus musculus
  source 1..262: mol_type = other DNA
ctaatattgtaatttacatttgatacaattttgacgaaaattgtgctaaagtgccagggtctcctgctgtagcaccagcctttaattaatatctgatccgtattttatattttaagttactcatttcttgtagacgcgtagaaatcagaggacagccgctgacagccctagaactcgcgcatgcgcggcgctccgggagacagcgttatatcagagcaaaagcttgagtcgacgcagcgggcccttcggcttgtagcgaaag

SEQ ID NO: 39091 - DNA, 264 bp, Mus musculus
  source 1..264: mol_type = other DNA
ggaaagcagctacccttagcagtggtctcagttatcagttcacactggagcctcctaatattgtaatttacatttgatacaattttgacgaaaattgtgctaaagtgccagggtctcctgctgtagcaccagcctttaattaatatctgatccgtattttatattttaagttactcatttcttgtagacgcgtagaaatcagaggacagccgctgacagccctagaactcgcgcatgcgcggcgctccgggagacagcgttata

SEQ ID NO: 39092 - DNA, 237 bp, Mus musculus
  source 1..237: mol_type = other DNA
gtgtgccaggcagtaaggggtttctctgcgtagccctggctgccctgccgcctgcggcgtgcgccacacgcccggcttagtttttccatttttaaacaaaggttgcaaaaataggaaacctcttatgagattaagcgagggcgccggggattccaagcctgggagccaccatgcccaaccctgggggcggaactcaggagctccggactctgtgcccatccggacctctgctgaggt

SEQ ID NO: 39093 - DNA, 445 bp, Mus musculus
  source 1..445: mol_type = other DNA
ctccccagataatatcctggttgtcctgggactcattatatagaccaggctgatctcaggaacttccaacatggagtactgggattacagtgtccccaaaaaaaaaggctttaaaaattttttttgtttggttttggttgacagggtttctctgtatagtcctggaactcactctgtagaccaggctgacctcaaattcagagaaaagaattttatgtagttgcccagtgccacattaaagtgaaattttcttagtatacgtcccctcagtgagatgtccaccacttctcgcttggggcgtgaggcgcgggatcccgatgctaaggtatcaccagggccggggcttttttgcaccctcccgggtcatacaggtccctgggcagcgggctgggcggggaaggtcgagtttgacctccgagactggccccgccgccccagtgggctc

SEQ ID NO: 39094 - DNA, 393 bp, Mus musculus
  source 1..393: mol_type = other DNA
agataatttttattaatcccacatatatgtctgtgtgtatacatatatatttatatatacatatacacgtacatatatgtatacatatatatgtacatataggattaaataaaattatataatatatatgtgtgtgtatacatctcagagaaacatacaccttcaggcatacacataatattttttttccgagacagggtttctctgtgtagccctggctgtcctggaactcactttgtagaccaggctggcctcaatataaatcttttaaaaagacttttctatttttgtattttataatgtctgaagacagctacagtgtacttacatataataaataaataaatctttaaaaaaaaaaggacaggtcccagatggtgccaccctgcaggc

SEQ ID NO: 39095 - DNA, 559 bp, Mus musculus
  source 1..559: mol_type = other DNA
cctaatgtctttcattgcaagaaaagcctgggatccccaggactcaggctgaagggattatcatgaattcagcaaaaccaaaacaatgctctttgctttggtgtgcaacagtagataccggtgccacatcattcactgctgcagttacctagtttcattacaggctgcagcatatggcaagtgcttaattatgcgtaggttgcttgaatcattgatcacacatgctatgatagaagatggaacatacaagtttctataggtttctataggttataggtgccatatatcacctcatgaagccctgggttcaacactcagtgctgcatagacctgtaaattttacttcaaacaaattatcaatgggggaaatggaatgcccatttcacctcagtggtcttggccaaggcaatgggcagcgactcgcacccggaccctgcgaagtgccaagccttcgcttcccggccgaccccgcccccgcagtcacgtgagcagcgggggtacgtgacgtcacggccaatgggtgcgcaggccggcggcgccggggaattccgccgccccg

SEQ ID NO: 39096 - DNA, 279 bp, Mus musculus
  source 1..279: mol_type = other DNA
aaagtaagtttaggaaacagactcagtgtgactaatcataataaaagtttatatttattcagtggagatgcgtttttaaacatgacaagatgtattaatatttacagacattaggaacaaccaacattttgtctaaaataaaggcttgacaaagcacacaccaccgctcctggctgtgtttggtttaggtcagaggtcagaggacagttttcagaactcagttttctccatctaagacctagagatcagactcagggcagcaagtgactcattgagcca

SEQ ID NO: 39097 - DNA, 375 bp, Mus musculus
  source 1..375: mol_type = other DNA
tacccaaaaaggacatcatggtgccctctctacataggccagaggatgagcccacctgtccccaagagaggaatggggtcctgagatctcaagccccctgagccccacgcctggccctgagagcagccgctggagcctggtaagggccaggtggtgaccagaaccagctgagggctggggcctggagccctgagtctgaaggaggctggggcctgaactcttgggtctgagggaggagagctggggcctggacccctgggccacaaagactctggaatcttgagtccaggggccctggctgggtccccgaactcaggcctggctgcagcaggaccatagcttctcttgaggctctatctaggaaaaagttgtcgc

SEQ ID NO: 39098 - DNA, 362 bp, Mus musculus
  source 1..362: mol_type = other DNA
tcaggcctctcagcctgtcaagcagacttgaccggagtgcgtggcacacagtgacgcacacgcagtggtgacccactccttaatcccagcacttcgaggcccacctggtctacagactgagttccaagatagctagggctacatagagaaaccctttaggagtccttcctacggagggtcaatgtgcacctctctgacacagacagtcacacatacacataagtacaaatacagtttttacatgttagctaaaagaagcctgggattgtacaaggccagcaggcaagggcagacatggcctctgactgtcactgtcactggccccatcgctttgaagtcctgccaaggagtgtggggaggtc

SEQ ID NO: 39099 - DNA, 214 bp, Mus musculus
  source 1..214: mol_type = other DNA
aataggattattactctcatgtatgttatccagtattctatcagagtagggctcagcggctaagagctcgcccacacggtggctcacaaccatctataaggtgatctgatgccctctacataaaacaaataaacgagtctttatttgaaaaaagtgacttctagcgaatcgctaatctcgcgcgatcgcgctggcgccgtcggggacggggcgg

SEQ ID NO: 39100 - DNA, 285 bp, Mus musculus
  source 1..285: mol_type = other DNA
ccccgccccaactgacacgtgggttgcaggggcaccaggccagccaacctagagtctgggccccttagccaccagctgccagggggtcactgtcggtcaatgacgcaagtttagggcctgcaggggcctaggaggccccacaagacctaagaggctcttagcttctttgcagtgaggggagttgtttgtaagacccccccccttaaggtgggacagcctcagagtcccagcaactcaggaggctcagggggagggcgaccagcttgctccgccccctccccaacc

SEQ ID NO: 39101 - DNA, 253 bp, Mus musculus
  source 1..253: mol_type = other DNA
agtcagtgctcctctgctcttctgcttttatgaggaaaaagaaaagagagggtgcacacctgcagtcccagcatgctacagcgagaatcttatctcaaaacaactttttaaaatgtgctctgtagggacataaacccggagctttcctctgccctgctgtgaagggggagagaacaacccgcctcgtgacagggggctggcacagcccgccctagccctgaggagggggcgggacagggggagtcattggacc

SEQ ID NO: 39102 - DNA, 470 bp, Mus musculus
  source 1..470: mol_type = other DNA
acttctcctcccctccccccaaggtggggaaggaatggcgggcgcagagggaggggcaccccatccccaccttgaccagttccaggccactgctcagtcagaggaggggcgcttcccagcaaggtggctgcctctaaggggagagccggtggctcacccttgtaatcccagtacttgggaaactgaggcagaaggccagcctgagctacagtgggccagccacatgccaccttgggcatgcgtgtcaagaccgtatctgcgcgctttcccttagattccagctcgagagggtcggtccccacggctgagtggagcagcgcgcggcggtgctagcgggtccccgcgcgcgcgagggtgggaggtcctctcagggcagtgggaggtcttggccctgcgcccagcttggggggggtgggcgtggtcaggggcgtggtcaggggcctggcctccgctgccagcttcagggcggc

SEQ ID NO: 39103 - DNA, 190 bp, Mus musculus
  source 1..190: mol_type = other DNA
agactgactggtccagccccacccagcggggttcggcctgctgggttggtttcgcggaaccccgacctaccacatggcctcaccaaggggcggtgcctcaggaagggaggccctatgagagcccacatactcaagccctgagaggggcggagcctgagccctaggggtccggcccgctggagctagcagg

SEQ ID NO: 39104 - DNA, 238 bp, Mus musculus
  source 1..238: mol_type = other DNA
gtttgaaaccttcccgaggcactgtgggaaggggcagcacttccggctttaccgtcggggaccctgcctctccaccgcggtgcctgtcgggacgcgagacccttgctgcctagcagcgtctgcctgaccctggcgcattggccaatccaccaaagtcaaggcattttctggggcgggtctccgcgcctccaaaaggagggaacttcctgctaattctaaacagcggtggcggcggcgg

SEQ ID NO: 39105 - DNA, 370 bp, Mus musculus
  source 1..370: mol_type = other DNA
aggcagacagatctctgtgagcttgatgccagcctggtctaaaaacaaagctagaacaacaaagtgtgtgtgtgtaggacagaggcttcagatctcctggatctggagtgaggagtcagtaccgggcctagcatgccctgggtgccctggggcagagagaaccgtgtccacggcgccctctggtggcggacctacaggtctggcaggttggggtgcaaacctgcccggcagccacaatctgggtacttaaactgtaactaaatttcccttagagcccgaactccggtggttctagtaccttactcggggacatagagtaactactagaagactcagctctctgactcccctatgaattcatgaaagggcg

SEQ ID NO: 39106 - DNA, 320 bp, Mus musculus
  source 1..320: mol_type = other DNA
acattgtggggactccactctactctcgtgggataactgatcctagattcatataaactacttttacaactctcttcagtttctctatagcttttaaattttcctgagatactatctcctgtaagccaggctgtgcatgggcaagtttctctgtgtagccctggctgtcctgaaccaggctggcctcgaactcagaaatccgcctgccaaggcgtgcgccctctgccttttggagagggcccatccgaactgcacacctatgcaaaggtgccaggctctgccctaggtgcgcatgcgcccagtctgggcatgctctgggg

SEQ ID NO: 39107 - DNA, 377 bp, Mus musculus
  source 1..377: mol_type = other DNA
gccctagcaaccctgtggcctctaaggacttcagagtcagccaacagaaacgtttgccggttatggaggagttcaaggtcatcttccgctacagctagccttcgatccatggtccaagaagatagatagatagatagatagatagatagatagatagatagatagatagatagatagagaccaccctctactacatagtgagttcgagactagcctgggctacaggacagaatctcaaggactcagaagtggcgggtggggaccaggagctccgcctccgagacgcgggtccaggaaacccctggggcggacgggtggccccgggggcccgggggcggggaggcgggaggcgggcgccgccccgactgacaaaagtc

SEQ ID NO: 39108 - DNA, 303 bp, Mus musculus
  source 1..303: mol_type = other DNA
gaaggaaaggagagcacttctcttttcttttttgatttatttatttattatatgtaagtacactgtagggccaagcctggtaacctgccaggcgaggcaggcggatttctgagttcgaggccagcctggtctataaagagaaaccctgtctcttttttttaaaaaaaaaaaaaaagaagaagaaagaaaagaaaatgttaagttctttagagtgaacttcctgcctcactggttccccttggccagccacgctgggtgactggtccaaccagtgtgcacgcttcatctcagggcatgggtgga

SEQ ID NO: 39109 - DNA, 376 bp, Mus musculus
  source 1..376: mol_type = other DNA
cattagaagcgaggtcgatccttctttgctgctgtgcacaccaggctagcttgcccttgagttccaggaagtctctcgtgtctggccacctccccagctctgggtgcgtagatccctgcatgttgtctatgcagtgtatgcagtatccgcagaagaactcagaagcagtcagtgctcttctcttagtttttatttctgagacaaaaaaagaaaaagtccttgaaagcgctgggacaacaggtgtgtgcttccaagaaggctacttgccctcttggtcacacatactcactcatttaattgatattttgtggctgcatggctagcctggcgtcttagttcctggtccttgaggttccagggatggggacaaagttcc

SEQ ID NO: 39110 - DNA, 249 bp, Mus musculus
  source 1..249: mol_type = other DNA
gtttctctgtgtagccctggctgtcctggaactcactctgtagaccaggctggccatttattttatttatatgagtacactgtagctgtctctctggaagagcagtcagtgctcttaaccgctgaggtctaggtttacgtcaagttgacaaataacctaaccaagtgcctggaatgttctggcccttgggccgggagggctccagctgcctccagtcccgtctgacgcgggcaaggggaaggctatgtg

SEQ ID NO: 39111 - DNA, 310 bp, Mus musculus
  source 1..310: mol_type = other DNA
cctactaggttataaaaaacaacatttaattgtggctgcaggcatggcacaggcagagctgagagttctacgtcttcatccaaaggctgccagtggaagactgaccaaaccatcacactgacttatattttttattattaaaataattctcattgtgtatgtacatggctctgttactaagggacatttgtaaatccagaattggagggctcacctgtgatccagatcttgaggctagaagacacaagtttctgacctaagtcttagataggagatctctgagttcgcctggtacaagtcccagaaagtt

SEQ ID NO: 39112 - DNA, 479 bp, Mus musculus
  source 1..479: mol_type = other DNA
ctggggtagtctagaacaatcgttctcaacaccatatcagatatcccacatgtcatatttacattatgatatttacatgtcccatattcacattatgattcataacagtagcaaaattacagttataagtagcaatgaaaatgattttatgattaggggtcacccggctgatttctgagttcgaggccagccttgtctaccttatttctttttttaaacagtttcactgtgtaactcagacgaggatttgtctacggtggacccggctgacacaaagtgctgtgattaaagacatttgaagcctgccccccattatttttaattaaaaaaaaaatccgggatgatccccacccgactcaggtgctgggatgacaggtcgtcagggtcgttcactcatcaaccagcccggcagacgtgcttggctgtgtgcgcctgcccagcaggggaccgccctcaatgggccgtccctaggcggcacc

SEQ ID NO: 39113 - DNA, 466 bp, Mus musculus
  source 1..466: mol_type = other DNA
actaatggtgtggaacacctttgtgtaagattattggccacatttttactgattctgaatcaaatcgctaattagctttctttcctaatgggtaatcagtcagaaaagtaaatgtcatagttcacttctaaggggtacttaattaagattccaaagacacttagggaatttgtctcttagggcactaagttacagtgtaagaaaatgagttctaatactggattatagccagttataatgaaatattaaacttaaaagacaaatattttccattgtatttgctgctctcgcctgtaactccagtttcaggggttccaccattcatgagcataaaaaattgttaaacttttacatcttgagaagtgtatatagccttgtcaaatcaagcacaccttgtacaagtcccacgtctcactgagcactcagttacagctgtcatgtgattggttactttgaagcagtgcat

SEQ ID NO: 39114 - DNA, 525 bp, Mus musculus
  source 1..525: mol_type = other DNA
attcttttaaaaaataaaccctgcatgctgatctctgagttccaggaaaacctgtggcagatctctgagttcagattttaaaattttctaaataccaaattctcccccaaaacatttaaattgatatgtagcttaacatagtcattccacagtgaatatatttaatttcgtttttggaagccatacatacatagaattataatgggtcagtttgtagtaaaatttcttttaaaaattaaatgccaactacaacttgctaaacttttaaaatgtaaggaccctgaatctattgtgctaggtcctactacacctgacaggaagtagggtctttagctagaaagacggctcactggttatgaggagcatgcaacttcaagcgatcacacataattttaatttttctaatctaaaatatattaagaatacaatctaattagaacctcccctgtgcagctgcaggccagtactgggcgcagctgttcccagtctacccgggaagggcattaagctcgtgctagctgagag

SEQ ID NO: 39115 - DNA, 593 bp, Mus musculus
  source 1..593: mol_type = other DNA
aatctggctttatagaacaaaaattaagattatgaatgaaacttgttagcaagtggattttttataaataggtaaacatatgttcatctgtgtgatgagaacacaggtggctttatcagaaatatttcatattttgttgtgtggctgagtagtacattcagttacaaaaccttatggattattatatgtaatcatacatcctattaatatacacattgtttttaacatgttgctataacatgaggaaattgtattcattatttttattttttaattgattaagttattttattgattaaaattcattccatttccaaattatattgaattcagatgaaatatttatgcttcattaagtgattttattgataaagttacatgatatttgaagcctatccaccctcctaattgtattgaattctgattttggaatcacatgtaggtaattgaactagatgaacataaagatatagttgccatgcaaatatatctcgaggcaggagttatttatgagtatataattttattctgagttactgtccatgtattgttctccaggcaaagttcctgtagtgtgaaagaatagtgtctcc

SEQ ID NO: 39116 - DNA, 366 bp, Mus musculus
  source 1..366: mol_type = other DNA
caggatcctgggcggagaatctctatccatagggcagatcaagatggtgcctctccaaatgtgcagagcaaagcattgctctattttttacatgtctaaaaggcattttaatatgctaattataggacccggcctgggtttctttgagacctaacactgacagctattaaataaaaaatcagtttttaaaagatgggtgtgatagttcatacctttaatcccagcatttcatcatgattggcggcaaagtgtacaacatggacatcgctagtcttccagacttggcagtgtcaaagccagcttcaatcttggcttacaagaggactttcccattgactcgagttcgaggcctcgccgataaccccc

SEQ ID NO: 39117 - DNA, 329 bp, Mus musculus
  source 1..329: mol_type = other DNA
ctagcaagattttgctgaaacttgagaccctagcaaacacagcagcggcctagtggatatgccccatgcctaataaaaaatataaaaaataataataataataataagggggcaggccctgcagatcccgtttatcccaatcagatttttggcttagggtatgccaaggactttcaaaagtctgaagtcttactccatggcacttccgctcggggaaggctgggaaatgtagttcatgaccctcccatccccgggatgataagataacttccgctgcaagatcctctgcaggagactgcaggagactgttctccccgcaaccttcggga

SEQ ID NO: 39118 - DNA, 166 bp, Mus musculus
  source 1..166: mol_type = other DNA
acacttttcaacaacaataacaaaatatccatatttgtctttcgtgatggctccccctaggacgatgggtcagcaacagtttccagccccatgtctctatcctaggattcctcaaattgtgaataaaacactctttgcttttgcatactatttgagtctacaaaca

SEQ ID NO: 39119 - DNA, 317 bp, Mus musculus
  source 1..317: mol_type = other DNA
actgaagttctagcttttataatgcagtataatatggatgttggtattcccacagttacctggcaacagccaggtaggcctggccaggaaagggatgccttggcttgggctcgctgagggaccccctcccccttattataatcacaacagtggggcttcaatgttttaaaaacctaccctggattacagaggcagttccaggacagccagggctacacagagaatctctttgtctttcatgccattttacaaatgaataacatacctaacagctgttaaaacagctaggcggttaacgggaatggtcccgctccaga

SEQ ID NO: 39120 - DNA, 453 bp, Mus musculus
  source 1..453: mol_type = other DNA
attaagaaatggtaaagtatattttatgccataacacattggattatgtggtctgctttttgattttgattttacagggaattacaatgaagagattgtcatgagtatcataaaagtttgacatttagatttttaaaaaatattgggattcagtggcccccatacatctatgtatttgaatgattggaaatagcagggagccatgctttctgccatgttaatggaagcctctgaaacaagctttgatcatggcacagcctgtgactggaggattcagggactctgcctctgctgctgaatcaggctcctatagctgagcagttgaagttttagcttttataatataatataaaatgagacttcagtgttcttaaaaaggacacagctgcttacctcttatcccagcacccgggagcgagagacaaagggatctctcagtttgaggttcttcca

SEQ ID NO: 39121 - DNA, 259 bp, Mus musculus
  source 1..259: mol_type = other DNA
agttttagcttttataatacagtataatatgggacttcaatgttttaaaaaagcaggaaaagaaaagaaaacagtatctatagttgttgttcactgatgtcagatggggccatcctctaatacatatgtatctagagcctattagtaagtacttcttatcatcagaaatatctttggacagaaagatttcacggtttaaaatgttgagatgtgaggatggctccatccctcaaatgggtgtaacctttctaaggaaggt

SEQ ID NO: 39122 - DNA, 166 bp, Mus musculus
  source 1..166: mol_type = other DNA
gtttataaaatgaagcgggtgcctcaacaggcccatgccatcccttcccacgatggtatagtatagaatagttttatagtggatccgcctaccaggctgttgccagaggcagaatcataagccccctggctaaagggttgaaaataaaggtcaattttaaatttct

SEQ ID NO: 39123 - DNA, 313 bp, Mus musculus
  source 1..313: mol_type = other DNA
tcaagagatctctaattaaatgtttccagcccctcactaggggattctgggcagtgctcgggcagaaactctgactctgctgcctaattaggcaactgcagctgtgcagtttccctgttagcttttataatgtaatacagtatgggatctcaattttaaaaaaaaatgtatcttcgaggccagcctggactaggagttccaggacagccagggctaagttgactttcatggaatttcagaaatgaggaatccccttagttaaaaaggttcaaagctttgccattccgaagtccccagatccgctcccgggagg

SEQ ID NO: 39124 - DNA, 450 bp, Mus musculus
  source 1..450: mol_type = other DNA
gaaccatgttccttttactcagcaggtaaacactcctgttgcccagcctgacaacctgagttgggtcccctgcacgttttccccgatctctggggatacagccagaaagaagctctttgttctctatagccagcaaaaagctttttttttgaagacctagccaggcccttgcttggctccctgtgccaaggacacggagatagacacaggtgggggccatcccgggacttgagcggaggtctccccagtttcgggatgcatgaacacaccaataaatgatttattttatttatttatttattttagtattttggaaagtttatttattcactcacttatttatttatttatttatttatttatggatcatgcagtgctcgaggacgccacgagagagcgacgggtcctccggagctggagcaactacggttttgagctccgcagttagta

SEQ ID NO: 39125 - DNA, 287 bp, Mus musculus
  source 1..287: mol_type = other DNA
gcactgactgccagaggttttttttaattgtactttatttgtactcacataaataaaaaaagaaataacaaaccaaaacttgtttctcctgtggattgatcaattttggtttctttgagaaacacagaagtatatattatatactcaggtatataataattttccagggtgaaaaattttccacgtgggacgtgtcaagttcagacgtaaattcagtatggattgtacagtgcgcaccaagtacctgcgtggcgcacacacctgtgaaggccggcggacgccgagca

SEQ ID NO: 39126 - DNA, 316 bp, Mus musculus
  source 1..316: mol_type = other DNA
gagtaagttaactttggtagctggctccaattaaccactcctctgttcctttaggaaatgaacaactgtgcagatgtaagacaaagacacgtatctttggttgtcctaggaaaaccaaagcgtgctctctcttttcatatatataaaattatataatgtataaaatatataataaacatatgacacataatagatgtaacatgtaacataatatataatatgcaatctataatacgcaatgcgtaatatacaacacatatataatatttatttcaatatgcttcatttcactgattgatgacctaataaatcagca

SEQ ID NO: 39127 - DNA, 230 bp, Mus musculus
  source 1..230: mol_type = other DNA
ttaggaaagcactctatccgtggaggctgcagaggcgtccccagtccaataggagaaacctctgcccatcctatgtgatcagaagtctctggagagagaggatgtctgagtgtctcctccagatattcagtctcgggattacaagcccgtgtctgcctcagggcccaggagcctgagtcctggaatcctggccaggctgggtggccaggatgcctggggatcagcaggga

SEQ ID NO: 39128 - DNA, 271 bp, Mus musculus
  source 1..271: mol_type = other DNA
catgtggcccaactcatagtagaagagagtctgtgattcccacttaaaaattatcatttaagatttatttttttttatgcgcatgcatgtatgtgaatatcagccacatgttctcctggagttgactctggagaggagcgcacatgcaaacggttggagagtcacaacctatttgcccacgtggatgaactcttcttccttgcccggggaagggaatgggatagccagcctgctgcagttaccactccccagagggcacagggctaggctg

SEQ ID NO: 39129 - DNA, 359 bp, Mus musculus
  source 1..359: mol_type = other DNA
ccagcagtcctgaggccaaggcaggtgggtttctttgagttctagaccagcctggtgagaccagcctggtctacttccaggacagccagggctatacagagaacacggttttttttctttaagaaaggaaaagcaataggggaggcagctgtctgactgcaccctctgcccacctttctctacagctgtcttggaggagctgggctcttccttaaagtccttcaagatcgcttcttgcagccagctgaatcagtcttgcgcacgcgccttcgcatgcgtgctgacgcgcacgttgggttcgcttgcgcgcccagcccgcggcgcatgcgccgagctagcagcgcaggccgtgactcgtt

SEQ ID NO: 39130 - DNA, 307 bp, Mus musculus
  source 1..307: mol_type = other DNA
agcagtgacatcactactgtccacactgagccgctctgagtgattcttaggaatccacgatgggagagattagataactaatgtatcctccccatccagttcctggaacagtgcccagtacccaggaggtccttggtcaggagttccagactcgggggcctgagttcaaggctggtcttcatagcaagactctctctggagaaaaggctagagaggattctaacccttgcggggaggcgaggcaacccctggagctgactcactctttagcaaacagtgggaggagccctagggtcacaaaactgtc

SEQ ID NO: 39131 - DNA, 517 bp, Mus musculus
  source 1..517: mol_type = other DNA
ggtctgtgagacatcatcttgattgcgcagtgctgtgccaaccctggcctggtggacctgggatgggcagcattccttcgtacactctgctccagttcctgctggacactgtgagctccagcccctcactggggaattctaggcaggggctctaccactgagccacgcccccagcccctcactgggggattctaggcaggggctctaccactgagccacgcccccagcccctcactgggggattctaggcaggggctctaccactgagccacacccccaggcactcactgggggattctaggcagggcctctacagccacacccccagcccctcactgggggattctaggcaggggctctaccactgagccacggccccagcatctccagtttgggtttggctaggtaagccaagcagaccttgaatttgaagggctgggatcacaggcatgtgccaacaatgcccaactttgggtgtgctacctctccagtctcaggggaagggagctctgtccct

SEQ ID NO: 39132 - DNA, 285 bp, Mus musculus
  source 1..285: mol_type = other DNA
gatgccatacctggaagattgccccaggcaggggcttcgctctccccagggcctagggttaagttccagtctggttagctttctggaggcccctcccaggactattctatgccctgccgctgtttcccaagcagcttctgctgcagcgtcctctagggagctccgctagtccaggctacgcctgcgcgcacacgcacgcacccctcgcgcccgggtccgcatgctgtcctgctctcctgacgccacgcccaccaaggcgcgcagtgggcggagcagagggcgggg

SEQ ID NO: 39133 - DNA, 268 bp, Mus musculus
  source 1..268: mol_type = other DNA
acaaagcaaaacacaactattccttttctgtggtgtaatgggactctagagttttaaattgctctggctgccatatgcctgtaatctcatggaggctagcctgagctacatgaagcagactttctaattgtgtggccttgcagaacctcgagctggggcaggcgtttctggcatccacggcctctcccgggaatatgcaaatcacatcctccagtgcgggaggcagcgagcctccagcccgggggatccgggccgagtatttaggccc

SEQ ID NO: 39134 - DNA, 296 bp, Mus musculus
  source 1..296: mol_type = other DNA
agcagactttctaattgtgtggccttgcagaacctcgagctggggcaggcgtttctggcatccacggcctctcccgggaatatgcaaatcacatcctccagtgcgggaggcagcgagcctccagcccgggggatccgggccgagtatttaggcccccactctcggcgcgttcgctctaccgcgcacgcacgcacgcgcgattcttaaactagcggggccgtgagcggcagagcccgccacccccgccggcgtgagctcccgcgcacgcgcccctcgctcgcccctcgctcgttcgc

SEQ ID NO: 39135 - DNA, 264 bp, Mus musculus
  source 1..264: mol_type = other DNA
gtggctgccaccaaccttagtggtgacactctcactagaaaagcttcagcagtctcacatgggagactcctcgggtttgtgacacctcggtcttcaagcccctggcagtggtgctcacacttgagcccgccttctcccaggagacatccttctctgacattgattactgtttcaccgtaggttggtcgccacagctctggctaagcttaccctgcacgtactgcgcaggctcttggtggggcaccgccccaaaactttctgcgc

SEQ ID NO: 39136 - DNA, 437 bp, Mus musculus
  source 1..437: mol_type = other DNA
gtcattggaccgtgaggtcaccaaccaaaccagagctcagaaacgctgaagctgagagtttcctgaagcctgaatcctgtttgaaataagatctctgatggccgacaaagatctcagacctctcttagctcatgaccaattgtgcacaatatactgcgcccggcccccgcaggacgggtctagacatgctgggcgctccccggttaggacccaacctacgctgggcgcctccttgggaaaggagaagaggatggatgccagtctccaaagttgctctgcaccctcagggaacttctgggtccaggtgaatttgggcccaggtgcggctctgacccggaggctgtggaagactcccatgggttctgagctcagctatttctcaccccagggtgaaggtgggaccagacccgcccttccccagcttcttataaggctga

SEQ ID NO: 39137 - DNA, 441 bp, Mus musculus
  source 1..441: mol_type = other DNA
ttccctgagggtgcagagcaactttggagactggcatccatcctcttctcctttcccaaggaggcgcccagcgtaggttgggtcctaaccggggagcgcccagcatgtctagacccgtcctgcgggggccgggcgcagtatattgtgcacaattggtcatgagctaagagaggtctgagatctttgtcggccatcagagatcttatttcaaacaggattcaggcttcaggaaactctcagcttcagcgtttctgagctctggtttggttggtgacctcacggtccaatgactgaggccgctcttgttgctaggttcccaggaagccgagtctccacgttatcaggcggctaggccgcccggcgcctcgctcgcggagaggcccaaccgagcatgcgcagtgttgacgtgtgcgccggcgcgccgcggtttgaaaggcccga

SEQ ID NO: 39138 - DNA, 530 bp, Mus musculus
  source 1..530: mol_type = other DNA
aggtgctatggagcttttgcaaaatttcaggtctgggggtgtggaacttccctcccttaggaaggtaccacggaagtctggcagctcaggcagaggtacctgactctgaggtctgggtcctacatttgaaagggagactgaggcccagaggtatcgctggcatcagttccttggtcctgacagaggagacctctaggtccagagagaaaggccatctctctccttattactaattttaaagtttgcctttcctagaggacagaccatgcagggcccatcacattgcccaatgccctctgaggtactggggaagaggaccaggtccctttgtcacttaccgagaccagaatcatggcaggtcctcagccttataagaagctggggaagggcgggtctggtcccaccttcaccctggggtgagaaatagctgagctcagaacccatgggagtcttccacagcctccgggtcagagccgcacctgggcccaaattcacctggacccagaagttccctgagggtgcagagcaac

SEQ ID NO: 39139 - DNA, 274 bp, Mus musculus
  source 1..274: mol_type = other DNA
acttttatgagcacatcacaggcgtcacccttggcctggcactcctaggccacctagggaggggcagtaggtagtttctgaagactgtaaaggctcgaatcgacctgagctttttgaacggctcccaaaggctgaattcagactatacatggaattctctaaatgtaattaacattttcagatgtgcactttcctagctaggatccttaggcggatagcttctgcagcctcttgctggccgagagtgcgcatgcgtgccgacgccccctccagc

SEQ ID NO: 39140 - DNA, 431 bp, Mus musculus
  source 1..431: mol_type = other DNA
ttaacccttgtgaggggctagcagaaggctctgttgctaagcaaccattgcagcaagcggttcctggaatctaggtatgcacatatatgtcccttcaaaaaagaatatgcatgtgcatgcgcgcgcacacacaaatacacacacaagcatatattgttctttgtagaggatccaaattctgttcccagactcctgtaatccacataattttaaataatacaaataagaatcttaaatatttattgttgttgctgttagccacgattttgtggccagcctgggctatataagatcctgtcgagttcgagaccacccgaacctgtgtcagatactggaatttagaacacgtgttttcctggaaaacgggttcctttaaggcaggccccgccctggcccgccctcccgggtcagccccggtgcgtaaggctctg

SEQ ID NO: 39141 - DNA, 451 bp, Mus musculus
  source 1..451: mol_type = other DNA
ccttgtccggctccctaaaccggtcagggcccttccaaagggcttattagaggggagaggcccccatctgcaggtggctaaaagcccggccctccaggggcaccggaggggtgcctgggctgcgggcggggcaggctgctggctccctcctcccaggagtgtccccccctccacttccgggctgctggggagggggacggggcggcctctctctcctccctccttccacgcaggagcggcattgacgacctacgaggacctcctcccgggaatggggtggatcttggggtgaggagcctcggacgctgattcctgttcgggacccaactgtggagctccaaggagcgtgcgacgccccagcacggggagcgtttcggagccgacagcctctccccagtcgcgagcgggttcagagctggtctctgaacctttaggttccgccctctgggca

SEQ ID NO: 39142 - DNA, 355 bp, Mus musculus
  source 1..355: mol_type = other DNA
agagggtttaacgccatcctggaacaaagtaaaatatatttaaagatcaaattaaacccatttttttgttttacttactttcctgctaccaaatctagcaattctgagtttgattccctggacccacatgctggaaggtgggaactcattaaaatgtaatccaagaatttaaatccatgtgtaactcgtccaaatgttttgacaaatttaagtatcctctactcagccctgaaggtcaacggccaggggcggcgcatgtgacttcagacgcggccagtgattggcttctctggggaccaatgagatgcagtgattctccaaagtccaggctggccccgccttccgtgcctcctgg

SEQ ID NO: 39143 - DNA, 565 bp, Mus musculus
  source 1..565: mol_type = other DNA
ccctcactgggggattctagacagggactctaccactgagccatgctcccagcccctcactgggggattctaggcagggactccactgttgacccctacctagggcactaacttttttttttaatttaaaggacttattgcagtgcgcacgtaataggtgttcaagacttgttttcaatttttattcattctttgcaatgtattttgattctaaatatcgccttaatctctgttataaagtgaggcctggaatcgccgtgcctccctcagctcagtgagtgctgtgattacaggcatgagtcactacttgtaaataacagttttcccaattatttaattaatatctgtatcatgggagctcttcgaagacagacagtggttctgcctcagggtctccaatccccaggcgcaggggactggagggaacctctactcccgccctttccctccttggcaagggcacagggcaggggccgctctccctgtgggtgacgcacctagaggcgggcccgccccacagcggacgctgagttggcctggttgggcaaggccagggttgccccgg

SEQ ID NO: 39144 - DNA, 335 bp, Mus musculus
  source 1..335: mol_type = other DNA
agaaaaggttgcaaggaaactactttctatataataaatatattattagtttttaacaaaagaactagaggcatctgttgccaaacctgacatccctatttatgtcatctgtcatgtgcaacttcacgcatgtgcgtcaacacataataaaagaattgacatctatgtctaatctgaatggtcatatgccgtcacctgctccctgctcatatcatctagaaggatctgctgcaactgaccgttgctcgcatgccttccgaggcggccagttattggcttcactgaagaccaatgagatgcagtggctctctaggcttatccaatcaaggcatgag

SEQ ID NO: 39145 - DNA, 206 bp, Mus musculus
  source 1..206: mol_type = other DNA
tccctaggctcccacccccccagaaagaacacacttgttattcctttgtaagacttgttttggaagcttagtaatcttgaccgttaaaactatgtttcagccagcttccttacctctgcacttcctaccaggctcttcaagcctgagggaagagtgtttacccctgtttcttagattaagggtggagccccccccccccatttccg

SEQ ID NO: 39146 - DNA, 384 bp, Mus musculus
  source 1..384: mol_type = other DNA
ggagctgggagcctggttaccaaccttagggcagcccagatgtgagctgcagatctcctcgtgaacaccaggttccatcctccatcatccatgggagagatgggaaatcccagggcattcaccaggggaggtctccctggcgccctccatagagacaacttgtatcctaggatcagacacatgactggtgccatcagtgacgatggatcaggtcctagtcagtgagcattgagagcagggcacacagggctcccatgtacaggaattcctgctgcagttgacagccccaaggccagggcacagggcactcctcagccttgctgcttgttctagaacactgaagccctcctctgggaggagaatcaactctgctaagaagagcag

SEQ ID NO: 39147 - DNA, 245 bp, Mus musculus
  source 1..245: mol_type = other DNA
acactctgctaatacacagagactgtctctatggacgatatttctttatttacatttcaaattcattggggaccttgaggtatttgccaggcactggcagagtctctcaggatacagctacagcaggctcttgttggcatctgcctggaccttctaccaaggacagtacagagagtaagtcacactgtcccagagcgtcactgagagctagttgtgtttctgtgtcacaaaaggaaacacacccg

SEQ ID NO: 39148 - DNA, 308 bp, Mus musculus
  source 1..308: mol_type = other DNA
gtgcggagtcctgatgtaggccaaaggtgttctcaggacgcaaacgctgggcctgcggcccctcccgccccagggtcccagggagggggctgggcacgaggaccgatgttcatgccgccagcgggtggttaccacagcctcgagcggaacggccggctcgagcggcttttcccgctcgctccctccaagcacagcgcttcggcggcgccgcgcagccaatagggtttgcaatcggccagagcgaggctggccctgccccaccctgcccccccaccgcaggaaccgtggtcctgaggcgttgactcaga

SEQ ID NO: 39149 - DNA, 340 bp, Mus musculus
  source 1..340: mol_type = other DNA
taatctccaagtccgagttcaattagctatctcttcttcattcacaaaaaaaaaggtcattgtgaataataataagattattcagatccagctccaggacacatcctctgtatagcagtagtccagctggaaggggtgctgtaacctgctaagcgcggagcccaggttatgcgcaggcgcaagcgcagtgggtctgagtcaacgcctcaggaccacggttcctgcggtgggggggcagggtggggcagggccagcctcgctctggccgattgcaaaccctattggctgcgcggcgccgccgaagcgctgtgcttggagggagcgagcgggaaaagccgct

SEQ ID NO: 39150 - DNA, 350 bp, Mus musculus
  source 1..350: mol_type = other DNA
cttaaataatatttgtctggatgcaacacaacctcaaatattttatgctagtgacacactcccgtagcattaagctgggggatcattcaaagcgccttagataaaaagcccaggcttggcctccgcgagcgtcaatggagctgaagcaacttccgccgctagcacaaatccggccaggaagcagggtcttgcgctgaatcccgcgtgcgcgctcaacggaaacggaaagaggaaccagatcccttatcctcctcccattttgggtggagatgaagccatattcgccctcagaaattagccgctctcgcgagcactccgaaatctcgcgagactcgacgcccgacttgtgc

SEQ ID NO: 39151 - DNA, 235 bp, Mus musculus
  source 1..235: mol_type = other DNA
gctgctcttgcagagaaccagggtttcacaagtaccaggcacacatacatgcggtacatgtgcatactatgtaagctgtgttcgaggccagcctggtctacagaatgagttccaggacaggactgttgtcacctggccgctgtggacctgcctgcagcaggtacccagaaccatggctcgccaggatcctttctcagggatggccaggtggccactggagcccatctccggcacg

SEQ ID NO: 39152 - DNA, 228 bp, Mus musculus
  source 1..228: mol_type = other DNA
gtctcttggggaagtccccaccccaattggttaccaaatttttacctatatttaaactctgagaacacaagatattattttctggcctggatgggcccctgaccttgtgggcaggaaggccttcgagagccagggctacatggcggggccgggtggggacgcgcccgcggggcgcggccgggcgggcacggggcgcggaggggcggcgggcgggggctccggaaaaac

SEQ ID NO: 39153 - DNA, 329 bp, Mus musculus
  source 1..329: mol_type = other DNA
aaactgaggcccagggagtcggactgccttgtcgtagggacagagcatctgggacttgaactcaaagctgtttcctgtaaagagctgtccctgcgatcatggatgcttgattagagctccctaaagccgagacttacagagcgttaaacacgtctcagaaaagaagaaaatatatgctcgagcgcatgagtgttttataggtgcttaggacctgagcgacttgaccactcctgctaagggggcggggcccacctccaaggcagaccagagcggccctatcgggccagcgtggcgccgtgtattacccgccggagctggacgcaaaggcg

SEQ ID NO: 39154 - DNA, 376 bp, Mus musculus
  source 1..376: mol_type = other DNA
cctcttaaagaaactgaattggttcccatagcagtcaaacccagctgacttttgccgccataactgtacatttgcagtcctccactgatctgaagctttcctgctgagtggacagctcataattgcctgtaactccagttccaggagataaacatataaaagtaaatcttttcttttaaaatgcaaacatttatttttaaatcatgtgtatcttctcctgtctcactttcaaagtaaatacttttaggaaagaaaaagtaaatgaactctttcccagacttgcccagttagaatcagaatatctgagttttcgaacaatgtcctgacagtccagacgagctcttagcatacatctcccaagatgtcttgcgaggca

SEQ ID NO: 39155 - DNA, 317 bp, Mus musculus
  source 1..317: mol_type = other DNA
cccgcaagcttgaggccagtctacagagttaaacgctcaccagtgttcacatcttgacattagctgagcttttatcatgacttctgactttggggtgtggggacccgccccctactggtccacacagcattagtcagactaattagggtctggaaccaacaccagctgtggaaggacagctgtcctgggcatgcccctgagggcaggctgctgagccccactgtagggaaccatggggcccaagagctcagtgtgtctgacagagaacatttcctgtcacaggaaatggggctggtgggttcagaggcaacatcctg

SEQ ID NO: 39156 - DNA, 266 bp, Mus musculus
  source 1..266: mol_type = other DNA
gagggcgtgggctctccacagcacttcctgcaagatggtggcactctggggccctgcattactgcaattaaggaggcagattccagggtgcctcaccaagatacctccctatattgagggggggtctctgagtccccaccctggggatgtccgggatcaccccccccccgccactttgcagctgcagtactgggggccgggccgcaagctgtccgtctgctcttggccggagccgcctccccccgcgggcgcgggcatatgaggag

SEQ ID NO: 39157 - DNA, 424 bp, Mus musculus
  source 1..424: mol_type = other DNA
agctccatgggctccagaatcctgggctgcctgggcaggggggggtggccccgggggttggcccttcatcccacccccccgcgctccaggactcagcgcgggcgggcgggcaggcggcggcagcggccggcagcaaggaggcaggcccggctggggacacggagccgccagcggctgccgctcacaggggaccagagtgtgcggccaggccctcccaccgagagccggcgggccccgggacaccccaccctcggactgaggggttgaggactcccggccctagcctcatccagggcagggccaaggctctggggggaggggggggaagggggcggccccctcccccccagcaggccctcccctacccccagtgccccccccaggccggcccggctaggggagggggcgggggccctttcctggg

SEQ ID NO: 39158 - DNA, 196 bp, Mus musculus
  source 1..196: mol_type = other DNA
tggaacttcatgttttcccaggaaattctctgtgaggccagcctgcctcttaataggaaaaaaaagtcttaagccttgttttgttcctttgtaacccgccgaggcgcccccaagatggcgcctccagcttagtatccacctggggattggctgggcgctgcgcgatcccacccctccccgatgattgggcgacttc

SEQ ID NO: 39159 - DNA, 456 bp, Mus musculus
  source 1..456: mol_type = other DNA
ggctcgcgcctgcaccctcgcaggtgtgcgcgcgggcgggccgggatggagcggagggcggggctccctcctctgaagccggccccgccctcctgcccattgactggacgctgccgccctctggcgggcttcaggaaaaccgcaggactgagagcggagcggctcgctgaaagcgctccacaggaaccctgaggactcaagctctgtgccactgctcatgggcactattggcacaggttgcaagccttggtctgtccacagcatccgtttgtaagacgaatcacaaaatactgtttcgcccccacccctccgtgctgcgggggcagaaggactgtatagatacctcctagtgtggccccagcaagccgtgggccagggtattttcccttccgaagggggcggaccggccctgtggtttcctcccggggtgacttccggcagggagggctggccccc

SEQ ID NO: 39160 - DNA, 253 bp, Mus musculus
  source 1..253: mol_type = other DNA
ggagggacagcaggcaccctccctcaggcaccctccaaagtcacagggagaatgttgccccactttgaccttcagcttcttagcctagcaagggaaagagcccctctctcccagtcctttctcttccgggtcagggctggcccatggaggagagaccttcagagagggttctctcccgctcaggcaaagaggagccatggctggcagccatccgaccaggctggacaggtggacagcagggatataaagccgg

SEQ ID NO: 39161 - DNA, 186 bp, Mus musculus
  source 1..186: mol_type = other DNA
gtcctagaagagacctgtcttaggcacgtgctggccctgaccttgagtcacctatccacttctgtgacaggattgctctcatagattgtacaaagcagaatggggcataccgctccagggagtcgggaccctcgtgacttccaccaggaggttttgctcttgcgcaagcgcagcaagggagagtcc

SEQ ID NO: 39162 - DNA, 294 bp, Mus musculus
  source 1..294: mol_type = other DNA
ctttgtacaatctatgagagcaatcctgtcacagaagtggataggtgactcaaggtcagggccagcacgtgcctaagacaggtctcttctaggactgaaagggctctctgtgtgaatatcattgaatcagacaaagaaaattcaataaaggagcggccccggagaactgcgcaggcgcctctcctggtcccggacaccgcctccagggcactggtgtctgcgtggagaaactcgcggagccccgcctgactcccaacacgcaggcgcgagggcgcgtgccctgcgcgagagcac

SEQ ID NO: 39163 - DNA, 325 bp, Mus musculus
  source 1..325: mol_type = other DNA
tttaggtcttagacctagggatcagagaagacattgtaacacattatagtctcccttgggaagtcagagtctactgtggattattcccagcatgcttctggttgctggtagctctcatcagcctcgtcaatggtgaggcaatattgagtcctacttaaggtttgaggagccctgcaatgcggtgagggcgtggtccagctcagtaagtggctaagatttcgtttctgagatactctaaggggtgtgcagcgcgagccgtcacaccccgcccccagcagtcagctactctgagggtttgagacgacggcagagggacttcatctcc

SEQ ID NO: 39164 - DNA, 455 bp, Mus musculus
  source 1..455: mol_type = other DNA
ctcctccggagcacactgctccagtgtggaggtgggggtacctccggccgcgttcccaggacagctgcagtgggggctcccgaatgcattctggtcccccagctggactgggtctatcaggaaggcctctccacaggagtcgagggtacagccgcctccccatttccgatgctgggaaatgtttcccccccacccctggacagctgccctctttcaggctcgggagactccgcccccctgcggagaagactctggtactgagtgctgaagacttaagttcttctgacttagagcctgggtcccgcgcggcccctttaagccaagagccggccggtcctcagtggctgcgcgccggcaagcgtgtgggcgggcacagtgtctccatggcgacgcggcggtgacgtcgccggccggggggcgtgggcgtcccggccccggagtgcgatattaacccg

SEQ ID NO: 39165 - DNA, 344 bp, Mus musculus
  source 1..344: mol_type = other DNA
tctcaggggttgcacccacccacaatgggttggaccctatagtactgcactgacttgcctacagggcaatctttttggtacttgtgtcaacttcatatgcctttgatccaaagctgtctatgcctcagagggtatgtggcacatgctcttaagatttttacacatctttcctcaggtgtgaaaagccatagggctattcgcctttcctcacggccacaggccacgcgggttgccagtactgcagagcgcgctaccctgcggggccgcgtgttgattggccgtagtccggccacccgacagcggaaaggtgacatcactagttctcttgcaccgcccctgccgtt

SEQ ID NO: 39166 - DNA, 263 bp, Mus musculus
  source 1..263: mol_type = other DNA
aaggccagagtgcctggtagctttgtacacctgtgctgccaggccggccacaccgtgagtgagcgtgttcctcgcgcgcactggctgcagcgcagcaccctgaaccgcgcacaccctactgcgggcccgcccccggccggcttggagccaaccgtagtccgccccgcgaccaatgggggcgggcgcggcggggcctgacccgcgcgcggcggcagcagccaataggcttaagcgcagggggcagtgcttgcgcggaaggccgc

SEQ ID NO: 39167 - DNA, 357 bp, Mus musculus
  source 1..357: mol_type = other DNA
aagccttagtgttggactcaggagtcagaggtaggtagatctctgtgaattgtgaaatctcatctcgaccagcctgtcctcgaagctgggtgggagcgtccctcctatgtgaatgggttacacacacacacacacacccccgtaggtggtcaatttcctcctcggacggaggcctcccccctgcgttgggcccccgtggccgcaaggggtcccggcgggaagcggcagacgagcccactttgcggcctccatcgggggaggggagcgaggaggaggcggcgtctgggctcggccttcgccctacgcgcgagcgagcgcggcaggacggtccggcgtggcggatccacgtcctcgcgg

SEQ ID NO: 39168 - DNA, 551 bp, Mus musculus
  source 1..551: mol_type = other DNA
gccaggccggccacaccgtgagtgagcgtgttcctcgcgcgcactggctgcagcgcagcaccctgaaccgcgcacaccctactgcgggcccgcccccggccggcttggagccaaccgtagtccgccccgcgaccaatgggggcgggcgcggcggggcctgacccgcgcgcggcggcagcagccaataggcttaagcgcagggggcagtgcttgcgcggaaggccgccggcgcggggctcgcttggagcgcgcggacgctagcacgctagtccgtctatccgccggggacccgaggttgacctggtgttcagccgccggcccagggcccggaaaggcggggcggcggctctgactgccgggcgcgcggggccagagccgttacccgccggagcccagcggagaagggagggggccgcccccgcgcacgcgcgccgcgccccgccccgcctgccccgcctgctggactctgcgagggaggagggaaagggagggggcggcgccgatggcccccgtgccgcgcgccccgtgacggcccccgcgcgcgccggggg

SEQ ID NO: 39169 - DNA, 308 bp, Mus musculus
  source 1..308: mol_type = other DNA
cggatgccaagttggacctgggctgggccttgcagccactgcacctctttcacatagatctgatggtgcctctgaggcatgaagatatgcatttgagattttataccactaaaaaactaatgtgtctacaaagatatacatatacataacaaagccttagtgttggactcaggagtcagaggtaggtagatctctgtgaattgtgaaatctcatctcgaccagcctgtcctcgaagctgggtgggagcgtccctcctatgtgaatgggttacacacacacacacacacccccgtaggtggtcaatttc

SEQ ID NO: 39170 - DNA, 455 bp, Mus musculus
  source 1..455: mol_type = other DNA
agtctatgtagaccaggctggtctacggagtgagtgctgggattaaaggccctgccaccacaaattttgagatgcaaagttgatgagcaccttagatttatttgttgtactttcagaaaccttttactagtaccaacattttcatggcatcccctcactgttttatgacccagaggtggtttcctgaaacagtgtatggacaaagtttgggggccacacacctgtaattccagcattaaagaatcaaacctcgcaagcattcattcatatgtatgttggttcaaagtttcacaaaacacaaagttttctaaagaaaaatgctgcttcaggaatgcctccaaaggccatctttgccactgggaccagaaggcgggcggagggctgggcggggccataactgtcaatcttggtgcctcgtgcttctccctgggcaaggggcgtggcaaggggagcgc

SEQ ID NO: 39171 - DNA, 509 bp, Mus musculus
  source 1..509: mol_type = other DNA
tgcaaagttgatgagcaccttagatttatgttgtactttcagaaaccttttactagtaccaacattttcatggcatcccctcactgttttatgacccagaggtggtttcctgaaacagtgtatggacaaagtttgggggccacacacctgtaattccagcattaaagaatcaaacctcgcaagcattcattcatatgtatgttggttcaaagtttcacaaaacacaaagttttctaaagaaaaatgctgcttcaggaatgcctccaaaggccatctttgccactgggaccagaaggcgggcggagggctgggcggggccataactgtcaatcttggtgcctcgtgcttctccctgggcaaggggcgtggcaaggggagcgccacgcactcactcgaggcccggaagtgctcgaacagcttcgaggcttgggggtctctacagaagaagccaccgctctccacagccgcgtggagtccagggcgggtaggagagaagagggtaaggcacc

SEQ ID NO: 39172 - DNA, 309 bp, Mus musculus
  source 1..309: mol_type = other DNA
ttctggaatttaatgcagagaccagtctggccttgaattcacagaaagcttttgaaatggcattttgagcagcagtgaatgaattttctgctggaacttcccaaaagccagccctggcagctagagcactggctcacaccctaggggcacaaggtttgccaaatctatcagtggtcaggacagagctcggttttctcggttaaatcctggagtctgcagtccaaagaaacgcatcctgaggtttctttgagacgcctgtagggaggagggggcggagaccgctgcgtccagcggcccctttaatcgggg

SEQ ID NO: 39173 - DNA, 265 bp, Mus musculus
  source 1..265: mol_type = other DNA
gtcccttaatccctgaggaattcattgggaatttggatagcctagactagggtcgccagagtctagaccctcttttagattaagaggcccaggctcagcccttctccctcaggaggtgttaactggggccagacacaacccccaggtttctgccgcaggtcttcagtcctgagagatgggaagagggtcaggcagaccggctagtctcccttggcatctctgtcagagccccgcccagggctgtgtggcctggcccatataagca

SEQ ID NO: 39174 - DNA, 327 bp, Mus musculus
  source 1..327: mol_type = other DNA
ggcaagagaactgttattattgttttattaatttttaacttctgcaggaagctctgtccctgccttccttggcagggtcacaggtagagaggtaaatcagagtgactcacagtggcgtccaaatacctggaccccaattttttagatttctaattctttggacatagttaggtttcttattctcagacacaaaaaccctgaacccaagactcaagggctgttgggaatggatggctcagccctgggatcctcagcactctggaggctaccagtctgtgagccggcctggctcagaggacctggggctgcagtccatgtaggacagcg

SEQ ID NO: 39175 - DNA, 352 bp, Mus musculus
  source 1..352: mol_type = other DNA
ggcagacatgtgctgcctgtcagcctcccatgtacagcaggctctttggaaggaagcagtcatactgcactttatgatgacccatctgtgtccgtcctagaggacacagcaggagggcctgtgactcaggcccctagctgagtttggtaatgcccttaatcggcttttggactcccagaggggacagcagggctggccacttcttttcccctttggctccctgggactcctgggtcctaagagtctgagcaaggagagcctgggcctgggctccctggtgtaaagctgcctgtccagcaggcaggaggggcaaggagttgaacttggataggaggtgaagcagtggccacac

SEQ ID NO: 39176 - DNA, 503 bp, Mus musculus
  source 1..503: mol_type = other DNA
gaaagacgttttctcttcttgccaaaataaagaggatttggtttcttttccatcttagctgaaaaaaggaaaagacgtgtttcctgaatgtatgtcagcgtactatgcgcgcacattgtgcgaacttgatattcatgttgatcctgaatgtattcgctagcagagatagaggggcaaaggctttgctcagccaatgactagttttgggttcttagcaatacgcatgcgtaattctgatgggaggaaagtttccggaagtcttcctcgaggccaggcgctccttagtcctctcagggccgccctcagaggctgcgcggctcccgccccctcgcctcgggccgctctggcccgggagtctccaggtcttctagcccattcgcctcgagtgggagggccctggagatccgggccgggaccccgaaggcaggccccgcccccgtctggaggggtctccccaggagtctccgggccaggcaagttccaccccgcacgctccatggacc

SEQ ID NO: 39177 - DNA, 321 bp, Mus musculus
  source 1..321: mol_type = other DNA
tttctccgaggacagagtaattaatgctcactctgggcagccgggttccagaagcttctggcatgggcaacccagaagcaactgggagcacagtgagccatgtgcgcatgtgcgagtcttcccctttcctttgattctggggaataaggcagggacagcctaggacccccaagtcggtccccgcccacgccttgggttgccccctgcccgcccgcccgttcttccggctcccggggcaagtgggcgggccgatctgagcagatgggcgggccaagaccttcagccccacccattaaaggcggagctccgcgaggagccgag

SEQ ID NO: 39178 - DNA, 297 bp, Mus musculus
  source 1..297: mol_type = other DNA
ccttcgttcttcattacagttatttaaggatgaggtagcagtcaaaggacaatgcactgatttctctacttcctgtgaacagtggggattgaagttagatcatttgtttttctttctttgttaagagagagagagagagaatgacaggacaactgtccaggcagtagcacttccatctactgtgctggcaatcacaaatgggtggagagaggaagcgcagctgtcagcctctctttgccacagtgggggacacacacatgccaaggtgtcagtcattggtccaatctggtattgtgt

SEQ ID NO: 39179 - DNA, 363 bp, Mus musculus
  source 1..363: mol_type = other DNA
agagctcccgggatgaacctatcttgcaacctggattgcagtttccatcccagttgacacaactggagccagtgaggtcccttccatcctccatcatccatgggagagatgggaaatcccagggcattcaccaatggggaggtcttccccccctgagacaacttgtatcctaggatcagacacatgactggtgtcatcagtgacgatggataggtccgagtgagcactgagaacagggcacacagggctcccctgagggctacaggaagtgctggaactccctctgctgctgacagcccttctagaacactgctcagagtatgttctagaacaggccttcggagaatcaattctgctatgaaa

SEQ ID NO: 39180 - DNA, 419 bp, Mus musculus
  source 1..419: mol_type = other DNA
agagctcccgggatgaacctatcttgcaacctggattgcagtttccatcccagttgacaccttccatcctccatcatccatgggagagatgggaaatcccagggcattcaccaagaagctggggaggtctccctggcaccctccataggaaggtggagccccctgagacaacttgtatcctaggatcagacacatgactggtgtcatcagtgacgatggataggtccctgtgagcattgagagcagggcacagagggctcccatggctacaggaaatgctggaactcctgctgcagttgacagccccaaggccagggcacagggcactcctcagccttgctgcttgttctagaacactgaaccacccccagcccacgtggatctgggaggtgccctcccctgggaggtcctttaagaaa

SEQ ID NO: 39181 - DNA, 337 bp, Mus musculus
  source 1..337: mol_type = other DNA
tgaacctgaggttgataattctccttcaggagctgacctggtttgcaaggaggttggtatctgttttcaaccttatcctaaggaccaagagccatgactgtgggtcatgatggtaaatttccgggagccatggcctcagccatggccttgtggatattttctagcttacataaagaatcttgagagaacattcatggtcgtaacaataagaatttgatcagtatgaattaccaatttgcatttggcactagcattttcaaaagccaaaggttcaacctacagctgaagttaatctttaaaaattcaagtgaatgtttcctttggaccttgtttaacc

SEQ ID NO: 39182 - DNA, 341 bp, Mus musculus
  source 1..341: mol_type = other DNA
tcaaccatagagctcccgggatgaacctatcttgcaacctggattgcagtttccatcccagttgacacaactggagccagtgaggtcccttccatcctccatcatccatgggagagatgggaaatcccagggcattcaccaatggggaggtcttccccccctgagacaacttgtatcctaggatcagacacatgactggtgtcatcagtgacgatggataggtccgagtgagcactgagaacagggcacacagggctcccctgagggctacaggaagtgctggaactccctctgctgctgacagcccttctagaacactgctcagagtatgttctagaaca

SEQ ID NO: 39183 - DNA, 233 bp, Mus musculus
  source 1..233: mol_type = other DNA
caacttgtaagagtaagttttctcctttcatggcttgaactcagattattagtcttggtagcaagcttatggtctgtgcttaccacacagagctgaggtctaagcccaatgctgccaagtccgcgctagcagaactagcttctgtatcctagcctgcagcttccatacagaggctcttcaggcacaagggtgaagcacggtatctgggatatatctgtccccaggggactggg

SEQ ID NO: 39184 - DNA, 406 bp, Mus musculus
  source 1..406: mol_type = other DNA
cacccacgagtgtgaggtttagtccccagcacctcataaactctgtacacatacacacattaatgataaatatacgcttttaattgaaaaaagttcatggcaaatataccatacatgagagactttatgtaaaagtaataactctcttaataagtatagatgtgaactccaaactaaagataggctgaggagagacgtctcagtggcagttaagagcactgactactcctcaaggcattgaacaagccaggtctcagtggacccagactcggaaaaaatcataatcagtcgtactgattctggagtagatcctttacaggaaagaccgtctcctccgcacgcgcgcctttaaaaggcgggctaaaacagaagggggcgtggccacacgcgtggcccttggtgtctg

SEQ ID NO: 39185 - DNA, 213 bp, Mus musculus
  source 1..213: mol_type = other DNA
agataacagactctgagcgctggtacactgagttctttttatatctgctctccaaaaccggggtggggtgcgggcttcctcccaacctaggcccctggagttatgggaaggccatacctgctggcctcccccttgccccaaggggtggggcctctcccagctggaggtgcaggcccccaactcgggggttctcagtgcaccccccagggcgcg

SEQ ID NO: 39186 - DNA, 368 bp, Mus musculus
  source 1..368: mol_type = other DNA
gggcaaagggtcctgtttgaaggacagtcatggcaaagtcccttgccttgccttttgatcaggtggcataggaatcaaaccagtttcttgctcaactccctttacgggattcttcccttgaatttctcttcaagaagggtgtctcacacaatgtaacagcctggcgcaggccacggctcggcctccagatcttggccgcagctgtccatagggtggcaatttttagtctctaaaattgggcaactaaaaggacaacttaacttgaaccttcagggttcaggacccggagccctgagcaaaactagggccaactcgggcgtgccctagacgggcgcatgcgcaataggtacgcggccggtagaactgcg

SEQ ID NO: 39187 - DNA, 349 bp, Mus musculus
  source 1..349: mol_type = other DNA
gctacagtgctcttatataaataaaataagtcttgaatcactctttctgagagggatttaccaggctggccaactcatttcttctcgagacgggagggtacttaagcagatccatccggccgggacagcaggttgaccacgcgcgctgcggctcccaccgtagcttccgcttagcggcgcgcgcagttctaccggccgcgtacctattgcgcatgcgcccgtctagggcacgcccgagttggccctagttttgctcagggctccgggtcctgaaccctgaaggttcaagttaagttgtccttttagttgcccaattttagagactaaaaattgccaccctatggacagc

SEQ ID NO: 39188 - DNA, 454 bp, Mus musculus
  source 1..454: mol_type = other DNA
aaaagaaataaatgtaatataaaaatttttttgtttttgtttttggatagccctggctgtcctggaactcactttgtagaccaggctggcctcaaactcaggcccgccttggaatgcctgcaaaggagctgtatgcaaaggatgcttatagcaggaagtgtttatgtcaacacaggagccagtgtcctggcctcagtttcctcatctgcaaattaagagccgggtaaaaaaagaccatataccatgctacttagaattgttctgtggctgtgtatatttaaagcacctcttagaataaggcacaaaaccatcaggtttcagcctctttaagggagaagctgctggctctgggacccccagaatcggaggccccctcccgggtcgctgcggaggggcggagtctggagctattgccccgcctctctcctccccagctcgctgcggggctggggcg

SEQ ID NO: 39189 - DNA, 359 bp, Mus musculus
  source 1..359: mol_type = other DNA
taatagcccaggctggctttaaacaatactcatcataaaatttttaaaatttgtttccgacttgggaaaaaaatatatatatataaaggagagaggctttctagaatgctgggaaccgaactccagttctctggaagtgtactccaacctgtttgttcaaaaccagctgctagaatgctctgagaaagaacttggacttctcagtccttgagaaatctgaggaagctcctagtgatatggatgaacatttgaggaagcaaagagcatcaatagatttgcttatagttggcgttctaacttcctcaactgctcgccaggcctcccactctggggcgtaaggcgtggcgggctcaggggag

SEQ ID NO: 39190 - DNA, 489 bp, Mus musculus
  source 1..489: mol_type = other DNA
gccagcttgctggctatggcttttgccatgtgcctagcagcccaggcactcatcagctggactgggctttcgtgggtggtgggccacagctgctgcacgcagataccatctacagcggggctgaccgctaccgcctgcacacggccgcgggtggcacagtgcaccttggtatccgccacttcgatcgctatggagtggagtgttgagggacttcattgctactaatcgccatcaagtcatggcccctatgccatggactgcaaggccaggaactcccctgtggcccatgctccactgaactacggggtagaaatccaccggggcgctttggtccgccgccaggaggcagcaccctggaggtggggcgaggccggggtgcccgccccctccccgcagggctgaagggaccccccttggagtgccctccccctggggctgcccccgccccgcgcgcgcttcctgggtggggccggggcggcttcaaaaccc

SEQ ID NO: 39191 - DNA, 181 bp, Mus musculus
  source 1..181: mol_type = other DNA
cttatgggttccaaacacctcatagggctacgaagcccttgtaacgtgctgtatgctctgcatagtaaacagttaacagcacccagaaatgtttgtcatgccagccctacaggctggatgtgatgatagctgaccgcataagtatttttaagaggcatgcgcataagagaaggcccgcctt

SEQ ID NO: 39192 - DNA, 375 bp, Mus musculus
  source 1..375: mol_type = other DNA
tgcagctatgcccagagcgggaaggctctatggttgcgtgcagagtggcttgtctagcaaccatagagaaagcgccctggtttctaacaaacgatgagtaacagatccacttgattctttgagaggcaagcctctcaagaatggccaatctagttcgctttttctaaagcgctcaagctctggcagtggtgaaactgcgattggcgaacaggttgttttgaaaccgccctaacgtctccttccggttcccgaaaggcaacaggaaagacgagggttggccggcctcttcccgcgcagcgggcgcgcgagcgctacccaatcagcgattggcttggttcccgggcccgcgcccgttgccccatgcgctagggggag

SEQ ID NO: 39193 - DNA, 509 bp, Mus musculus
  source 1..509: mol_type = other DNA
aaatccaccggggcgctttggtccgccgccaggaggcagcaccctggaggtggggcgaggccggggtgcccgccccctccccgcagggctgaagggaccccccttggagtgccctccccctggggctgcccccgccccgcgcgcgcttcctgggtggggccggggcggcttcaaaacccccgccgccccagccggtcccgccgccgccgccgcccttcgcgccccaggccgcggatcctccagacagccaggcccccggccggggcaggggggacgccccttcggggcacccccggctctgagccgcactcggagtcggcctccgctgggagccggcaaaggagcagccgaggagccgtccgaggccccagagtctgagaccagccgccgccgcagggaggaagaggaaaaaagttttgagacttttccgctgccgtggggacttcttggcactgcgctgtctcgcaaggaggcaggacctgaggactccagacagccctccaaagctg

SEQ ID NO: 39194 - DNA, 248 bp, Mus musculus
  source 1..248: mol_type = other DNA
gacaggcatttgcccattgcccaaagtcatgtggctgggtgctacctgtcccagcttctgtgtcaatgcagagagagagagagagaattctacaggaatgtttacaccctgtcccagtggccccaaggctggggccctagtgggcggaggaggggctcccgctgtgccaggcgggcagtgccaaatcccaggagcccaggggtggggggagggccggggacaacccggccctgccccctttcctagcg

SEQ ID NO: 39195 - DNA, 185 bp, Mus musculus
  source 1..185: mol_type = other DNA
ctgtgcaagaaactgcatgcactttgacctagatcgacaggcatttgcccattgcccaaagtcatgtggctgggtgctacctgtcccagcttctgtgtcaatgcagagagagagagagagaattctacaggaatgtttacaccctgtcccagtggccccaaggctggggccctagtgggcggagg

SEQ ID NO: 39196 - DNA, 349 bp, Mus musculus
  source 1..349: mol_type = other DNA
atcctaataatttcctacctgcctagataaatatggaggaatgcaggaggtcaactctacctgcctgccaacgtctaaaaaaaaaaaaaagaaaaaacactttttgtttttaatttaaagaacaagtcctttaatcccactagtgatcatacttaaactacccagagagtttcaggccagctctagggaaagtgcctccaagacacctgtggctgctgcagccagcctagggcccaaggtactgcctccgccctcccagggagcggggagcgacgccttgcaggaggctgccccgccccactcctcttgatttcgttgaggagggagccgccccgttccctcccctaac

SEQ ID NO: 39197 - DNA, 229 bp, Mus musculus
  source 1..229: mol_type = other DNA
tgcttactcatcatggcttgctcactaaaggcttgccttcagtgtgattttatggatatattctctcaattgaagttccctcatctcaaatgactacagcatgtgtcatgttgacacccatctatggctatcatgggccagagagtatctgctcttgtcaagccaaatgtaatcacgttgtacattcatctcagaaatgacctttcaggtatgctatggctcctcacgc

SEQ ID NO: 39198 - DNA, 268 bp, Mus musculus
  source 1..268: mol_type = other DNA
aaagtattcttgcaaaattatccagaacctcaacatcaggattaaaatcagacacggtgattttaagtcaccttaccagtactttcatcaagaatggtcatcattttggcccaagatatgtagtgggttccatgcagtatctaacatagtgttcatactttggggatctgttcccggagttgagtaaattaactatagtcacatagtggatttcaactatgttgaggagataaacatggcccatgtccttgccaaagtcgtgctcaca

SEQ ID NO: 39199 - DNA, 385 bp, Mus musculus
  source 1..385: mol_type = other DNA
ccagtaggcttttgtaaattagaacttttctaccatattggagttatgatttctcaagacctagacagaccctcagatgttgtctctagtactgggccgagttccagtaaaatatactcagaggctcgcatccttaaattcaggatcctcttcattgaaagactcccaaggtcgggtgagtataggcctaccagcactcaggtggtctatgtatggagctctaggctaggcaggactacatagtgaaagcaagaaagaaaaatggtctttcaacttcataggtattcattctatttcaaactaatggattatatttgggccccttctcagaggaagtgtaatgcatagctctggagcaggtaatgtcccaaacttggtgcacaat

SEQ ID NO: 39200 - DNA, 278 bp, Mus musculus
  source 1..278: mol_type = other DNA
aatactcctctgaaacagatgcagatatccacaaccaaattttggacacacatgcacacatgtagcaaatatgcaggtttgtcttcatggggattccccaacaactggagtgggggctgtccctaggcctcagcaggagagggtgtgcctagccctgcagagacttgatgtgtcaggataggctgatgtgggggcctccgccctctcagaggagtcaggatgtaaaatgatttaattaattaaataataaataaataagtgaaaaaaagaatgtcatt

SEQ ID NO: 39201 - DNA, 280 bp, Mus musculus
  source 1..280: mol_type = other DNA
gcaaagttcaatttggatgccaaggctccaggagactaagttttcatgaaactttttgcctccaaagtcacttctggagtgggtctggctttactccaagagagcctcaccacttttatcaaagctgttcagaaattctttgggcaggtggaggcattcccagaaagtctatactttatgaagactgcgcaggtgagatattacgtaactccacacctaccaagcaatttgtttattgatggataatactggtgggataatttgactcccacaggattca

SEQ ID NO: 39202 - DNA, 387 bp, Mus musculus
  source 1..387: mol_type = other DNA
ccagtaggcttttgtaaattagaacttttctaccatattggagttatgatttctcaagacctagacagaccctcagatgttgtctctagtactgggccgagttccagtaaaatatactcagactcgcatccttaaattcaggatcctcttcattgaaagactcccaagcagcactcagagcagacacaggtggatctctgtggtctatgtatggagctctaggctaggcaggactacatagtgaaagcaagaaagaaaaatggtctttcaacttcataggtattcattctatttcaaactaatggattatatttgggccccttctcagaggaagtgtaatgcatagctctggagcacagtgttggcaatgtcccaaacttggtgcac

SEQ ID NO: 39203 - DNA, 352 bp, Mus musculus
  source 1..352: mol_type = other DNA
gcaccacttccaagtttggttcgaatctgactctgacttctgtgggcaactgcactcacatgcacatacctccatacacataattaaatttttaaaataatcttaaagagaaagcccttcagaaggacagcggatacacttctaagggtcaacttgacaatcagcaatatcatatgtgtgttgttttaatagtgtctcaggatattttattgccagactaagagagacagaatgagagtcatatagaatttctggatccagtactagcctttgctctgtcctaaggctagaggtgtggccacatttaccccaccatgccagctggctaagagcccaaggtctattaagggca

SEQ ID NO: 39204 - DNA, 413 bp, Mus musculus
  source 1..413: mol_type = other DNA
cactgtgcacagcttgtatggcaatttgtgtcctgtggtaaacatggatactaattacagaagtcacctgtatcacagtgagctaccataagggtcttaatgggaactcagtaggagtctttgccaattagaagccttctgacaactggggtttcccaatattcaagctgttatttcacaaaacttctataagtccttcactaacattatgagttattctcctctagtctgtgaaaagatctgataaaatatacctggttttctacccttttccaagccatgcataggcagggaaagttgctcaccctaacctgaagttgaggataatcccagtgctcagctaggatagccagagaaactctgtctgtaagagcctggtgttgcaacacagacagagtccatctgcccattct

SEQ ID NO: 39205 - DNA, 368 bp, Mus musculus
  source 1..368: mol_type = other DNA
tttctgtgcacagcttgtatggcaattaagacacaggatgtgtgtcctgtgggaaacatggatactaattaataagggtcttaatgggaactcagtaggagtctttgccaattagaagccttcggcttcccaatatttcacaaaacttctataagtccttcacaacgttctgagttattctcctctagtctgtgaaaagatctgataaagtatacctggttttcgcaggaaagtttgctcaccctaacctgaagttgaggcagctacacagagaaactctgtctggaaggctttaagtatttcaaattaatcctaacacgtgggtgttgcaacacagacagagtcaaaggccatcttttgccccttct

SEQ ID NO: 39206 - DNA, 503 bp, Mus musculus
  source 1..503: mol_type = other DNA
tgactcccacatttttaagtgcttatgtaaattactgacgtaggaatttacatacactttccaactaactgcgcagtcagcccatgtaaatgagacatttgcatagcaaatgccaggggccgtcttgagagtgcggttcgcgcacgcgcagtctcctcggccgggccgctgtcacgtgcccagcgggcgaggcgggggcggggcgtcgcgggcggtggggggcggggtatggcgcgctgcgaagcgcagggcggctggcacaaacggcggcgccgaggctgaggcccggtggccgggcgcgggcgacggggctggaggcgggagcgcgcgcgggcggcagcgaccccacgctagggcgttgggggtggggaaggaagcgcgcgcccggcgcggtggggcggaccattgggggccacgggagcgcgcaaaccaaggggaggggccgggccgaggcggccccgcctcagtcacccggggcgtcccgcggcccctgggtcctggcg

SEQ ID NO: 39207 - DNA, 318 bp, Mus musculus
  source 1..318: mol_type = other DNA
ctcctgtgtcgccttctggagacaggtgcagcccccctcaggacagcttcagctgctctcacacccccggaatggtggtataaatatgaagctctggattcagtctccagcactatgactcccacatttttaagtgcttatgtaaattactgacgtaggaatttacatacactttccaactaactgcgcagtcagcccatgtaaatgagacatttgcatagcaaatgccaggggccgtcttgagagtgcggttcgcgcacgcgcagtctcctcggccgggccgctgtcacgtgcccagcgggcgaggcgggggcgggg

SEQ ID NO: 39208 - DNA, 369 bp, Mus musculus
  source 1..369: mol_type = other DNA
ggcctacattcacttgagctcgccagcttgcctaggatatgttggaagggtcagggtagctctccaggcccttggctccacctgtgagactctcaaaaccaacctgaataatactaattgagaaagactctgaggccgagaaactgtatctcaggggcctccgaaccagtagcctctctccacagaggggggcagtcctggggcagatcccagccttgggggtgactgggtccccctggcctcacaggtcggtgacgcggacagctggagccctgctggtgtatgacatcaccaggtgggtgcaggccgggcctgggagaggccgggcctgggtggcgtgggagaggccgggcctgggtggccccactc

SEQ ID NO: 39209 - DNA, 359 bp, Mus musculus
  source 1..359: mol_type = other DNA
tatatgatttttacacatgcatatatatgtatgtgtatatatacatacatacatatatatagtatatacacatatatattttgtgtgggtgtacatacacacacatgcatatgatttgctggtgcatgccttacccacgtttggaaaggccagtctggtaggccagccaggcagttccagaagtgaagctcataagctagaatagcttagcttctgcacagtgagctgggacagtgcctagcctgaggccagatcagtacctgggacaaagaactgccttgttctcagacctcagcacaggaaattccaggtctctggagggtccaggtacctaaaacgagataccagcctgcatactc

SEQ ID NO: 39210 - DNA, 213 bp, Mus musculus
  source 1..213: mol_type = other DNA
aaatacagcagccaatggcaaactatttgtctagccaattaatgccctgaatgttgtaacgtcagtggctactagctgcaagccctttgctccaaggtaaggtttgggacccccaagcaagggggtaaacagtacaatatatgtacgctttcctctcttttaaagggaacggagtctagtcgtggcctggtatccgcagctccggaggctcgc

SEQ ID NO: 39211 - DNA, 253 bp, Mus musculus
  source 1..253: mol_type = other DNA
gtcatctcatctgctgtagctaagctttgaaaccttgactcaactaagttggtataaacctatcaatttacaattggccagaagctcgtgccgttccctcgcgtccagggggcgggaccccaactctcggcgggagcgagacgctgctcggcgccggggaggcgggagagcaagtcggcccctagacgcctttcgcgcacgtggactaatgggaagcgccgctcggtgtgctccgcctgccgggactcgtaga

SEQ ID NO: 39212 - DNA, 200 bp, Mus musculus
  source 1..200: mol_type = other DNA
gaggcttgtgagaattaactgaggccaccacccagacagtctcatgaaggggtcaactcttgtgatatcaccttgattgatcttctcattgagattgttgatataaatactttagccctaagtagaatgctctacgagtcccggcaggcggagcacaccgagcggcgcttcccattagtccacgtgcgcgaaaggcgtct

SEQ ID NO: 39213 - DNA, 113 bp, Mus musculus
  source 1..113: mol_type = other DNA
gtcatctcatctgctgtagctaagctttgaaaccttgactcaactaagttggtataaacctatcaatttacaattggccagaagctcgtgccgttccctcgcgtccagggggc

SEQ ID NO: 39214 - DNA, 246 bp, Mus musculus
  source 1..246: mol_type = other DNA
agaccaggctggcctcaatcaggctggccttgaactcagaaaagtacagtaattaacggtgtttctttgaaaacaaacacatataaatttatttatccacaaatctctctgcagtcctgggctcgaactcaggacatcagatttggcagacctctatgtggtccaggttggcctagaagggattacaggtttggcgcacgacctagagctggttccctgcgagacacacggtggcatccgaggctc

SEQ ID NO: 39215 - DNA, 282 bp, Mus musculus
  source 1..282: mol_type = other DNA
cagggttcccactgagggccatcttatgcaagggaaatgtttgcttcatggtggctcgcaaccatcatgggatctgatggtgtacactgtacttacatataataaataaataaatcttaaaaaaaaaaagatttctagccctggattcgtgcatccgatagattttgagcttggcaggccctgcaatttccattggtcagtacaatgagctcacgtcctcctcagcggggtgagtttttgcaaacgtcggcgagctgctgtgctaccattggctagctgatc

SEQ ID NO: 39216 - DNA, 444 bp, Mus musculus
  source 1..444: mol_type = other DNA
ggtggcggcggctcggtctgacgcgggcccggcccggggccggcggctggtgcgggatgcaagcgcgcgagccagctcggctcccgggaggattccgttccgggggcgggggagcatccctccctcggcgccccgccccgaccccaagcaaaggccggcccgccccgccccttggtctggccttgcgggaacctgcacgcatccctagaggagtgcctctcaggttgagctgcttctgaagaattgctttgggaggcgcctcgtccccccacggttctcccagcccggcgggggcgggcagaagggttagaccaggtcctagttctggactcagctgcacccctacccctgccacagcccttggagcaggtggccatctgcacctggagctgcctgtgagctcctcccccttagcacagagagctttattcggaggaaaggatc

SEQ ID NO: 39217 - DNA, 334 bp, Mus musculus
  source 1..334: mol_type = other DNA
gatcctttcctccgaataaagctctctgtgctaagggggaggagctcacaggcagctccaggtgcagatggccacctgctccaagggctgtggcaggggtaggggtgcagctgagtccagaactaggacctggtctaacccttctgcccgcccccgccgggctgggagaaccgtggggggacgaggcgcctcccaaagcaattcttcagaagcagctcaacctgagaggcactcctctagggatgcgtgcaggttcccgcaaggccagaccaaggggcggggcgggccggcctttgcttggggtcggggcggggcgccgagggagggatgctcc

SEQ ID NO: 39218 - DNA, 352 bp, Mus musculus
  source 1..352: mol_type = other DNA
tggggccgggaagccaggcgtccgggctcccgtggctgcgattgtgcgggttggcgcctgccccggcacaaaatgcgcgggacggctgggggccaaagacctttccctcagaaggtcagaggatgccccatccacttgttggagcacgggtgggagcagagggggcgccctcccctcccccctgcgagtctagcgcccagccttcgcgcctctggctaagcgcccagccccacgcgcccccgcgcggccgcccgggagggagcgatggggagggggggctgagcgggggcgcggccgccctcccccgcgggcgggcgggcgagcgggcgggcgcggccgggcccctcgggcg

SEQ ID NO: 39219 - DNA, 265 bp, Mus musculus
  source 1..265: mol_type = other DNA
gcctggagcccactaagcctttgctgtaggtggcaaacaaaagcttagtattctaggtttgtaacttgcagaatggacaggaccatcttcctggccatagagatggcccctgggtcaaagattagcccaggctggcctggaagtgacaagcagagtctggtctctccgtaccggggaatctatcagttccactagacagacagctacttgtgtcacttgggtggcctcactcggagcgctgacagtgcagggctctgcacagccc

SEQ ID NO: 39220 - DNA, 478 bp, Mus musculus
  source 1..478: mol_type = other DNA
taggaggggagtcaaagttcaaaactgtcttcctctctcctaaatgccacttcccgagggggagggggtgggaaagccctccccctgcatgcttctggctggagcacctccctgggacggagggaatcagggttacaggcaacccccgtggctgcttggagacgctgccaaggcagggggtgcaggcgcacactgtatgtagactctacaaatacctaagccttggtataggctcatttcgcctacattcgttatgtattataccaaaataagggccggccctctttaaagagtcagagaccgtaatgagcgagctctctgtccaacacccggaagtgggtgcgagccggccggcttgcggggtggccgtcgcgacgactgcagtggagggggtcccgcctcgaggccccatcctacgggaccgaggcgggatgcccgcctcttctgggggtggggctccgcctcaagctggaggctt

SEQ ID NO: 39221 - DNA, 534 bp, Mus musculus
  source 1..534: mol_type = other DNA
cattagcaatgggtccttgttggccctcctcatcattgataatgattctggacagcatcacagatgtccgaggattcggaccccctcctgtccttaggaaaggacctgacccttgtcatgacccgactagggccccccgcaaaggaggcgggcctggaggcaggcagggggcgcgcgcgggcgggcgcgtggccgcggcgcgggggcgagggagggggcgcgcgcccgccggagcttctgctgttgccgctgccgccgccgccgccgtcgcagtggaggggcgagtgcctgcccgcctgccgcagggacgctcctccaacgccgccgccgccgcaggtctcgggggcgccgggggggaggggagggggagggggcctgcgcgcgcccccgcggacacgcgcgggggagggggctcgtgcgcgtgctcgccatctgggcccgcgggagggaggggcgggggcggtgcgggggcgggcctggacccccgccctgggggagggacgaaccgggactagcctaggctagtccttccta

SEQ ID NO: 39222 - DNA, 498 bp, Mus musculus
  source 1..498: mol_type = other DNA
cctcctctccgccctaaggatggacaacgggggcgctggtgaggtcccctggaccatccagggtgctagggggtggggaggggacacactccctccctgcctttgggaagagggaggacaggggcccttagcccctgtactccgctaggaggggagtcaaagttcaaaactgtcttcctctctcctaaatgccacttcccgagggggagggggtgggaaagccctccccctgcatgcttctggctggagcacctccctgggacggagggaatcagggttacaggcaacccccgtggctgcttggagacgctgccaaggcagggggtgcaggcgcacactgtatgtagactctacaaatacctaagccttggtataggctcatttcgcctacattcgttatgtattataccaaaataagggccggccctctttaaagagtcagagaccgtaatgagcgagctctctgtccaacacccggaagtgggtgcgagccggccg

SEQ ID NO: 39223 - DNA, 280 bp, Mus musculus
  source 1..280: mol_type = other DNA
cctctatcaccttacctgttaagactggtacctgtttcttccagaaggttcaggaactaatgatattcattagcaatgggtccttgttggccctcctcatcattgataatgattctggacagcatcacagatgtccgaggattcggaccccctcctgtccttaggaaaggacctgacccttgtcatgacccgactagggccccccgcaaaggaggcgggcctggaggcaggcagggggcgcgcgcgggcgggcgcgtggccgcggcgcgggggcgaggga

SEQ ID NO: 39224 - DNA, 286 bp, Mus musculus
  source 1..286: mol_type = other DNA
gacacagagcactattccatcctgtgagtgtcactgtcagtggtggctatatcagagtgtgtcacagtgaatgaccctgcaggatgactgcgtgtgacagacagttagaaggtttgaccctgactgaccccttatgtgggagtgtgtgacgctgcctcgagcgctcgcgagcgcggctgtgcatcacacgcgtggcccggtgtgtgacagcgcgggcggcggggcggcgtgcgggaggggtcccgggggcgtgcggagcggctgcggcgcgtggggggaggcgcgg

SEQ ID NO: 39225 - DNA, 284 bp, Mus musculus
  source 1..284: mol_type = other DNA
aaatatataagttctgcatatcatatactatgtatataagtaaaaagaggaagcaggtctagagaatcttgcaacttctctatagctgagattatgtttgacctggggctacagtgtgacactctgacaaaatgttagtaacaaatgatattgttaaggcgcttgctgccaagcctcatggtgtaaactagttaataagtaatgaagataaatgaaaaggataaaagcccgtattttaattatctcaagagccacaagggctctcaaccacagagcctctgtct

SEQ ID NO: 39226 - DNA, 318 bp, Mus musculus
  source 1..318: mol_type = other DNA
aatagtgctcgtgtccgggtgtcgcgtcccttgtggtcactgagggtcacacaggtaccatctcagaagcacggtgggcgtaacgccccggccggccccgccccgctcagccccgcccactaagggtggctgtctctagtaggcagagcgcaccgcccactcccttccctagaaggggcgtggcttctacgtcctccgcctttccagcgggaggcgtggtcgcctcggtcccgccctttgaacccaaattaggagggtgaggcggaggctggaaccttgtctggtcccgccccctccttctgggtcgaggaggacccg

SEQ ID NO: 39227 - DNA, 449 bp, Mus musculus
  source 1..449: mol_type = other DNA
tcaaggcccttgtctacactggagtcctcacaaaattttaaatcttagctcagttctacggtgttcaaaactaaaaataataataataataataagtttgagtttgttcccagtaagcatagactcctcctacaagacgggttgggggtggggaagcagagctccgccagctaaggggcggggctgcggtcgttacgcaagccgcatcatgctatttccggtttgacccagccttcggaactccggggggcgtggcctccggtgtcacccggtgtcactcggcgttaccagactccaccgtggagactccaccggacccggcccagtgatggacggggcctagcatccgtggctcctcttagccaatggcgccccgcggcgggcaggattccaaccaatcctggcttgcgactggcctccggggaggagccgagtggcccccagccaga

SEQ ID NO: 39228 - DNA, 391 bp, Mus musculus
  source 1..391: mol_type = other DNA
ttccagtcactgtttcccaggctaacttgggcaagttagtgaaaaaaaaaaaaaaaaaaaaaaaaaaaaagttcgtcggttttttttgctagtttgtttacaggatctcactctgaggtccaggctggattcaaatccattatgggtgacgccccgcaggaaattattttcagggactggacgtgctcactgtattgagtccagtatcctaagtactgagaaaactgtaactctcaagaagtaggtcctcttccagaagtcatacagttttctaaaataacacatgaagtgacaggcctgtactttttaaagtacaaaaaccagagctgtcccttcgctcaggcagtcctagccgatccctgagctgcagggcggggctgccacgcgtgtc

SEQ ID NO: 39229 - DNA, 306 bp, Mus musculus
  source 1..306: mol_type = other DNA
ggtcgtgtgtgcatatgtatcatatgtgcatatgtatcatatgtgtgtgtacacacatgtacacacacatgtgtgtgtgtgtacgaacatgtgtgcgcttgtgtgatgtgtatgtgcactcatgtgtgcctgtgtgcatgtgcatgtgtgcatgcctgtgtgtgctcatcacatggacccagggactgaatttaggtcctcgggcttaattcttactactactatttcaaagattcccggagccaggaattgagagtctcagggctgcctgggtccaggagccacatccccacacccaccctttgt

SEQ ID NO: 39230 - DNA, 321 bp, Mus musculus
  source 1..321: mol_type = other DNA
cctgctctagtcccactgcagtagggcatctagtctaggaagtgcaaggtgctccgcaaaatcttgctcgcttccccttctgggaagcagatgtaagggtgtctccctttattagaggcatgcctaactattatcaagctgaatattttatattttggtttgtttacaagacttctaccactgggttaaatccctaggcttgttgtgtagttattaaagccccatttggtctttaaaatatggatattggaattggcattttgtcttgactttagtcccagtacaaaattaataagcttctcaaaatcacctaatttggca

SEQ ID NO: 39231 - DNA, 338 bp, Mus musculus
  source 1..338: mol_type = other DNA
tatgctgctcagtagcaatgcaagctctgtacttcctctgtgataatatgagatccagaagccttggattttcctttttaaattttaatctctaaaaataaaaattgacttaaaggaacttcaagcgccttcaagattaatcttaggatttatcactaaagagtccgtggtgctatacagagaaaccctgatcagagaagggataagaattcccttttctctgtatggcgaagctgagctcctctctaccccaaaccaggtggaccaccccggggagtcagccgacgcgcgcgcactgcgcagactcctcgctgcagtgggcgtgatccgtggaggtc

SEQ ID NO: 39232 - DNA, 544 bp, Mus musculus
  source 1..544: mol_type = other DNA
tctatgtagcaaacaaaacaacttttcaagtatctttcatttaccaaatgaagaggaatgttctatttctattgtattaggttcccttctcctggctaggataacaatgcaaaatgcccccttttaaattgaggaacatgcattagtcattattttaaatcgctatttcaggactcaggaaagaggcaaacaatcttcttgactgttgttttgctgcctgagattatcggttttcactaaacagagaaaacttggggggattagaacccaaacccgctggcctgctagctcgggcagctcccgcgcgggtacccatcatcagtgctaacgaggacagaacgggtgtgcacgacctgacgtcgggcccccatgaggctcagaaagagaaatcatttatctgatcgtacagtatgggctgcgcgggaagtccagacccccggccaggcactctggggcccgcacccccacgaggcgcccgcccgccctccgggtcgcgcctccctcggcctgggccgcccgccccggaagtcctgcccttgatacc

SEQ ID NO: 39233 - DNA, 172 bp, Mus musculus
  source 1..172: mol_type = other DNA
tgcttgcaatccccacactcaggaggctgagcaattggatctaaaattcaaggacaagagaccctgtacttgttgctctaattaattcccgcccacctgtgcgcaggcgcagtcgcgctagactgcgggcagggggtatcaagggcaggacttccggggcgggcggcccagg

SEQ ID NO: 39234 - DNA, 278 bp, Mus musculus
  source 1..278: mol_type = other DNA
agactaggctcctcgtgttctagcagaggcatggttttgccagcagcagatagtttctgcgattgacttttggaattctgggaacttttcagagggtacataaaaagaagaaacaaaggcaagaaattagattcagggatctcttctaaggcttccataaaattagcttgtagtcattttccaggctgagccagcggcatttaattacagtaatggaaacagatggcagcccttcccaggctcaccacggcctgccagctgcttcctctaacaggcag

SEQ ID NO: 39235 - DNA, 321 bp, Mus musculus
  source 1..321: mol_type = other DNA
gagcctggcagtggcaggccaggcctttaatcagaacactaacccatctataaggggatctgatgccctcttctggcctgcagatcagagcaaaaagaaagtctaggacagtgtttctcagtctacctttaatacagttcctcatgtggtgatcccccaaacataaaattattttcgttgtcacttcataactaattttgctattcttatgaatcataatgtaaatatctgaattttccgatgatcttatgagaggttcctgattgaagtaatcactgggccctaaagtacgcaggcgcgctgccttgagcctgcctgcct

SEQ ID NO: 39236 - DNA, 317 bp, Mus musculus
  source 1..317: mol_type = other DNA
agaacactaacccatctataaggggatctgatgccctcttctggcctgcagatcagagcaaaaagaaagtctaggacagtgtttctcagtctacctttaatacagttcctcatgtggtgatcccccaaacataaaattattttcgttgtcacttcataactaattttgctattcttatgaatcataatgtaaatatctgaattttccgatgatcttatgagaggttcctgattgaagtaatcactgggccctaaagtacgcaggcgcgctgccttgagcctgcctgcctggagggggcgggggggcccgcgctgcgc

SEQ ID NO: 39237 - DNA, 443 bp, Mus musculus
  source 1..443: mol_type = other DNA
cttatgtcttagaggaggaactgctcttagaggaggaactgcttaacctgtcattgacagtcagaatctgcttgtctgctgttacactgcttacaagagcattttgataaaagctgatggtgtagaaaatgtccatatgcattctgacttttaattattactgataatttttactctcccaggcagagataatcactgcccttgcctcccaggtggcacatgtgtagtcagcagctacagccctagctctggccctgtggcacgatggagacacagtggctccctgcttgtgtgtgctgcagaatgtctcagaccacagctcctcagtgaacaggccatctgcttggctgtgctgccaggactgcgtcacagacacctcggctgaggcgccacccttagtgggaggacggctggagccaggcaggacgcaggggatcttccaa

SEQ ID NO: 39238 - DNA, 311 bp, Mus musculus
  source 1..311: mol_type = other DNA
tcagtggggacccttgtcacctccccactggcttttctggaaatggaatggcgctgatctggaatttcctcgttagcaccagctcctgcctcagatgtccgagtttgagcaatggctatttgtttattacataaagaatctattgtcccgcactatagtacaatcagcttgatcccaatcctgtatttccaacatgactagtgggctgaaaaccagctttccacaaaactgatgtctgcccgctcagcctttttcttctagaaatctccgggggaccggccccgcggggggcgatgcggtagctgcagcgg

SEQ ID NO: 39239 - DNA, 409 bp, Mus musculus
  source 1..409: mol_type = other DNA
atatgctgcttttgcggagaacctgaatttgggtccccagcacccacatggggtggctcacaaccgcccctctttgggtgcgtgcacgcacgcacgcgcgcgcgcacacacacacacacacaatttaaaaatacgatcactgacagtgtttgtttttcaattttttgccatttataatttagcaatcttgaacaaatcttcgtgaagatttaatgacatcaccaaactgaagctcattataggaggctgcccaaagaggcagcaacccattgctctctgaagcaggtggttcaaggagcgcaatggtccacgaacgaactacatttcccccagggacgaaccttgtccgaaggatgagtcagatagggcctaaggaccagggctcatgtagcctgggcctttgggactc

SEQ ID NO: 39240 - DNA, 267 bp, Mus musculus
  source 1..267: mol_type = other DNA
tgccgctgtgtaacgggacatgttcaacaacttcctcagcaggacaggcgcatactgaagatttgactttgtgtaattcagctcaccagaatggtctttgatcgttcagaaaaaccatccaattttacttcctagcctgcgtttaaaacttaggctcacctgtcttctccacaggggtgaaacccagcgcagctgccagatgggctggcccaggttgcatgctgggatatcccagaactatgaagcattatatttcttgtagtttgg

SEQ ID NO: 39241 - DNA, 248 bp, Mus musculus
  source 1..248: mol_type = other DNA
aacagtttatctgctaacagtgacatacgttccctacataaacaaggcatacgtcggtggttgtggttgtttaggataacagggacactgatttaagggggtctgggagacagaacacgacgtctcccgttgtgtgcagtgatctctctgaactacagaccgctaggctcatcgagttgagcactcggcactacatttcccaggggctaccgcggcggaagtaaagcaacttccggtgccctggcggc

SEQ ID NO: 39242 - DNA, 468 bp, Mus musculus
  source 1..468: mol_type = other DNA
tttgccaacaaactttaagcactgtagctgggcagattctcatctatatggctgcctaccacccagccatggtgactcccctgcaattagagttgaaggaaaacagttttacacaacattaaggtaatgtccagactgtaaccaatctctgggcacagaatgagggaaggttctcaggagagtggtccatggtgcacagtcccattcacggcacagaatgctggacgctgcctgagcactgcagcccctccagccttgctgtgcttcagccctgacacaggaggggccacctggatgctgtgagcccctctgagatctgctcacactggatctcagagtggaagatggctcccttctgctggcctcttctggaggagttcaaggcagacatgcctgcactcccacactgcccccttggcagtgggtgacatcacagtgacagaagtcagaacatcaagtcacaatgca

SEQ ID NO: 39243 - DNA, 352 bp, Mus musculus
  source 1..352: mol_type = other DNA
tcactcagagttgagatgctgtccaaatcatcagttttttaaattgacaacatttgaatgtgtattctgagtttatttttaattaattttttcagacgctgaagatgaatctgctagagtatttatctttaatatattttctgtagttaacacatagtctgacttttcaaatctaaatgtggcaaattttggcgtttagacgatttacagtacttttaatgcgattagttttattaagaggctatctaaagcagggaattcagactcctccgtcttctctacaggagaaagaatgctcaaaggagggcgcctcccctttaagcgcgcacccacgtgggcactcccacaagcc

SEQ ID NO: 39244 - DNA, 220 bp, Mus musculus
  source 1..220: mol_type = other DNA
ctaataagccaaaaagttttaatactcacttttctcatataaaaagcctaccctgagagcagaccagtactacaattaggctcttaatacactagtctcagatttaaaacttcagtttgtctgtccaggagagaaaatcagttactagtagaaccacaggagggagcctcccctttaaagtcggggagtacccccctccccctggtgggctgggccaagt

SEQ ID NO: 39245 - DNA, 317 bp, Mus musculus
  source 1..317: mol_type = other DNA
ttactaagtataagtacatattatgtacatgttaggctttctttctttctttctttccatgaatgaaaacaaaaccttccaagaaacaatgtgtctcaggtccttcttgactctggagactgcagctaaggcttcctcggggaagccctgtgggactgacacctccactgcagggacagtcctccctgagctcagacctgccagccctcactagaccatgtcttgggaactagagctggcgtgcattgtgacttgatgttctgacttctgtcactgtgatgagtgtgggagtcatatctgccttggaggccagcaga

SEQ ID NO: 39246 - DNA, 384 bp, Mus musculus
  source 1..384: mol_type = other DNA
acggccaactaggccattttctggctgtcaaggcatgtcttaatgtactactcgtaatcttctagagtactgaactttaacatattttctgtggtaacagggaccctgaactcagggagggtccagaacacctggctgtctgaaatcgctgatgtaaactatccacgtttaacaccaacaattcgaggtggaatcccactcagtgggactcaagtcacttatatcgcgcaggaagtaccttttgagcaccacacgggagcttttaaaggctgtgcctttttggaaaaacccctgacaccaccaggcgcagctcccaggtgggctggtcccagtcaagctcggatcgccctgaacctctgagctctgggcttcccggagttccgc

SEQ ID NO: 39247 - DNA, 413 bp, Mus musculus
  source 1..413: mol_type = other DNA
tctcgaggatcatgtgggtcatttacataatgggatagtatttagctattaagaatcagtggctatcgctgggataaaagccattgctaccacgcccagccatgtttactatcaattttataatcgacttgagttttcttttgattatgtaaagatggtcactttgaatctgctagagtatttatctttaacatattttctgaagttaacagatagctgggtcctcttttcaaatctaatgtgacaaacctgtactttagcttttagaccgattacagtactttcaatgcgactagtttctagcctgtctaacagacatttttaagggcgagaaaatcagttccccgcagaaccggaagcttttactcaaaggagggcgcctcccctttaagcgcgcacccccgtgggaactc

SEQ ID NO: 39248 - DNA, 567 bp, Mus musculus
  source 1..567: mol_type = other DNA
cattttaaagttgacttaagtaatatttaacacattttctgtagttaacacttatctgcaaattaatgtggcacctatactttagcatttacataatttacagtacatttaatgcaattagttttattactaggattgttcacaatttctttctatcatgtttggaaaaagttctttgtataacatgagaaaaaacaaaagtggtttcgaaagttccatagtgtcaagttacaataaatgtgtctatcctataaaaaagaggcctatgttttgggacacttaacgcgtgctagtcattcatcctccaacaggaggtaaatgactaagggtccagaatatctggctctttgaaatcgttaatataaactacccaactttagaaaccaaccaattctttagttcggtcttttgcgtagtggaatcccactgagtgggactcaggcaaatctaaattttaaaatttccgctcgaggaggcagcctcccctcgaagcatggggagccccctgcccccccaccgtgggaactcccacaagccactgggcccagttcccggatgggccgggca

SEQ ID NO: 39249 - DNA, 371 bp, Mus musculus
  source 1..371: mol_type = other DNA
catgtactgaatccaggtgcacatatacacatgtacacgtaactaaatataaaatcctttcaaaacgtttaattatgtgtaagcaggtgcctgcagacctgggtgctgggaaccgaactcgggtcctgtagaagagccacaagtgttcttcagcactcttctctcttcaggtggcggccagagaaggtcaagagattcttctgtggaactaaaggcttctttactggagtttttaacaagttaggacagttgattaatcaatattaaacgcgcgacgggccgtactgcgcacgcgcaacatccttgcgggtccgcgcgcgcgcgcctggagcgcagagcgcaggaacccatcttgggggcggagcccaggg

SEQ ID NO: 39250 - DNA, 246 bp, Mus musculus
  source 1..246: mol_type = other DNA
tccatgatcgatcttagctctcccagaagcccagcaaagccaggttttcttgtttccatttcccaggagagaaacctcaccggcctgggccgaggcctcagaccccgcgtcacccccagacacctcttctccacgggtgactggaagacccggatatgggtcctttactgttgttcctggcaggcccatgcccagggagccgggatctcggcattcgtgtgagatcggcatcctcctccaggaagt

SEQ ID NO: 39251 - DNA, 257 bp, Mus musculus
  source 1..257: mol_type = other DNA
agccaggttttcttgtttccatttcccaggagagaaacctcaccggcctgggccgaggcctcagaccccgcgtcacccccagacacctcttctccacgggtgactggaagacccggatatgggtcctttactgttgttcctggcaggcccatgcccagggagccgggatctcggcattcgtgtgagatcggcatcctcctccaggaagtggtcctgcagctcggggacccgcaggtgaggggatagccactatgcca

SEQ ID NO: 39252 - DNA, 270 bp, Mus musculus
  source 1..270: mol_type = other DNA
taccctagtcatttcagattcaaccaataatgtcatggtttgtactggccttttgggagtcactgactatatcccagcatatcatatcttaagaagtcccttcttcatggagagagatgggttaggggatatctcaaataccaaaccaaataattttctgagattggaaatctgatctcacagtcatctcagaacacaggtgatatcagcagcctcctccaggaagctggcaccatctgcctggaagatggccacgggactatatagctc

SEQ ID NO: 39253 - DNA, 238 bp, Mus musculus
  source 1..238: mol_type = other DNA
cttcatggagagagatgggttaggggatatctcaaataccaaaccaaataattttctgagattggaaatctgatctcacagtcatctcagaacacaggtgatatcagcagcctcctccaggaagctggcaccatctgcctggaagatggccacgggactatatagctcagtccccagcctgttcccgcagctccgggacctgcaggtgagaagagacagtctccaacaggacagtagg

SEQ ID NO: 39254 - DNA, 271 bp, Mus musculus
  source 1..271: mol_type = other DNA
atctttcagttgcctggtggtgcaacattaacactgggccttctgcaacagttgttgctcgtgggagcagctgctgttcttcgctgtaaaggagggagctccggctcacaattaattgccggtaacgctaaacacttctaaggataaaattttaaaaatttaaagtctttgaaaaataataaatttttaaaaatcggtataacggggccgactccgacttccgggagacgggacgcgcgtctaaggggcgtggttacgcgcttccgtcact

SEQ ID NO: 39255 - DNA, 388 bp, Mus musculus
  source 1..388: mol_type = other DNA
atttttcaaaacattttaattttaaatagggaaaactctcgcgccaccatgttcaaaactgacagagttttctctgtatagccctggcagaaataacctgtttccaatgtgagccaaattaaaacttctttaatgaagttagaaaattgggaaagcctgggtctccaaatctgtatgactccactgcgtcagcagaggctgtgtttgcatctggcaggagcagctgacgctgcagacctctcaactcagaggttgttttgtttttctattaaaagactcatctctcgagacgcatgcgcccttcatggtgcatgctccattggtggctgctccgcacgtgcgcggctcagcacccttaaggcgcaggcgcactgtgctccgctatcac

SEQ ID NO: 39256 - DNA, 503 bp, Mus musculus
  source 1..503: mol_type = other DNA
cagacctctcaactcagaggttgttttgtttttctattaaaagactcatctctcgagacgcatgcgcccttcatggtgcatgctccattggtggctgctccgcacgtgcgcggctcagcacccttaaggcgcaggcgcactgtgctccgctatcactaatcggggccctggctcgccgcgtccaccggacaccctcagccagtgggcaggtctgagctcgggctccccgcacgccctcaggtaagggtgctgcgacgggcggggcggcacgcttgggtggggggcaggccgggaaccgccctgcccgtccccgcgagatttagcaagggagtccggctcttcatagctggattcctggaaagggagtcggggagggggcagccaggccccactcccgccctttggcaacagctgccctgagtgctaattggttaagctcttggcagcaacaaccaatggcgcggttgttgccatgggaggtgcggcctgccgggctctcttgg

SEQ ID NO: 39257 - DNA, 399 bp, Mus musculus
  source 1..399: mol_type = other DNA
atttatgttttgcctttaattgataaatcatagtagagttaataggttagtatagttaataataacctgtactaggttagttaactatcgaggcatagtgagacatgcctatcatcctagacgagcttcgtgaaactgtttcaaaaacacaaccagaggatctaaaataaaatacatacaaataaagaaaacttttttttgtttttgttttttttttttgtcctggaactcactctgtagtccaggctggccttgaactcagaaatgcgcgcaaaactttaaagactaattttaaaactaaaattaaatttagaaacttaaaccgattggggaggacacgcgtgcgcactgctcctcggcttcgccgttggagctacgcctgcgcagacggcgagacac

SEQ ID NO: 39258 - DNA, 183 bp, Mus musculus
  source 1..183: mol_type = other DNA
ctcttgagacatcaacaggctacaatcctgagtcaacatgcctcaggatccaggtcttgttctaggagctggggaagacagagagagaggtgcctccttaggctgtcactctcatactgggtgtgacctcctatcatgggcagagcgcctccctggcgcagagcttggaatctccgcctgact

SEQ ID NO: 39259 - DNA, 325 bp, Mus musculus
  source 1..325: mol_type = other DNA
attaaaagcactttttctttcagacatcgtgtggtagtgtctctcagataggggtgagctatggcttacatatacagatatgtaacaaaacatccatatatgtgtttgtttgtttgttggtattaaaggcgtgcgccgccaccaccgctaattcggccagccaaatgtacatggagcaataaaataataataataataataataataataataataataataataataataataataaattaaagtatgtgagcccctgctggttcagaacttgaggcggccggtccgggcacccgtccttgcgcaagcacttttgttttccagg

SEQ ID NO: 39260 - DNA, 275 bp, Mus musculus
  source 1..275: mol_type = other DNA
tagtctaggatataggagcaacttatattttccctaaaattactagctctgagtattaacttagtatttactaaatacttgccaaatcccacctcctcgccccccggggtgggatgagcagctccattcatctgggggagcccaaatgggaggcccagctgcggcccaagggggaggggcacggccgcccggcagatgggaggcccctccaagaccaggatcctagcctggcgtctggtggacatgatagagaggaatgcacctgtattgggggc

SEQ ID NO: 39261 - DNA, 268 bp, Mus musculus
  source 1..268: mol_type = other DNA
cctggctgtcctggagctcactctgtagaccaggctggcctcgaactcagtgggaaggcatgtgccaccaatgcagtactttggatttttaaagtttaagtgtaaaaatctgactttttttttcccattgaaaacaatctataaagagatatcagtgcactcatacatttaaaatgagtgaatgaacgagtgaataataaatgattaacctttctacaaactcacttcctcggtccttagggccccagggggcgtggtgccagatgac

SEQ ID NO: 39262 - DNA, 324 bp, Mus musculus
  source 1..324: mol_type = other DNA
ctgctggaaattgaccacagctccacagcagccagcgtttggtttcactgttttttaagatttatttatttatttattatatgtaagtacacagtagctgtcctcagatactcattaaagtgtctttcattgtaagtctgagatttagccaggcgcgctaaactaacaagttttgagattgtctaggtccctaaaatccgtcacctctgacacctccgagggttcacccgattcagctcccggagatggcggctccaagaggccgccctcagagcaggcccctaaagtctcgcgttaggtgagactgacgcgccagttctcgcg

SEQ ID NO: 39263 - DNA, 267 bp, Mus musculus
  source 1..267: mol_type = other DNA
ggtggttaaaagcactaactgcttttcctaacctgagtttggttacaggtacacaagttgggtgtggctcagacaccctgtaactacttggaggattaaatcttaaaacaaggctacttggaggattctggataatgatctaagataactgccctgaagacaggtcctgagggtagttctccatcttccgagttctggacggagtccccaccctccgggtgacgtcagccgtaaagcccggcgcctgcgcagaccctgaaaaatcgg

SEQ ID NO: 39264 - DNA, 425 bp, Mus musculus
  source 1..425: mol_type = other DNA
cccatctgaggacgcccagaactttgggactgttccacagaccattgcaaaaaattcacaaagaaatgttcattcttcaaaaattctagaggcagaggcagtggcaggcgctctctgtgagttcgagcccggtctagagagttacatggtgagaccctgtctcaaacaagccaaaacatttgattgaaattataaaatgtgaagacttctaaactgatgcgcgctaaccgattgcgccactggagctccggccgcaccctcgcgccaacattgcatatggagtgtgagactattccagattctgcctttacgggagggcgtgccggaaggcggcccctccccccagcaggcgggaacaggatgagccgcggcggcggcaaaggggaggagaagccttgggcggccgccccccgccccacatctgg

SEQ ID NO: 39265 - DNA, 325 bp, Mus musculus
  source 1..325: mol_type = other DNA
ccagcactccggaggcagaggcaggcggatttctgagttcaaggccagcctggtctacaaaacaaacaaaaaagacagggtttctgtgtgtagtcctggctgttctggaactcactctgtagaccaggctagcctaaagtttttttacttcctaagaaatagtggagccagagtctcctgcctcagcctccctgaggggccggaccctccctactaccccccgagaggggccggagctgcgggaggggggcctagtaccaggccggccgagctacgccgcgggggcgcgtcccggaagctctagtggccacgcccccaggccgcc

SEQ ID NO: 39266 - DNA, 364 bp, Mus musculus
  source 1..364: mol_type = other DNA
tcccctggagagaagcttcactgaaggagactgaggtctgactccctcccgcaaggtgcaattccgaaatcgcagagcccaggggggaccgccccttcatcgggggtgagcgctgcgcgacctcgggggccgacctgagggaatcagtgatgtcgcaaggtggccatcttccctctgggcctgggtctggatggtgggcgccatcgcgaccaggcgacggcggcgcggtaggcgtcctcgctggccgcaggcggacgcaggctcccgtagacgccgggctccgcggggaaagggacagcgtcggacacagacttgcagctcccgctccgactgcctggccgcaaggcatgcatatcctcttctc

SEQ ID NO: 39267 - DNA, 424 bp, Mus musculus
  source 1..424: mol_type = other DNA
ctgagttcgaggccagcctggtctacagagtgagttccaggacagccacagggtttcactatgtagaccctggtcggcctggctctatagaccagactggcctcgagctcagatcgtccccctctgctgtcaacacagctcggagcccgcccgcccgccaggctccccgcgcagggcccatcacctggagactctccttcagttgcgggatgagcatcttgtagcgctgcacaggatcgaagtcctgctgctgctgctgcaggagcccgctctgggcagaacccaccaactgggtcggttgtggctgttgctggggacccggacccccggcagaacccgggcaccagacgcagaggaaaccgctgcagcctgtggctggggcgcagccattttcctccgagaagaggatatgcatgccttgcgg

SEQ ID NO: 39268 - DNA, 302 bp, Mus musculus
  source 1..302: mol_type = other DNA
acccttaaagggtcgacctcgctcatcttgaggtgtcccaaagggcgatggtactaccggacctgccccctgcgggtccgtaggtccaatcgcgggcttcgccagaccgttgcccggggcaacgcggcgcgcgcccctcctcttcccgtagtgaggagggggcgggcctctcaggcctccttccagccctgtggtctgccctcgccgccagttggctgggctcaccgtctgtcagtgtgagcctggcgcacagtggccctccggggcggggccaggggcggtgacgcacggcgcggtgacgc

SEQ ID NO: 39269 - DNA, 310 bp, Mus musculus
  source 1..310: mol_type = other DNA
tgtattacacacacatatatatatacatataataagctgtaactgtttggggagaccattatatttatttaatagctttggccttaagctaggcgtgttcccaaatagcttgtaactcaaatggtagcatttattagcagtgggtgacagcaaactttaatcccagcaagagacgggctgatctttgagttcaacgccagcctggtctatacagagagaccctgtcttgaaaaataaagaataaacgtgttttccacagtaccagacttatttgggagataaatttctagggccagaggaaagcttcccc

SEQ ID NO: 39270 - DNA, 292 bp, Mus musculus
  source 1..292: mol_type = other DNA
ttagccatggcatacaattgctactggtggacagggaacagtttgcgtggctcctcagggttcaccagtgaatcaagccctccacccgtcaaagacccgcacgcgggggctggaccagggcgctctgcagggtctgcggcgacctgggagtgcgtgtggccgccccacctccggtccgcgccccctcccccccttgcggcggcgacgcggagggcggagcgcggcggcgcgcgggagggcgggcgggaggcgggaggcgggcgggaggcggccccgcggcaccgcgccccct

SEQ ID NO: 39271 - DNA, 190 bp, Mus musculus
  source 1..190: mol_type = other DNA
ctcttggggatctgtcccatagcctggatggggcactgagcagatggcaggacatctgcctgtcttctctccagcacagacagctactgtgggaagcctcctgacgaaccttgccccaggtcgccctgctctgggcttccccagcctgggctccctagtggcgtgtgtcccaagagccaccttgccactc

SEQ ID NO: 39272 - DNA, 172 bp, Mus musculus
  source 1..172: mol_type = other DNA
gaacacgagtcctttagtagagagcctcacctctgagcactgagatattctccagggacctgagcctgtgccctgaaactgccccaggcccaagcttcttgtgggtagcctgctctgggcttccccagcctgggctcaggtgtcccaagagccacccactctgtccctctgt

SEQ ID NO: 39273 - DNA, 375 bp, Mus musculus
  source 1..375: mol_type = other DNA
tgtgtccgtgtgtggcatatgcacacacgtgtgagatatatgcattaatgtgcatgtgtacacaaagggagctaggctgccagtcagcaagtctgcagtgctggtgttataagtgccacattcccatgggtgctggggctcagaactcaggtaaaacctttaatttattttttaattatggtgcccatagacgccgagtctcctggatcatggccctcttcaaggatatgtctatctatctatctatctatctatctatctatctatctatctatctatctatcatctatctatctatctattttgctttgtagccaaagataaaatcccaggttttgcaaacactcttagactgtctaggacagggggtgtgtc

SEQ ID NO: 39274 - DNA, 351 bp, Mus musculus
  source 1..351: mol_type = other DNA
caggtggcgttgggtttttaaaatttaattaaattaattaattaattaattttttttttttaagacatggccaggctggcatcaaatcagctgcctgcaattagttggtgtgtagaccaggctggccttgaactcacacctcattgccctggcactcgggcattgggacacaagtgtcagcttcccttgtgatcctggatgcctccctccctttagcaagccaggttggagcacaggcttgaccaaccctccagaagtctggacccagtggtgtgaagactgagatcttgactctgaatctggggccgtggttgagtcacatacccatggctccaaaagggtcagctgagc

SEQ ID NO: 39275 - DNA, 456 bp, Mus musculus
  source 1..456: mol_type = other DNA
tagaattctctagggccggggacttccctagtagaaatccttgatgagaaagcatttttaaatttttcagtaagacctaatgaacccattttccattttgattaatttaaaaacacttaattacaacttaaaaaaaaaaaaacttatttaaaagattaagatcaaatagtgtcagatttccagattcggaaaccaactagcatcctattagcttgtttacctgtaaaatgggtgttacaacaacagggttgtgttaacagtgcataataagtgcttaagaactgtttctgctctgccacgctttaagaggcggagtgggcggggagtcaacgatcccgcaccttttattgggccactcgcaccaatcagtggttttagggaaccctgcccggctcgctgccccgcctccgagtaggccccgcccatcacccggtcagctccgttgccatggggact

SEQ ID NO: 39276 - DNA, 238 bp, Mus musculus
  source 1..238: mol_type = other DNA
ccatacacataaaactattttttttttttcgagacggcaggtctctcagtttgcgtacacagtgagttccaggctagcggcctctaagagcctcgggctgtcttatggtgtgtctgaagacagctacagtatacttatgtataataataaatcttctcacatacataagataaatctctttttaaaatgtgctaagttgccgaagttcgaaactgtaagcttcagctgatgctttctc

SEQ ID NO: 39277 - DNA, 253 bp, Mus musculus
  source 1..253: mol_type = other DNA
ggcaggtctctcagtttgcgtacacagtgagttccaggctagcggcctctaagagcctcgggctgtcttatggtgtgtctgaagacagctacagtatacttatgtataataataaatcttctcacatacataagataaatctctttttaaaatgtgctaagttgccgaagttcgaaactgtaagcttcagctgatgctttctccactccccgctaggactgtgccagagccctggcctattcggcgaatctca

SEQ ID NO: 39278 - DNA, 276 bp, Mus musculus
  source 1..276: mol_type = other DNA
ggcctctaagagcctcgggctgtcttatggtgtgtctgaagacagctacagtatacttatgtataataataaatcttctcacatacataagataaatctctttttaaaatgtgctaagttgccgaagttcgaaactgtaagcttcagctgatgctttctccactccccgctaggactgtgccagagccctggcctattcggcgaatctcacaaagctatagctatgcggtcctccaggccgcgaaggggagctggcaggggtgccggtgagcacca

SEQ ID NO: 39279 - DNA, 278 bp, Mus musculus
  source 1..278: mol_type = other DNA
ttctattgctacaatgaaacaccaaagagcttatttggctcatacttccacattgctgttcattattgaaagacaggactaccagtccagggacagcaccgctcataatgggtaattgagaaaatgccctacagctggatctcatggagactgtcagtaaaataataacaatagctgagatataagtaaataaataaatttaactgaaagctgaacaagacggattatctgcggtcagagccacagccctgacgactcagggacaggcggcctagctc

SEQ ID NO: 39280 - DNA, 327 bp, Mus musculus
  source 1..327: mol_type = other DNA
catataaatacatgaacagatataccttaaatatctgtttagcaggtatttatccattcaacaggatgtttatagcagacctaagtgggtgtcatgcacaagacattgcctaacttgggaagaaagggcgctcgcaggcaggtcggccggccgcagctcccccttgcggagctccagggagcgcgcggctctgggcatgcgcacaccgacgttcgtacaggaggttccggactcgtttctccgtagcgaaactgcacacgcagcgtcctcgggaccggagcccctggcgagccaggccaccaaagccgcgccatggacgcagccatc

SEQ ID NO: 39281 - DNA, 185 bp, Mus musculus
  source 1..185: mol_type = other DNA
tctcagggattcaccgctatcgatgcagcttcccacctcctgccccctgagccgggagcgtggaaggccatcctgtctacaaagtgatttggaagttgacctggactacagtgaaaccttaccacgggacgtggtggccataaagaaggccgggccaggacatctcgccgcctgcagctgagtag

SEQ ID NO: 39282 - DNA, 422 bp, Mus musculus
  source 1..422: mol_type = other DNA
ccacaaattggaggccagcctgggctatatagaaagagctgtgtgctcttgtaacccaagcactaagtggatagttggatcccaggagcctcaccattgacttccggtctccacacgtgcatacaccacaccacacaagcagtcctggcgtgccatgcagtcctgtgaagttcctctaaggttctggagcagggacttgggccagaaggaactcccacctcttcccacgtgagtctctgaggagaccctccccagcccgtgctcctgagccagaagcccagaggggtgcatacagctgtcccctctccctgagccggggggggggggttaatgacgtcatccccccttgcgggggtggggggggcactacacagcactggctggctgcccggcagaaaggtcccgggtccggactccccacc

SEQ ID NO: 39283 - DNA, 257 bp, Mus musculus
  source 1..257: mol_type = other DNA
aggggccacaggggtccccggaacccatcctacagtggtaactttggtccttagcaacgagggtcctcagcagcccgagcctaccctcgggccccggggcctgcagcccaaagccaggccccggcgcggcccgaccggcccctaactcacggtccggctcggccatgggaacggggtgggggccctcgggactgtcaccgactgctctgtcccgtgacggcagcggaaacaagctggcgccggcggccatattgacc

SEQ ID NO: 39284 - DNA, 343 bp, Mus musculus
  source 1..343: mol_type = other DNA
accgcctgccaaggaggaggacagcggagcccggccagcactgggccctcttaacatgcagcttgtgtgagctcaaagacccttcgttctttaaccacgttcttgaggcctgtaggccagaataaggcatttctctattgtaaacccaagggggtggttgtgggactctgagcctgaaggcctgccctccaacaaagtgggtactaggctccctttcctggggacccactttgcttacatgacttgtgtggcctctgcttctttttccagaccatctatggggtagcctggtgccctggctctcagcctgccagaggctcagaggaaggtgatttcagatgcc

SEQ ID NO: 39285 - DNA, 296 bp, Mus musculus
  source 1..296: mol_type = other DNA
gaactagttttgaaatcaaaatctggcttataaggttcagatccgatttggggatcaggagctcaaatttatagagttgtgagacacttgactgtgtgaaagcgtaccagtctcacaatttgcgcccacgacagctctgggccaagctctgcgcccagacctggtcctccgggagccgctgcgtcgggacctagagagcccaggccgctgtcgcagaccccggccatggccccagccacctcgggtggccccctgtggtcgcctgcctgtcgggtcaatatggccgccggcgccag

SEQ ID NO: 39286 - DNA, 464 bp, Mus musculus
  source 1..464: mol_type = other DNA
gtgcctgccagggtccaaagtcacatggcaatcaatgagtgttttattagtgagatcagatttgaaggttcttttaaaaataataacctccagcagacttccggagcttttcgggtactcgagtagttgtacaggagcgcatgcgctctctcgggaccggttcctagattgcgccacagagagcctccactcttcattgaccaatcgagtgttgacgggaaggcctttcttgcttcggaggcccacttccatttactgtttgtgggaccaaaaatctggcctattaaatcagagtttattttacggtctttccaatagaacggcatgcgtcctatccaatagaaatgtcccctccccccaagatagggccagtggctccccctatcgggtgggggcggcgagtgacgggcgtgtccctcccccaatgagaggcggggggaggcgggttctgcgccgccatgtcg

SEQ ID NO: 39287 - DNA, 233 bp, Mus musculus
  source 1..233: mol_type = other DNA
agaattgtcattttccggaagaacggagttcaggctatggaatatccttttctgggtttctcagagtttagcaatagaaacagctgatcagggtatgttctaatgagatactattctgtgcaagtgagacagctcagctctacaggccagcctggtctacagagtgcctggacagccagggctacacaaacatttttttttaaagaagccactttttaaagcaggccccagcg

SEQ ID NO: 39288 - DNA, 307 bp, Mus musculus
  source 1..307: mol_type = other DNA
ggtctagccctggctgtcctggaactcactttgtagaccaggctgtcctggacctggggttttatatagacaaagagcctgttccaacacagcgttgtgatgaactttatacacaattttccaacagcactgtgaaatattttctcaggccagcgtcccactgggccaaaggtttaacacatgagacacgaaggagtgcttttttttttcgtttggacctcgctgctaaagggcggtggccgcggtggcttcggtgcccttgaccaacatggcgaacgttcgtgcccgccccctaagtttttcttcg

SEQ ID NO: 39289 - DNA, 367 bp, Mus musculus
  source 1..367: mol_type = other DNA
caggatttctcttataagtcctggaactcactttgtagaccaggctggcctccaactcagaaatctgcacatagccttggctgttccagaattgactatttaactgttaagccacttagctgcccctccccagtttgacactgcaggggagcctcaagggtttaaagtcattgccatggtgcccagcaataggcagagtcttgctctgcagacaaggtgctggggtcactctagtatgagggccaccccagaacctgtggccccagctgcgtgtgcactgggcccctgttgggcagggttttatgaagccttgcaagggcatccttgtctgggccctaagcgtctccaccagagagacctcctgtac

SEQ ID NO: 39290 - DNA, 409 bp, Mus musculus
  source 1..409: mol_type = other DNA
ctatttctctagagtgctggtctagggagactaaaagggtggtgactggcagcccgggacacccaccaacccatattccatcacactctcattggatgggaaggtggcgctgatcttgatctttgggcaaattgttcccatgagcacctccacatatcgatctggacacccagaggtctcagcagcctggccactgttagtgtagcgggtttcctggggaccccatgcagcctgcgctccagggaagaggctcctttcagaaagggtggagcctttctggatccactagatctccaggggagcagggcaaacctccccagtcttgggttgtccctatctctaagcctaggaaaaggcaggaggagactcgcccggccttgacaaagggaggagctgaaccactaccttg

SEQ ID NO: 39291 - DNA, 383 bp, Mus musculus
  source 1..383: mol_type = other DNA
cctggggccagaggcactgaaaggcaagactgcctgccttacggagcctgctcggcttggagaggggccgcagcatcccacacagcacagagcagaacctgttttctgtagtcagccttgcctgggtgacctagccatggtctaccttcctgagagctagcagtgttttataaatataaaaaaggaaagagcctagggctaagagagcctgggagcccgaggctaacctcggaaactcagtgagaccaggtctcaaagtcagtcgatgaagggccttggagctgcaggtgcagacagtcctcagcactgtccccagctgaggagacagggaggcccagagcccggctggtcctccccagggaggactgaagcatgactcagga

SEQ ID NO: 39292 - DNA, 429 bp, Mus musculus
  source 1..429: mol_type = other DNA
tatctttgaaagagtttctttaaactagattcaaactcgctgtgtactaagtaagtctggccttgaaccctcctgtccacaccctgtagaccaggctggcctcgttatttatttaatttaagactgctgcggcctgagaacagagatcccacgttccatcgtgcaaggtttatagtatatagtttcgactgacttctttaatgccaaggcagaaaaggagccccgccttatgaatcattcatgactgggccccgcccacacggggtgacgcgcgcgttcccgctagaagcgcctgggctcccacgctgggcgggcagccggaggtgcgttctgcgccggcgccgagagcccggggcctcctcaggtgcgcgcgcgcgggagggcggcggcggcagcgcagtgcgcaggcgcggcaagtgaactgcgcag

SEQ ID NO: 39293 - DNA, 447 bp, Mus musculus
  source 1..447: mol_type = other DNA
gcagagggctgcacagagggccccgtcccctgggttctgagttgatcgccttgggacccatgggactcccctttacccactgaaggacactatgtaaataagatggggttcttgaagatctggaatcaagccagaggttgcaggtctcgtgacacatgcatgtgacttaagtgacagctgagctcagggcacctgcccgcatggcacatgtctgtgcaacgcttcaaacgtgtagttcccggcctcctaacagcactgtagcagtacggaacgcatgcgtagagaaaataaagtctcttcccgtacaactgcgcacgcgcgtcagaagcttaagtactaagtttgcgcggcccgggaaaagcttagcccgcctcctggcgctttaagtgagctcattgcgcatgcgcaagttacgagctggagggagggtgtgacgcaggttccgct

SEQ ID NO: 39294 - DNA, 459 bp, Mus musculus
  source 1..459: mol_type = other DNA
gtaacttgcgcatgcgcaatgagctcacttaaagcgccaggaggcgggctaagcttttcccgggccgcgcaaacttagtacttaagcttctgacgcgcgtgcgcagttgtacgggaagagactttattttctctacgcatgcgttccgtactgctacagtgctgttaggaggccgggaactacacgtttgaagcgttgcacagacatgtgccatgcgggcaggtgccctgagctcagctgtcacttaagtcacatgcatgtgtcacgagacctgcaacctctggcttgattccagatcttcaagaaccccatcttatttacatagtgtccttcagtgggtaaaggggagtcccatgggtcccaaggcgatcaactcagaacccaggggacgggggtggagccctctgtgcagccctctgcacagccctgcagctggggcagccacagagtcaaggcggg

SEQ ID NO: 39295 - DNA, 420 bp, Mus musculus
  source 1..420: mol_type = other DNA
gcccagcctgtggggaggcagtagtacttccagcaacggatggtacgcttattagcgaatggtcctagactcggagttggtactctcaatttgtctgttctttttacagaaataggcaagctaacagtctctagaattgtatgcacactaatgggacgatccatgcttatgcaaaggcctcctctatctaatatgcatcttagagttggggctaatttagtctaagttagatggggcatctccttatgcaaactagcatgcaaatattcagaatagctgtggtactgttgattcaaataaacgcactcattattgaggcgggctggctcacttagttaggcaaattaagcgcagaggcacagccagactgtgggtgagaaaagggctggcttccgctgaggaccgccctcaccttgagtg

SEQ ID NO: 39296 - DNA, 170 bp, Mus musculus
  source 1..170: mol_type = other DNA
ccacatatgcggccggagccatgggtcccccggagttccagggggtctgggatgaagaatgcttgcctggcatgcaagtgatctagggtttgaaccacactacatgtggagtttaaggccattctgaatacatgatatctcactgtgaccatggctcccatgcttgccca

SEQ ID NO: 39297 - DNA, 315 bp, Mus musculus
  source 1..315: mol_type = other DNA
atatgaggttagtctgatccaggactacctggaacccccgctccagggggatctgatgttagagaagtatatggtgataaagtgaaaatgttttccaggtataaacatatgggaggatgaatcctgcttcggtaaggccagcctgagctgtgagctaaagcaaagagaaatgcagacttttcttttgagcctgtttttacacactttttaaaactgtgtgtgtgtccgctgagcctcagcaggcagggatcccccgtgagggggaggggagcctttggtctctccccagcctcttccttccccctggcctagggg

SEQ ID NO: 39298 - DNA, 361 bp, Mus musculus
  source 1..361: mol_type = other DNA
ataagacttggcccacacaagacttcacgaccacctggaagtcctggaagtccagttgcaggagatctgacttctgtgggcacaaggtacgcgcactaaaacatatactttattgcccttggatcccaatcgcataggcaaatggagtcaaccccagtcccatcggcttgcctcccccagaggcagagagtctggctaacactggacccactgtcagctgggcgtgtcacacgcctgccaaaagtataaaagttaaataagttgctttttgcttttttttttttttgcgcgtggcgcgcgaccaagccaataggagcgtggaagcgccttcgcacggcggagcctttccctggcggaaggg

SEQ ID NO: 39299 - DNA, 150 bp, Mus musculus
  source 1..150: mol_type = other DNA
gattgtcaagaatccggccgccccggatcaggtccagatcagatcactgccccgtgggcccaaggcagggcggggcgaggacgacccccgagatctaggccccgccccgagctcgaggccctgccccctgcaagccagcttgagtgcagc

SEQ ID NO: 39300 - DNA, 285 bp, Mus musculus
  source 1..285: mol_type = other DNA
gccactctgggcacctgcctgggaggctccggccgggctccgagcggcggcgacgcggcctcctcctcccgctccctcactggctccggcggcgctggagacgggcaccgggagccggggcgagtacatgcccgctgggtcctagagcccggctagggcttatctgaacggttggtccctgatgatatgagaagggaccctggtcccaaggctgcactcaagctggcttgcagggggcagggcctcgagctcggggcggggcctagatctcgggggtcgtcctcg

SEQ ID NO: 39301 - DNA, 418 bp, Mus musculus
  source 1..418: mol_type = other DNA
tgcagcctgccacctccccaggactttctgaatcagtcccgagtcactgggtttgatccccaggcctcatgagatctaaagagagagccgactctgtgacacacacacgcatgcctgtaggccaggctggcctggaactcagagatccgcctgcctctgcatcccaagtgctgggattaaaagcgtgaaccacaaagctcggtctgtaattctattttaatttcaaaaataagaaaaaaatggaataaagagcactgactgctctcatcatcaaataccctcttctggggtgtctgaagacagccacagtgtacttatatacataaaatgaataaataaatctttttaaagagtctgaaaaaaactccacatcgccaccccttgacgtagaggcagccagcgagggtggccatggtgc

SEQ ID NO: 39302 - DNA, 260 bp, Mus musculus
  source 1..260: mol_type = other DNA
ctaccctggatatagatatatacatatctatatacatatctatatccaggtcatcaaggttattatccaccacaaccacatccgaaatttatttgctcatttttgtaagtaagcaatgtattgtttatttattctgactcctggaaagccagggctacacagagaaaccctgtaaaggactccgcagccctcgatcccggagcgtcgaaggcgtcggtggccgcgcctggagctcccggaactaaaagcggacctcgggc

SEQ ID NO: 39303 - DNA, 212 bp, Mus musculus
  source 1..212: mol_type = other DNA
atgttcaaagccagtactcgtgacttttttttttaaagatttatttattatgatacataagtacactgtagctgacttcaaacgcagcagaagagggcgtcacagttcagcttcctcagtattgggaatacagaagacagatctctgtgagttccaggccagcctggttcccttacgtcattggcaggctgcaccccctccagagggtgtgg

SEQ ID NO: 39304 - DNA, 185 bp, Mus musculus
  source 1..185: mol_type = other DNA
accagcctccttattttcttgagtcaggtatattgctggccaggctagcccaggctatgatactgagcagtggcttaagcactaatctgttatgtttaacagccagggcctcagctcggaggagctgagtcagtgtacggaacggctttccggaagcaagttgggcaggtcgtgcagtcccaccc

SEQ ID NO: 39305 - DNA, 470 bp, Mus musculus
  source 1..470: mol_type = other DNA
aacacctctatatatttgtatttgtcttcctgcctaacggcatttgacgacacacaggccaagctggcctggccactgatatatccgcaaggacgtcgtggccaacagacccacgcctcccgcaaggtccggctggggcggggtcaatgccaaccacgcctcctcccaggagccgggggcggtgccaggtgcaggccgcagagccaggtgcggggccctccgcgcttgcgccgcatctgccccgccccgccaggtgcgccccacccccagcctgggtgcccgtagtactcctcggacgggtggaggctttcacagtctggggaagagtcgcagagtgttaaagggcttccggggacccgggcgcctcgaagtcctactccggggcgaagccgcacctgagcccgcggacctgcagtgcgcgtgcgcggccgtgggctttcccgcacctgctcgcgagaccccacccccac

SEQ ID NO: 39306 - DNA, 451 bp, Mus musculus
  source 1..451: mol_type = other DNA
gcagcagccaggtatgctcctccccatagttacctggcaacagccaggtagacctggcccattataaaaggggctgcttggccccaactctattccatggtataccgtcaggggggaagggatgccttggcatgggcccgccgagacatccctttatctctttttatgatcgcaacaggaacaaggattcaagcagactaataggtccctcttaaaaagagaaacttcagtgtgcaacacccttcgctgccgccagagggagcacaggacggaccctagagcgtgtcctgggaccccgcccggagatgcctgccctggggcactctaagatgggcaccccgggcttgaaggctgcacattagccagcttgccaggcccggcgatcggggaggggcgggtcccagagcacgagcccccgcccccggtggccccgccccggccattaagatcc

SEQ ID NO: 39307 - DNA, 280 bp, Mus musculus
  source 1..280: mol_type = other DNA
aacacctctatatatttgtatttgtcttcctgcctaacggcatttgacgacacacaggccaagctggcctggccactgatatatccgcaaggacgtcgtggccaacagacccacgcctcccgcaaggtccggctggggcggggtcaatgccaaccacgcctcctcccaggagccgggggcggtgccaggtgcaggccgcagagccaggtgcggggccctccgcgcttgcgccgcatctgccccgccccgccaggtgcgccccacccccagcctgggtgcc

SEQ ID NO: 39308 - DNA, 334 bp, Mus musculus
  source 1..334: mol_type = other DNA
ctttctctgcagtgatcggtaagagcttcctgactttgtagaccaggccagtctctgtgcgtgtctggtgctcacagagaccagaagaggctgggaacccaaccgttgctatgtcaatggacaaagacattgattcaactgtgggtcatccacatcccttggggcagctgggacccaggcatccctcccaacggcccctgggacgtgtagtccctacaggggcgccctcgggcgccgccgcgcgcccctagactccaggtcccgtcgtgcgccgggaggcgcggggattggctgagccacgcccccggcccgccccgcttcgctcgcgccgcag

SEQ ID NO: 39309 - DNA, 344 bp, Mus musculus
  source 1..344: mol_type = other DNA
ggtacccactggtcaaggtaatctcttgctacaaggcacctgctgccagcgctaggagaagacagattcctgcggtgtcctctgacctctgcctgtgtgtacagtcacgtgtgctcacacgtgcataaatgtgataaaaatatttttaaaagaatgagttgttaacgctagggaaactgaggccctggcctagggtgaggtatgaaccccacactctccagcctgggtcggctatacccaccaaatgctgcctgatttgcctggcaacctcagcagaaccctgaacaagcagggctgtgcaccctccctccttcagacctccctggcagacatcccgggcaggc

SEQ ID NO: 39310 - DNA, 332 bp, Mus musculus
  source 1..332: mol_type = other DNA
aacacagattcgaagatcatagtcataagctattgagctccatctgtgggtggacactagcgctggactcttgagataaaatagagcaccctcccagagctgtgcttccaaggctgggtggaagagtctgccacaaggtttaatcattaagcctccagcctctgcagccggcactgtctgcagaggtgaggggcccaccggatgctgtggcgctgatccagccctggctcagcacccccttccccaaagggaatattggcagaactggctctttggggagagcagccatctcaggggaactccggtaagctggcgtggcctgaagcactgct

SEQ ID NO: 39311 - DNA, 637 bp, Mus musculus
  source 1..637: mol_type = other DNA
agccttgcagcccctaccatctcggggactggtctggagcagagaggaacacggggagccgcgtcctcacgttccggctccccgggcgggaggtaggtgtgtccacctccttcgggcaggagccgcgcctgttacctgtgacaggactcccgagaagggacagcgagctctgcggcaccccggagctccggttagtcccgcagccccgcacctggcggattgacccgggcaaccagagcgcgcgcgggtgcacggtggcacgcgcacgcgttccaaaagggggtgggaaaagaagtcctccgacccccgccccgaggggggacccccaaccatccagggctgagtcggccggagagcgcgcgtgcgcgagggcgcgccgcgccgtcccgctccgcccagcgctgaagggggtctagcgcagggctccagtcttcccgcccctccccaggctcgcaggctcggagtagtagactccggccctgacccctcggggctgcggaagtcctccggagactggagctgcaccgacccggtgcggtggcgtgcctacgactcccggcagaccccgcgcgccaggctctcttcagcgcgctgctgttcccacgaggcctcgcgcgaagcggcttggaagtgggca

SEQ ID NO: 39312 - DNA, 531 bp, Mus musculus
  source 1..531: mol_type = other DNA
gtttaaaagtgcttgtcattatagcctaaagttagatttttttttttaaaggacagcattctcaacaaatgttcaactggcagtcagcatgtagaagaatgcaaactgatccatttaaaaaaactttttaattattttttatttatatgagtacactgtagctgtcttcagacacaccagaagagggcatcatatcctattacagatggttgtgagccactctggaagagcagtcaatgctcttaaccgcaagttagattcttgcctaagcaagaaacttacttccttatcatgccttgtcctaggccaatgtgttggctaatatttaactaccctcgaatgaaacatcttggctcctcaggagaagttttgatctagaggtcaaacatgaacagtgcctctgtcagaatgtttccttctgagaacaaagctacaggttatttttagcctgtcacacatctgagagcctgacttgctagagccctgctctcaaggccttgggctggaaacgcgcaagccacgcaggcctgc

SEQ ID NO: 39313 - DNA, 416 bp, Mus musculus
  source 1..416: mol_type = other DNA
tactttcaggcttatgaagaagtcaagaaaaggtggacatgccccagattctacaccacgagtcgtatcatttacagaaaatgccttttgaaacaacttaatttttgcctcttcctttatgcagcacataatctaaaatgtccttgtttcagaatgagattctgaataaattcatgttatatttcatccatccattcatttattcatcaagacaggttcaaactcactatgtagtacaagctatgcatactggatgcgaaaattagtttattttaatacctgactccatgttccagattgacctagattagtgactgttttacactggtaactataaggcccaaagaatacaatattcattcttaagtagggtcttgaatccagggcttcagccagccaggcttttccttacagca

SEQ ID NO: 39314 - DNA, 345 bp, Mus musculus
  source 1..345: mol_type = other DNA
cattgaattctcattatatgagtgagaatatatatatatatatatatatatatacatatacatacatacatatggaattccataaaatttgatccaacataaatgttcatgattggcccaacatagaacagacgatgctcttaagaactgaaccacatttaaaagtggtaagtagactaaatattccagtaaagatagggcgatctttgcctaccgagaacgcggtctggtttgcctcgcttctgtagctggagtaaagatccaccactgcttaagtttcagagacttcaagccttggatccttggctgcagactctagaagtcagccacatggcggctggaaag

SEQ ID NO: 39315 - DNA, 496 bp, Mus musculus
  source 1..496: mol_type = other DNA
aactagtataagtggttcacgccagagctactgctgtaggcctaaagacttggccatttctgcccaatcctggatcctggatgcggctcccttgtgcgcatgcgcattgaagcccttcccctgaccaagagctaggggcctggctcgcagcctccgcggggctggaagcccagaacgcagtcggactctcaggcttgagatctgatgtcccagagccttcagtaccacggtcccgtccgtagcactttggtgccgccgctgcagcgctgaccgcgctggcaacccaccctcccgggatacccgtcagctgggtggtccccggtctcgtgcggcctacgctcttctccggggacccgctctgaggacccctgggactcaggtggcccgttcgtgggtacagctgccgtgctgacgcgctgcacctaaaccccggcctggctgtggactgcacgttagattcccggcgggcctggggagcagagaaccgggggcagcc

SEQ ID NO: 39316 - DNA, 162 bp, Mus musculus
  source 1..162: mol_type = other DNA
agggagagccaatcacagtcactgttgctcattgcactgcacaggatggtgcatccaaacccttggcacaggagcttcgacccagcactatctcagcagcgagtttccagggaaccgcgcatggctcgagtaggctgagtcatccaatcccaattcgacttc

SEQ ID NO: 39317 - DNA, 646 bp, Mus musculus
  source 1..646: mol_type = other DNA
gaaaagggttgtaatgctgcaggcgtaatgtacagaaccatcagtaaaccaggccctagtcatctcttctttagtcaacagagcacaggcgacatgggcaacttcctcatgtaacttgattgttccttcaggatatgtttgggtccaatcacatgcataccatttgatattgatattgcacatcctactttatcttgtttaatgaaaatctaaatatagcaacctcaataacatttatttaataactctatcttattattgtttttgattattggatggtaagttatattttattcatgttaaataactaattattgcttaatatctaaccaatctgtaccttatgttttagaagacaatttttgttttctttttataaagtttattatcattattttggagaacaacttttcctttgcaattaatagagtcgataattggttgtcaacttgattacatccaactcccaaaatagagggcacacctctgagggctttctgctcatgaatctggatttttgaataaggaagacacatctttagtccagaactttaattcagttttaaactgggccatgtttatggaagaatgaagcaagcacacaacccagtctaggttgacttggccagcgccgggtctcgcggtg

SEQ ID NO: 39318 - DNA, 297 bp, Mus musculus
  source 1..297: mol_type = other DNA
atatatatatatatgaatgagagagacagagtctttctgtgtaaccctgagtatcctagactttgttctatagaccagactggcctcaaattcagagattcacctaactctgcctctgggaggaaaaaatacttttgttttttcaagacagagtttctctgagaccagctcttttaattagagccctagagcgtaggtgagaactcacatcgcctcacttgggcttgaaccctcaaagcccataagggaattattgtagccaccgggagcagaacgccgtttccgtttcctgctcgt

SEQ ID NO: 39319 - DNA, 240 bp, Mus musculus
  source 1..240: mol_type = other DNA
tggtattaaattaaggcttcatttacacactaagagattctatccattaattatattttaattttacgtgcttttaatcacagaaacggatgggcttcacccatgcagacaccctgacgtgaagggagcttcacgaacctcctcttatcggatgataaggattgtgtacaaactgagcatgcgcagtactaatagcccagggcctttttttttttaagaccggaagtgaccttggtgctt

SEQ ID NO: 39320 - DNA, 309 bp, Mus musculus
  source 1..309: mol_type = other DNA
agaattgtaaacaaacgcttctatttcctttattaaaatcaactaatttagagattactgtaaaaatatttatatagaaatgaataaataaaaattcgaagagaatttttttcactacgttataattcttcctaaatctgatagattttaataactaatattcattctttttttttatatgccacctaaatggatcatataaatctacagtgattctctgagattggccccctatcatggaaggggctcaatgcatgaatttcactcggcctgcctcaggccgtgatgccatcttccccgccagttcga

SEQ ID NO: 39321 - DNA, 302 bp, Mus musculus
  source 1..302: mol_type = other DNA
caagagtacttgttgctcttgaagaggacccatgtttcattcccagaactctcatccagtttcggggaatcggatgccccctgtgtattgcatgcatgaactgcagacaaaagaaagtatttgtaaaaacgtatatctaataacgtcccccgtacaagggtctagttgactagtaaatggctccgtttccttaggatctagttagtatgtagacattgctgtttctgaaagtggttgcaaattcacacagttttaaatgtcactgaacttcaaggtctcttaactggaggaccatcccaagg

SEQ ID NO: 39322 - DNA, 413 bp, Mus musculus
  source 1..413: mol_type = other DNA
gacagaggtcttatctcagcctttagggacccaggcctggtgttttactgcagcttgaaagaaagtaaggcttgcgggcatgggctcggcacaaaggaaagcccggctctttgtgtctttcttggccaggccagatcccaggagcagagttctgaagtcacaaccatgcgtccgcccagtcgcaaggctcctgccgagaggctggacaggccactagcctttctgggaaagttgttccggaaaagaccgtccccgcagctgctcacgtccagcgctgcttcgccggcggcgtcaccgtctcgccgcgctaatgggctcagccacctcggcgccttcggccatgactcctgtccctacgaaacgccagccgagctctgaccggaagttgggtcgggccgcgggtccttctggga

SEQ ID NO: 39323 - DNA, 362 bp, Mus musculus
  source 1..362: mol_type = other DNA
tgaatttgcagtctgcatgcttcagtctcctgaagaccggatgatataattatttttactttataactgtaattttgctactgttaggaatcctaaaggtcatttgacccccaagggggggggggatctcccgatagaagaaagcataattatctttccagtcaaggagcctgagcaacctttccctgggtcaccctcgctggggtgagaatatgcttatctcacatattaagcatgtgataatgtgatgatggtgttcacgacacaacccccagcccagtgagctaggtttggggtggggatagagggcagcggaatctcctagcccttcccgagcacgcttgcgcactccgacaggcctc

SEQ ID NO: 39324 - DNA, 396 bp, Mus musculus
  source 1..396: mol_type = other DNA
ccactcggaccttcggaagagcagtcgggtgctgtgctatatagcattttactgaaaggcttaactttccacaagctgtagcattagagaatataattatagatgatcaattaatcagaaatttaaccatcacgtttactttatatactgacaggtctccttcaaagtgataagaatataggcacaccattttattatttattttctggcaatttaaaaatataggaacgaaaggtatttaagttgatgatccagcactttaatacacagagaaaccctaactacatgataggaatgtcctttaaaatcttattctaagacgtaaatccgattttcctcggagcacacagtgagtgtggcgcatgcgcacgcggtgcgtgcggctgtccctcccag

SEQ ID NO: 39325 - DNA, 354 bp, Mus musculus
  source 1..354: mol_type = other DNA
gggaagaatcccaggccgccctggaagccccgcctccgccacactgtcacaaaaattacaatttcacaatagttcattttcctgattgtttagtctgaaccattatcagtctcaattccagcctggcttcagtttgtgatactgtagcaatcgcttccttaacaccagagtctgatagcgccacggtggccaagatggcgtcctctcccgtaaaacccagaggattgcgccttaagcctattctgagttgtaacacagtgtaaaagtggtagtatctgagttccaaccttttactacttatccactgggaaaagttctcggcagagacctctgggagtgctagctcactgaagg

SEQ ID NO: 39326 - DNA, 474 bp, Mus musculus
  source 1..474: mol_type = other DNA
cacaagaaaatcatacaaagcactttcagatggaacagtatttggtccaaaatagaatcaatcggtaataactgattaatgcatcatattggatataaatccttggaaaattattaatgacacataacttctaaaacaatctttggacgacgacgacgactcccattgtgagatctccatacaaggctgtgtggtttttaaacctgaatcgtcgttctaggtttcaaataccagtctggcaatgtcaccggtgaggcgacagtctctcctagggtggtcaaaatgaaccaataggatcaaagcacagtgctgtcacaagatcaatgggatcgcccgcgcgcggccacagaccgtagcaggcagctgactcccacccgccccagccaaggggacgctggtgcaagcgcggggcgagggagaggcgcgcgcggcaactaacgggccgccccggaggctcctgggagagcgagcccc

SEQ ID NO: 39327 - DNA, 371 bp, Mus musculus
  source 1..371: mol_type = other DNA
gagaagccagtgctcttaacgctgagtcatcgaaatcacttcaaaggaagatgctttctgatcctcctgctcctcctgcgggctagcattagaagcatgtgggaatccaaggtgtggtcctggtatccacctgaagtcacacatctgcggaggagatctgttcctgcacacttctggggaggcttagctctctgagaaattttttttcgtattgcactgaattatattactagaagtctcagccgcatgattatgcttactatgcaagaaatcaacagattcctaacttttttgaatgattttaaatgcagagagggctccctggcttctcgcgggaagatcacgcgcctggcgtgacttcagagctttga

SEQ ID NO: 39328 - DNA, 125 bp, Mus musculus
  source 1..125: mol_type = other DNA
atatgtttgattcactacttgtaagcactgaccgttcaggacacgcggcgtgagcttatttggggtgaacaagccctgagatgtcgcggagacttctgggagtgctcactcactccctgagtgcg

SEQ ID NO: 39329 - DNA, 417 bp, Mus musculus
  source 1..417: mol_type = other DNA
tatatatatatatatatatatatatatgctttaaatgaggaatgcctaacctaaatctaaattagaatcctgggtttttagtgaaatgacgctcttcaaaccgaaactcgaattaattaagcatgacagagtaatctgtatttcataaacgttttagtacacagatcgtcttttaaaatctaaacatgtttactaaggctttctgcacatatcacgaaatgcatttgcgtataacaataaatacagttttaaaagtatttaacccatagtgggtcaaactttgcagtcaaattcggtctcaggcgccacgtggacacgacggccgtgctgacccccactcgctgcccctgcgtctgcgcactcagggagtgagtgagcactcccagaagtctccgcgacatctcagggcttgttcac

SEQ ID NO: 39330 - DNA, 144 bp, Mus musculus
  source 1..144: mol_type = other DNA
ggtactctggactagcagtcaccaggctggcctaaggcgtgtgccatcacgcccgagaagacagacatttatctctgccctggttcattgggctctctgtggacaaatctaatttggtcacgccccaccagtctgggagtcagt

SEQ ID NO: 39331 - DNA, 327 bp, Mus musculus
  source 1..327: mol_type = other DNA
taagcaataaagactcaaaccgaggttctttaggtcatcatttagaggatgtttaacaaacctctgtctcaaagcaatgaatgaatgaatgaatgacaactgaagtccttttttgcaactattactgcaacggtgaccgggtaccctgtatctagttcctggaggctccagtacctgggcgttagaataatttattcgtactcaaagctatttaatctggacagcgttgaatcccgcgcaggcgcagtctgcaatggaggctctaggaccgcgcagacgacggctgggtggcggcagggtctaacccggagtagctgcctgagtcac

SEQ ID NO: 39332 - DNA, 322 bp, Mus musculus
  source 1..322: mol_type = other DNA
tgaacccgcgggcgagagggttgccggtactcaccgcgtacagagggaggtcagaggtcagccctggagccagtcctcactggtcccggccttctgcgcttgcgcgggcgcgctacggaacgcgggaagggtcgcacaccgaagctgcaccaaactagggcgatgctgcgcgcatgcgcgcccaactccgactgagcgtgaacgagagaatccgctgctctcttcttggcccaaggccagtgcacatgcgccgaacttacactcggcggaccgggacttcccgtgcacggaaggcctctcgggattggttggacgtacccga

SEQ ID NO: 39333 - DNA, 402 bp, Mus musculus
  source 1..402: mol_type = other DNA
ttgttgaagaaattcacatggatgcgacgctccagttccatgcaggaagcagggctccagtttacactgcagtagatgaggagaaaggctgtcagaggcctcatcttcagactttgatcaacttccaaaaagtctgttctccggggctcccaggcctgggaggctggctgtcagtctctgcaaccttccgtgggcgccgatatccccgtcacctccatctcgctgcgccccggagtggcccgcggtgcggttcagccgtctcacaccggctccgcagtggccgccgctgcttctgggatatagtcgggtacgtccaaccaatcccgagaggccttccgtgcacgggaagtcccggtccgccgagtgtaagttcggcgcatgtgcactggccttgggccaaga

SEQ ID NO: 39334 - DNA, 387 bp, Mus musculus
  source 1..387: mol_type = other DNA
tctgttctccggggctcccaggcctgggaggctggctgtcagtctctgcaaccttccgtgggcgccgatatccccgtcacctccatctcgctgcgccccggagtggcccgcggtgcggttcagccgtctcacaccggctccgcagtggccgccgctgcttctgggatatagtcgggtacgtccaaccaatcccgagaggccttccgtgcacgggaagtcccggtccgccgagtgtaagttcggcgcatgtgcactggccttgggccaagaagagagcagcggattctctcgttcacgctcagtcggagttgggcgcgcatgcgcgcagcatcgccctagtttggtgcagcttcggtgtgcgacccttcccgcgttccgtagcgcgcc

SEQ ID NO: 39335 - DNA, 310 bp, Mus musculus
  source 1..310: mol_type = other DNA
aaaaaaagttttactaatagcattccttctactacaataagatttttacattctccataattttaagccgtaagtagataaaaatagatctcagagctcacagccagcctgctggtctacagaatgaattcagtcacaaagaaatgcggataagtgtcttaggtcactcactgaacagtaaagtgatattagagatgatttgtaaatgcaaaaccatttcccgggagttagaactacaactctacctctgccaagggggcggggcttccggaccaggcgggcctgggaagccgccgcctctcacccggtt

SEQ ID NO: 39336 - DNA, 218 bp, Mus musculus
  source 1..218: mol_type = other DNA
gggagaatgatgtgtgtgcacatccctctcaccccgtcctaccctggccagtcctgcccagtcagcaatgcgtagttcctcgtgctaccgcggctacgccccaatcacgggatcctcactatttgtataggcaagagtagggcggtgttgttcgaccccaagcccacggctcttttcccgggactgttgagccggggtgccggctgcgtccaatgggc

SEQ ID NO: 39337 - DNA, 129 bp, Mus musculus
  source 1..129: mol_type = other DNA
gctctggatccaaggcctccgtaggcctgtaccatacctactaacactggctattgctggggttggctggaactatctcggaaattcccagtctgctaaacgacctggtttgctaagtggagtctggag

SEQ ID NO: 39338 - DNA, 64 bp, Mus musculus
  source 1..64: mol_type = other DNA
ctggaactatctcggaaattcccagtctgctaaacgacctggtttgctaagtggagtctggagc

SEQ ID NO: 39339 - DNA, 339 bp, Mus musculus
  source 1..339: mol_type = other DNA
ctacaaggtcctaaggactgggaggaaggaccctgttgccaggctctcagggcatctcaaacctgactcctggaacaaggatagaggactctaatactcttagtccatggatcaaatctgagtcattggccccaagctcctgggccagagagaacctgagggccccataggtccagagcagacctggggccctgaccaccaagaaggttactgcattgaccctgtgcgtcctgtccctgtgtcagtgacataggacttacaacttgacctgcagaaggctaagtctcaactgagtccacaaggacacgcgttctctgaccaggcttcctgcgtcagtaa

SEQ ID NO: 39340 - DNA, 467 bp, Mus musculus
  source 1..467: mol_type = other DNA
tggtggaaccacggagcctgctggtgctccggggcctccacggcatctcagctacccgtgtggatgagctggacgccacctcgctgccacccaatgccaccgcttgcaagtcagcgctgcccggagcccacctggtgcgcggcacccgtgtctcactgaccattcgccgcgtgccccgtgtgctgcgcgccagcctcctgctgagcaagtgaccaccaggttctaagaccttggaaccctagggcagaggagctgtccagggttatttatttccccagtaactatggaaaccatcaaataaacagaaaatacctttactcgttttggatttttttttttttgatgggaagagatacttcagtttaaactacaacccaggcaacaattgcattattttttagttttccttgtgagaccagcttgcctggggaggaaggagttaaatgcctccgcaaggggtggagcta

SEQ ID NO: 39341 - DNA, 335 bp, Mus musculus
  source 1..335: mol_type = other DNA
agactcatttctcgctcagtgccttgagctccttctcgaatctcaggagacacatggatagcatgcctctagaggagggggctgcctacgcctttaagcgcgggcgcgcgcggggcctgcgcctttaagcgcgggcacgcgcacggccctgggttcccggcgaggaggccgcgggagcacccggacccggcccgcctgcccggcccccgcccggcccccgccccggccccggcgggggaggggtctctgagcgcgacccctcccccctgagcccccattgcgatgcccgggtccccgcgtggccctcgcgctcaggcctcgccccaccctggccc

SEQ ID NO: 39342 - DNA, 274 bp, Mus musculus
  source 1..274: mol_type = other DNA
tcatgaccttagtctgacctaatgttctttgactataacatcatgttgctgtatggagcctcgagacctatggaaattccctagacttcctgagccaatcacttacggctttgtctagatagccaaaaaaagttttcgcttggccgtaccacggagcgaaagatctttttaaaaactgctatcccttcgctctcaatcttccgagggctcagattagagtggcccggagactgagcaggaggcgggacttctggcagacgtgccagtagccctg

SEQ ID NO: 39343 - DNA, 226 bp, Mus musculus
  source 1..226: mol_type = other DNA
cactggggagccagtagtcaccacgtggccaccacctgacctctctgtaaaatgggagaaaggtgaggactcagtgacgtcacacatgggagcactgtcgtgagtgctctagtaatgctggttgcacgaccctgcaaagaaagacgatttaattctcagtcttgtggacttatctggagatgaagatgaagacctgacatgtgtatctcttctcgtggcacagccc

SEQ ID NO: 39344 - DNA, 164 bp, Mus musculus
  source 1..164: mol_type = other DNA
ctttgttttgacaggggctccaagtagctggcctggccatgcacctgctaaaacagccaggctagccttgtgctggacatacaggcttgggcaatcatgcctggcagtgtgtgtgtggtcaggaccagtcttgtccctagactcccgagatgatcacggaagct

SEQ ID NO: 39345 - DNA, 280 bp, Mus musculus
  source 1..280: mol_type = other DNA
gggcccgagcacgtggtcttccacctccaggggagttcacacacttttttttaaaaacagctagagctacatagtttgactctgtctctgcaaaagagccaatattggtagttgatatggctccaatatctataacccaacatttgggtaggccaagtaaggcacctatatggcccttgcctagagacttctccaagaggccatggcactcggtcctcttctcctcgagggcttcacccgggactccggggactgtgggcggggctccgccttgaaccgg

SEQ ID NO: 39346 - DNA, 244 bp, Mus musculus
  source 1..244: mol_type = other DNA
acctgcggcgcgcgcgtgcggagcggttagcgccgtgacgtcagcgcgcggcgtctcgtccgggatggccctgctattcccaacaagacttggagaggagcaactcacctagaacagagaaacattttgttgttgttttggctgggattgcaggggtgtgtttcgggcaaaccccagttccgaggagcccggtgtctccggagaagatagttccactacggtggtgggcggggccctgcactca

SEQ ID NO: 39347 - DNA, 264 bp, Mus musculus
  source 1..264: mol_type = other DNA
ccgggatggccctgctattcccaacaagacttggagaggagcaactcacctagaacagagaaacattttgttgttgttttggctgggattgcaggggtgtgtttcgggcaaaccccagttccgaggagcccggtgtctccggagaagatagttccactacggtggtgggcggggccctgcactcaggaaaggagggcgcccacatgcactcccagccacccaccgctgccaccgaggctgcatacacacagtgagtcggcctga

SEQ ID NO: 39348 - DNA, 375 bp, Mus musculus
  source 1..375: mol_type = other DNA
ttgtacactcacttaagataaaacagtgaaccctttatggaaggctatggtatccagcacctgacccgagtcatctggaaggcttcctaggtttgaggaagcaagggtgggagacttggcctccggtcctgagtgtaggtaggctagcttcaaaacactccctaaattcttgactgggaaaattcggaggtggattctggcatccttactgaacctagtgactcggtcttcacgcgagcaggctccctcccggggttccggagcctctcagtgcgcagagccgccacgctattgtcctggctgggaaggcggggccggcgcggggcggggctggcggcgccggcgcagcccgggggcggcgggaggaggaggcgg

SEQ ID NO: 39349 - DNA, 540 bp, Mus musculus
  source 1..540: mol_type = other DNA
aatccctggggcttcgccagcttccgcgccctggggaggcggagctcaggctcccgtgggcctgcgggtcggagagagggcacccaggtgctggagccttgagagaagagggtttctgctccctatttccagcagtccctggcccatccgagtggtgagtggttgccgggcgacggctgggaggcagcagtgccctggctctggcaggcagggagggaggctgggaaccgcacagcttgtcctgacagctccggtgcagcccagctgggcgttcccacgcagcgcagctggcagagcaggtgggggcctgagaccccgggtctgacattcctggacctctcagaaataaatgacatttggggctccgactggtacttctaaatatcagagggttggacttgccccagggggatagttcagacttctctgctggctgagaagccttgcaggctgcagcagaatgtctggtcttaagtcttaaagctactggatttgacatccagtctcgttctcactcaccccctagggcccccgaggatg

SEQ ID NO: 39350 - DNA, 402 bp, Mus musculus
  source 1..402: mol_type = other DNA
gctatacagagaaaccctgtccattggaaatggctttacagtgcacaatccagggctggagcgatggctccacagttgctctagttccagaggatctaatgccctcttctggccattgtgggcactgttgttatgcaaaacacgcatacatataaaataaaaacaaacaatcttttatttgtttaaaaaaataaataaaagacttggtgtcacatgacagctcacttttgcagtttaagtgtacacaagaactgtgcatacttagctaagattgcaaatcccggctgccttgaacctggagttcagcaatgcaagctggacagctgagatctgtcgtactgtcaggctggttaatcagtaactgccccccagctgggcaaggggcatttggtacagctgcta

SEQ ID NO: 39351 - DNA, 254 bp, Mus musculus
  source 1..254: mol_type = other DNA
cagatgattcatcagagaattcatatattaaataaattaaaaaaaaaacttgctcagcatagcttgtttcagtttcaaacagtggcaaatactatgaacaagttaggggaaacttcttgatgcatattgttaagtaacaaggggaaccgcggcggttaggagcacgggctgcccacccacctacaagcaaaatattcatacacataattaatataaataataaataaaaactaaccttcgctatgagtgcgagg

SEQ ID NO: 39352 - DNA, 323 bp, Mus musculus
  source 1..323: mol_type = other DNA
tttttttttgattattggtatatccccgaattaaataatcaaagtctttaaaatgcctgctcaggtcaaagcatccttctctaggcacttctctatcgtttaaaaaaagaaaaaagacgggcatgaatgtcatagcattccatacagaagcttttcctagaaaaagatgtcaaaggctgggccctgggcagccgccttgtgggcggggcgtagccctcaggctgagaagggcctccgcgtgcccgctggcccgcccctcatggggcgcgcgccagagacccccccggcagccgttaggggaggagcctgcgaccgcccgcgcg

SEQ ID NO: 39353 - DNA, 293 bp, Mus musculus
  source 1..293: mol_type = other DNA
tacatggtagctcaccatatacctaaaataaataataaatcttttttttaaaagcatacaaatgaaaaaaagaatccggcaatccccattggggcaatttggaaactaacgaactaaattttcaaatttcttttcgactcttctgaggcccaatctcctgagattgggcgggagacttcaggctcacgtaaacactgtggtcttgcagtcagtttgtcggcatagcgccagcggagcttcttcgcggaacaaccctgcgccctttctggctgtgcagagtaggagcgcggcct

SEQ ID NO: 39354 - DNA, 533 bp, Mus musculus
  source 1..533: mol_type = other DNA
cccctgcggcgggcctctcagggacactggattgaggccaaactcaggcattagtattccttatttagaaacttcaataattacttggccagttattaaagacaccagggaaatgtcattaagcctttttccatttctgtaaggggaagctaaaagtctaggaggcagacccttataggtgtggcaatcattgtggcagttgggaccctgggtcccgaatccatctccgccaggctggcagctctgaggatgacgcatcagtcttagtaacagactcctggagaatgctgcacccatgccaggcactaccccagagtaggtcgggcctaattctgtgcctctgactcagcctggggtgctcagcggccagggggcatgagcatgaacactccaggttggcccccgggggctgcgcgccggggcccgaaattcccactacctgggccaggagcccgggcctggcaaggagtaccaggccttcgctccaacaggtatcctggaggccgcgctcctactctgcacagccagaaagg

SEQ ID NO: 39355 - DNA, 539 bp, Mus musculus
  source 1..539: mol_type = other DNA
tctggctgtgcagagtaggagcgcggcctccaggatacctgttggagcgaaggcctggtactccttgccaggcccgggctcctggcccaggtagtgggaatttcgggccccggcgcgcagcccccgggggccaacctggagtgttcatgctcatgccccctggccgctgagcaccccaggctgagtcagaggcacagaattaggcccgacctactctggggtagtgcctggcatgggtgcagcattctccaggagtctgttactaagactgatgcgtcatcctcagagctgccagcctggcggagatggattcgggacccagggtcccaactgccacaatgattgccacacctataagggtctgcctcctagacttttagcttccccttacagaaatggaaaaaggcttaatgacatttccctggtgtctttaataactggccaagtaattattgaagtttctaaataaggaatactaatgcctgagtttggcctcaatcccagtgtccctgagaggcccgccgcaggggcggcacagg

SEQ ID NO: 39356 - DNA, 458 bp, Mus musculus
  source 1..458: mol_type = other DNA
taccctgtgtcaacataatttcagcaaagagtctagtgaggccagtcatgacctgcgtttgatcctcaaatcctgtatacccaacaggttgttgtgttaatcacttcaggctagactgagccagagtgaggcaataaataaataatgataaagtctcagtcttattgactatcgtctatcctctacacgataagacacatagtatttaaatgaaagagagttagctgagaaatacacctagcgagctctctgtcagaaaggactccgtctaatgatcttcctgtgaaggatgtcagtgactatgatagttactaaaactacaaatcccgaaaagccttgggatgtctggcgcaggccacaacccccacctccgccccccaggtgcctggcttgtcgttacaggctgtcaattggccagcaaatgaaattgacgttttcatcaactagtgggaaaaagc

SEQ ID NO: 39357 - DNA, 272 bp, Mus musculus
  source 1..272: mol_type = other DNA
tctttaaagagacctgagctcagacgctgcatctacctagccagccagggggcgtggccggtgttcccgggggaatctgggtctcacctggcagtcgggagcaccggtccccgtgccggcaggctccgaaggcctcccgaacactgtccgtccagcccgtagggacccaagtgccccggctccctgagagagctaaatatgcgtgttagaggccagcggaccgtcctcgaccgtcaagcgcgtagatagggaacttcctcgtcccacgagcc

SEQ ID NO: 39358 - DNA, 322 bp, Mus musculus
  source 1..322: mol_type = other DNA
tccacgtcgctcacgtgacctggaggaggactgctggggctgtctgcccagtcccgagcaggactatggtctgaacaaaatttaaaagagacctgagctcagacgctgcatctacctagccagccagggggcgtggccggtgttcccgggggaatctgggtctcacctggcagtcgggagcaccggtccccgtgccggcaggctccgaaggcctcccgaacactgtccgtccagcccgtagggacccaagtgccccggctccctgagagagctaaatatgcgtgttagaggccagcggaccgtcctcgaccgtcaagcgcgt

SEQ ID NO: 39359 - DNA, 265 bp, Mus musculus
  source 1..265: mol_type = other DNA
catcttctgcaggaggtattcacagacctcgtgggcaatgtctaccagttccggcgggagtaaccgctggttcaacgggcaggctgtgcatgccgagctgtctcctgtcactgacttccgagagtcctgctgccggcagtatgcgaggtggcacctacggcccatatctcggaacttgcgccggcagctctatgggcgaggacccaggcataggtacctcagacccagggtgctgtgttctcagagacaggcctggaaaaatctt

SEQ ID NO: 39360 - DNA, 138 bp, Mus musculus
  source 1..138: mol_type = other DNA
ttccttagtgagagaaaccttaggggaccgtgcgctggagcccggtggtcctaagggtctgcagagggctcgtgggacgaggaagttccctatctacgcgcttgacggtcgaggacggtccgctggcctctaacacgc

SEQ ID NO: 39361 - DNA, 220 bp, Mus musculus
  source 1..220: mol_type = other DNA
cagttccggcgggagtaaccgctggttcaacgggcaggctgtgcatgccgagctgtctcctgtcactgacttccgagagtcctgctgccggcagtatgcgaggtggcacctacggcccatatctcggaacttgcgccggcagctctatgggcgaggacccaggcataggtacctcagacccagggtgctgtgttctcagagacaggcctggaaaaatctt

SEQ ID NO: 39362 - DNA, 580 bp, Mus musculus
  source 1..580: mol_type = other DNA
taaagttctgctccagtcaggacgagtccagacttttcctaattcccgagggcagcgaggaaaggtggctttgaggcgccccaagactctggttcctcccacagcaatctaccgcgcgcgtagtctagggctggagaggagcgcagactgaggtccggatttcgaccaccggtctgcatctcccctccgcgccgggcaatgcggctaccgggttgcgcctggccgtcgggttcccagggtccgaagccaacggtaccctgggaaggaccctgggacacctcctggagaccaggaactggttctcctggtctctgtcccagttctcgcgccccagctgtcggcggaaggagcaaggcgactggactacattccccagaagaccttgcgcctcccgctctcaggccgcgacgcggggtccgctcttcaggtgcggctggagggtgacggccgaccggcccaggactcctgctcccgtggtgccccgcgcgtggccagcccagcccccggctcctgcccgccccacagcggcgctggttgttgtcgtgagccgcagccgccccggccctgcgcacgggctgcc

SEQ ID NO: 39363 - DNA, 728 bp, Mus musculus
  source 1..728: mol_type = other DNA
cgtccccggccgcggcctcggcctcgctgaactcgcgcaccagcccacaggcggcggagccggcgcaggccccggcgaagacccagcaaacggagcagggccgtgtcctccccgggctcggctcctcccggccccgccgcgccgccaccgcgccgcagggctacccgtcggctccgttgcctcggccgccgcggcccccgcccccgccggaaccccgcggccggcccgggaagcggccccgtgcggagccaggcccggggcaactgccgccgcccgccgccgccgccatcttggcaccgtgagaggggccggggaggcggggcagcccgtgcgcagggccggggcggctgcggctcacgacaacaaccagcgccgctgtggggcgggcaggagccgggggctgggctggccacgcgcggggcaccacgggagcaggagtcctgggccggtcggccgtcaccctccagccgcacctgaagagcggaccccgcgtcgcggcctgagagcgggaggcgcaaggtcttctggggaatgtagtccagtcgccttgctccttccgccgacagctggggcgcgagaactgggacagagaccaggagaaccagttcctggtctccaggaggtgtcccagggtccttcccagggtaccgttggcttcggaccctgggaacccgacggccaggcgcaacccggtagccgcattgcccggcgcggaggggagatgcaga

SEQ ID NO: 39364 - DNA, 353 bp, Mus musculus
  source 1..353: mol_type = other DNA
aaacaaacaaatttgagtttcaaaggctttttatcccttcctcaatttaaagagtatcaaacgtcaaaagaggtggaaatctctagggaccttgacccaaagaaacccctggttttgatttcagagaaatgtcatttgtcatcagcccaagaaaaggagatttttctcttcgaagaccaccacaggcttcctggggttgcccccctcagagtctgctgggaggatctgagtcacacacaccagggaaaggaggagccttggcttttcctccagggtgactcaactagtaaatggcagagatgaggcttcaactcttgatcacaagtgacacacccctctaggggactgtggca

SEQ ID NO: 39365 - DNA, 304 bp, Mus musculus
  source 1..304: mol_type = other DNA
ccttccaatttagtgtggtagcccgggcacctcactctgagagagagggcgctttttttttttttggaccatttatttattttcagataaaaatttatggcacaaactgggcacattcagtaatatatcctttgaataaattccttatacttcttttgatggagaacatgaaaataaaaatttcttgattgtttatgtcccttaagttcgtgttgaagaagtcttcaaggtctttaatcaacactgttggctggctacgtggcgagaagccagctgcttccctggctggtcagcacccagccaa

SEQ ID NO: 39366 - DNA, 208 bp, Mus musculus
  source 1..208: mol_type = other DNA
ggaattaagcctagatatgcttgcttaattacaggcgtgcacttctgtatctgacttgagccgtcccgggtgggaggaggagttcctctcccaccaccctctggcatggctgcagcctgggaattagacacaatcctgaatttcaggtctgtaaatcacttgagtgtcaaggagctcatacctcctcctctgagactggctcaaggag

SEQ ID NO: 39367 - DNA, 363 bp, Mus musculus
  source 1..363: mol_type = other DNA
ctctaggaggaatgactcctacaggtcttgaagtcttctgctggaggcctatataaggacaatggaagaagggacaggtacttgctttgccagtacttctggattccagtttatgcagaaaagccattgcttccaattatgatgataatggacgaaactccaggacagcctggtctacaaagtgagttccaggacagccagggctatacagagaattaatctgtgatcaaaatttcgaggcctgagatatatgcttttccctctgggaaggacaggcaggtgtgccttttgaagtcgtggccaaagcggtttctgggcacgcctcccgaggccaatctagcagcccggaggactcagctcggc

SEQ ID NO: 39368 - DNA, 441 bp, Mus musculus
  source 1..441: mol_type = other DNA
cttaaatccagagatctgcatggctatctcctaaattatgggattaaagacatgtactctctagatatctctatggctcagcagttaagagcactgactgctcttccgatctgacaccctcttctggtgtgtctgacagctacagtgtagttagatataataataaataaatcttttttaaaagccaatattttgttctgtaacctaggaatcagtaaaattaaattttattcaaaaaaagaataatgaaagtgcaaaagactcctaccctggctttgcagtgtttacaaacttctggaaggacctccgaacttccgtgcctcctcagggtcaaagtgacgttgcttcgctctcattcgccggcggggcctatccgtacagccgcgtctgtcagattagaggcccttccggggccctgacttttggccaagtctcagcccc

SEQ ID NO: 39369 - DNA, 441 bp, Mus musculus; identical to SEQ ID NO: 39368
  source 1..441: mol_type = other DNA

SEQ ID NO: 39370 - DNA, 437 bp, Mus musculus
  source 1..437: mol_type = other DNA
ctgtcttgcatcctgagtccctggcacattgggacccgcttctaccgtgggcaccgcaggcacagcagttgggattccggtcaccggagctcccaatacttccctgggggagcgggacagataccataggtcaggtctcaccaagcctgaggttggaggctacagggttattgcccgcccgggatgccgacaccaggccccgggaccaccggccctcccgccaccgggagtcccggagccggccctgctccggccatcgctgatgccatagccttcaccgctccttccagcagccgcagcgggttctacggtggggctgagacttggccaaaagtcagggccccggaagggcctctaatctgacagacgcggctgtacggataggccccgccggcgaatgagagcgaagcaacgtcactttgaccctgaggaggcac

SEQ ID NO: 39371 - DNA, 464 bp, Mus musculus
  source 1..464: mol_type = other DNA
cggcctgccaagcaaacttcactggagtacaccctgatgacttcctatgccatttgtatttttataaacagttctgggggactaaaaccattgagctatatctacatttaagtggcattccactttaaggcagttcttacatacatacatacatatatacatacatacatacatacaatttttcttccagatatatagggagtatgtctgcaattcttggctgtcaagtgaattccaggccagcctgggctatatgaaatcctatctatcaatctatctatctgtctatctatctatctatctatctatctatctatctatctatctatctatctatctaagaactggctgtgtagaccaagttggcactgcatttacagagattgggagatctgcctcagtctctcctaaatctagctttctcaccttctcctatcccttggtactcggcagaagaaagaggc

SEQ ID NO: 39372 - DNA, 320 bp, Mus musculus
  source 1..320: mol_type = other DNA
ctctctgagactgggaagaaggcccagtgagatcacctgagtatgcgctctgctcattgtagaggacagctcctcttgatacagccagaggcatctggaagcaccaaaggcatagattaatggaagagttctatgtcctttagcaagtaaaaacgattttcttaagtccctgagagaatgatgggttttgtctaaaagcccgagtttgggaaaaggaaatgaaccttctgcctcttacagtgagtgaaagaagccgctacgggtagcggcccggtacagagagacccgtcagccgggacctgctgtctgcttggcaccgt

SEQ ID NO: 39373 - DNA, 365 bp, Mus musculus
  source 1..365: mol_type = other DNA
gtgagacccctccaacctggcctggttttaattccactgagattatcaggagacctagtaagggctgaggcttacctctcaagagtcttctcaggccatgtgagctcaggaactgttcagtacagctgcgaatgaccttcaaaggtccgcctctagattaaaattcaaaccataacacatttggctcacagttaattttattgaacattgaactctgggagagccagggtctgcctgactcactgtgtgacccctccggatgttaccatgatgtgatcagccacgcagacccatacactggacagtgacagctgtaagccaggctccgggctggcagtggggggcgctagcgagaccacgcccag

SEQ ID NO: 39374 - DNA, 327 bp, Mus musculus
  source 1..327: mol_type = other DNA
agggttgggatcctcagctgagtgttggggagctcaggctgcctaccctttacttccctaggtgacctgctcccaaggaggacattactaaggtgattatcttatcaattgtgcctcaagggatcccttcctgggatcatggaggggtctctcacatgcggcaagggcccttaggtattccccaagtgctatgatgtcatagctgtactagactaggacaagaatcgagagctccgtgtttgggcaatgggctttgaacaggttggaacagctcattagagagcctcataatcagctgcaatcagcacctgggtatatcaagcctgg

SEQ ID NO: 39375 - DNA, 242 bp, Mus musculus
  source 1..242: mol_type = other DNA
ctggaattagggcgagcgcgcgagtgcgtacacgtacacacacacacacacacacaagggcgagcgcgcgagtgcgtacacgtacacacacacacacacacacaggcgagcgcgcgagtgcgtacacgtatacacacacacacacacacaccgctacatgtggcgcgcacagctttgccctcttggctccgagcaagtccctgcaacacagccggagctgggcgctctgacgtcactgcacg

SEQ ID NO: 39376 - DNA, 369 bp, Mus musculus
  source 1..369: mol_type = other DNA
caccttcccaggtgatcacgtgatcttgggagatagagggcaaaccctgtgggtgaaatatcgcactaagaggttttctcattttacaacagttgtaagaaaaagtaaggtattcgggcatagtccccaggcccctgagatctggaatgcctggaggccagacacgtggagtccgggagtccctcaccttgcataagccggcggtgaggggtcggcccgggtcccgcaccctctccaccccgcgcagccgcccggtcccgcaaatgcgggactcgccaggcgcagcgtctcctctagtcggcctcgccggcaccggggcctggcgcccacctgctttgccgtggcccgcgcgcggccgtgcagtgacgt

SEQ ID NO: 39377 - DNA, 353 bp, Mus musculus
  source 1..353: mol_type = other DNA
ctacaaagtgaggcaggctctcttgtttctgcacgcttttaaatatatcctatgtttactgaaagcatgagacaactacttggggatagctatccatagctccccaggcagaggtgggtgcctaccctccatagtggaaggctgagcgcagcgacagctgctgatgagaggatcccagagaggctttctcagcgtgaacctagtgggttccactctagatgccagagggtggccttgaaatcctcagtgtgggactctcaaaagcttctggagagtgggctgaggtctttgcccctctctatgtgatgtcattgatcaatgtgacatcatcagaagctcaagagccactggga

SEQ ID NO: 39378 - DNA, 365 bp, Mus musculus
  source 1..365: mol_type = other DNA
aatttcatgaaaaaaaatgtaaagcttttatcttacatgtgagtagttttgtctataccagtgtgtaccacagggctgtcagctgtaagcactcggcacacaggtactgctataagactcacatgagtggggtcacagagtagtgtttgatcctagcctagaaccaacggccttgatcttggctgggaaccaggtccactgtgaggtctgcagtacagctgtcgtgaacctagtgggttccactctagataccagaaggctaatcctatgtagggaggggaggctaaggctcctccctgcacaccactccctctgtgatgtcactgggcaatgtgacatcatcagaagctcaagagccactggga

SEQ ID NO: 39379 - DNA, 235 bp, Mus musculus
  source 1..235: mol_type = other DNA
tttggggacccagtaccccttctccccagcatgctgtgaggctatagttactgggcctcagttaaaatttcagattgcacaattgtcatacctgtcacaccacactgcctggggcatggtcaggaagggctttcttctggcttccagccagaggcaactccttcagctccttggggtgggggtgaaccctagaggcaaggatcttgtccttcagagcctcacaggaggatagcgg

SEQ ID NO: 39380 - DNA, 304 bp, Mus musculus
  source 1..304: mol_type = other DNA
tgtgtgtgtgtgtgtgtgagagagagagagagagaagagagagagagagatattttgtactgatccctctttcctcaccagggctgccctggcccctggaaggcttcgggcagtgcgtacagtggctgtgagctcttacaggcacacatgtctttccatgcaggtaaacagaattcccagtgtctgactgcactgtggagatgggagctggaaatggtcacctctttccagtctctgaggttaggcaactggaacggagagctctctctaccctgttaccttttcccaacctacagtataaggg

SEQ ID NO: 39381 - DNA, 235 bp, Mus musculus
  source 1..235: mol_type = other DNA
ccgggatcctggccatcatggtccccttgcccaccacaaacattgtcactctttttttgggagcagtgctgcaggtggaacagagagcacttgctaagcacatgctaagcacatgctaagtacatgctaagcgagtgctccctagctggctttgaacttgctagctagcccaagctagccttgaattctctatgtaacacagggagtgcaaggatcctggttcttcaactggaaa

SEQ ID NO: 39382 - DNA, 254 bp, Mus musculus
  source 1..254: mol_type = other DNA
cagagcgtgcagctcttctgagagcagccacaggggaccccttacagagagtgaaccagtagttaggattcaggcccctaactttcaccttctaggaaggtgtcagaggcttgagggaagcaccaggggccctgaccctgatgcctcatgcctccagcctcactggatggccctggatgtgcagtgcagaaatctgatcggatggcagcccgcagcaggccaactcgttctgagaatgacattgaccttctaga

SEQ ID NO: 39383 - DNA, 245 bp, Mus musculus
  source 1..245: mol_type = other DNA
agcgtgtgtgtgtgtgtgcgcgcgcgctctccccatccataaacacacacactacacacacatatatatgtatgagacttatcaagctttatccttgtctataaggtggagcctgcagcatggaacacaccagcctggcggagggacaggctcgcctccccctcccggagccccaggggtgggcgacatgatagtcactagggtgggaaccctgctccctctcataccttgctaatataaagggc

SEQ ID NO: 39384 - DNA, 390 bp, Mus musculus
  source 1..390: mol_type = other DNA
cacccctgagcaagcaggtttcaggctgtgtcctgaggaagcagagtggccaggtctcctctgaggaaagccttgtcaccccagcactggggccactgagctagaaggccttcccttggatggactgtttagttttatgtcaacttaacacaagctagagtcgggaagagggggatctcaattgagaaaatgcccccatcagattgaattacaggcaattctacatttttttcaattaataattgttaagcttattgagcaaactgcatctttattaatagaaacaagtaacggagatggtgaggctgcctgacctgcctcacagccatgctcacagggacccatggagacttgggcagccagaggctagcaaggttcctggtcacatcc

SEQ ID NO: 39385 - DNA, 240 bp, Mus musculus
  source 1..240: mol_type = other DNA
gaaggaaggggacctggagagccacctccctgtcatgagcccaggttagcctcaaactgtgtgtagctaggagttgatggtgaccctgaactcctgatctctggttatgctttaatctatgaaattaaattagtacctctgttttaggaaacatgttctaaagaggtaggtcctctctgctactgaccatctgcgcagagatgcacacatccttggaatttgtcctttctttttgcatat

SEQ ID NO: 39386 - DNA, 104 bp, Mus musculus
  source 1..104: mol_type = other DNA
cagccagctgggagctctagctctgggaagaagggttctgattcattattacttatttctagggagcctggtatctgctggtctctcgcagaggcccagagagg

SEQ ID NO: 39387 - DNA, 397 bp, Mus musculus
  source 1..397: mol_type = other DNA
gtcccagcacttggctcacaaccctctgtaactccagatccaggggatctgatgcccttgtctggcctccatgagcatcataaatctaaaagaagtaaatcaataaatgtattttttttaaaagagagaagaatagcacttattttctgagcgtccctgtccttaccaagggaaggaggacagtgcaacaggttccaccttttagcctggagctttcagaaagatgaggccactcctccctcctcaactcccaaattggggtgtatattacccgatggtgacaagggcccctttgtgcccccctcccccgggggcagggaggagctgggccctggaggcaggcggcccctggcacccagggggcagaggaggggctggcaagtgggggcctagaccc

SEQ ID NO: 39388 - DNA, 674 bp, Mus musculus
  source 1..674: mol_type = other DNA
tacttttttaattggaatattgatgaaactcttcaccaagcctaataaaattcctgatcaaagaagcggccagacaggcctttagccttctcctgccccgccccgacgtgcgcatgcgccttcgggagcgcgcgagcgcgcaacccggctccccaagccccgcatccgtgttgccggccttccagccgggccccgtgtagagtccccgggcctatgtgtgtgtacgcgcccggccgtcaccaaagacagacagcgcgcgcgttccctagggcctgccctctcccgcgcgcgcgcgcgcgcccgcccgccccgggatcgcgccgtcgccgccaccgcgcgcgcgcagctccagaaagcggcggcagctgcagccacaatccgccgccgccggaccgggctaggccgggcggcgggcgcgggagctggcgatctgggcaacagggcggccgccatccgggcagggcagtcgcggcggcggcggcggcgagcgctcagggaagcaggccccaggccgcgtgcggcgggccggcgggcggggggcagctgagctgtggcccggagcctcgcaccgcccggagccggcggcgggcggaggcggcaggaggaggcggcagctgcaggagtagcggcggcggcggcggcggcggcggcggcatctcctcctcacatgaccc

SEQ ID NO: 39389 - DNA, 408 bp, Mus musculus
  source 1..408: mol_type = other DNA
acgcacttggagctgagagggggcacagtctgttcctgctaagccaagtgtcacacaatactgtgtcccctgtgcttagaggggccacttagaggccaagtagcaccagctgtttggcaccggttactcactgctgcagaagtgactccaacatgagagctacatcatatggtcttctcggtggactccatggtggacttcagggctaaggctgagacaaactcctgggcctaacttgggtccttctgagaaacccagtgagtaacagctgataggggtaaaggtacagcttttccacttaccaatccaatcactgattaggggaaagatcttcttggaattgagtcaaggcaaaaggggggtggaggaggctcaggtgaccgtcctcccactagtcccataaaaagg

SEQ ID NO: 39390 - DNA, 406 bp, Mus musculus
  source 1..406: mol_type = other DNA
gctttagtagtactccaagaactagctataaaagctctggcataatcccactgcacttgggagagggggcacagtctgttcctgctaagccaagtgtcacacaatactgtgtcccctgtgcttagagggccacttagaggccaagtagcaccagctgtttggcaccggttactcatgaaaccagtgtgttttttatacacgagcttgtgaaatgcattggctctgcctattatggtcttcacagtggtctccacggtggactccagctgcacgggtccttctgagaaacccagtgagagttcttccactcaccaatccaatcactgtttaggggactattttcttggaaatgagtcagagcaaaatgggggtgggtgaggcgcaggtgaccctcctcccactagtc

SEQ ID NO: 39391 - DNA, 506 bp, Mus musculus
  source 1..506: mol_type = other DNA
ctcggcgccaccagggagcagcagtgttgcggccgcgcccggggtgcaccgaaacagatctgttggtctccagtcttggctcagagcctttaatcatcagaacttcgaaggcgtccccacgagcgtcccctagggggcgggcgagagtgggaaggcaggctgcgtcaccgacattcccctggcagctgggacctggctctgcttggcacctccctacagggcgcacctaggcgggtccatgaccagcagcgaacaggtgcgcacaaggcccggcccctctcggcaggtggagcacgcccagagggtctctgtagcaacaggtggctgcacaggtcgcctatggtgcagaccccggtcacttggttcaggccctggaggcaggagcgcacctgagtcagcccacttccggggagggaggcccgcaaggcccgcccccgccgcccaccccccttgtgtacctgggcggttccattcccgggagtgcgcagggggtagagtgacccaga

SEQ ID NO: 39392 - DNA, 762 bp, Mus musculus
  source 1..762: mol_type = other DNA
ctcggcctcgggtcccttgtcgtggctgcgggggcacaccaggggcagggcccggggtcagcgaggcccgcacccctcgccggggcgcagcggcccgccgcccgccctccaggcccggcccccgctagggtcagcaccgctgccgagccccggccgcccggatcccctccccgcggcctccattttgagccgggcccagaggccgctcgggatcatggcggcccctgcgcgcggggctcgaggggccggggcccagggcgcgcggaggggcgcgagctgtcggcgcgcttacctggcggcggcagcagcggtggccgaggaagcgggatccagacccgggtccagcatgtccggggagggggcgggcggccgggggggcccgagcccggcgctcacgccgcgcggcaggaggggacggaggggtcatgtgaggaggagatgccgccgccgccgccgccgccgccgccgctactcctgcagctgccgcctcctcctgccgcctccgcccgccgccggctccgggcggtgcgaggctccgggccacagctcagctgccccccgcccgccggcccgccgcacgcggcctggggcctgcttccctgagcgctcgccgccgccgccgccgcgactgccctgcccggatggcggccgccctgttgcccagatcgccagctcccgcgcccgccgcccggcctagcccggtccggcggcggcggattgtggctgcagctgccgccgctttctggagctgcgcgcgcgcgg

SEQ ID NO: 39393 - DNA, 589 bp, Mus musculus
  source 1..589: mol_type = other DNA
ccgaaacagatctgttggtctccagtcttggctcagagcctttaatcatcagaacttcgaaggcgtccccacgagcgtcccctagggggcgggcgagagtgggaaggcaggctgcgtcaccgacattcccctggcagctgggacctggctctgcttggcacctccctacagggcgcacctaggcgggtccatgaccagcagcgaacaggtgcgcacaaggcccggcccctctcggcaggtggagcacgcccagagggtctctgtagcaacaggtggctgcacaggtcgcctatggtgcagaccccggtcacttggttcaggccctggaggcaggagcgcacctgagtcagcccacttccggggagggaggcccgcaaggcccgcccccgccgcccaccccccttgtgtacctgggcggttccattcccgggagtgcgcagggggtagagtgacccagagagccaccgcgcgccgggtcagttgtcttcgggaagccgaaggcatgagcttcataggggccgggcgcagcacgcacccttctcggccctggtgctcgccgcgccccctactctctggatacttgggaggg

SEQ ID NO: 39394 - DNA, 562 bp, Mus musculus
  source 1..562: mol_type = other DNA
ttccttgggcacacagggaggcgggttctggagagggtcctccaaggcctggtggccgggtgggagccaggcgccccagcacacgcgctggccgccggcgccatcgcggccgtctagcagcgacggtgcccgcgcgtcccctcccaagtatccagagagtagggggcgcggcgagcaccagggccgagaagggtgcgtgctgcgcccggcccctatgaagctcatgccttcggcttcccgaagacaactgacccggcgcgcggtggctctctgggtcactctaccccctgcgcactcccgggaatggaaccgcccaggtacacaaggggggtgggcggcgggggcgggccttgcgggcctccctccccggaagtgggctgactcaggtgcgctcctgcctccagggcctgaaccaagtgaccggggtctgcaccataggcgacctgtgcagccacctgttgctacagagaccctctgggcgtgctccacctgccgagaggggccgggccttgtgcgcacctgttcgctgctggtcatggacccgcctaggtgcgccctgtag

SEQ ID NO: 39395 - DNA, 421 bp, Mus musculus
  source 1..421: mol_type = other DNA
tctgccaaataattttgaactgttcttgaaagccctctggccttgaagcccagtgatgcggttttctcaaacctcatttgaccaaagaatttgggtaatggtctttattcttgttcggtgagatcaacattaaggtttccagtaccagcaaaattcaaccactgaggccagcctggtctacaaagtgagttccaggacagccagggctatacagagataccctaaataaataaataaataaataaataaataaataaataaataaattcacaccaaaaatatgaactttataggtctgtgcatcacaggtgtatctggtgacagttatgagctgccatgtgggtgctgggagtccatcccaggtccccaggagaacatgtctgaaccacagttcacgtggtcacagtacccaagaaggttc

SEQ ID NO: 39396 - DNA, 278 bp, Mus musculus
  source 1..278: mol_type = other DNA
ggtgatccagagggtctgactggagcctgtcctgctgagcattttctactcggccgccaggaaaccccaggctccagggaacgatgggttttctgagggggtccaagctggggctcagagaccctcactctggcctggaaagtacttgtaaaagtgccgagcctgcagggtcccatggggcagagagcggaagacttcagtcacactcaagactgtagagtgacccagttaaagctgattcccctgggagggggtgagagactccctcctgaactctc

SEQ ID NO: 39397 - DNA, 291 bp, Mus musculus
  source 1..291: mol_type = other DNA
agcaggcatgcctgtgcttggctggaatgctactgctccatccccagggttaggaagtacaactttggtgtgcaggcatatgtgcatacagaacattgtatactaaatgaataaatctttttttaaaaagtgtgtcgccagcctggtgtgtaactcaagttgagttcaaggcagcctgggctccacagtgagttccaggccagccagggctacagtaaggctgtgtctgggacacagtctacctatataggaacagttgcttaatgttcacacaatgtgcaggctggtggc

SEQ ID NO: 39398 - DNA, 281 bp, Mus musculus
  source 1..281: mol_type = other DNA
ccctagacccagagactcaggcctccagctcctgggatccaggagtccatccccagtcccctgggatcctagagtggaggctcccacccctgcctgtggggcctggaaacgagagaggactgggacgctctggtccccgcctgcctgcgtccgcgcccgcccgtggccacacgagaggagaagagaaggatctcgatgcctctcacaggtccctctatgatctgcccatcacgggtgctgggcgcggtggtgcctgcagggcagccggacaccagctctgg

SEQ ID NO: 39399 - DNA, 246 bp, Mus musculus
  source 1..246: mol_type = other DNA
aagggcagccatccttggactctgaccctggccagtggggacccagcctggcgccagggagtgtgcccccaatcccctagacccagagactcaggcctccagctcctgggatccaggagtccatccccagtcccctgggatcctagagtggaggctcccacccctgcctgtggggcctggaaacgagagaggactgggacgctctggtccccgcctgcctgcgtccgcgcccgcccgtggccacac

SEQ ID NO: 39400 - DNA, 227 bp, Mus musculus
  source 1..227: mol_type = other DNA
tcttaatgagatttaagaacaccagccttagctggcctcccaaaacactcaggtcagccttgggtgtccaccacagctggataagggcagccatccttggactctgaccctggccagtggggacccagcctggcgccagggagtgtgcccccaatcccctagacccagagactcaggcctccagctcctgggatccaggagtccatccccagtcccctgggatccta

SEQ ID NO: 39401 - DNA, 272 bp, Mus musculus
  source 1..272: mol_type = other DNA
aggccttcacccgtgacaggctgggagcacctcctgccgcaccccgaaacagcagccgggcgctcttcatatcaagtccagaggagggaactttccgcagctccatccgccgagagcccccctgtcatcccgcaggcggtagaacctccacctgactccagggggatagtggcgagagcttgccaggagcccccttggccccggcagggggcgcccccacccttggggaaggggcggggacgtcaggctcttcgggcccccattggctatag

SEQ ID NO: 39402 - DNA, 495 bp, Mus musculus
  source 1..495: mol_type = other DNA
tagcgggccagggcagtctgggctgggggccgccccctggcccccctccagcctgggctctggtccaaagtgcttagctcctagggtgcacagctagcgtgaatggggtgagcgtcccccagccctccctccgggcccctcagctcccctagctgggaggcctattttgggaacaagagtggccagcctgtggcttctcaggcaggcctgacccaagagggagttagagactcctccctttttcagcggccactgcgagacccctggcagggggtgaggctcagattctgtctctgttgaacagagcgagacctgcgctctctaatcaacagtttggggagagggtgtttccagctacacccactctgtgtgtgtgtgtgtacctgtacatactgtctggacaaagagagggatgttcccccttttctcacagcttcgatgtggctcctggctgggcctcaccccagcagcagcaaattcctcccgggtgaagtg

SEQ ID NO: 39403 - DNA, 135 bp, Mus musculus
  source 1..135: mol_type = other DNA
gcagagcaggctggcagcctgccagtggctgatcagtggtgcccctgaagggctcccttaagagggcctgcgtgtttctattccctctctctctctcatacacacaccggggctgtccacagataccctgcggat

SEQ ID NO: 39404 - DNA, 303 bp, Mus musculus
  source 1..303: mol_type = other DNA
gctcacagccctcacctcctgtggtgtgggaatctcactgtgtgtcattgcagacagaagcacggcaatgtaattttttttttttttaaaagaaggctggcctcagactatatcactgcacagatagcctgtgtgtgctggtgactttgagtcagcacctctctctctctctctctgtgtgtgtgtgtgtgtgtgtgtgtgtgtgtgtgtgtcctctcatagtccagtccacacgcaatcacatagcgggccagggcagtctgggctgggggccgccccctggcccccctccagcctgggctc

SEQ ID NO: 39405 - DNA, 208 bp, Mus musculus
  source 1..208: mol_type = other DNA
gaaattggatttcatagaggggcagggcagctgtcctaccgatggtgaccaccagggggagcagctggcctggtgctggccggtgagtgggtggaccacaccctccaagagaaggggctggccaggactgcagtctgcagagccatctgctccccaactggggttggcctagggtggcagccttggcagccccgccccctcaaaggcc

SEQ ID NO: 39406 - DNA, 344 bp, Mus musculus
  source 1..344: mol_type = other DNA
ccggacaaaagttcttctgtgtaaggaggaagaattttgggggaggcacctccagcagggaccatgtgggagccttacagaccccaggcgtctctgagagaaacgtttcagtcttctggggcctggtctatgaaccccaagaacgatggtgactctcaacaagatcaagtccagcctggtctgtagtgtgagttcccaggccagtcgttccaggatgatgggcgtctgtcattaaggagaggctactatagttaaagaatgagtaggcgtccctcgcctcagggagacctgacttgtgcctgcctgcccaggtttgctcagggcgtggcagtgtggataaaggc

SEQ ID NO: 39407 - DNA, 133 bp, Mus musculus
  source 1..133: mol_type = other DNA
gccccggggcctaggaaatcctcagtcttgactgctagtcttagccgtgctatcatactgacacactgaggctcagagagacagtgacagttgcacctgctgtgtgccaggcacactggcacaacaaaaggca

SEQ ID NO: 39408 - DNA, 320 bp, Mus musculus
  source 1..320: mol_type = other DNA
gtatgtcagggttttgtaggtcttgctatactctgaaaagccggtagcctgctgtgtgcggacagctgtcgtgactcagatgccagcctggtgggaccggatgcacttgctctaggcggcctgggcctgggcaaccagtgctgcgttttcagggccgagccggctccagaggtcactgggcaggcagcacagcggcgtcaagtttgtcacagacacacctgagtcccagtggtgggaggcctggctggtaactgagcctgcctggtccaacccctgcgggccccgccccatgagccaggtggcctctgtggcagcctgtc

SEQ ID NO: 39409 - DNA, 484 bp, Mus musculus
  source 1..484: mol_type = other DNA
aatggcccctttaaatcccgcacctccgacccccagagctgtgggatgccaaggtacccgataaggtctacaggtttctatgtatacctctcttaggtcctgagatctccagtccgagggatctcaggtgttcagcccctcttgggcagagtacgaagccaccggagaggccggtgcccgggcgcctcccgggccgctgcggcaaaggctgggcggccgcgccctccccccgcggtgatctccctcccgggccgccgctgcagtgcgcaggagcccgcggtccgcaccccagcgccgggagcccgagcgcgagcaacgtccggagccaggcaggggtcgccgcagcctggatgcgccctgtggcgcgcgcgcacgcagcatcccgagcctcccgccgcgcggcggggatgcctgctctccgagccccggggctgggcccccggcggtaaccggagcgggggggcgcgcccccccagcagcagct

SEQ ID NO: 39410 - DNA, 242 bp, Mus musculus
  source 1..242: mol_type = other DNA
caatggcccctttaaatcccgcacctccgacccccagagctgtgggatgccaaggtacccgataaggtctacaggtttctatgtatacctctcttaggtcctgagatctccagtccgagggatctcaggtgttcagcccctcttgggcagagtacgaagccaccggagaggccggtgcccgggcgcctcccgggccgctgcggcaaaggctgggcggccgcgccctccccccgcggtgatct

SEQ ID NO: 39411 - DNA, 525 bp, Mus musculus
  source 1..525: mol_type = other DNA
ctactatccctgggctgggtcccaaagccagacaaccacgcctggcttgcagaggtgggtgcagggctggctggcacaactcgtcctacactggctcggcaggcttcccagtatcaaaaacgctgatgagccctgcccctgtgctgttctgggggaaaccccttgcctgggagcagggggctccccaggcctgagggacgccaagcgcacacagcactgctaggagccgggtgggtctccatacacacgcgcgcgcggaaaagggagaacgggaagaggctttccaccctccagcgagactcttcgtccaggggatgttttgaagacaaattctcactctgcattccagtagcctctgggatgtgaggcgtgcgctatcacgccccgcccaggctgctcattttaaataaaaattttctctaggcctaggcccgcgctcgcgtccatgtccccctcccggcgggggcggcgccgtgacgcgcggggcgggagcaggaagggggtgtcgctgacgccgaggcggcc

SEQ ID NO: 39412 - DNA, 255 bp, Mus musculus
  source 1..255: mol_type = other DNA
gagctttgttttcatggcaacataaccatcacacactgcaagcaaggtgatcttgaatttatcctgtctgtacaacatccagctggcaatcaaatctctttgagacgtggttcctaacagagcatttgtggtacaaaaggccactctggctgaggtcctcagtctttcaatacaaaggtctcagaagcttgacacagggcatttgggcttatctccagatacggataatattcaatcccctattcagatgggaag

SEQ ID NO: 39413 - DNA, 397 bp, Mus musculus
  source 1..397: mol_type = other DNA
tgtgtcaaaagatggcctattcagccatcagtaaatgtaaatgagaaaaatacctaataaaaatatttaaaaataaaataaataaataaataaataaataaatagttcttgtctttaactccagcatgcacatgcaaggccaacctggcctacattattctgggacattgaaggatgcctccaacagctgtagaaacaactgtctagacactgactgtgagtaaagttcttaattaaatccagtgtgacagggcacatgggtctttggctgtcaaatgacaagtgaccttaaacaggatattgaccaggatcttgccaaaatacagtttcaaaatgtgtcctggtaggggcctggagaggctcagacatgggctcctccctgcccactgagcagacc

SEQ ID NO: 39414 - DNA, 291 bp, Mus musculus
  source 1..291: mol_type = other DNA
gcagaatgagcttggtagtacaacatgacaatcaccacatacaacactgcctgtggtctgttgagcagtgtagtttacagccaggcagtccacagtagcctgtggggttgttcaaaccttttaagcagaatttgtggtacaaaaccatcatcatcccctgagcatgtcctgagtcttccaatccaaaggtcttagaagcttgggtccacaatgagaatacatctcaggatgttgttcttcagattgggcagggctcccatactccctccccagttcaagggggaagggtat

SEQ ID NO: 39415 - DNA, 352 bp, Mus musculus
  source 1..352: mol_type = other DNA
actttttttatggaaactctcaacccagtcaggatgatcatcaagattaacatcacacactgcaagcaggatgagcttgaatttacatccagctgacaatctcattagacacagcactgcctatggcctgtggagctgtagtttacagccaggcagtccacagtagcctgtggggtcaaacctctttgagatccatgtcctcggttccaaaggtctcagacagggcatttggctcgctgctaaggtcagctctaactcttttggcaaacaaaaacagagtgggaggggctcccatactccctcccctgttcaagtgggaagggaatccacagatgctagattctttgccatg

SEQ ID NO: 39416 - DNA, 406 bp, Mus musculus
  source 1..406: mol_type = other DNA
gctggccattgctaacagatattgacagtgattaccactaaaacctcaactaggggtttaaaaggtcaagtttaggcaaatatgacagtgtttgcctttaattcaagcattcatatcagagagaggcacaaagacctctttgagttcaaggctaacctggcttacatagttccaggtcagcctgggctatgtagagagaccctattaaattgaacgttgtggccagggtttccagtgagagagggggacacaccctcactctggaggtctgattttccattgactgtaaaaggacaagtgaccttaaggttattgacaagatcttgaggaagttccaagatgtgtcctgggagggccctggagagactcagacacgggcccctccctgcccactgagcagaccagg

SEQ ID NO: 39417 - DNA, 269 bp, Mus musculus
  source 1..269: mol_type = other DNA
agtcagaatgatcatcaagatggtgacctgccacacagctgacaatcatatctgtgctggaaatgtcttccttaaggtaagtatgttgttctgaacttgagagtggccttacaggggactaccctggctgagtgtcaaggtccagttcattttgttcagcatgctgcttgcaaagatcagctttaagaaactgatgtcatcaggctaataggaggggcccccatgctgctccctctatagcccaaatggtgtttaatgatttataaaga

SEQ ID NO: 39418 - DNA, 365 bp, Mus musculus
  source 1..365: mol_type = other DNA
aggtcaagaccaacctgggcaagatcttctttaaaaaatacttgccttttattccaatatttccaggccagccttgtcctagaaggtaggcccaacagactgcttaagcccattcactctgataggagatacactggcttccctagcattgccatgggctgtgtagagagaccctatctcaatggccagtggtctttgtgacaggaggacacaggcctcattctagaggtctgttttctgtcaaatgacaagtcacatttttcatatcttaagaagattactaagaaggcacataagaggttattgaccaggatcttgccaaaatacaggcatggagaggctcagacacgggcccctcccttccc

SEQ ID NO: 39419 - DNA, 204 bp, Mus musculus
  source 1..204: mol_type = other DNA
tcttctttaaaatagttgtccaatttccaggacagcctggtcctagaaggtaggcccattcactctgataggagatgttagagagactcaggaggacacaggcctctgtcaaatgacaagtcacatttttcatatcttaagaagattactaagaagttattgaccaggatcttgccaaaatacacccctcccttcccactgagc

SEQ ID NO: 39420 - DNA, 317 bp, Mus musculus
  source 1..317: mol_type = other DNA
cagaatgatcatcaagattgtgagcctaaatttaagacctgacaatcatatctgtgctggaaatattttccttatggtaagtatgtttttctgtcctgtggcctgcagagcagtgcagtttacagtgttgaaaccctcaacctctttaagacatgtgccaaagagctggggactaccctggcagagtgtcacagagtagaacaggaccacaggtcattttgttcagcacttgggctgcttgaaagatagaaactgatgacgtcagcctgtctcaggttgtgagtgggaggggcccccatgctgctcccttgataata

SEQ ID NO: 39421 - DNA, 293 bp, Mus musculus
  source 1..293: mol_type = other DNA
gaatgatcatcaagatggtgacctgccacacagctgacaatcatatctgtgctggaaatgtcttccttaaggtaagtatattgttctgaacttgaggtggccttacaggggactaccctggctgagtgtacagttcattttgttcactgcttgcaaagatcagctttaacagaaactgatgtcatcaggctgtctcaggttgttggatcttcagagtgggaggggcccccatgctgctccctctattagcccaaatggtgtttggaactcaatgatttataaagaagaggatc

SEQ ID NO: 39422 - DNA, 386 bp, Mus musculus
  source 1..386: mol_type = other DNA
gaggtcaagaccaacctgggcaagatcttctttcctcaactattggtttaagaagtgaggtttaggtagagaagaaatacttgccttttatatttccaggccagccttgtcctagaaggtagccattcactctgataggagatacactggcttccctagcattgccagtgggctgtgtagagagaccctatctcacacatggccagtggtcttatgtgacaggaggacacaggcctcattctagaggtctgtttctgtcaaatgacaagtcacatttttcatatcttaagattactaagaaggcacataagctgagataggttattgaccaggatcttgccaaaatacaggcatggagaggctcagacacgggcccctcccttccc

SEQ ID NO: 39423 - DNA, 347 bp, Mus musculus
  source 1..347: mol_type = other DNA
ctaaatttaagacacacagctgaaaatcatatctgtgctggaaatgtcttccttagggtaagtatgttgttctgaacttgagacagtctatacacaggccacttcctgtggcctgtgaactagtgtagtttacaggcaggcagttcacagacaatactgttcaaaactctttaagacatggttcctaatgccaaagagctctggactaccctggctgactgtcacagagaggtagatggcattacaaaggtctcaggtcattttgtaaactgatgacgtcagcctgtctcagggtgattgggaggggcccccatgctgctccctctatacaatgatttataataagg

SEQ ID NO: 39424 - DNA, 212 bp, Mus musculus
  source 1..212: mol_type = other DNA
tcttctttaaaacctcaactatgggtttatagagtccaagactaaatttccaggtcagcctggtcctagaaggtaggtcactctgataggagcaggggtcacatggccagtggtgtcaaatgacaagtcacatttttcatatcttaagaagattactaagaagttattgaccaggatcttgccaaaatacatatttcccctcccttcccact

SEQ ID NO: 39425 - DNA, 394 bp, Mus musculus
  source 1..394: mol_type = other DNA
agtcagaatgatcatcaagattaaccatcacacactgtaaacagggtcagcctaaatttaagaccttcctgtcttcagagctgacaatcatatctgtgctggaaatgtcttcccacacagcacttcctgtggcctgtgatactgttcaaaactctttaagacatggttcgatggtgccttaaggtctcagcaggaccacaggtcattttgttcagcacttgggctgcttgcaaagatcagctctaaacaatctttggcaaaggtactaacaaaaactgatgatatcaggctgcctcaggccatttgctctggaggggcccctttcccaaaaggtgtttggaactcctggagccatgtttgcagatgggctcaaagctataatggtttataaaga

SEQ ID NO: 39426 - DNA, 327 bp, Mus musculus
  source 1..327: mol_type = other DNA
aactgtaaataaaggaaatacctaataacaattttaaaaaacaataatttgaggaaaaaattagattttaacaggttcctatcttaagaaacatgtactacaacttgtgctgaaaatctcttcattgatctgaacttgagacagttcacacacacagcacagcctgtggcctgtggagcagtgtagtctacaggaaagcagtccacagtagcctctctttgagacatggctcctgacagagatgattgtgcactgagacatagatggtgctcagctgcttggtcaattggagcatttagtgggaggggctcccatactcctgcggga

SEQ ID NO: 39427 - DNA, 382 bp, Mus musculus
  source 1..382: mol_type = other DNA
taggaagcctcttcctcctaagagctgggatcaaaggtgtgagacacattggtaacagattttaacagtgattagggttatgatctcaagaactacctggcaagatcctcttcttaggagtacctgcctttaattcgttgtgtagagagaccctatacaatagcatcagaagcttggattgaagagactgtttcctgacttgtctaaacactgactgtgagtaagagaggccatttgacctgtcatcttttcctttgacttcacatgacatgtgaccttaataagaaggttgttgactaagatattaaggtattgccaaaataaatacatcgggtggggttcaaatatggcccctccctgcccactgagcagaccagggcag

SEQ ID NO: 39428 - DNA, 246 bp, Mus musculus
  source 1..246: mol_type = other DNA
tagtgcaatacccagatgacaatcttattggtgctgaaaatgtcttccttaggatacttacacacagcactgcctgtgacatgtggagcagtgcagtccacagtggccatcctgtccaaacttggaaaggacatgcttaccacagggcgtttggctcagcactcgggctgctgacaaaggtcagttctaaccgacatcagactgtctcaggatgtttgttcctcagagtgggaggggctcccatct

SEQ ID NO: 39429 - DNA, 248 bp, Mus musculus
  source 1..248: mol_type = other DNA
gatgacaatctcattggtgctgaaaattagggtaagtaggttgacttgaacttgagacagcttacacacacagcactgcctgtgacatgtggagcagtgtagttgtacccacaaggcctcaacagctaagctgtccaaactcagagaggacctgctgacaaaggttagctttaacccctctttagaaactgatgacatcaggctgtctcaggctgtttgtcagagtgggagcggctcccatcaaggaa

SEQ ID NO: 39430 - DNA, 252 bp, Mus musculus
  source 1..252: mol_type = other DNA
gaaggatcctgtaggttcttcctggaagtcaagtttaggcagatggactacatagttccaggacagcctgtgctctgtagacagactctatctgtgtctatacactgacagtgaggtccccactgtgacagggtaacccctttacatgacatgtgaccttaagaagattcttactgtattgccaaaacaggaagttccaagacatatcctgggaatggcctggagggactcagacatggttccctccctgcc

SEQ ID NO: 39431 - DNA, 397 bp, Mus musculus
  source 1..397: mol_type = other DNA
gcgtgtaatgagactgaagactacagtgtacttatgtagaataatgaataaatcttgaggctgtagtcacatacataatgaatgagtgaataaatgtattcataaataataaataaataaataaataaataatacatcttacttcacagacctctgtgaggtcaaggctaacctggtcagcctggggtgtgtagacagaccctatctcatggccagcggtctgaggtctgccatgtcgacactgacagtgaggtccccagtgtaacagggtaacatgggtggcctttacatgacatgtgaccttaagaagaccaggatcttattgtattgccaaaatacactcccaggaagttccaagacatatcctgggagtggcctggaaggactcagatatgtc

SEQ ID NO: 39432 - DNA, 470 bp, Mus musculus
  source 1..470: mol_type = other DNA
tgggagtctcacgttcagcctgcctaaggaaacaactggattttccaaggcctagtggatactaagtagggatgccagttgataaacaggcttgttttgcttgcttgtacatcatgcacgacgttcatgcctagaatttgggtcccctgatggctccagcctaaaagaataatgggtcccggaactcatcccgtgattcttttctagactttgctagaatccttacactgtgttttcccacgttggtgtcacatccatgtggcacaaagcaggcagcatcaggctgtgtgccctgaggcctcggggtggaccagagcctgggccaccgctgtcccgcccgcgtcctcgcgaagtctgcgcacccctcggccgggccgtcgccgccccccccggccgctgcgcagtcgacggggcaaaggagtccctccgtccccccgccccctgcgcgcggtctcgaagcggagggggcg

SEQ ID NO: 39433 - DNA, 285 bp, Mus musculus
  source 1..285: mol_type = other DNA
ataactgatgctgactgtaccggagtcagcgtgaatcagagaacttctttacagtcagtagaggcatcaatttcaaaaataatagcagtttttgcattgctgaaaattttaatattggaatatagttgtaaggtttattcagctgttttaacctttaaataaagagcttttgttgggaattcaaaccgaggtctcccaggactcagggtgtcgcctgagcccatcccggggcgggatggcggccgcactgcgcaggagcggaagctgcgctgcccttcccccacc

SEQ ID NO: 39434 - DNA, 290 bp, Mus musculus
  source 1..290: mol_type = other DNA
tttttattaatgtgcaccatgtgtattcctgctgtccacagactccagatctgcaaactggagttgtaagcagttgagtaacctatgtacatgctcaacatcatagaggttacacaaccccgctgttcagtcttcatatgtattttaaatgtatctgtcaaaatgcacataaaataaaaaaataaatgattattttttaaaatgtaaggactttttgtttggctgtcctggttgtagatcctatcaagatatccgtccaggacccctttgcaggcggcgcgcgtgcgcag

SEQ ID NO: 39435 - DNA, 428 bp, Mus musculus
  source 1..428: mol_type = other DNA
ttttactcaaatataataaagagtgaatttttttttcttaaccatttagttaaaggaaatgcttatttccaacctgcctttaaatatatatacatataatttcatttttattgtgtgtttattaattacatacaatttttaggatgcaagtgccattggtattcccattggttgtactgggaacccaattcaggtcctctgcaagggaactatgtgttcttaaccacataaattctatttacttatttggcttagccggtaagagcactcatgtacttacatatagtaaataaattctttaaaaaaaaaaagttctgctgaattgaatacatgaatgcaagtggccacacttgtgttctacagctgccggcaaggtcgcctaggccggaggcggggcggggtcggacgcctgcgccataaagcccgct

SEQ ID NO: 39436 - DNA, 412 bp, Mus musculus
  source 1..412: mol_type = other DNA
ttttaacccagcactgtgagttcaagagcatcctggtctacattacaaattccagggggctacataatgaggacctgtttcaaataattcaagcacgagagcctgctcaatcagtctcaaaggccttcagtttagaaagtccaggaaatgtcgaaattccctaaaacaacgcctcggcacagcccttgagttttagcgcacgcctacagcctgcagagcagtgctgggctgcggagggggagcgcgccttcctgctagggtggaggtccaggcacgcgcacgtacattctgcgggggcggggcgagaccacgcgcatggaagcggcgagcacgcgtagcacctgggctagccagggcgagcgcatgtgcgcatgtgcggatgcaggaaaacgcttgcatttgggggggggtg

SEQ ID NO: 39437 - DNA, 383 bp, Mus musculus
  source 1..383: mol_type = other DNA
aataagcccttgtttaaaacagggagtttggaatgttcttagataaatcctatcttctctagttttctgacaatgaaacatttgataattattcacctttttggctagccctggatttgctatgtagaccaggcagggttcaaattcatagaaataaatggcactacatcattacagtgatttgtgacagtagtattctgttgcctgagggtgctagtactatcaatggttctatcattaatttcaatgatacgcaaccgagcccctcagcagggttccgactaggtctggggagggaacgcagagcttcgccgccgcccatccagcacgaggggagggtgggctccggccggggaaaccgcagcgaccgcctggggcggggg

SEQ ID NO: 39438 - DNA, 381 bp, Mus musculus
  source 1..381: mol_type = other DNA
aataagcccttgtttaaaacagggagtttggaatgttcttagataaatcctatcttctctagttttctgacaatgaaacatttgataattattcacctttttggctagccctggatttgctatgtagaccaggcagggttcaaattcatagaaataaatggcactacatcattacagtgatttgtgacagtagtattctgttgcctgagggtgctagtactatcaatggttctatcattaatttcaatgatacgcaaccgagcccctcagcagggttccgactaggtctggggagggaacgcagagcttcgccgccgcccatccagcacgaggggagggtgggctccggccggggaaaccgcagcgaccgcctggggcggg

SEQ ID NO: 39439 - DNA, 414 bp, Mus musculus
  source 1..414: mol_type = other DNA
tggagacggtccagcctgaacagacaagagctattccgagttacatctctggatgcaaagttttaagatgccaatttggtatccgatgtttgggggacagagtcccagagcctcccggagcggcagcccttggagtgtgagactcctcagtggcccgcggagagcggctccggagctgggaggcgacaggcgggatgggccctcgtctagtcttcccgcgacatctaggtgccgtgaagcgcaagccaagcgctctgggccgccgcggaaagagcccgggaccgtccgtgagctcggcgagtctcgcgagaaagcacgccgcctcgccctcccggcatgccctgcgccgccgccgctgctgccgccgccgccgccgccgcgccgcggtttgagggcgggaggctggggggcgga

SEQ ID NO: 39440 - DNA, 438 bp, Mus musculus
  source 1..438: mol_type = other DNA
ccttgcaaagcctgggaagcaaacgtgggcgaccatgggcccccacagcaaatccataaattaaggaaattaactgatttgtaagctatttaaatctataaatttacaacatcttctgcatatatcaagtaattgaactaactgcggggatgtaactttaatgagaaaatttccccctttttgagataataaataaataaataaataactccctcaggaggaaagtttcttattcccgcgtgaagttaaggggagactgggtccgggcgcccaggcccggccggagtctgtaaaggggggcccgcgccgctgctcccggccgaagcgcacccgccttcctagccgaaagcctgcctttggcccgggagtcccgggaaccaggcgggggcgcagtctgggcaaagcgcaccggccgcgatccgtttcctaggagccgag

SEQ ID NO: 39441 - DNA, 271 bp, Mus musculus
  source 1..271: mol_type = other DNA
caaaaaaaaaaaaaccaagtaagttgtattattttatgcgtatgcatgtatgtctcttcatcatgtacatgcagtgcttgtagataccagaacagatgtctgtagaaccaaggtgacagacaactcgtgtgcatgcatggagtgtgcctctctgtggctttatggacccccttcagcctctgggggcttcagaaggccaaaaatgagtccccacacacacacacacacagagagagagagagagtgacagggagcttagttcactgatatc

SEQ ID NO: 39442 - DNA, 504 bp, Mus musculus
  source 1..504: mol_type = other DNA
ggttgctagatgcgcacccagccttccaagatttgaaacagccctggaaccgagtcccggttctacacttgggttgcttgcttcagccctcaagctggtgccagaccgacgcttaaggatgaagttcttaagtgagttaactgagacccagaaatttagggtccaaattccacgcgtactgtagtccgcggccgctcagctttgggtcttactcagtgtcgccactggggcagtggcaagaccagagtccagcactcggggatccccgagctgggcgcagcccgcgccaatacccgaccgcgcccagcggcagctcccacagagcgcgcggccagtggggctgctgaagccgcagagcgcgcgtgggcgtggcgcccgtgagctcccgagagggctgagcgatcggggaagagatttcccccatctctgccctgctctttccaccgtggggcggggcccggactgggggcggggcgccgggcgggcgcggcgctatttccagcc

SEQ ID NO: 39443 - DNA, 309 bp, Mus musculus
  source 1..309: mol_type = other DNA
cactgtgagcagtggtgctaacatctgcaaagcacttgaaccagtgtctagtgctgagagtaaggagggcagtgcctgcctttattagatttaactctccaacttatatacaagatttttctttaccatatgaataaatatttatttatttattttttaaaattaaaaaatttttattagatattttcttcatttacatttcaaatggaatcaattgatctcctgtcttcccaagagggaaaggctgcaggactcctccacttaagggtgtgaagtccggagctggagtgggtcctcagaggaacccta

SEQ ID NO: 39444 - DNA, 494 bp, Mus musculus
  source 1..494: mol_type = other DNA
gctcagaggacccaccggctggtcccgggcgtggggtggtggtgtcccgaacacttgactagagtgctccacgctgagccagcctaggcgagtggacgagccaggtccaccaggctccggggttagcggccgcctccgctccccgccgggtcctagcgccctactactctgaagagcccgtgggaccctgtagcctcgccactcggcggtgcgcgctaggttgctctcccgcgccgcggctctccgccacagccttttagaaatccgggtgggagacaggcctagtcccagctcggaccacgtgtgtgcgggggcgacagcgccgccggggtggggctgagcgctgcaagccgggttcgccttgcagcgcaggagtcagtgggcgttgcgccacgaggagaaggcgggctctaagacccagcaggcaccatcctactggcgccttcgatcccgtttggacaccagggggcgatgcccgaccctctataaaagcg

SEQ ID NO: 39445 - DNA, 469 bp, Mus musculus
  source 1..469: mol_type = other DNA
tcgctccgcccgccgccccggtggccccgacgcggccctgctggaggaggcaggcttcccaggatcctgggccagacggcctgggccaaagtcccagtccactgtgccctgactgacctgtggagtctggactgtcccaaactcccaggatgcccggggccccactggggttcagaattgttttaaggacaaaagtcttcatggagaccgtgccactgtcaggctggacctgtgcaatgcccacccttggctggggcatgcagcaccgcctacccttgagcgcagggacagtcccctcctgtctcccctgactagggttgggggtgggggggaaggagggcggtgggggagggggctgccggccgtccctccttccgtccctccctggatccagccgcccgggggcccccgggggcccgggccccgtgccagcgcatgcgcccgcctgtgggcgctgtcccgggctgcg

SEQ ID NO: 39446 - DNA, 433 bp, Mus musculus
  source 1..433: mol_type = other DNA
atgaagaaacatttcccttctgaaagccagagagttttgaatgataagcattgctaaacaggctctctgcttcctgtttttcaaaacacaaaaacaacaaaacaacaaaaaaacccgctttttgattctcttgtgaactgttcccgggagacccagctgctctccggaggtgagcacactttggaaacagccacagtctgctgttgtcaagcgtctgacaagtgctaaccttatcaaaatggaaatgtcttttccctaaggcacccaaggctcgcgcgcctccagccagcgccggtgctgccacgcccgttccgccgcgcgcccgcctctcgccggcacacggcctgtgattggctggtggagctgcccatctctagaggcgagcgcgtggtcacggcggcggcggcagcgcgcggacccgaagccgcgacgg

SEQ ID NO: 39447 - DNA, 348 bp, Mus musculus
  source 1..348: mol_type = other DNA
gttcctgtacagtgaaatgagtggcagtgcttgtgagggcacgcacaaaagctaaaggctcaccccagcttgcggagcctctttagcatcagttttaaagaacagctgacctcaattgcttggttgacaggttgtctccagactacactttttacaagggaggtcccaaccttgggcctcgactcatccccagcacagtcgcctggcttcgggaaagccctaatcgctgagccaaggttcagagctagcgggttccggtcggagccgcgtgcgtggagctgtccagcaccccgaggcggggcgtgcgccccccggcccgccccagcctcctccgcccgccctgtcagc

SEQ ID NO: 39448 - DNA, 215 bp, Mus musculus
  source 1..215: mol_type = other DNA
ctaattatttgattatttattattccaaaagtctaggagggcctcacttttgcaaatatacactaaagacacatctcagacagtggccactgggcaagcacttttccggaaaggactggctgtacggaattacagagactctgccctgcgctttctttgtagaccaagctatacaaacttttgcgaggaggaggtgacatttccccctcaaacaa

SEQ ID NO: 39449 - DNA, 233 bp, Mus musculus
  source 1..233: mol_type = other DNA
gcagaattcctgtgcacaaagcctgctcagtaggtacctttaaaagcttatttactatgtgctgaaactgagctcttcagcctcgggcggggctggccactgagttccaggctcgggatctgctaagaggggcggagctccagatatctggcgctctagggctcgggcggggcggcagggcggctggctggtcggggcgggagcgggggcgggtcccggcgcctcctggggcc

SEQ ID NO: 39450 - DNA, 280 bp, Mus musculus
  source 1..280: mol_type = other DNA
gggggaagttttctccaagacaggagtgaactcccggctaagaggagaatcctgacagggaggccaagattcctgtctgtggcaagtctttaaaacctgcacatgaagttgtcttatgcaggcatacatgcagatagatcactcatataaataaatcttttttttttttaaccgaactggctccggcggttcctgcggaagctgaggagcatccgagggctgcgggttgagccgccaggcgctggactagctggattttgagtctcagcctatcagagtc

SEQ ID NO: 39451 - DNA, 228 bp, Mus musculus
  source 1..228: mol_type = other DNA
caggagtgctgggattgcaagtgggaagaaaggggcactgactagccacaatatgtcctagtggcacgtggaccggaccggtcccatcaggcgggttcctttctagtctgaattcaagagattatttattttcaaaataagactgggtcggttcctgtccagggctacaaaggcagggaagctcacgtggacctcacctgagggactctgataggctgagactcaaaa

SEQ ID NO: 39452 - DNA, 370 bp, Mus musculus
  source 1..370: mol_type = other DNA
gaggaggccttgctggctcagcttcagctcgccggtgggaccagtagccaagacccccactgaacccagccagggagcctctggctcctcccactcagattggagatacaggattggccgtctgggccacagtttccccatgggggaagttatcaaactgtttgaggcctcctttctttcacgggaaggcctcacccagcctcctgccggctcccgctggggcacgaggactccctgaaggaaattcctgggttgcagattcagcacttttcagtctccagggccagcccagtgagatagtaaatttttcaaaaatgatctctggcagaagctgaacttattttgttgcctagaaggaaaaaaaataatt

SEQ ID NO: 39453 - DNA, 424 bp, Mus musculus
  source 1..424: mol_type = other DNA
cagcttcagctcgccggtgggaccagtagccaagacccccactgaacccagccagggagcctctggctcctcccactcagattggagatacaggattggccgtctgggccacagtttccccatgggggaagttatcaaactgtttgaggcctcctttctttcacgggaaggcctcacccagcctcctgccggctcccgctggggcacgaggactccctgaaggaaattcctgggttgcagattcagcacttttcagtctccagggccagcccagtgagatagtaaatttttcaaaaatgatctctggcagaagctgaacttattttgttgcctagaaggaaaaaaaataattgcctaggcacaagacatggcccttcctggagcgagagtatcaccgactcaggtaggtcctgcttctgtcgag

SEQ ID NO: 39454 - DNA, 256 bp, Mus musculus
  source 1..256: mol_type = other DNA
cttctgtgtcttttgtttcaatgtaatcacatgtaacttagaaccagtgtacttacatataataaataaataaataaataaataaataaataaatatttaaaaaaaaccaggtcagcctgttcctgccaggcaatactttggcttgcatgcagtcactccatgggggggagggacatgcatcaccgcccagcctgagggtggcgcagtgcgcagccaggccattatccaggccttctggagccctgtgcgcaggag

SEQ ID NO: 39455 - DNA, 289 bp, Mus musculus
  source 1..289: mol_type = other DNA
gctagcctggtgatcagttgaattcgaggccagcctggtctacagagtgagttccagggcggccagggctacacagagaaacctaatcacactaagataattttccctgatcctcaggtgctcaactacagagtagttagtctaacaaagtcctagtcgtttgcgtttagtgggaaaggttcacaactagaaattacccagaggctggctggtgactgcagcagctgtgacagggctgtgacagggcgagaatgacccttctcacgctcctcccagtaaacctccggaa

SEQ ID NO: 39456 - DNA, 528 bp, Mus musculus
  source 1..528: mol_type = other DNA
ggtcgcctccagccctgatgccagccttgagcagggcggactgaaagcttgttctcaacagagctctccagggacccttgaggtgcgcctccggcgtccccacggctggggccagacgcgctccgggtcacgcgtagtttttcacggcggctccctgagaagcccagagtgcgagccgcgcgccttagccccggccaagggcagcaggatccagtttcctaggacacgcccgccaccagtccaggcccggggcttcctccgcccgccccccccgccccctccccgcccccgggccaggggtaggcggggcccagcccaggtagatcctacaaattcaaggtttttttttttcctactttgcagacgaggaaaatagaccctgtagacagagtagggtggctcacgggcgatcgagggcccagccgcgcactccctggttctgggcggttgagtaggaagcgcggagtcgcctgggccccacctccgtctgtttacgtgtcagtctcgactaaaacgacctcttattgg

SEQ ID NO: 39457 - DNA, 463 bp, Mus musculus
  source 1..463: mol_type = other DNA
ggaggtggtatatgattggtcaaatatgccagccataaataaatagtgcttgaataggcaattttatacagacagaacattgttttgtaatgggaaccagggataataaataatttctatttagtgagtgggtgccagtttgtaatgatgaaaaatttatagagagtagcctcaggtgactcacagttgcttggacccttacctccatatatatatataatgaaaatggttagatgtatttggaaaaattaaaatacatataccaggaccctcactccaaaatcagggtgtgtgtgtgtgtgtgtgtgtgtgtgtgtgtattgccatagttcacacacacactcacacacacagcatcttctcagcaaaggcccttgggggttgggcctcctgggaacccacaaggtcctctgcaaggcaccctggccgaggcccggcagcccgagcatcactcgcgtctgcg

SEQ ID NO: 39458 - DNA, 456 bp, Mus musculus
  source 1..456: mol_type = other DNA
tttcgaagaaacttccaatacttaacattgaaaagaaatttcggaaagctgttcatgcaatgtaattgtgtgaggcaaatttacataatttacttaacaagtagaggattttgcacttctaacaattgtatatttgtaattcactcagcaaactactgcttttactgacataattttctaaccaatatggaataataaatgacatattgctattctagaaattacagcctaaggggtgattatgtacttagaaagtaacttagcgattacagttaagtaaaattatggtaaaggaatgaagggtcaaactttctctttttaatcaatataaattgccttgggccatgtactgaaagcaaattcctgtccactgtcagcggtgggggtggctgcctctttcaccaatggtctcagcgatctctggaaagatcagtcaatccgtgcttaaaggacggg

SEQ ID NO: 39459 - DNA, 248 bp, Mus musculus
  source 1..248: mol_type = other DNA
tgttacagacatgaagcagcagctgaatactcctcagggcctcacacagttacatgttccacaaatcactttaagtaagcagtactacggcggcgggaaggtcccccgagactgggtaacctttcttcggggcaccagggtacctcttccttccggtgtgcgccgcacgagacggggcggggcagcgcgggaggcgggggaatgcagcggtagcggcccggcctccccggcgcgccccttccccgggc

SEQ ID NO: 39460 - DNA, 365 bp, Mus musculus
  source 1..365: mol_type = other DNA
cttttttaaattttaaacataaaaaaaaaaaagaaagtatttttgccagcactgcacatttttcagcatacgatgcctgaaaaaaataatagtactctcccaagctaccctggagggctgaggcaggaacaaataacaataaataaatacgtagataatattttgtgtgtgtgcagaagaaggccagagcttctgagtccccatcgctccaaccctcgctccagccatcactccagccatcgctcctggatatcaacccacagcatctgcccagagccttaaggccctttctgccagagggcgtggtctgtggtggctccaccccaccacagccccgcccacgccgcgcgcctccaggctcacct

SEQ ID NO: 39461 - DNA, 652 bp, Mus musculus
  source 1..652: mol_type = other DNA
cacccccggggccctggcatctttgatagggcatcccaactagggggggcagccgggagcagcccggggttgagcgggggctgtgggcgccccgggacgcgctccgcagggcggaccccgcgcctttgcgagagcgctcggggcggagacggagggccagctccgggtgtctggacttgggcggggggccctgggcaggcgtccgggccaggacccaggctgggggcgcctccgcgggcaggcgagtgttgccgacgccgccgctccagccgcgccgtgggcagaagactggaccgctgagccccgggccgcggcggcggcggctgcgccccccctccaccccccccccccccatgccttgacctccctgcctgggggcgggaagcggggcaggaccgaccggggtcgctcctgggctcctcccccccagccccgaaccccgcgcacctcgtctggggacggggcggggggggggcagggcgaccgctcctccccgccccctcctcctcccctccttccctccgcacgttcggggatcgcggcggagcgcagcgagggggggacgcggagagccggggcgcagcagcatcctgcgggcggccgctctccgggggggaggctgcgagcaggcccgcctcgccccccccccgcc

SEQ ID NO: 39462 - DNA, 252 bp, Mus musculus
  source 1..252: mol_type = other DNA
ggataaataattaagataattatagattaggctaaggcattatgaattaatattaactcctgtgttgcagagcgggacagcactcccagagagcatctcttttctcttggagacaagaaaaaagagaaaaaatagcatttaccatttttatacccactgtggttgaagattcttagcttagtcggctcagctctatacttttctcctgtaaagtagtcccctggactgctgcaagcgacagtctctgccaag

SEQ ID NO: 39463 - DNA, 460 bp, Mus musculus
  source 1..460: mol_type = other DNA
ccgccttagttttcacttgagcggaaaataacggcggctacgtgcggtccctgcctgcggggctcgagcgcgctgtgcgcgcgggtgggcggcccggggcaccggggctagcagggtgagtgcgcgccgagctggcctctctgggcagtcgccgccgccgctctgcagtttagcagaaatccgacaggggccgcgtttgctgagcgcatccggccggctgcagccggagcggggccgtggggccaggcctctggaaatgatcttggccggagcgagcacagctcccctgtgtccaccgcgagttgggcatccccgcgcgccggggccttggcttttcccccacggtcccgggctgggaggggggcgatctttccccatcgggcgtggggggcacatcagtgtcccctccttgctccggcggcgggacctggcgtagccgtgacgcgcccccataaatctg

SEQ ID NO: 39464 - DNA, 579 bp, Mus musculus
  source 1..579: mol_type = other DNA
tgtattttaggcaaaaatataataatataaaaataaaaataaaatttctttctgatgctcccatctgttgcaattttgcaaacaattacaatatagattatctccacatacatgaaggtactcttcggagaaaattccccgcaaggtttctctagggacaggtggaaagttaagtggcccccatttagttctttcctggaaggatgcaagcctggaaggctggggtcggtgcgggcagaagccaggggctggggcctgggaggagcagggcggggtcccggcctggcgcgcgggtggcagcgacgtgtcagccgccttagttttcacttgagcggaaaataacggcggctacgtgcggtccctgcctgcggggctcgagcgcgctgtgcgcgcgggtgggcggcccggggcaccggggctagcagggtgagtgcgcgccgagctggcctctctgggcagtcgccgccgccgctctgcagtttagcagaaatccgacaggggccgcgtttgctgagcgcatccggccggctgcagccggagcggggccgtggggccaggcctctggaaatgatcttggcc

SEQ ID NO: 39465 - DNA, 242 bp, Mus musculus
  source 1..242: mol_type = other DNA
aataaagtcgcctctaatggcggccttatttacattagggagttttttttttcaccccagaaaagaaacagacttgaggagcaggtaagaattacgcgttttcctcacaatcaccattctttgtagattattgagcctgccctgctcgggctgggctgagagcacttggccgggctctggcgagtgggcgactgaggcgcgcgagctgggcgcccgtcccccctcagcaatgatcaagtcaa

SEQ ID NO: 39466 - DNA, 163 bp, Mus musculus
  source 1..163: mol_type = other DNA
ttctttaaaagcaagctgcttttagcaaagttgcctttaaaaaagttattttgtaaactactacgtgattaattaaaatcatattttcataatcatttggcactagtattgttttagaattatcataataaagtcgcctctaatggcggccttatttacatta

SEQ ID NO: 39467 - DNA, 497 bp, Mus musculus
  source 1..497: mol_type = other DNA
ctttcttgatgcaagtgatcagagggccagaattctgcaggtgcctgcatatctagctcaggctggcctggaggaccaggctggctctccagcttccaatttttaaaatactgagtggaacagttgtctagcaagtccaaagccatgcatttggtcccagcagctgttgttgaaaaatgtgctacacagtgcatacgtagtaacatagtaatattaatactgcagcttaatatatgtaaggaaaattgtaatgtgtacagtaattaatacatacgcaaaaatatagttgtatattgtgcattttagctcattaaaccacattagttcattaaaaaacagctgaatttgataaaattaaatgagcttatgaaacagtctcagtgggcctgagcggctcagcctcccccacccggaggccctgtccccgccatagccccgccccctagggcggagcttgagagcttcccggcgtgctgcgcgggcggggcgaggggcgg

SEQ ID NO: 39468 - DNA, 538 bp, Mus musculus
  source 1..538: mol_type = other DNA
atgctggatccagcagctcgaggacctgctgctggtccacaggagacctaacagcagcagcctgaatgctggttccggtcccaggagccacaagctgttgtgaccttggggacacccacgcgccggactcggcccggaactctgcgtctcaggggcggggacgcgcgcgcgggagaccggccgggccctcccgtgcctagtcaagcccggccgccgacttgggcggcccatgccgctcctcccgggcacgcagtcaggcgctcgcgccaagattctcccgcgtcagcgagcccgccccgcagccgcgcgcgccagacgactctcccgcgtcccgccccgcgcaggccccgcctaccacgtccgcaccccgcccccggcgcgcaggccgggaggccacgcccccaccagagctcctcgctggtccgcgcggcgacggggcgggccccgggcctgcggcggccgctgaggggctcgcagccctcggggcggggcgcgagggcgggacggggccggtgccgcgcgctgggatttttaaatg

SEQ ID NO: 39469 - DNA, 406 bp, Mus musculus
  source 1..406: mol_type = other DNA
agaattctctttgtaaccaggctggctccaaactcatgagacgattaaaggtgtacacccctgcacctggtagctagcctcaaattgttgagctttctgcctcagaaggttgtggatgtacacacacctactgtgcacctctttcacagacggcctcagccgctactggctgtcagagggcgctgcccgcgggggacaggagctaatctattcttagcctcagttaactttggcgggttcgaggccttctaagctgcacagatcatctgtatgcccgcagcaccacctggcagatcgcgctaggggccacttggacctagtggcattggctagcccagtctgacaacgtgcgtactcaagacttcagccctagagtccttgggaccagggggcggggactgctccc

SEQ ID NO: 39470 - DNA, 425 bp, Mus musculus
  source 1..425: mol_type = other DNA
gggttcgaggccttctaagctgcacagatcatctgtatgcccgcagcaccacctggcagatcgcgctaggggccacttggacctagtggcattggctagcccagtctgacaacgtgcgtactcaagacttcagccctagagtccttgggaccagggggcggggactgctccccagcccctgcccacgcaggccccagcgttaattcccaggtccaggaccctgtgggagaaagggtctcccaagtgggggcagcgggtcctcgcgacacagagtcccctctcctagcctgggtcttggtgcaatcagacgctggggcgcggaagggacgcctcgccccgccatcatcttgaggacccagactcatggggacccagagctcggcgacccggaaggccggcggaggccagggtggcggtggcctgtg

SEQ ID NO: 39471 - DNA, 275 bp, Mus musculus
  source 1..275: mol_type = other DNA
gggaagggtctgcccctaacaaacccagtttggtcttggcccagcgggtaccatagactaatattagccagcagtctagagacagaggcaaggcttctatgatactagtctacatatagaaacttttgacattttcctctaggaaaaaaattataaagttctgttgatcgttaagaaaagtgtgtctctgctcagtcttgagtgtggcgaccagcggagaactcgggccggctccgcccccgcctgcgtgccagggctccaagtccctcgaacgg

SEQ ID NO: 39472 - DNA, 358 bp, Mus musculus
  source 1..358: mol_type = other DNA
tttagacatgtaaaacgtttaactaaggaaccccatgtaaaacgtttaattaagtggacagtgtattagtgggcaccaagagcaatgctctgctctgcacaactgaagagaactgcggctggagaccaaaacttctgttggagactggacctgaaatgaccgtttgcataataaaatgtaacttttgttatactagctacactaaacctactctttttctttactaataggaaaaagacctttgaactagtattctcgggagtaaattctagattacccagggcctctcaaccacagagcctgtgccagtgacggacgcacacagatgccgtcgcgtcaatgacgtcagagaggcgcc

SEQ ID NO: 39473 - DNA, 506 bp, Mus musculus
  source 1..506: mol_type = other DNA
ttctctgtgataatataagggaatccaaatacgaacacagtctttccatcattgatatcaggacaatttgtgtttttaaaaatatatacgtgttctctcatttatggggaagtaaatttaaagaagaaagtggccttttaaaatttggatttcaagaattcttccaagcagagctgaaacatctaaatagaatttgtaacatccatttatgaaattttatttatttatttatttatttatttatttatttatttatttatttatttatttacttacttatttcttatatatatttttaaaattaggtattttcttcatttacatttcaaatgctatcccaaaagtcctgtggaagttgtcttgggactattgagataggtatctctgatccatttcacagattacatttcctttggaaaaatccaatatgcccaagagccaatcaatgaattgagatcagatttcagatatggcgccttactgacgccactatatgacgccatcga

SEQ ID NO: 39474 - DNA, 260 bp, Mus musculus
  source 1..260: mol_type = other DNA
gcctcatcatcagtccttctgttgtttgctgataagtgcagaacccatgttacatgcatctgccagacaaaatcaagactactgtgtcgggaaatttactgtgctatcacactctagtgtaggagccctttgatctcttcctttgttcatggacaggttggaatgtgacagatcatatgcacattattaataccagtccataatctggtaagaaacactgatatgattagtagaatcctggggtttccatggtactgcct

SEQ ID NO: 39475 - DNA, 331 bp, Mus musculus
  source 1..331: mol_type = other DNA
tggattaaatagagtaacacattagctgtaaattaactctaatcacagaaatgttcaggctttatagagattgaatctccaagtgtgagaccctgagtctgaatctctagcatgtacagtgggctggctgccagctttcctccaggtgccacgtgtcacagaagaagattttcaaccttcttctctggccacacatgtacacatgtaagtaatgtcccacagttactattgagtccttcggcggctcagagagcacactgtgacctgtcctcctgtcactcaggagggcaaggccataggaggatccaatcggattcgaacgaaggttctt

SEQ ID NO: 39476 - DNA, 380 bp, Mus musculus
  source 1..380: mol_type = other DNA
cttgaagaaatctttgttttccagcagggacccccttcagaaacattttagttttttaaaaaaggatcctgccctcagggcatgatgtctagtgcagttgacttctgtagatacacacacacacacacacagagagagagagagagaagagagagagaaattaaaaattgttaaatctccttccttctccaaagaacacatttttcacatctttttatttggtctatagatctccatgaaacaaatcagtccattagttttttaatttatcttgaaacttcacaagctagactctacagtctacagtcagacttctagcttggaattccaaactcttgcacattctttctgagaaccagttagttctaaaggcctatgag

SEQ ID NO: 39477 - DNA, 360 bp, Mus musculus
  source 1..360: mol_type = other DNA
ttcctctgaaactgaatttacaggcagaggtgggtacccaagattcaacctctggtttcaaccatgctatggaagcattgtattacagagtggaatccagtctaggacctagctagactttcaaaagtaaataacagttgcgcttaaatttttttttttaatcaacttttggaaaagcgaaaccctatgaattgagttcgatccccaggcacacttttcttttaactaaatacatgcaattaaaatttttaaattaaccttttgtataaaaattcacggcgactatactagccattgcgtgtagtggacagtgcgaacgcacgactctagacgagccacgggccacaaggacccgctggc

SEQ ID NO: 39478 - DNA, 299 bp, Mus musculus
  source 1..299: mol_type = other DNA
atgccagccctgcagacaggaaggcaaccatgtctgtcttcattttggcactgtggcccaatggacaatcagagccactcccaaatcacattttggggacctagttcatcaatcttgtctcataaaagaattacttatcttgagaacttaaaattgtaatgtgtcttggacacatgaggatataaattacttaggcagagtccttgtaattctttgatttattaattaatttctaatgctgaaggaatatgttgaggtgtgtgtcatcataatcatctctcaaagttctaaattgtgaa

SEQ ID NO: 39479 - DNA, 466 bp, Mus musculus
  source 1..466: mol_type = other DNA
cacccacccgccatggcccgggtctgggccaaagagtggcgtggctcgtggtccaccccgcggcggggggctgtggaggaggctgctcgccacccagccaccgggctgcgggtcggccacgctggacccgctctccccgcgctgcgctacggtcggacgccaggtctgcacgccgcggctgagcgcccactcgccttgaagagtggcggcgggagagctccccgggagccttctccaaggatggatcctggcgcagtccggcagtttcctggcccgcccgccagagtctggagcaccggactgaaggaggtacagaccgaaggatcctcctggagggacctcgtctcctgcgtcccccgcgtagcgccccccgccggagccgcgccgggccagccggcaaggaagctgggctgattggcggccgccggcggccaggggagggggcgccgtgcggggccatggcagg

SEQ ID NO: 39480 - DNA, 222 bp, Mus musculus
  source 1..222: mol_type = other DNA
ggtcaggtgctcagcagatgtccatcttcatgaaacctgctggtttccattcttcagctttccaggcaaaagtttgatctgttgaaataaatattatgacacctagtgacttcgctaccacctcaatgctgtatgttctatttccaagttattacttactaattacttgcttagcatttataatacatgcagccacagttatcatgccagcttcttctccag

SEQ ID NO: 39481 - DNA, 289 bp, Mus musculus
  source 1..289: mol_type = other DNA
gttgaaagtctatttagttagatattagaatggctggaaaagagataatgatcatctttgttggtgagatgtgtctcttatatacaacagaatgatggattctttttatgtaatcatgtaatcattctatagagatattaatgaccaatgaattttaattcctgttcctgtgcccaggacatgtttattaatgaactttataaaagcattgccatgatattttagggtaaatgtcaccagcatctggtagaatcttggggtttccttggagctacctgtaaacaactgg

SEQ ID NO: 39482 - DNA, 296 bp, Mus musculus
  source 1..296: mol_type = other DNA
tttagagagaaaaacctgtttctggcctcatcatcagtccttttgttgtttgctgataagtgcagaacccatgttacatgcatctgccagacaaaatcaagactactgtgtcgggaaatttactgtgctatcacactctagtgtaaaggagccctttgatctcttcctttgttcatggatgtgacagatcatatgcacattattaataccagtccaaatctggtaagaaacactgatatgattatctagtagaatcctggggtttccatggtactgcctgtaaacaaatttggatc

SEQ ID NO: 39483 - DNA, 282 bp, Mus musculus
  source 1..282: mol_type = other DNA
tctgcagagggaatgcatttcctggagaccctagacacagctgggtcagcccaccggacaacagtttattaaatattaggtagcagaatttcccagccggaaccggtcacatattcctgggccggaaagctttacatatccaccttcatttccggaggaagaaagggaagaagctccagatttcccgatttagagagctagggagcagcccgagctgacgcggtgggttctcccccgctactgaaattcaaatctctgtgtatctgcagaaagaatgatact

SEQ ID NO: 39484 - DNA, 275 bp, Mus musculus
  source 1..275: mol_type = other DNA
gcttcccggagaccttggctgggtcagcccacccctcgtccaaatttgaagcaaccgtttattaaatattaagtactgaccaagcggtggatctggatcagaaatatccacagaatttcccagctgggatagcccccggtcacatgttgtacccagcattcctagaagtaacctggttcctggggcttacaggtcaaatttgggaattacaattttcaagcttgatttccattacatatccaccttcatttccggaggaagaagggggtcctagg

SEQ ID NO: 39485 - DNA, 328 bp, Mus musculus
  source 1..328: mol_type = other DNA
tacatgccaagttctagaaagttacttaatgagactcggttttttttttttttttttttttttaatacgcaataagaaccgctaaaattgcagctcaatggaagcttctggcccgtccagacagatctgcccaggggccactaggggcggggttctgcgctgtcctcatggctccgcacagcgggcccacagtgcactgcactcctgtccattccctccccttccacactccttcccgggcagtgcacatgagcgaccctgtgctcagctcattcaggtccggctgggagtgactagcagtactggtcccttcagtcatgtgcagctg

SEQ ID NO: 39486 - DNA, 415 bp, Mus musculus
  source 1..415: mol_type = other DNA
gttctgcaattgtttttattatgcaacttaaaaaggaaagtttacttctcagcaagaagagagctctgttctctggggatcatgagattcctccagccagaagcacatgatgccttcctagttttcaatctttgaaaaatgagaaaaggttgcactcggccaagagcagttgcttccattatgattatacatgtatatgaaataagtctaataaaaatttaaaaatcactagaaaaggtatttttatgaggatacaatttcagactcctagaagtagttacaaatactggtaggtccaccagtcttgcccggttgtaaggaactgaccctggtactttctgaaggagcaagagtattggcaagatttacctctgccagtggtagcgcgcacgcgcgccgtcccccaagtgggagg

SEQ ID NO: 39487 - DNA, 331 bp, Mus musculus
  source 1..331: mol_type = other DNA
tgttccttgagtaaccacctggatggtccctttaggggagccagcccaggcgtgcatcagcatgcccaatgcttctgccagatcaatccaaggcttggtgtagggtcctgtggtggctcttctgtaaacacatccagtgcagccccagcacactgaccagactgcagggcacgctcatagcctacagtcttcattccaaaggactgcattcgggtggttgcctggggaatctgtctggccaggcacatgatcattccacaggtgagctccgcagcactgtgctgcattaatgacatcagcaatgaccttagtagctgaccggacaaaggcc

SEQ ID NO: 39488 - DNA, 300 bp, Mus musculus
  source 1..300: mol_type = other DNA
ggcctatgtgtttgctgggccccggcatagtctcacaagagatttcaataaaatcttgaaaggcacaatttaagatgatcacaactttgctaaagtttacatttgctttcatgtacacgtgtgtgaatgggcacaggtgcaggatgacatactaggaaacccatgcaccctaagaggaaattgcttcttcctggcactgtgtcctgttgtacacatggaagacagatggacagcctggctggagacctcaggaagtgaccttacttacgaactctgaatgctggttaccaggtaaccaga

SEQ ID NO: 39489 - DNA, 383 bp, Mus musculus
  source 1..383: mol_type = other DNA
gtttattacactgcaagttaaataatgggccctgcaagctatccgaagggctggaagccagaagcaagactttccctcccccctgctgcttgaggaattctctagcaagactagctgttctcaaaaatttaacaataaaaacggtccctgggaccccggcctcagtttgaattctaagccgacgtttctgacatcgctggctgacaccaaaagtaaaaaacataactgttactttgctggccaacattgaacctgtcttgccattgcagcgatctattggcccctggggtcctattcatcacacactaaccttaagggagttgcttatgtcaaagactcgctgatcacggcctccagtctgacctgccagtcagaagtggagg

SEQ ID NO: 39490 - DNA, 324 bp, Mus musculus
  source 1..324: mol_type = other DNA
tctcagcaagaagagagttctattctctggggatcatgagatagtccttcctagttttcaatctttgaaaaatgagaaaaggttggccaagagcagttgttattcttgcagatgttctggaggtatgcaatgattatacatgcaggcaaatatatgaaataagtctaataaaaatttaaaaatcactagaaaagatacttttatgaggatacaatgttagactcctagaagtagatacaaatacttggttataagccatggtactttctgaaaagtattggcaagatttatctctgccagtggtagcgcgcatgcgcgccgtcc

SEQ ID NO: 39491 - DNA, 340 bp, Mus musculus
  source 1..340: mol_type = other DNA
tatttcactgcaagttaaataatgggccctgcaagctatcttccttgattacaggagggagaagggaagtgcgaagacagaagcaagactttccctccccctgcaggaaatgatagctgttcaaaacggtccctgggaccccggcctcagtttgaattctaagaaaaccgaccttgctgacagtttctgacatcgctggctgacaccaaaagtaaaaaacataactgttactttgctagccaacaatgataattgactctccctgcgaggctgagcaacgggcccctggggacttgctgaccaatcaaggcctccagtctgacctgccagtcagaagtgg

SEQ ID NO: 39492 - DNA, 347 bp, Mus musculus
  source 1..347: mol_type = other DNA
ttatttcactgcaagttaaataatgggccctgcaagctatcttccttgattacagcaggtacagaaatgcaaatctgtccagatctggaaaatgtctagctcaacaactgaagaactatagttttagcctggctagttccctgccagtgtaaagcagctcaagatagctgttcggaccctgctaagtttgaattctaagtaataaacatcactgttactttgcttgccaacaatgataaagttgtcagggttgattctccctgggaggctgagcaaccctatgcccctggggtccgggcaagcagcatgggccagctccactctgtcctgccagtcagaagtggagg

SEQ ID NO: 39493 - DNA, 297 bp, Mus musculus
  source 1..297: mol_type = other DNA
acctttaatgttagcagcctacatttataaagatggtagttggagtacttggacacaccttgcaagccttccaataactccacttacgacatatatggagagatccgttctatcagttttgtccattaggatacctttattaataaaatcttagtgtttcctaaaaatctcttgaattgttatttcactgcaagttaaatagtgggccctgcaagctatctgccttgattactagatctggaaaaggtctcgggagcaaggccttcagtctgacctgccagtctgaagtggaggcag

SEQ ID NO: 39494 - DNA, 351 bp, Mus musculus
  source 1..351: mol_type = other DNA
caagttaaatccctgcaagctatctgccttgaaatgcaagtctctccagatctggaaatggtctagcgaagaactatagttttagcctggctgccagtgtagactagctgttctacggtccctgggaccccggcctcagtttgaattctaagaaagtaatgaacataaatgttactttggtagccaacaatgataaagttctctccctgagaggctgagcaatgctattaaaaacctcttgccattgcagagatctattgtcaagggcccctggggtctggccctggaccagcagcatggtccacttaagggtcacggcctccagtctgacctgccagtcagaagtggagg

SEQ ID NO: 39495 - DNA, 381 bp, Mus musculus
  source 1..381: mol_type = other DNA
ttcttctcatatgtgtagctaaaaagtttgtttgaaatgcaatcaaaattaagttggcaacgtactgattttttgtaagtattttacttcctttaagcacctatgtactcattttgtaatgactaagttagttagcacattggttttctactagttaattcttttgttgtttgttttagaacccagactaataacaagagcagggcttttatgtattccggtgtctctgagaccactgcaatcattcaggcctaaggatttccttctgtgccatgactcttgagggatttggatttgcctgcgggcagacgcaggaagctgcagacttctgagaccatcaatgtgaggctggcctggaattctttcatatagcccaggctg

SEQ ID NO: 39496 - DNA, 392 bp, Mus musculus
  source 1..392: mol_type = other DNA
ttgatcaagattgactaggctcagaggtctgcctgactctctctacagagtgttgcactgggcaagatataaatttttattttatgttgagcccttaagagcagtttgggcacttacctgttatttaaacaatcttagtttgtcagaacgcattgtctcaatagtctgtagaggaaggggtagactatcatattcctgccaggcctgtcacaccatatgggagacagctttcagacttccactcaaaggcgttgcactgcccgcccacatggaatcaaagttcctggatggtggcctccaaccacccggtctgccatgctgactgctggcaggcacactcgggtagtgttagtgggcatgcgcattattctactgggcgtggacatgtcctg

SEQ ID NO: 39497 - DNA, 398 bp, Mus musculus
  source 1..398: mol_type = other DNA
tcactctgcttcctgactgaaggtgaacagaaactatttttgtttttaagttgcttttatctggatattctataacagcaacagaaaagttatttaggcaattagagttccagtttatacattaaacaactattgaattcatcaaccttttccttttttaaaaaaattatttattcattcattttacctctgagaaaggacacagtgcatcaagtcactgcaggactgggtgcatcctcttccactgaggcggttccagttgttggggaacccacatgaagatcaagctgcagatctgctacatatggggtaggggaccttctttcttaatacaaacaaatgagaaggcctcccatgatgatacacatgaaaagtggaagtgtttactttccagggcc

SEQ ID NO: 39498 - DNA, 168 bp, Mus musculus
  source 1..168: mol_type = other DNA
aggttgcttggttcctagtaagtacttttagagttcatctatatttttctgatttagcatgaagcaaagaaaaaaaaaaagcatttggtgtaaatagtactcacaaagtatttgagacatttcataccaagaaatatagtgactacctatttgtttttaaatttgaac

SEQ ID NO: 39499 - DNA, 226 bp, Mus musculus
  source 1..226: mol_type = other DNA
aggttgcttggttcctagtaagtacttttagagttcatctatatttttctgatttagcatgaagcaaagaaaaaaaaaaagcatttggtgtaaatagtactcacaaagtatttgagacatttcataccaagaaatatagtgactacctatttgtttttaaatttgaactagctctgttccctccctcccagccactagagagggctgggaaggatcatgctccata

SEQ ID NO: 39500 - DNA, 172 bp, Mus musculus
  source 1..172: mol_type = other DNA
gtaactctaaagtaaattgcaatcctcttttatttttatcttgaaactccagctccagccccagcagctgctgtgtcccagcccctgacatgtctagatacctatatccagagctgggaagcccaggacccagaggttgatggggcccctttgtcccctgcttcagattggg

SEQ ID NO: 39501 - DNA, 397 bp, Mus musculus
  source 1..397: mol_type = other DNA
atctgcagatcaagctggcgcaaacaactaagcaagctcccaggcttgctttctgagctgtcattctgttaagagagcctcaggagctaggctcagatggtaagagcgaatgtcagttccaagggatccaatacctttggactacataatttaaaataatgtaaataaattctaaagataaaattcgatttaccttaaaaataaaaagttttaaataaagattttaaaagagagttggcctgggctacatggtgagttctaggccagctgagggctacacagtaagactctgactggaagccccgcacaatgggcattaaataaccctgtttcaaaacagcacctgaggagtgcagtgactcctgtagtgagactttgcctcagaaacaaaagattc

SEQ ID NO: 39502 - DNA, 253 bp, Mus musculus
  source 1..253: mol_type = other DNA
agggtctcatggagcccaagctagccttaaactcatgatccctcagcctcagatctcttgccactactggaggacctgaggcagaggacccagaagtgtcactaagacgcctatgctggagggtccaacccaggcttcggatgttggacagaagctttagcccaccgactcaatgggacctttactgttggaaactctaatgctagagtctcagagtgttgtgacacaactcagttgtctccaactgtggcct

SEQ ID NO: 39503 - DNA, 93 bp, Mus musculus
  source 1..93: mol_type = other DNA
ttgccgacatgatcttgcagagcaccgaagccatcagcggattcccggtatgcctatgaatgcgtgcggcgcgcaggcgcagagacagatacg

SEQ ID NO: 39504 - DNA, 188 bp, Mus musculus
  source 1..188: mol_type = other DNA
cctccgcgaacaatggaaactgattgacttcacagacacgcctgaaggaagtcttcctgcgtggtccccacaggcttgctgcttggtcccagctggggttcagcctgggcttctccatacaacctctgatgaagacaagaagggtggagcgggccactcagccaccatatcatgccaggggaccctgg

SEQ ID NO: 39505 - DNA, 325 bp, Mus musculus
  source 1..325: mol_type = other DNA
gagggcgtgctcagaggtaattgcctagacttgcctgggaagcccaagcaaggtcaattctccttgtttcttagctaacttagctcttcaaaaagaaattaagtaaatttatttgtttgtatgggagtctgagggaagaaactgagattggacccgtacaccttgccggagtctgcaggagggttgggctccttcagcagaaggcagctggggtctgcagcagctccggctccccccgcccccgccgccccccgggccggtgcagccgcaggcggggttcccctccccctccccctccgcgccgccgcgatgcccccccctgcgc

SEQ ID NO: 39506 - DNA, 372 bp, Mus musculus
  source 1..372: mol_type = other DNA
gactgcctatatatttatttaaatatgtttacacacacacacacacacagggccttgtaaatcctgtatgtttcaggagctccctggacccatttgaattcaaaggaagcatctacggcttcctgtaacccaggacttcaggtttatggctgtcctgggacccctagtgagttccaggagcaggttacgaggtagtgaggtacaaatgttctttaagagatggctagcccaagctcttgtacagaaatcaatcaatcaatcaatcaatcaatcaatcaatctcttaactggtagaggctctgctctatataggagggaaatcgctgcttcttggcagccgactctgatttgttctgaacaggcatgcgcctg

SEQ ID NO: 39507 - DNA, 140 bp, Mus musculus
  source 1..140: mol_type = other DNA
tctgtgtggtccacaccacaaagccaatggaatttgttcagaacttcttagtctttccttacagttttccaaagaggaaccctggatcaagcattcagaagctggattttcagacagtcttcaatcttcaagttctgtga

SEQ ID NO: 39508 - DNA, 318 bp, Mus musculus
  source 1..318: mol_type = other DNA
gatactcttacacaatcgttcattacactatttcttatatatgcaaaacacacaataaataatgaagaattaaaataaaaacacttgtcattgacaacagatatatttattaatttattttttatttacttcttagtttagaggaaaaaaatcttttaagtccctgagaatatacagaaaaaaaaatggtatttttagtaatatgcagcatcgaaaatatgagacagccttggactttcactgtgtcacagtccacaagctttgtgcacactgtgatggtggttcattgtattgtggccatgacagctcctaaaggaa

SEQ ID NO: 39509 - DNA, 317 bp, Mus musculus
  source 1..317: mol_type = other DNA
attttatactttattcttataatgtacattaggtctactaatttatatgcgatttagaagacattttacttctaagtaagaacaggtttcgagatgcctcagtatgacgtaccccacatagttttcaatttttgaaaaattagaaaaggccagtgtgatctttaggccagaatgaccaggtcatctcaaaaataagaacttctttcaattctggtgaaaatcaagagaaaggttgctcttaggaagatgtaatgttacagtgtcttagaattatatacacatacaagacgttaattggtgcgcatgcgcgccacccc

SEQ ID NO: 39510 - DNA, 413 bp, Mus musculus
  source 1..413: mol_type = other DNA
aaatttaaagcaagcttcattaaatattaaatactgacacaataggccatgtactttgccatgagaaggttggatttctgagttcgaggccagcaggctcatttcagatctttaatgtcttcctagttttcaagttttagaaaactagaagaaaagtctaacatggagaaatttttttaggaatatgcaatataaatgtctcttaaattcgtgactaaggagcctcagacttttagtctgtgacattccacattccatggatgtaatgatgactttcgcataattgaaatatggacatagccataacaattaattattggcaaagagtatcttcgcacgtgatggtaggcatgcgcaacacaactttagtgcttgcaagcgatagggtatatgggcaataccgatttccgcca

SEQ ID NO: 39511 - DNA, 351 bp, Mus musculus
  source 1..351: mol_type = other DNA
cactgtcagaaagtgtccctcacaaagcatcaagcctgggaaattgtcaaaatcacctacacagagagagcactgtctgctcccttcttttaaagggagaaaacccatcctaaagtgttaaaatgtaatggtcttttgctgtcaaactccttccttacacgtgtgtgtcacacacacacacacaaatgctgtttgtggttgggaatatcaaccaaaagacacatgatgctcttgtctttgtaactgctttttagtatttcccagtttttgaaaactagcaagaagctggtgttgtttgtgtcatagtcataaaaacattaataggtataaaaattgcagccgtaggtctgc

SEQ ID NO: 39512 - DNA, 322 bp, Mus musculus
  source 1..322: mol_type = other DNA
cctaaataattgagatcggactattatattgatttaacaagcttaaacaattgagcagtaccagtctattataatcctctacccgactcagtcattgactgatcagcttctttattgaccaatcagggaataattgggtagcaatgttttgcaacctgatatgggggcacagaaatcagacaatctttacacacttcttagccattcagtctttgctaccactactgaatctctggctgtgagatactcgaggggcctgagatccatctcggagggatgcttccccagtgcctgggtctgaagctcttcctcctgaggcagc

SEQ ID NO: 39513 - DNA, 312 bp, Mus musculus
  source 1..312: mol_type = other DNA
cacagatgtcctatgggatgagaagtagcagggaatgtaagatcttggagaacgctttaagacaaaatgcttggacaatttactgatgtgtattacaatagcttacatagctgttggactccttccacctttgtgagaaaggaaggaaggaggcaagattgcatacaccttttatctaggccagcctggtctatatggctagttcctccaggacagcctaggccaacatcaggattctgggctcggttcccaggccctggtgtgcgccctacagaggagtccaagctgctgtagagttacaggccccgtctg

SEQ ID NO: 39514 - DNA, 300 bp, Mus musculus
  source 1..300: mol_type = other DNA
agtatagaagtgtgctgtaacgccctgtgatacaaagtgctactttataactttaaactgtgggaaactcactaaaatgaaatttgctaggtggcataagcatgagcaaagaattgatttataaattcttattagcattgcttaaacagcaaaggatgatcttgaattccggcttacacgtgtgtaccccgacacaacaccttattttaaaaattaatttttgaccactaggtttgatctcaacattcaaatcttgactcccttggtctgctggtccacccctgggattaactcatgggg

SEQ ID NO: 39515 - DNA, 194 bp, Mus musculus
  source 1..194: mol_type = other DNA
gctggtccacccctgggattaactcatggggaaaggctgcctagcgaacatatgtggtcatcaccttaaattttcagtgatggctaaaggaaagtgggcttttcccctttctaggggccagatctgggtcccagcttgtctcagaagccccgcctccaagctgagggccgagcccaggctggggggtgcctgtc

SEQ ID NO: 39516 - DNA, 289 bp, Mus musculus
  source 1..289: mol_type = other DNA
tctgtgatctcagcactctgaagagagagcaggctgctctctgagtttgaggccaaccttgtctacagagcgaggtctagacctaaaatcaaaggtttgggccttacatttagcaagtatgtctttgagccatatgcatgcagtgctcacatagccactgtgagagagtagccattgctctttggccttctcatgaactggatataagagacattctcttcagaaggcagaaaagaaggcattcttgcttacggcacccccatgtcacacctgtcccacgtcacctggg

SEQ ID NO: 39517 - DNA, 308 bp, Mus musculus
  source 1..308: mol_type = other DNA
cagacaagtgatatcttgtctcccagaccccaaggctgccttgggagggcccacacacaccttccggaggccaagccctctgcctgcctgcctgccaggagagaagggaaggtttgccatcctagaagctaggcctcttctggggagggacttgaagccacactagggcagctgtaggccagtccagctgtccttcactggagttcagcaactacatgttgggacatcaaaaatgaggaaaagaaaaatattctctaagattttcagccaggagtgcccaacaaactcccagctgttttgttgttctc

SEQ ID NO: 39518 - DNA, 267 bp, Mus musculus
  source 1..267: mol_type = other DNA
cactgaggtcagcgttgcctggtctctgctagccaaaagaaattcctgtcacctttagctccaagtaaatccctagaactagagagatgattcactagctcgtgtcacctgaagacacacaggatgctgagacacaaggagcctactgtttcttggggaacccccaagaaagctagctccagaaggtgttcttgtcagagcctgtattccagggcccctccctgagcaggaatctggggccctggttgaatgccagccccacccacg

SEQ ID NO: 39519 - DNA, 301 bp, Mus musculus
  source 1..301: mol_type = other DNA
cagtcattgacatctttggaggactccagagagccccacccagtgagtcagacctaggctgggctctcccaggggattcaccccatgctgggagggagagcacctgagctcttggcctctgatcatgatctcaaagcttcatgctcattaagacatatatatatatatacatatacatatatattctgtctctctgtctctctttgaatccagatctcgaagcctgaggccatgggatgcaaggaggccccgtggagagtcccctgggccccctccccttccagaggaccctgtcataagg

SEQ ID NO: 39520 - DNA, 245 bp, Mus musculus
  source 1..245: mol_type = other DNA
aacagctctgggttctgctccgagtgtgtcctgtcgccttcagccagggctggtcccgccgccctgggaggaaggggaaaccaggttacagcgccaccctaataaggacagaatcagagctcctcccttaaatccaggggttcagatgaggtattcaaaccccaactctccagcccgtgcccctcctcgagcgcttgcgggttcagccgcaccgcagcaaggtgcgggcagaaggcggggccgtg

SEQ ID NO: 39521 - DNA, 206 bp, Mus musculus
  source 1..206: mol_type = other DNA
gcctgccaaggctgggcgaccttccaggatcttggagccctgagctctggtgagccctgcagggtgggtcgccaccctcgatgtcacttatgccttcaacagataagtttccagcatccattggaacatggccacatgtaagttcactgagacctgagaatcacccactgaaggccctgggtggtgggacctgttcctctcacctg

SEQ ID NO: 39522 - DNA, 265 bp, Mus musculus
  source 1..265: mol_type = other DNA
aatcagagctcctcccttaaatccaggggttcagatgaggtattcaaaccccaactctccagcccgtgcccctcctcgagcgcttgcgggttcagccgcaccgcagcaaggtgcgggcagaaggcggggccgtgagtccgggggcctcttccaccgagtccgagtgaccccgccccttgcattctggaaggtgaggcgcacggacctcaggcgcagggaggtcccctttctctgagcccagttcggggatctagagctctgccct

SEQ ID NO: 39523 - DNA, 553 bp, Mus musculus
  source 1..553: mol_type = other DNA
gagtggaatctttttttaaaaaaaagtgagaaatgcttgatacttacatctttgatattagaaaacataatgtatatgttttatgtaagtgcattaaacaatattaaatgtatatgtacatatacatgtattaaagtgtatataagatattaaatgtaaaaatgtattaaaaaatcaatgtattatatgatgaaagatcaatatgcatacagacaatatgtaaatataacttacaatttatttttaaagaacatgaggacagaagagacctatatcctggtgttgagtgtggaatctttaaaacaaaacaaaacaacaacaacaacaaacaaacaacattaagtctttttgggctgggagtgagttcagcctcaaaggcggtactggatgcagcgggaccgactcaatcctctagaatgtgtgggggctggcttccacccgccctgcctgactgcagtaaagagggtggagggattggggttgcctcagggatttcagataaccctatggagacagctccacctgtgccccagggagctggaggcggtgcggg

SEQ ID NO: 39524 - DNA, 310 bp, Mus musculus
  source 1..310: mol_type = other DNA
accgattgttggaagtcctcatgccgcttcccagcctgggttaggggcgcagctcccactctccttgggacacggaggtcttcagcacccaacaggtaggtgagtcagccctgaccccactgaacctgggcagctggttccagggcctcgatccccagaggggtacctgtggaggccggggcaccactggggcccattggacttgcaaactttatatgccccagtacttggaaatgtaattgagaaaaatatgtaataaaaaaatatatataaaagaatgcagagatctggggtcactgtgttccagtca

SEQ ID NO: 39525 - DNA, 265 bp, Mus musculus
  source 1..265: mol_type = other DNA
ctgacagagagactcattgacagactctgtgaggtgccaggcatgaggagggcccagcctgatctgaggacccctccccatccttggggccagggagggagggagtggcgcccagactgacaggaacctcactacctgggaatgtgccccagggaccagtgggtggttatatcaccaggtcagcttgagaagtctggagagggaacctgatttggctctgtacagggactgtaagatgctgatagtcctccactgccggtccctg

SEQ ID NO: 39526 - DNA, 364 bp, Mus musculus
  source 1..364: mol_type = other DNA
tctgaaggctgcctgtctgccttgcttcccatgggaataatgccaagacgtcttctgatgcaaccccccctgatcaccgggaccggagtcccaggaacatggagagatcactcttcctagttcctgagttcctaggagcctctgcactaggacatctgcagacaggttctctgaattcaggctgagcatggagtgatgcttacccagatcctatgcatgggccagagaggctggggtctggacactgttccctccctgtgccccagactccacctgacttggaggcagcctgaaggctttgagctggagcctgcagcagtcccctggggggcaggccagccccagctgaggaagcttataagcc

SEQ ID NO: 39527 - DNA, 190 bp, Mus musculus
  source 1..190: mol_type = other DNA
tgaattccaaataaaaggatttcattctcattggactaaaaatagatctccctatacaggaacagacatatatgtgtcccagtatgaggtttggctgggcaaaaccaacagcaatgcatggcttgccaagcctcaccctgtttcaacatgagctttgtgacaaagcacatccaacatcatgattatgact

SEQ ID NO: 39528 - DNA, 361 bp, Mus musculus
  source 1..361: mol_type = other DNA
aatgaggctccttcccaactcagggtgggtgacactcccctggaataacctgagatttcatacttttgaataaaagactgatcaggcataacttcgacagctctatatattaccctggctgtcttgaaagtcactatgtagactaggttggtctacatcacagaatactagagtctaaagtattggaggtgtgcaccactacaccctgaaagactctgttctaactgcaagggttaggcagcactaccttgacatctggcaatggtccccggaacaatctcatccttgggaaggtatccagggtgacccagggcctactggacgaatacacttctgtcagcaagagatggctttttttaaa

SEQ ID NO: 39529 - DNA, 393 bp, Mus musculus
  source 1..393: mol_type = other DNA
aagctgaacccttaatgaggctcctggagtgagaaaggtagctcctgatctaggagatgaggaccaacattgttcaggacaggtgacactcccctggaataacctgaattttcatacttttgaataaaagactgatcaggccaaagtgcaccataacttttattcattttattttataggtttgttttgagacagctctatatataaccttggctgtcttgaaagtcactatgtagactaggttggtctactattagaggagtgcactgctatacactgctcctgaaagactctgttctaactgcaactttctgggataatcttggacttgaggtacaggaccttccttaaagttgaacagttccagtgacctagagggatttaaagtctccc

SEQ ID NO: 39530 - DNA, 352 bp, Mus musculus
  source 1..352: mol_type = other DNA
gctgaacccttaatgaggctcctggagtgacacaacattgttcagagtgggtgacacaccccaaactgagttttcatacttttgaataaaagagtgatcacataacttctgtatatatttccctgactgtcttgaaagtcaatatgtagactaggttggtctacatcacataatactagagtttaaaaggcaagaactttggctttctcaaaaaaattaattgtatatacagtgaaatcactggtgaaaaaaatcttgtgagggttgggagtcacttgctcgctaaggtccccggaactcaaatatccagggtgaactagggcctactgtacagcgggtatttaaaatatcc

SEQ ID NO: 39531 - DNA, 398 bp, Mus musculus
  source 1..398: mol_type = other DNA
cccatagcccatgattggctaaactcacatcattgttcagggtggtatactctacactggaataacatgaattttcatacttttgaataaaacattgatcatgccatgataatggcaccataacttctatttattttattttattttatacgtggctgtcttgaaagtcactatgtagactaggttggtctacatcaaagatactattctatgggaaaaaggcaagcattttggcattctcaaaaaaagaatttgtatctgcaggaatgtatccaaggtgacctagggcctactgtacagtgggtgcaacagggccctcccctcccacagcagggagggtgagtgcaggacctctgtcatggcagggttttctctggctgccacaggggtttttaaag

SEQ ID NO: 39532 - DNA, 374 bp, Mus musculus
  source 1..374: mol_type = other DNA
ccccgactctgctcagggtgggtgacactcacctggaataacctgagttttaatacttttgaataaaagagtgatcaattggtttgttttgaaaaaactctatatattacccaggctgtcttgaatggcagtatgtagactaggatggtctacatcacagaatacattccagaaagactagcattttgacattctcaaaaacaggatttgtggtgaaaaaaattgttctaactggaggtccaggaacgggttgggagtcacttgtgcctccataaggtccccggaactatcatccctgggaaggtatccagggtgacttagggcctactgtacagagggtgcaatgaggccctccctgagggtatttaaaatct

SEQ ID NO: 39533 - DNA, 279 bp, Mus musculus
  source 1..279: mol_type = other DNA
cccaactctgctcagggtgggtgacactcacctggaataacctgagttttaatacttttgaataaaagagtgatcattaccctgactgtcttgaaagtcaatatgtagactaggttggtctacatcagtgaaaaaaggcaagaattttggctttctcaaaaaaatgatttaaaaatcttgttctaattgcaactttctgaagataatcttggacttgaggtacaggcccaatctccctgggaaggtatccagggtgacctagggcgttttaaagtctcc

SEQ ID NO: 39534 - DNA, 315 bp, Mus musculus
  source 1..315: mol_type = other DNA
tacttgagaaagggtcaatgtcattgttatcccaactctattcagggtgggtgacactcccctggaataacctgagatttcatacttttgaataaaagtgtgatttaccctgactgtcttgaaagtcaatatgtagacaagggcaaaaaggcaagaattttagcattctcaaaaaaatgatttaaaaatcttgttctaattgcaactttctgaagacaatcttggacatgaggtacaggatcctccctgggaaggtatccagggtgacctagggcatattgtacagagggtacaacagggccctttaaagtctcc

SEQ ID NO: 39535 - DNA, 425 bp, Mus musculus
  source 1..425: mol_type = other DNA
ttataaaaagggctgctatgaacatagtataacatgtatccttattaccagttggaacatcttctgggtatatgccctccagagtggttgtataagcttgcaaacccaccagcagcatctgctgtcaccagaattcaagtacttctcagtctttcagtattccttgattgagaattctttgtttagcaatttttaatgaggttatttgaatttctggaattcagctcctaataggaaaagtaaaatcagtgatccaacttaaaatgaagcaagcttgcagcaaagctctgttctaactgcaactttctgataatcttggacttgagggctaaggtccctggatgggaaggtatccagggtgacctagggcctactggacatcaggtgcaacaggaccgccccttaccacgtttttaaagtctccc

SEQ ID NO: 39536 - DNA, 311 bp, Mus musculus
  source 1..311: mol_type = other DNA
gctgaacccttaatgaggctcctgacttgagaaagtgtctcacatgtggatgaccttccactggaataacctgagatttcatacttttgaataaaagagtgatccataacggtttgttttgagacagctctatatataaacctggctgtcttaaatagactaagatggtcagaaccacctggctctggcttcagcttgctggtactttttctcagctatcactggtgaaaaaacttgttctgacatggctaaggtagggcctactgtacagtgggtacaacgaggccctcccacaggtatttaaaatctcc

SEQ ID NO: 39537 - DNA, 296 bp, Mus musculus
  source 1..296: mol_type = other DNA
aatgaggctcctacatggttcaggctgggggaccctcccctggaataacctgagttttcatgcgtttgaataaaagagttttattttatttcattttaatttattttatttccctgactgtcttgaaagtcactatgtagactagattggtctacatcacagattcgaagtccaaaaaagcaagaattttggcattttcagaaataaaaaaattttgtactaactgcaactttgaatctccctgggaagatatccagggtgacctagggcctattgtacagggttttaaagtctcc

SEQ ID NO: 39538 - DNA, 324 bp, Mus musculus
  source 1..324: mol_type = other DNA
actccactggaataacctgaattttcatacttttgaataaaagagttgcacctgctgtctgtaggccctaggtcatcctggaaatggtaatgtgtaccataacttctactcattatatttttgggggtgttttgctacatattaccctgactgtcttgaaagtcactatgtagatagattaagcattttgacattccaaaaaaatggtttgtatctacagggaactagaacccattttgaaaagattttgttctaactgcaactttctgagaataatgaagatatccaggatgacctaaggcctcaggctccttttaaagtccc

SEQ ID NO: 39539 - DNA, 376 bp, Mus musculus
  source 1..376: mol_type = other DNA
ctgaaccctcaatgaggctcctggacccaacactgttcagggtgggtgacactcccaccaaagtgtcaatagaccatggtaatgtgcaccataacttttatagcactatatattaccctgctgtcttgaaagtcactatgtagactaggttggtctacaagcattttggcattatttaaaaaaaagtgcaaagaatttgttctcagtgcaactttctggggataatcttggaaggtacaggaacttgggggttgggagtcacttgctcggctaaggtccccggaactccatccctgggaaggtgtccagggtgacctagggactactgcacagcaggtgcaacagggcctcctctcccacatgagggtttttaaag

SEQ ID NO: 39540 - DNA, 364 bp, Mus musculus
  source 1..364: mol_type = other DNA
cagctgccaagctgaaccctcaatgaggctcctggaacaaagaagaaaatggtcatttttatcccaacactgttcaactccactggaataatgagttctcatattcttgaaccaaagtatggtaatgtgtaccataactttattcattttatagacagctctatatattaccctggctgtcttgaatgtagactaggatggtctatatcacagactactaaaaggaagcattttggcattctcagaaaaagaatttttatctgcagggagcttgcagctctcctggctatgtgcaaagaatttgtgcagactactgattttacccggatccagggtgacctagggcctactgtagattttaaag

SEQ ID NO: 39541 - DNA, 170 bp, Mus musculus
  source 1..170: mol_type = other DNA
actagagttcattatagtagaaagacaaagagtcatctgagaactctttcaagctgtccttggagtcccagacaaaggcagactctctggaactgagccatcgattgtaggccacagactgtatgtcctgtacattgctaatttgcgaatgtggatgataggccagacag

SEQ ID NO: 39542 - DNA, 483 bp, Mus musculus
  source 1..483: mol_type = other DNA
ctgaacccttaatgaggctcctttcttgagaaagggtctcaaatatgagctaacctcaaaatgtcattgttatcccaacactgttcagggtgggtgacactccactgtagaataacctgaattctcttattcttgaatcaaagtgtcaatggaccatggtaatgtgcaccataactttcatcattttattttattggttatttggaaacagcactatatattaccctgctgtcttgaaagtcactatgtagactaggttggtctacatcatagaatactaggtgttggtactgaagatttgcacccaaaaaggtaataattttggcattctcaaaaaaaaagtatttatatctgcagagagcctgcagcccttgtggcttagggtaaccttaggtatccaaggtgacctagggcccagccctcccctcccacagccatgagggtgggagaaggtttggccaacatctggctgctaaaggctcc

SEQ ID NO: 39543 - DNA, 384 bp, Mus musculus
  source 1..384: mol_type = other DNA
ttttaaaaaaaaaatgttctcaagacctaggggttggtcctgcctcccgcgccgcagctgcgactactgccgggtgggcccttaacgagctagcctgccgcgctggcaagtcgggggatttccggttctggccaaacccccaccccatggggggctttctcgtcccgccctctccttgggagctgtctaagagctgcctgacggaagtaacggaagaacctttcagatatgttccgtaccttatcacctgatcagccgtgaaagcaggatccccggctcaggcgtaagtgtgggctacctcagggcggggcccaagagccgctggaggcggggccttgcgagcgcgatgggtggggctgacgggcagcgcgcgctataaatggg

SEQ ID NO: 39544 - DNA, 292 bp, Mus musculus
  source 1..292: mol_type = other DNA
tggctttttataggcgagcgagtcacccctgagcgtcaagctgggattaagcccacactgcaaagagtggggcccctccagtggtgcattccctctatgcacagctggtagccatcagacacgcacacgcgtgcatgcacacaaataacctggaaagtcattttaaaggtataaagaactgagtggtcacagtctctctgtggtccagagctcagaagctgtcaccaagtcctgactgttagttcccacccttgcatctggcagacacgaggattggagatccagtggtcac

SEQ ID NO: 39545 - DNA, 265 bp, Mus musculus
  source 1..265: mol_type = other DNA
ccccagccctgcaggctgcactgaggaccgaggagaccgcggttctctcctgctttctctactcacggccagatgggggaatcaacctgctcagggcctggcctgcaggagaatcttgatcagcggtgaccacagtctgcagtgtgccccctcctcaggaatggccaagacagagagtccaaagctggcatcctatcatagcctgctttgttctgagaagactcctgggaacttttatccatataagtgcttgtacttgcaacct

SEQ ID NO: 39546 - DNA, 199 bp, Mus musculus
  source 1..199: mol_type = other DNA
ctatagtatactcaccagtggagtgggtgagctggctcggacagcacacaggtctgtctaccgtgcttcttgtaggtagatctatcaggtacttccatgtatgtgagctcatatggaaagaatctataacgatttgggaggggctcccctaggaagagcagcgatatctctctgcgggctcccggagggaggggagagg

SEQ ID NO: 39547 - DNA, 302 bp, Mus musculus
  source 1..302: mol_type = other DNA
ctccaggagctgagaagacaggctcacctttaaatttaatcctgattaatgttgataaaaatagtcatgtgcgaatgagatgtgttagtacatttgctctcttgacctaacaccttggcctagggacacggggtgggctctgtgctgctaaaccctgtgtgtgtagtgccacacacaggcactgtagtacaggcaggaagctgccagccaggacccaagcagggctgtggtcccaccccactgggtgcctggtgcaccgtgggctggggtgccccgtgatggggtggagcaccaaccctgtg

SEQ ID NO: 39548 - DNA, 254 bp, Mus musculus
  source 1..254: mol_type = other DNA
tgtatggagttacagtcactctggattcaaacacaaccaattggtgaccagacagacaatttttttttctttgggttccaggcttggatagccctgcagccctccagcatgcgcgtgcgcgcgcgcacacacacacacacacttttagacgtgagctgcagctgctgggaatcagaactgggtccagcaatcgctccagatttcttttttgaaagattccgccaactctggaaaagagactgcaggtggtacct

SEQ ID NO: 39549 - DNA, 243 bp, Mus musculus
  source 1..243: mol_type = other DNA
cccacccaggattgtgtgcattggaggatgtacacatccattctgtatgtaggccagcctggtagtgagcactgtgttgaaaaataaattgatcaaagtttaggtttctcaatttctaacaaaaaattgagaatccagccgaatctacaaggtatgctgactctggaaggcaagggcctgcctggataagggatatgcatagacgagacagctaaagggttacattgggcaccatggtaacca

SEQ ID NO: 39550 - DNA, 319 bp, Mus musculus
  source 1..319: mol_type = other DNA
gctgatggagcctgggacagagctgttgcgccctggttaccatggcaacaattgggggcagggagctggcctgctgcagcctgacatgtcccatgccaggcctgccagccagtggctgggctcatcctgggacactcagagactccccaagccatgcaggtcccttcttcatggacaggaggtggggcctgcaggaccaccacatagggccatgcaaggcctagcttccaagccaccatgccagccagcaggagggcagagggctggaaaaggacaccctccccatcctgttccctccctcagtggagagagtcagggg

SEQ ID NO: 39551 - DNA, 199 bp, Mus musculus
  source 1..199: mol_type = other DNA
agcaattgagtgagacactaacttccaagccacccctaccttgattgcattcatccttataccaaagtgaatattccatgagaagccatcttcaaagctcttaactcctaacattggtaatggtgagtggcaattttcattagctcacccacttggtgccagtgggattcaaatccagtgcctgaggaaaggagtttgg

SEQ ID NO: 39552 - DNA, 235 bp, Mus musculus
  source 1..235: mol_type = other DNA
cctagagcagatgcaggagcgccagggtggaccctgccagcggcatggagtccatgctgcccagcctggttctgcagccgaggctgctagcgggggagggggaggccaccccctggccgagctagctgggaggggagggagcgccctccccgcgcactgccgtgaacctgactgagccaggctcccagcaatgacagactgacagcttgctcgtgtggggggggtgcagggagac

SEQ ID NO: 39553 - DNA, 475 bp, Mus musculus
  source 1..475: mol_type = other DNA
taggtaagcacagggcgtaggtggcacagctgtgtacactccgggtggactgactgcaggctgcagcctcaccgacatgcacgtggtggatgtggagctgctaggacccccagggccttcaggtcgcagctttgccgtgcacacccacagagagaacccagcccagcctggcgctgtcaccggctctgctactgttacagccttctggcacagcctactgggtgcggcaggcccctccaagggtcccttggcgtttgtgctcggcagagctcacatgttgggtgtcccaatgggatcatattgacaactatgggtcccagtaaacatcagagttcagcccactgttctcgctacacactgagtatgacgccatacccagaaacctctaggcagcagtgagccctgggatgggagttgtagtcccacgcggcagagcagccccggaggacttccggactgcgcgtcctatttagac

SEQ ID NO: 39554 - DNA, 472 bp, Mus musculus
  source 1..472: mol_type = other DNA
ttttttgaaacaggaccttaggtagcccaaggtgaccaggcctaagccttagatgtctctttattaattacttattgagtcagggtctcactgtttgtcctaggctggcctcggggtattgaaatctcaagcaatccaagctagcctcaaactcctctcagcctcccaagcacggagatgagaggcttcatgatggggtccatctagcgcccacaggaggccgccccgccccggcccccacgcgcggaggccccgacccggcagccgctgcctcgggctctgctaggagccgcggctaccatcagcaagagcactagcagccgggtcaccccggcacccgcggagggttcatcctgaggctcacgcgcctgcgccgcacgccgcgcctgcgcactagcgcccgtccgcctgctcccgcagtcaggggtgacccacctgggagagaagtgacgtcgttgacgtcacggaacgc

SEQ ID NO: 39555 - DNA, 420 bp, Mus musculus
  source 1..420: mol_type = other DNA
cctgctccctagggagcgaggtggaagtttttgcactgcaaccaatggtgtgcccccagaagccaggaagcttccggctgggaggacagcttgtcttcgatacccgccacacctgtggttcctcccctctggtgctgggaaggagccgggcctgggcagctctccagggccttcccggcctctctgcacttggccggtgacgggcagccggccaggccgctcccattgggacccggatcagaagggcgggagagaactcttccctgaggccggcacccgtcctgcctacgcggggaatctggacccctgtgcccccagactctggggttccagttgctatttctcgccctttagagcatgcaagaggaatgcggggcggccctgcgctgcctcctgggagtctcgagactccataaaggg

SEQ ID NO: 39556 - DNA, 558 bp, Mus musculus
  source 1..558: mol_type = other DNA
tgatatacagctgtctacctctagacagccccctcccctgggtgggcagcaggaaggggtcaaagtcctgggaacagcccctgatgtcccatcttctacatgcgcaagaaggtgcgcaaggacctggaagaccaggaacggctgctgcagcgctttggaccgcccggccctgaggcctggtgacctgacacgggacaaggaataaagtgtagactctgtacaaccctctggagccccagtgtgcctgcctgtgtccacacaggactgacatctctgtttccaggggactggtggccacccagctggcattaggtgctgtccaggcctggggcagcccctagcacacctcagggcgaccctccctgtcacggcacagccatggagtagctcccaccagagggtcctggtggtactgacatcctgtccccagaatggtggggatcatgtgactagagggttgtgcaatccagacccctcccagaggggatttttgaggagggcccccatggcccgcccctgggggtaggtaggcggaggctgggccaaatatatatagga

SEQ ID NO: 39557 - DNA, 341 bp, Mus musculus
  source 1..341: mol_type = other DNA
cctttgtgggccaaagattttaggattaacatcaacgggtcggaggtccggggctccacacctgcggaaagtcgcgcagctggtcgaactcgccgctcaggaggtggcgttggaggcgcccagggcggcacggggcgtaggctggagccagggggcggtctccgagggcgcatgcggggcagcggcctccgcatcttcatcgccacgccccggccctggggaggaacgccgagcgttccgtgacgtcaacgacgtcacttctctcccaggtgggtcacccctgactgcgggagcaggcggacgggcgctagtgcgcaggcgcggcgtgcggcgcaggcgcg

SEQ ID NO: 39558 - DNA, 400 bp, Mus musculus
  source 1..400: mol_type = other DNA
gtggccccccacagttgggagaccacaggccctctcttctgccccttttatttaataaaaaaacaaaaataaagtagtgtggagagggtgggccatctctctgcccaggtgacgagggtctcaaaagaacacttctttttttttttttttttttttttaattttatttattttattattatatgtaagtacactgtagctgtcttcagacacaccagaagagggcatcagatctcattatgggtggttgtgaagtcgggtgctcttcttgcttctagcaaagcatcacatccactgtggcagtcttctaacgctcctgcagtgggcgctcggggaccgcaggccagccagcccaagcgggctaggggcgggacccagcgggcgcgccgcagctctgggcc

SEQ ID NO: 39559 - DNA, 504 bp, Mus musculus
  source 1..504: mol_type = other DNA
tatatttacttcttcctattatgaagctgaatgcaaaaataaattcttgtataaaaaagacattgtggcttaatgagatctgatgccctcttctggtgtgtctaaagacagctacagtgtactcacatatacataaataacagcccaagccctgagctggagaagtttaaggtatgaaaagcctttaagctttttaggcttaaaacctccaaatttaaaatatttagagatcctgtctcaaaatcaagacaaaaatttttttaaaaagcagccatgcagcacgctacaaaagtagagaactttaaactactcaaaaaggttaaaacctgcttcgaaaagaaacgaaagaactttccggaacttttttctgagtcccagaggggaactaccagaagacttccggtgtgccacttccggccgaggcctcacagtcggtggcgccctggcagaccggaagtctgtcacctttcccggtccgcctacttccggaagtgacgcgcagcg

SEQ ID NO: 39560 - DNA, 258 bp, Mus musculus
  source 1..258: mol_type = other DNA
gcgaccctacagggggtgaccaccaaaggggtcttgaccccacaggttgagaaccgttgttctagcctaaggcaagaggtcgcttgcactggctgccaagcctgctgacctgtgttggacgcatgtggatgcacacacaaatgaactagctaattaaaatgtgtaaagagaggggagccccttctcccaagaaaaaaaaattgtggtatgaaaggggtgggtgcgggtctccctccccatgctacacgtcacttctgt

SEQ ID NO: 39561 - DNA, 120 bp, Mus musculus
  source 1..120: mol_type = other DNA
aaatttgcaacatccagttggacacgcggcccaataaggattgttaataatcccaggctgccacctcctctagctaggctgggtcggagtctgcctagccgtggccccgcccaggggccc

SEQ ID NO: 39562 - DNA, 324 bp, Mus musculus
  source 1..324: mol_type = other DNA
ggccagtctggtctacagagtttccaggacagccagggctatacagagcctattccaagacaaggtcttattataacaccttgatgtaacaacacgaggtattttaatatttaaacatcagcagcctgttaacatttaactttagggaggggacgggcctgtcccggcatgtcctggtcaaagctcacaaacaactctttgggctatttgacatacattacatgaatcacaggtcccaggctggcctagtaacagagatctgttgaattagtaaatttagcctacagtaagagtgttctgaggtcgcccctgtgaggtcacaaa

SEQ ID NO: 39563 - DNA, 411 bp, Mus musculus
  source 1..411: mol_type = other DNA
gggcactttaatgtataactaaactcccctccagtgtaggagaatggatttgaacacagggacctggtgtgcctggccctgtggcttttttttttttttaaacatcataatagtaatcaggagttcaagaccagtacatgatgagttccaggcgagcctgataaattgttctatcaccttctcgattgaggagaagacccaagcctgaggctggcatagcattttgacatcataaacagagacctgggtccttttcctcaaataatttttgttgatctcatgagcctcaattcccagccgcccacttggcaacaggctttgctggctgctgtgccaggccccgccccccgcccagcccggcaggtgtcaggagacgtcagaacccggtcctgccttcctgacgggagaggc

SEQ ID NO: 39564 - DNA, 427 bp, Mus musculus
  source 1..427: mol_type = other DNA
ttagtgctttatagctcaagtgccctataactgagacagggtcacactaagtttctcaatcactttgtttacagcccggcaatgctagctaggatctcctataatctaggctggcctagatgtaggatgaccttgcagggctggaatgatggtgccatcactcctgctttgcagactgggtggaacccagggctctgagtataaggttcacgccggctcccgggggacccaggcattccggcctcccgccgccccctacgggtgcgcacaaaggcatccaagcagctgctggccgctccccaagcatctctgcttcctgctggggcacgcccaagattggcctggcgcgccagcgcagcactgagccccaggggcgaggtctgagcgggccgcaacctgtgggtggggccgtccactgcaggccccg

SEQ ID NO: 39565 - DNA, 375 bp, Mus musculus
  source 1..375: mol_type = other DNA
tatataatacaataagtgtctgttgcacagatcctaagtaggtgtgggggaggcggagtgtctgacattcctcacaggctcctgggtggcctccgccttcctcaggcagtgacgtcacaggctgccgggcgagcggctctgtgaaaaagccgtgggcgccggggtttctcacggcccggactctcactccgatccggagcagaattacagttgccccgcagaaacttccggggagggagggtgaaggaggggctgcgcgcgcatcccccaccggccgtgcgacagcagcgagcagtcatacagggcatccggacaagctgtgccctgctggaaactccatttcccgtctgacgtcaatcttgatgaaatacgtga

SEQ ID NO: 39566 - DNA, 390 bp, Mus musculus
  source 1..390: mol_type = other DNA
gtacacctaagtgcctttagaaggaggaaacccccgcttaagagccgggcctacgcccggctgtgacaccccggccacagaggactaaggccatgggcgcctgggcttagtctccgtcccaaagaacatatgctttccaggataaacccaactcctcatgaggagggctccctcagagtacagggggaaattcctccgaggaagttccggttccagaaacttctcagtagagaggcaccccgaaaattccatttggaggtgacatcacgtatttcatcaagattgacgtcagacgggaaatggagtttccagcagggcacagcttgtccggatgccctgtatgactgctcgctgctgtcgcacggccggtgggggatgcgcgcgcagccc

SEQ ID NO: 39567 - DNA, 346 bp, Mus musculus
  source 1..346: mol_type = other DNA
agcccgcgctgcgccgcccccggtatatttgtccccaggccccggggccgcgcccgcgcaatggctctgtagccgcgaccccgtcgtgtcccccgccccttcagccgaggccgccgccgccgttgcctcctcgctggcggccggcgcatccgctgagcaagcgcacggctcgcgcgccgttgcgcctgcgcgctaatcccctccacccccggcctgaactacggcgggcggccggtcattggccttgcgcctcgtcgctagtcgagccagcagcgggggttttgcttgaggctccgactcaggcccaacttccctccaatcaaaggctttaggaacacctttaaga

SEQ ID NO: 39568 - DNA, 421 bp, Mus musculus
  source 1..421: mol_type = other DNA
caaatatgacacactgactgactttcacatggaatgccagccatgtacatgaacatgagagggactcttttactaaatggaatataaatgtcctattttggacaggaatagggtttttttctaaaagaaaatacaagagttccgtccctgggactcacatggtcagaggcgcgtatacagcgctctacaagtacggaactcctctatgaagcctaagctagcttgcgccattcggcgatgggcttaacccacggatctgaccgttcagaccgagcccgggcccccagcctgaagcagagagtggagggtcagggcgacatggcgggcccggggtcgccaccgccccgtcggggccgcgcgagggcggggcgcggagggatccaggcaagcccgcgctgcgccgcccccggtatatttgtcc

SEQ ID NO: 39569 - DNA, 305 bp, Mus musculus
  source 1..305: mol_type = other DNA
actgagaccaagtactgtgccagagttctgcctgaccagtctagagtctgctgcccagtggccacttagccctgcccatgttcctgcagctgcagcaaacaggttctggacctggccaggtgctatatgcaggccctgacctggctccattcctgccattgtgctggaccatgtgacatgagtaggcccaatgtgaaaggcccatgtgtgtgcccatttcaactgccacctgggtgggtagtccccacccccagaggaagaagaaaaatagactgagttacttcctcctgtgacaggaaaagggg

SEQ ID NO: 39570 - DNA, 135 bp, Mus musculus
  source 1..135: mol_type = other DNA
atgcccatgctcacacaagcgtaggcaagcggcatgactgcatgcccatgctcacacgcaagcggcatgacgtccatatgcctataaagcatgttcaatgagagtggcgcagtgcgcctgcgccgtcccgctgac

SEQ ID NO: 39571 - DNA, 282 bp, Mus musculus
  source 1..282: mol_type = other DNA
cctccaccggagcccagtgcagaaagacgtcgctgtcctgagggacatggggaggacttagtagagtcacccgaatgccaccgttttccccaggggcggggtctagagcccctgaggggcgtggcgagtctacagtcccgcctcgcaccccagatgggggcggggctaagggaggctctccctaaggactcgtaactagaagctggttctccttagcgagggaatgatttccaaagtcttagcggagtcagcgggacggcgcaggcgcactgcgccactctc

SEQ ID NO: 39572 - DNA, 172 bp, Mus musculus
  source 1..172: mol_type = other DNA
ggcgtggcgagtctacagtcccgcctcgcaccccagatgggggcggggctaagggaggctctccctaaggactcgtaactagaagctggttctccttagcgagggaatgatttccaaagtcttagcggagtcagcgggacggcgcaggcgcactgcgccactctcattgaac

SEQ ID NO: 39573 - DNA, 154 bp, Mus musculus
  source 1..154: mol_type = other DNA
gtcagcgggacggcgcaggcgcactgcgccactctcattgaacatgctttataggcatatggacgtcatgccgcttgcgtgtgagcatgggcatgcagtcatgccgcttgcctacgcttgtgtgagcatgggcatgccatgccttttgagggcg

SEQ ID NO: 39574 - DNA, 125 bp, Mus musculus
  source 1..125: mol_type = other DNA
taactagaagctggtctccttagcgagggaatgatttccaaagtcttagcggagtcagcgggacggcgcaggcgcactgcgccactctcattgaacatgctttataggcatatggacgtcatgcc

SEQ ID NO: 39575 - DNA, 319 bp, Mus musculus
  source 1..319: mol_type = other DNA
gcagagttccactcaggctgctgtgctgcagaagccatgcaataaaagtcttatgccaccatacctggttacacgtgtattaacatgctgcacaccatgggaaaggtgcacatgaaattggtgtaagtcttcaaagacttacgttaggcccagttgcagggactccggtagtgggccaccaagctggggtttggtccccagcaaatggtgtgcatgtgtgacttgagcactcaagaactggatgcatgaggggactccaaagttacctttatacacatagtgagtttgggtccaacttgaaggatgaggagtgatggtt

SEQ ID NO: 39576 - DNA, 339 bp, Mus musculus
  source 1..339: mol_type = other DNA
tttgggtgtatgtggattaacatatcatgggaccctgatgcaaaatgaggcttcatttctgctagatgaaaactgccccgtgtgtttttttgcaggtagcaacactatagtcggcttccccagaatgctctgtggtggaatcatatcaggctgggctctatacatacatacatacatacatacatacatacatacactatgatgtgacccctatccgctctggctcagagcgcctcaagcgccatagcatagatgagctttggaatgaattcagaagtgactctacctatatgcaatcctcactgcgcacccgcccatgggcaaggggcggaatttccg

SEQ ID NO: 39577 - DNA, 413 bp, Mus musculus
  source 1..413: mol_type = other DNA
aggctagccatcctgagcctcaactgttctgtgcagagaagactgagaccccagtggtgccgccaccactgaggtacagggtacaggtcaggccctgtaatcagtggtgacctttaaatgaggccacagaaaattcacggcctagtttcctgtggccactcagctgagttcgaggccagcctggtctacaaagtgatccaggacagccaaagaattgatatgagcctgcatgattttctgtgtactgtatgcaggtggctgcagaggccacagagcattgggtgccctggagctgtagctccaaggagatgctcagagaaatactggtatttaaaggctggtgtctccaggtacacgccttcagtccctatacctgggaggcagagagccagtctggtctgtgacagtattgt

SEQ ID NO: 39578 - DNA, 186 bp, Mus musculus
  source 1..186: mol_type = other DNA
acaaggaccaggtgacctctcttgctgctcaccttccagtttagctttttaaatcaattataaaacacgagatttttaaaaagccaacaggcatcattagggaacttctcgcatgcaagaggctataaattgccagcagctatgctggtcacggccacgtcaccgcctccaagaggcaagaacgcc

SEQ ID NO: 39579 - DNA, 431 bp, Mus musculus
  source 1..431: mol_type = other DNA
ctgatactgcaactcagtcccacttgcatagtaaatttctgaatgctgagactcagttttctactataccagacattactattgcactgtttatatatatatagtattattattttccttttttaataaggaatggcttctttcccagaaaacagagattaggtgttgcctagcaacctccacttaaattgttacagtgttgcctagcaacgtcgtttccaatgatgtgattggaccgctctctcggtcagaaagaacagaatttattaacttaatctcttgggtacgcgttgcctagcaaccggattcccgacggagtcggaaactagatttcgactccaaatgttgtgcgcaaaagtttgctcgatttcaagaggcccttaaaggggctcgttgtgcccaagctgccagacgtccggcggggctgcgca

SEQ ID NO: 39580 - DNA, 163 bp, Mus musculus
  source 1..163: mol_type = other DNA
ttagggaacttctcgcatgcaagaggctataaattgccagcagctatgctggtcacggccacgtcaccgcctccaagaggcaagaacgcccccccagcttcgcgttggttggcgccgggctcccctgttcgctgcagtggttcggccgcggcgacccctcagc

SEQ ID NO: 39581 - DNA, 280 bp, Mus musculus
  source 1..280: mol_type = other DNA
ggttctccagaactgatggaggaagcaattttgatcttatgaccattatagtgaaaaatgtttaaaaaccaaaatagtaatcccagttttccatttttgacctctcatggataagaggtgggaggcgcctgcgtagtggacacctcacgccccacaaccgccccttcgagggcggaagtatgacgcttccggcgaatcggcagagccttgcgaagagcacctactggcgcggaggggcggtcccgagcggcagggctctcagctaggggcgggtctgagg

SEQ ID NO: 39582 - DNA, 302 bp, Mus musculus
  source 1..302: mol_type = other DNA
atactattttaatagccatactattttaaactagaaaataaattttgattcttacagcatgtgtacgagctctctattctaccatgaagattccaggggttacaagcttctcaggtcttcatggcaagccctgggatttgttgcatggaacaaagttttccgtaattcgttacagaaatttgatttgaaaaggcactaataacaaaaacaaccatctcatttggtggttactaggaatgaaaggccacgctgcagttgccaggcagtgccttagcactgtccagttgtttaaaaacttggca

SEQ ID NO: 39583 - DNA, 345 bp, Mus musculus
  source 1..345: mol_type = other DNA
taccacctccccaaatactctgtgactagagaattctaggaattctagaagagcagcaagtactcttgaaacaatgatacaggacgctggattcttttcttaagaggccagcctggtctacaaagtgagttccaggacagccagggctagaatgttgagaagctgtgaggacatattgccatgatttctcctgacttcagggaaggtctgggactggatcccaaagctggctgcagggttagaacccagtccaccgtgtgctctagactcactgaggtctacaggggagtgacccagtggttaggccctttgtgacccaggccaggagctaggggaccctgagcg

SEQ ID NO: 39584 - DNA, 169 bp, Mus musculus
  source 1..169: mol_type = other DNA
caggcccctgcactcacccctccagagtaagggcgagaccattcattgagcagactgagctctaagatggtggacccaatagtcccccagtggcgcctgagaggcatctaagatgtgctccagtagatatacggtgacatacatgacataatgtagtatttcttgaaca

SEQ ID NO: 39585 - DNA, 340 bp, Mus musculus
  source 1..340: mol_type = other DNA
tgacatccatccgagtaactttctgcagattcagggaaatttcctggaaaggacctggaggccacgaggaggccacaggtgttcagaacttggcgccttccagcacaggggtgggaagctcatggtttcggaatcacagactagaatcagaatggtgatgattgacattgtggcgtacctttggctcagtccgcttagcgcggagcccgccgggaagctccagggcggagctggccaccctttaaacgctagggactttatgtttgataggcgtgtctgtcatccaattgaaatatgaagctctcagatggacggctttagaccctctggttccccggtc

SEQ ID NO: 39586 - DNA, 437 bp, Mus musculus
  source 1..437: mol_type = other DNA
agcccaggtcatcgggctgggggcggggcctttgtcctgcacgtggagcccacggggcccctcgaggcggcacaccgtgcggcccggctggaagcgcccccggcccgcgaccacgtgcgacagtcctcggctcggctgcggggccgagatctctcccgtcacgatcgcaggccgtgggccacccgtctcgcgccgcccccgtgatgcagttcgcggcctcggctgccgccatcttcacccgagtgaccggggaaccagagggtctaaagccgtccatctgagagcttcatatttcaattggatgacagacacgcctatcaaacataaagtccctagcgtttaaagggtggccagctccgccctggagcttcccggcgggctccgcgctaagcggactgagccaaaggtacgccacaatgtcaatcatcaccattctg

SEQ ID NO: 39587 - DNA, 378 bp, Mus musculus
  source 1..378: mol_type = other DNA
agagcataggtgctatgtagccaaggctggtcttcatacccaggctccagcctggcctggaactgcctccagcctggatgctgagactgcaggcttccggtagccgagcttctgagcgacaggtttgccatcctgcgccctgaggccgccgaggaattgggcgcccgtgcggcgcgggtgccagcagtggttttggggctcccaaacagtagttctgagactcgcagccacttccttttctaacgatattttgagatataaaaagtttttctcaacattgacgaaataaagtcaagaaatgcgcacttcggcttagcaggcctaactccctcaaatgcccttttttggccttccgcatgctgggaacgccatatgctc

SEQ ID NO: 39588 - DNA, 307 bp, Mus musculus
  source 1..307: mol_type = other DNA
cctagggacaagaacctcggagttatcccgaaggggtctgcgcgcttaaggaaggccgtcagaaccttcagtgtgtcctctcggagacccaactcttcagagccggcttactgagtcctaatcctagtatgctttgcggcaaaccgagcagtctgcaccgggagaccccgggtgctacagctggcaggactggctgtgttctacaaacttttacttcggaagttcaactttcccacgcctgcgcactgggccgacacggcaaccgccccaacgtcgaaggggtggagcatatggcgttcccagcatg

SEQ ID NO: 39589 - DNA, 252 bp, Mus musculus
  source 1..252: mol_type = other DNA
gggaattttatccagctcaaatgtacttgcctttcagaaagtaattaaaaagaaaacatatgtattttactaatattccatttgaaacttggaaagtattttcgtgaatcactaaattgctcccagagccctgtaattgagggatcaccgatcctgcagagccttacaaggtctatggttttggggatctccaacagactgtgagagagctcagagtaggactgagaccagggctgaggagataagcgctag

SEQ ID NO: 39590 - DNA, 435 bp, Mus musculus
  source 1..435: mol_type = other DNA
ccagaattccacttacatttatgtaagatatggtggaaatgagtcttcactcatctgctctgaaccagaagactcagagtttggattttcctgtcctcctgagttctgaatttaatggagattattttaagttaaagcctattctggacctatagatatagtttagtgaccccccaataaataattttagaagctgggcagacagcgtctcaaaaaaatcttcttaggatttataggagaaaaaaacatcttaattgaactacaattcccaccgcgcacgcaggacactgaggggggtcgtaccgcgcgctccagcagccccgcccagtacactgtcccccgcgtgacggagtcttcacacggactgggaaacggagtcgcctccggtgctgccggcctttcggaaacccagctgggtagcgccgcggcagcccc

SEQ ID NO: 39591 - DNA, 285 bp, Mus musculus
  source 1..285: mol_type = other DNA
atatcttacataaatgtaagtgcctcgaactcagaattctgggtccccagactctccatcctttggcccaaggagcccctcccgaccccctggaccggagtcggaccaaagcccagaaatcctggctgtcggcccttctagacccggacttcccttccgtttggctgggacagcgggacccgagacgccagcctctagaacgaagatctcccagataataactacggacacagagcatccggagactcgtgtcctctggccaaagctcatgtttatgcagtatag

SEQ ID NO: 39592 - DNA, 384 bp, Mus musculus
  source 1..384: mol_type = other DNA
tggtgccgcggggcacgtacgcgcagggaaccaggcccttgcacacgcctgacttcgtgtagcaggctccgctggtgcgctcgcgctcactggaggaagcggagcgcagccagacaccccgccgcccgcccccccttgtgcaaagatggctgcagagcgagcacccagcgcccgcacccactccggggccgtccgggacgccccctccggagcgcgcgtccccttctctcttgcaagcgccggggcaaaggcggagacagcggggtccctcctcccccctttccctcctccagggggaacccccctcccccgcccggggccttcccgggccttcggtggagggagcggcggcggaggagagcgcgcgcgctccccctcctttcc

SEQ ID NO: 39593 - DNA, 260 bp, Mus musculus
  source 1..260: mol_type = other DNA
agcgctgttaatgattgacagggattcggagtgcgaaacgttgaaaaagagtactgtttttaaactctactcctcctacttccgcccgacaggaggagaccggaaatcggaggcgcttcgtcccctaggcattacccagaggtttgagtttggagacttaactctgtcatcttaagagtcgataagtgagaactctttcccctattatagaaaaaacaattttcaaagatctcgagctcttgagaccgtagagagctcta

SEQ ID NO: 39594 - DNA, 300 bp, Mus musculus
  source 1..300: mol_type = other DNA
aaataaatctttttttttttgccagctaataaatcttaatctccttagagatatttagtgaaattcgatgcagcctggactacatgtcacctaatcccagcacttgggagaggcaggcggatttctgagttggaggccagcctggtactcggtctcaagcagaataaaatattttaattgcttcaaggaaccttcaagggtagcgctgttaatgattgacagggattcggagtgcgaaacgttgaaaaagagtactgtttttaaactctactcctcctacttccgcccgacaggaggaga

SEQ ID NO: 39595 - DNA, 347 bp, Mus musculus
  source 1..347: mol_type = other DNA
tctagatcccaataacgtggggaatcaggacaccagatcctctgcccagccacttacctggccagggctgggagctctggaaggccctcgggagctcctcctgggttactaggcccgagccggctactggcgagggggtagagctctctacggtctcaagagctcgagatctttgaaaattgttttttctataataggggaaagagttctcacttatcgactcttaagatgacagagttaagtctccaaactcaaacctctgggtaatgcctaggggacgaagcgcctccgatttccggtctcctcctgtcgggcggaagtaggaggagtagagtttaaaaacagta

SEQ ID NO: 39596 - DNA, 341 bp, Mus musculus
  source 1..341: mol_type = other DNA
cacataaatttggccccaaatctgtgtctcaagtttcaagcagctggatctgagtacactgcagctgtcttcagacacaccagaagaacagtcagtgctcttaattgcagagcccccttttttttttaaagacaagggtctctctcatagagacagactgcttctgtctccttttctgaaacggatctaagaaatggaaagagtttttaaaaaatacattccccttaatcccctggggccagagactctggaggtgcaccacgtggcaagggggtcgtcattggctccgcccctgaggctttcctgcgcagtcattggtcagagggcggcagcctctggac

SEQ ID NO: 39597 - DNA, 302 bp, Mus musculus
  source 1..302: mol_type = other DNA
gggagtgggctgctgccaaaccttgtgtgttaggcaaccatggggtgtcttaaagcatccagtcctaactgtgtacagacaggaagcagaggatccatcggctgcaggcagagggaagagggcctctggctgagcgtcagaggaggaggcccaggcctggttctctaggtatgagggaccgaccccgggcacctgagtctgaggggaagccggagcctctcctgaggctgaaatctgagcccagaagtctgagacaaattttggtctgtctagctctgtaattaattaactaaagtggatca

SEQ ID NO: 39598 - DNA, 220 bp, Mus musculus
  source 1..220: mol_type = other DNA
caccatgtgggtgccgggaaccaaactcggatcctctgcaagagcagcaggtgctcttaactgctgagctgtctcgtcagctccagggtccatctggaccaccagtcgcctgccgcccaggccggccatgaacccctggcctcccggcctagggggagtgggctgctgccaaaccttgtgtgttaggcaaccatggggtgtcttaaagcatccagtccta

SEQ ID NO: 39599 - DNA, 417 bp, Mus musculus
  source 1..417: mol_type = other DNA
tttagtctaagacaaggtctgtgttgcccaaactagtctcattagttactaaggcccaaatgggctgtgtgtcacctggaatctcagcacccaggagccaagaggtgagcctctggaagacatttccaccgggagaggtgccaggcgtggctggcactggggtttgagtgttcttcatttgtgcaaaggcctaagctctgcagatgactaaactgctgaggggtcgtcagactctgcaactttgaaaaggggagctgggctgttgtaaacacagccccacccggaacggaagcacctgcggctggagggtactcctgggtggctggcaggcacccagcttgggcggtgcccctcctgaccaatgcagaaggccgtggtgaagcagtgctttccgcagcatctcttgcaggcagagga

SEQ ID NO: 39600 - DNA, 295 bp, Mus musculus
  source 1..295: mol_type = other DNA
aaactggttaagagcacagactgctcttacgaggaatcttaaaaatgcttcccatgttaaccaccactagagtttttattacagctagctgacctggaagccaagtccttgtgctgaaaatgtcaatctattttgaaaatatgctttatattttgccacctggcctggggtggtcacctaaggttgtaaagcggcgcgagatgatcccccgtcatggcggcgtacggacagtcccaggaacgctctcgccggaaggcgtcacttccgccccgacctcgcgtggtgaataaggaag

SEQ ID NO: 39601 - DNA, 327 bp, Mus musculus
  source 1..327: mol_type = other DNA
tttgagtctcacgactgtgagatccctggcctaaaaatacttttggagcaagagatctgccttccaagaggctttgtccaaaaacttctatgtcctgacagtaaagtatgtccggaagcggatgaatacctcccactcatgttcgagttgctcgactatgagatggggtcagacggggttctcagcacctctgatgaggcccgctgagagaggccaggctgccctggagcgcctcaaggtgttggatgggatccctccactatgacaaggtgagccttgcaagcctagccttacagcctctgcgtcacgcctaccctgctggccttc

SEQ ID NO: 39602 - DNA, 332 bp, Mus musculus
  source 1..332: mol_type = other DNA
aaatgaagttccattttaaaaaatcaacttatatacacaataggaatcctatgcctgctgaggatgtaggcatcctgacgggttgcggccatcttcttggccgcctggcggccattgtggccaagctttgagtctcacgactgtgagatccctggcctaaaaatacttttggagcaagagatctgccttccaagaggctttgtccaaaaacttctatgtcctgacagtaaagtatgtccggaagcggatgaatacctcccactcatgttcgagttgctcgactatgagatggggtcagacggggttctcagcacctctgatgaggcccgctg

SEQ ID NO: 39603 - DNA, 311 bp, Mus musculus
  source 1..311: mol_type = other DNA
cagacatgtgcctgtctgcatggatctggatcccagctatcctgggatttgaggcggttaaatgaagttccattttaaaaaatcaacttatatacacaataggaatcctatgcctgctgaggatgtaggcatcctgacgggttgcggccatcttcttggccgcctggcggccattgtggccaagctttgagtctcacgactgtgagatccctggcctaaaaatacttttggagcaagagatctgccttccaagaggctttgtccaaaaacttctatgtcctgacagtaaagtatgtccggaagcggatgaa

SEQ ID NO: 39604 - DNA, 315 bp, Mus musculus
  source 1..315: mol_type = other DNA
aggatcttaaatttaaggtcagccaggattgcagaaatcttacgtcagaaccaaaccaacgacaaaagattctatttgttttccgaggcctccagtagcccagggtcagcacagggcacgccccatgggaatttgatgtgcagacgagtctttgatagccaacagtcttttgggaccaggaaggcttcctccacccgttggaaggcttcctccacccgactgcagccgccatcacttgatgggtatggcggctgcggcttggccggcattgtacggctgaagccggcgtcctccgcccctgcagcaagggataag

SEQ ID NO: 39605 - DNA, 408 bp, Mus musculus
  source 1..408: mol_type = other DNA
gtacgtatgtatgtatgtatttatttatttatttatagacagtttctctgtatagcagtctgtagaccaggctggccttgaactcagaaatctgctcttagtaaattgctcaggccagtcttgaaaggaggacaggtctgtattaccagtccttgctaagaacctagaggctggaggttcacaagttctgtgccccagccactatgacattccttcacgagtgactgacactgttcggattctacatacacttcgaagctgctaggtggcgtgtcccgcccgggctcgaggctttccacacccagctggggcaagcctggtgcgtggggtgagtccccgaggggcggtcccaaggtccccactcccgggcagagggagcagggtgcgatcactgtgcagggtatgagc

SEQ ID NO: 39606 - DNA, 370 bp, Mus musculus
  source 1..370: mol_type = other DNA
gtcggactgagtatttatttatgtatttatgtacgtatgtatgtatgtatttatttatttatttatagacagtttctctgtatagcagtctgtagaccaggctggccttgaactcagaaatctgctcttagtaaattgctcaggccagtcttgaaaggaggacaggtctgtattaccagtccttgctaagaacctagaggctggaggttcacaagttctgtgccccagccactatgacattccttcacgagtgactgacactgttcggattctacatacacttcgaagctgctaggtggcgtgtcccgcccgggctcgaggctttccacacccagctggggcaagcctggtgcgtggggtgagtccccga

SEQ ID NO: 39607 - DNA, 328 bp, Mus musculus
  source 1..328: mol_type = other DNA
cctggccaagtcggactgagtatttatttatgtatttatgtacgtatgtatgtatgtatttatttatttatttatagacagtttctctgtatagcagtctgtagaccaggctggccttgaactcagaaatctgctcttagtaaattgctcaggccagtcttgaaaggaggacaggtctgtattaccagtccttgctaagaacctagaggctggaggttcacaagttctgtgccccagccactatgacattccttcacgagtgactgacactgttcggattctacatacacttcgaagctgctaggtggcgtgtcccgcccgggctcga

SEQ ID NO: 39608 - DNA, 333 bp, Mus musculus
  source 1..333: mol_type = other DNA
tagaaccaaagcttattggggaggcagcttgtgtcctcaaaaaaaagctagcttaattaattacttgcttaaattactttggcccaacactctaaactttatagagtgttttaagtgtggtgactcctcttaagagtctaaagactctacaacctcctaatacctgcttggatgctggaagaatttcttctgattggtccttggttttaaagaaaatcccaggaacccgcaagagggttctggagccttgggccaggggggttcacgaacttgaccacccgttcctgaagggtcgctcagaggggcggggcttccgagaaggccgcagtggat

SEQ ID NO: 39609 - DNA, 471 bp, Mus musculus
  source 1..471: mol_type = other DNA
tgctgactgctcttccagacaaagccctgtaactccagttctagcatgtacatgatgcacagacaagcaggcaaaatactcatgcacataacaataatctttgtttgcttcttttaaagaaagaaaagcatttttaagaacacatgttatttttggagatgtctggggttaagctccaaacagccacaactgtcaggctctctccagcccagcggctgcagggtggcgcacgcctttaatcccagcactccggaagcagaggcaggcggatttctgagttcgaggccagcctggtctacaaacatacaaagaaagataaatatttttttagccaagtgtgctggcacacgcctctaataccagtcacagtgagactctgacaacgaaaatctattttttctggcgggtcacgtcctatatagctcgcttgggccctacggttggccccgcccctttgattggagtgggcgg

SEQ ID NO: 39610 - DNA, 437 bp, Mus musculus
  source 1..437: mol_type = other DNA
ggtattagaggcgtgtgccagcacacttggctaaaaaaatatttatctttctttgtatgtttgtagaccaggctggcctcgaactcagaaatccgcctgcctctgcttccggagtgctgggattaaaggcgtgcgccaccctgcagccgctgggctggagagagcctgacagttgtggctgtttggagcttaaccccagacatctccaaaaataacatgtgttcttaaaaatgcttttctttctttaaaagaagcaaacaaagattattgttatgtgcatgagtattttgcctgcttgtctgtgcatcatgtacatgctagaactggagttacagggctttgtctggaagagcagtcagcaacttctttataagcaaaaacattaattatgttcaaaaaatgtgttgagtgggatcagacccagagccgtactgtaa

SEQ ID NO: 39611 - DNA, 300 bp, Mus musculus
  source 1..300: mol_type = other DNA
atatataatatgctagcaaaacatgcatacctaattaaactttaaaagaataaacttttttttttcgagacagggtttctctgtataaggctggcctctcctgaatgctggaaggtgtgcggcactcaaaaaaaaaatttttttttttaaagaaaaaaagagtgaaactcggagttcaatcccagggacgtggccttggggtctagcattgttggaaggagagggcgggtccttcctacaaggggtggggcctcctttggtgggcgtggatgccccgccccgccccgacgctgagtccgc

SEQ ID NO: 39612 - DNA, 366 bp, Mus musculus
  source 1..366: mol_type = other DNA
attcatacctggcatgtcaccctatggtgtatgctacataaagaggggtgggggtaaagagcaacaccctcttcccgtatcatgggcaagggaacaggccctggattcctacctccacagagatgaggagccaaacttggaatcccaaacagaaaggtggtccagacagggcccccacttgcctggattcctggattcttcagtctgaagagagcagtatggcctggccctggctgccctggaacttgctctgtaggccaggctggcctagaacccagacctggtctcactaagtcacccaagccttctgcgagcagggatcccaagggagggggtcaggtgcgtcacctgtcacctgtgtgcctc

SEQ ID NO: 39613 - DNA, 259 bp, Mus musculus
  source 1..259: mol_type = other DNA
tggctcctcatctggaggtaggaatccagggcctgttcccttgcccatgatacgggaagagggtgttgctctttacccccacccctctttatgtagcatacaccatagggtgacatgccaggtatgaatggagggaaagacttttcccagtggaagcccagggcctgccccaatgagcgtggggtggagtgaccccgcgcccccagcccggcctgcgtcactgccgccgcgggggctgtgatgagcccactgcacggta

SEQ ID NO: 39614 - DNA, 156 bp, Mus musculus
  source 1..156: mol_type = other DNA
gccagcctggtctacagagtgtccaggacagccagggctgcagttctgtcgcacgggaggaatgtttatccctgggcggctgtggcttaaagcacaagcttgtgaaaatctttcttaaaagacgttgttggcgtggccagtctcgcggagccctga

SEQ ID NO: 39615 - DNA, 285 bp, Mus musculus
  source 1..285: mol_type = other DNA
tctatacacacacaagtatacatggctggagatggctcagggattgagagcactgcctgctcttccagaggcacaaccatctgtaactccagttccaggggatccagtctctgtaggtatacatgcagacaaaagctgtgtcttaagtcagctacagtgtacttatgtgtaataataaagaagtactcacattaagaaaataaataaaatcttttttaaaaaacccacataagtttggtaaagattattttgtatctgcagcgagtgtccctgtgagattcgggc

SEQ ID NO: 39616 - DNA, 201 bp, Mus musculus
  source 1..201: mol_type = other DNA
ggcgcgcgcgcgcagtctcagaaggcagctgctgtcccaaggaactggggacttgacaagtgtcagggactaaactttgaagatcgcagaggtaggaagtgccaggtctgtgaggttgaactctgctgcgaggaacccattgtgtccctggcacccacataatgaacagggcggggtggagctccacccccccggaacttc

SEQ ID NO: 39617 - DNA, 252 bp, Mus musculus
  source 1..252: mol_type = other DNA
ctctgtaggtatacatgcagacaaaagctgtgtcttaagtcagctacagtgtacttatgtgtaataataaagaagtactcacattaagaaaataaataaaatcttttttaaaaaacccacataagtttggtaaagattattttgtatctgcagcgagtgtccctgtgagattcgggcctcgccccgcccgcccgcggctcccctgcccaggccgggaggtaggaaggcgccggcgggaatcgggatcctgct

SEQ ID NO: 39618 - DNA, 376 bp, Mus musculus
  source 1..376: mol_type = other DNA
acctcaaccgtggttcattgtcccaataatcggacagataggttgagacacttagcttatcttccctgtggcacatctattttgaaatcaacacggaataattgtgaagattaagtctttgcaccatttctgcgcgctgcggcgcacgcgcagtcagaagctgcgagcacgtgtatgtgcacgcgcaccgccttccagggggccggagggcctggggaggtcgctaagcttccatgccgaggcctgacagccgctggagagttcagcggggatctcgaggcccgggcggtgagaccgacggggcggccattgtgctgccccaggctctccacgggaggggggagtcgcgaggtcaaggtcaccgtgccccctctcc

SEQ ID NO: 39619 - DNA, 237 bp, Mus musculus
  source 1..237: mol_type = other DNA
tcagtgagggaccccaaaaatgaattgaaggggatcaccagatcgctttgtgcccttctaaatgtgaccacactgtgtgacagcctgtggcacatcgttaaaatttttttaaaaaaagatgaacagcttccaggcgcgcgcgcgcagtctcagaaggcagctgctgtcccaaggaactggggacttgacaagtgtcagggactaaactttgaagatcgcagaggtaggaagtgccag

SEQ ID NO: 39620 - DNA, 80 bp, Mus musculus
  source 1..80: mol_type = other DNA
ggctcaggttactaggcctcagctgtccccaccacgcctcccgtgacgtgtcccgggactccccgccccgggctgggctg

SEQ ID NO: 39621 - DNA, 369 bp, Mus musculus
  source 1..369: mol_type = other DNA
ccagttggtggagagtcacctacgtcgtgcgtttgaaacagagtaacttggtatgaataatttatccaaacagggagataagtggacttagcaaactaatatttctgcttgtctgagaagacagggccacggccctgcctcaagggtatatttgatacattttatcaagcacccttttgagtcacgtccctcctgagagcggtagctgtgagcgcccccatgaggacagacttacaacctctgtcagtctgcagcctgtaaatggggatccccccttttgtggggaaacagggtctcactctgtagccctggcaggcctgtctggaattcccagagatccttcagagggtccctgcctctgccctgtga

SEQ ID NO: 39622 - DNA, 261 bp, Mus musculus
  source 1..261: mol_type = other DNA
tggtggggacagctgaggcctagtaacctgagcccccagcatatagcactggtctggtcccctgtccccagatctgagttccagtgagaggaggtcatggggttccttcactgtcttccacagcttctgcaggacaccactgtctctgcctgcaccttgcagggggccctctaaacgttcagcctttgtgctaaaaatgccaaacttgagcacccagtcctgagccagaggaacaggagaggtcctggaaccagggtcaca

SEQ ID NO: 39623 - DNA, 119 bp, Mus musculus
  source 1..119: mol_type = other DNA
cccccgggggcctgaacctgttctctagacggagagtggggtgcacggcgcactgttggcttccaggctcggcaactgctggagaagcgctgaaggggtttggcattgccaaccaattg

SEQ ID NO: 39624 - DNA, 272 bp, Mus musculus
  source 1..272: mol_type = other DNA
agacatcagatagatgatagagcccaaggtccagacgacactcaccactgtcagagattctgggtccctgccaggtctttaaggtttctaagtggcctgggcagggacattcacaagctctatgtaagtgagcagctactgagagccctgcggcccatctgggaggggggcgccggggaaccccaggtcaaaggcgcggtgagggggaggaatccccacaccacctgcacccccctcctccctagcggccgtggaaggagatgggggaggcg

SEQ ID NO: 39625 - DNA, 310 bp, Mus musculus
  source 1..310: mol_type = other DNA
tcacaggtccttggagtctcgaggctgaagaggctggccggtgtcccagagactagcccgacaacccttaagaggttcggaaggccaaggcctggcgcatccactgggggaacccttgcgggccgtgccaccgtcaccttgaatcccaaccctcgtgtcccgtgagacgcgcgccgccgtggggacccggggtcgcgactcgcgttccatgctgcgcgccaggccgccgcacgctggcccgcgcggcccctccctcccgatgtggaggcggggtctggtcgccggccggcacggaggccaattctcattg

SEQ ID NO: 39626 - DNA, 274 bp, Mus musculus
  source 1..274: mol_type = other DNA
ggggtgacccagggagtctaggttagtctagatcactgaccttggaagtgctgagattaaagacgtgtgcagggtgcaggacctagaatctcagcctgcaaggttagcactcttcctggagtcctgagaacgagttccggagtgggcgggaccctgcgcagcaccgcctcctgtcagtgtgagggcaggccctctgtgtgggcagggcctcatgcaccacctccttgccagcacctggtgggcggggcctcgcattgcacctcctcgctggcgc

SEQ ID NO: 39627 - DNA, 323 bp, Mus musculus
  source 1..323: mol_type = other DNA
gtagagcaaggccctgggtttggtcctcagcttaaaaaggaaaaataatacaaaacagatttatctttttctctcaacaggaagaagagatgacttttttttaaagatttattcatttattatatgtaagtacactgtcacatacaaaaattttgggaaagagttctctctctctctctcaccaggctggcctcgaactcagaaatctgcgacgtggtgcatcacttagacgcatgacctaggtccgatcacgcatgcgcagtacgacagccgggccgcggatggactcgtacggcgcatgcgcattgcgaaaggcggaggga

SEQ ID NO: 39628 - DNA, 430 bp, Mus musculus
  source 1..430: mol_type = other DNA
tggatatccccaccagaaaccggtgatgggcctgagctggccgaggaaggcatccccttaccgagggtgcgcccagcccggccacgcccatcgcagccgtacctgggagtctctgacccgggagtcctacggacccttggtgcacccgccagtgtacccaaggcctactgcactgagaattcccgctatgggagtgccagggcgcaaactccatcattggacttgtgggcgggccatcaagaaatttttggacccaatccaggcatcctgattaggggtggtgcaccacctctcaatctgggggttcagcgagcagcctgcagtggccccctgacacctgggccgagtgtgaggccaattcactgggacactggagctagtccctgagtgtctaggttacccaagcctgtagccactacttagtggcctt

SEQ ID NO: 39629 - DNA, 444 bp, Mus musculus
  source 1..444: mol_type = other DNA
ggcagagtcaagggccctgccacccaaggagcctgtctgctgcagagacaccctgcttgaggtctcttttaaaaattattttattttatttcattttattttattttttatttaatatataccagtacactgtaggtctgctggaagagcagtcagttcagtgctcttaaccgctgagcctaattaccttgaagctggtccccggccaagaaattccaggactatgtgggggagcccggacagtcactgtctccaggcattgagccttatcactgcaccagctggtgtctggctgggagcctgctctagacaccatagcaattccccggacccgagtctggcgcctggacccctgggtcttcgaggccgagcttccaaggtgccggcccgcgcgtgctaggcgggatccgccgcccctcctccgccgtcgggcgccgccccgcc

SEQ ID NO: 39630 - DNA, 263 bp, Mus musculus
  source 1..263: mol_type = other DNA
aagggaccaacgccatcctcccagtcttccaatcctggaagcgaggacacagcccgcttgccccgccccagagcgctccgactcaggtagggtgagctgagacactcgggcgggcagctgcagtgaagcctcgtggccgccaggaggcactgcccaccctgctggtctagcacgaccagaggctcctggggagtacaaaatgtgctcagaatgctgggcgcggcctagtgtacgccccctacaggaatatatcttatgggcca

SEQ ID NO: 39631 - DNA, 156 bp, Mus musculus
  source 1..156: mol_type = other DNA
actcgggagtactcctggcccataagatatattcctgtagggggcgtacactaggccgcgcccagcattctgagcacattttgtactccccaggagcctctggtcgtgctagaccagcagggtgggcagtgcctcctggcggccacgaggcttcac

SEQ ID NO: 39632 - DNA, 147 bp, Mus musculus
  source 1..147: mol_type = other DNA
cctcagagggcccatcactgagaaatcccttcctggctaggcatacctgactgttgccaggtaaccttggactcaaactcaatgctgggatgacaagcatatcccaggcaagctggggcggaggccatgttgcggggcacccacgtg

SEQ ID NO: 39633 - DNA, 464 bp, Mus musculus
  source 1..464: mol_type = other DNA
ctcaaaagtccagttgggccttgcatgccccccttttgattccaaaagagcaacctgcaaggaggcttctggaactccagtgcgtgtctgtttctagaaagacaggttcactgacacagacccagacagacaggctgacctgtctgggccgtcaccttccagagcacccgagggaatcttagttcctatggtaggagatctctagaatctttggaataccagacttcctcatgacgtgacatatcccttcattgtgtgcaattggacatatggagttttgtgagacacccagaaaaggacctcgaagtccctccccagggtctcagtgacccggagcccagaaccctgcgaccccaggttgcgcctccggatccggcgcgctccagtcccgtgacttcatctcatgggactgggtgggtggggtctcgggcctggggcacccctccctccggagggtaaaagga

SEQ ID NO: 39634 - DNA, 326 bp, Mus musculus
  source 1..326: mol_type = other DNA
cctctcgacggcaagtgagataaatcaagttccatcattaattttgtctgtatgcatgcatgcccaccatgtgcatgcctggtgccctcagaggacagaaggcggcactcgagctgccaagtggacagaacttgggtcctctccagaagtaaaacgtttgctttgtcagtagaccaggctggcctcgaactcagaaattcgccggcttctgcctccagagtgctgggatcaagtatgcctgtattaagcagccttggctatatatatatattgtgaattgcacgtcctgaggtcgggcggcttgcagcgcggggtggcgttggccc

SEQ ID NO: 39635 - DNA, 331 bp, Mus musculus
  source 1..331: mol_type = other DNA
gggcttcctgcatgccaggcctcactgtgtagccctagctatgtagaccaggctggactcagattcagagacaaccaatggaaaattaaatcaaatgaacaactctaatataaatgggttcttaatcatatatatatatatatgtgtgtgtgtgtgtgtgtgtatatatgtgtgtgtatgtatatatatgtgtgtgtgtgtgtatatatatatatatatataatgtttatgagtacactgtagctgtcttcatgcacaccagaagagagcacaagagcagtcagtgctcttaatcactgagagagatatctcctgttctccgggagaagga

SEQ ID NO: 39636 - DNA, 340 bp, Mus musculus
  source 1..340: mol_type = other DNA
tgtctgaagacagctatagtgtacttgtatatgtaaaataagcaaataaatcttttttttttttttttaaattagactgatgagatggctcagcggttaagagctgtgactgctcctcgtctgaagacagtgtactcacatataaataaatctttttttttttaacttaaaaaaaagaaaaacaaacaaacaaaaaagttaccttcaaagatttttttttttaaaggtacctaagtatatgattgcaagtaaaactctgtgacctctaggccatcctggtttacacagtgtttaaaaaataatgatcatatgctatgtagtttcctaacaccctgggcat

SEQ ID NO: 39637 - DNA, 477 bp, Mus musculus
  source 1..477: mol_type = other DNA
ttaaaattttctggacaattccagcattagatttttttaaaaaatttatttatttacttaatttatctgagtacactgatagatcccatttgttaaaaaaaaaaaaaaaaagtttttgtattgacggcaactaaatattggtagcatttttatcatacagtagattctatccgttcactattagtttgctattaaaatacataataaaaaagagtaattatgttagtacactgtcattgtcttcagaggtctctgaaagagcagtcagtgcgtttccctgtgtagccctggctgtcctggaactcactctgtagaccaggctagtctttatataactgatttatttattttctgaagtgcctttatagattctaagcttaaagtgctggaactacaggcactggcccctgggcattgagcttgttcattcttaagtactctccctagagagctatatagccagcctgggtccctatc

SEQ ID NO: 39638 - DNA, 326 bp, Mus musculus
  source 1..326: mol_type = other DNA
atcccccagtgccctgggagcatggacatggaccgtgaggggccaagagcccctttggacgcctctgagattgcagataggtggactccgagggtttgggatttgtggccctaagcctccagtccccaaaactcaggaacaggacaagccttggctaggtatttggtgttgttgtgcttaaagctctctacacaagctgccctaatcctctagagcgtctcaggacgcgcaccgtagggatccgcccagcttgggggtccgcccagcttgggacttgcctactgtgacatcacaggtgctacaaggctcttgaacaggcgagctgc

SEQ ID NO: 39639 - DNA, 396 bp, Mus musculus
  source 1..396: mol_type = other DNA
aaaggcgtgcgccacgcctggtcggatctcagtgagctctaggctagcctagtctacaaagttgtgttccaggacaaccagaaactagtcttaagaacactggctgctcttccagatttaaaaaaaatacataaataaaatttaaaaacattgggtgttttgtcttctaataaaaatccattgcggtggatcattgagtttgaagccagcctgatctaccagcctgatcagccacgccttaatcctagccgtgactgccagataaggttcgcgtacttgctcggaaattacgtgagatcgacggctctctcgattgagcctagggctgagaagctgcggtgacctcacagagcgcggagtctccgcgaccccgcctctccggtgacgtcagcacag

SEQ ID NO: 39640 - DNA, 281 bp, Mus musculus
  source 1..281: mol_type = other DNA
cagcactgagtcatgtggccagcccttctcagacctgtaagagtctcctttaaacgaagagtgtagacgtgggctctcctctctcagacctcaccggcgggctgcacgtcaccccgggggctgaagcgccggttctgctcgcgaagccagcgggttcatgtcgccctcaggcgtggggctcggggacgcacagaaggctgtcccggccggtcgcgcgggatatcgcatgagctgactcaatctgcgccaacactgtgctgacgtcaccggagaggcggggt

SEQ ID NO: 39641 - DNA, 400 bp, Mus musculus
  source 1..400: mol_type = other DNA
ttaagcaacgtgtttaagatggagtcactggagctcagctcccctcagtcccctgaggtggactggagtcgtccctcaggcggtgacagagccctcagcagccctcagtcaggtgagcactcttagggtacttgttctgactaagtcagacaccttcaaggctctgacctccctaggaggggccagttcaaaggttactaaacgcctctgatctgtgtaatggcacaaatgccatcgcttaagatttagaggtaggaatcaggcctttgtcctcagctgccaggtcatgtagtatccagggccagggaggggatgcagcagactctatgtacagactctatgacaaaggctctgtacaggccccgctggcgcggcctcgtatgagcgcgcaggagcagct

SEQ ID NO: 39642 - DNA, 306 bp, Mus musculus
  source 1..306: mol_type = other DNA
cctgggaaggcccctccagctctgacccaggaagagggggcatggcccttcagagtcactctgcagctggaagcacaactttgaggtgtggggccttcccaacactgtccaaaattggatgaaaactttgaactattagtcaataaatagcttttattcacaagggtcccaatctgcagtggtggcacacgccgctatacagaggcgcacgcctttaatcccagcccttgggaggcaaaggcaggcgggagttccaggccagcctggtctacaaagtgagacagccagggctataagagaaaccct

SEQ ID NO: 39643 - DNA, 391 bp, Mus musculus
  source 1..391: mol_type = other DNA
acaacctggtttacttaccgagctagttctaggacctacacagagaaacactgtctctagatagatagatagatagatagatagatagaagaaagaaaaaatgttttaaactttttgtgtatgtgtattgcacatattgagctatgtgggtgctaggaaccaagcccggtcctctctaagagcagcgtttctctgtgtagccctggctgtcctggaactcactttgtagaccaggctggcctagtgctgggaggcagtgttttaaggcagggtcttaccagatagccctggctggtctggatctgggcaggtcgggaccgttcccgcgcaggatcttcacagagcctgggtccctgtggcgtagcagggcggggcccgaatgcctttcacc

SEQ ID NO: 39644 - DNA, 348 bp, Mus musculus
  source 1..348: mol_type = other DNA
tgcggtgcggtgcggtgcggtgcggtgcagtgcggtgctcataaccgcaagcctctctgatatgagaacttccctttctgttgggcctgggcagtgcctgccttgctgaaggctgatggccccagggccttgatggtgaaaaggacaacccaggtgcactttaccagactctgtggtgtggcacgctgccctcttgaattccctccaaagatggatgtgaagaggacagtcccttggccactgggcttcaacacccgcaacgaaccacattccgttatggggagtggtggagctggggcctggctcaacggtagagcaccatgccctgttctgcagaggctgtgcagc

SEQ ID NO: 39645 - DNA, 408 bp, Mus musculus
  source 1..408: mol_type = other DNA
agggcggggcccgaatgcctttcaccaggccgcgccccaggcgggccatggctgcagccacactaggacaggtggtggccggccggcgctgggggggggtggaccactggcgcgcagcctttccggcttggcgtcattcctctgtgcctcgggttccgctgcccagcacggaggcggatggaccgaccagttgctcttgggttcctttagacaaggggcccaggacctcttgggacccaagatcttatttcttggaacaaaaagcacatgtcgatgtgtgcagtgtctgaggctctctgtacctggttttgttctgtctgccgatggtgtcaatagatggagaatctatgtctgtagaccaccaggttggcctctctgagtcctagaattaaagtcctgggccaccac

SEQ ID NO: 39646 - DNA, 211 bp, Mus musculus
  source 1..211: mol_type = other DNA
cacctcctctgtgtcccagaacacaggtgatctcaggaagagcgatccttggtgggccccatccagtctgcagtcaggggcctgacgtcgccaacctgagagacgacagctagacctctgagagatgcctaccctggcacctgtcgaggttggctctgtcacagtctcagtgcattctagaccaccatgcagggcaaagtcgacagaggcg

SEQ ID NO: 39647 - DNA, 297 bp, Mus musculus
  source 1..297: mol_type = other DNA
actggcctgtggccagctgggagacttccacctgctgggctgaggactcctcgaagcttaagccccaggttccttcttagtacccaagagcagacccaggagtgtagacttcagtctcctacctcagacccctgggagtgtagaccccagcctcctccttcagactcaggagtgtagaccccagcctcctccctcagactcaggagtgcagaccctagcctcctccctcagactcaggagtgcagaccccagcctcccttcagactcggagcgtccaggccgccctggccacggtgg

SEQ ID NO: 39648 - DNA, 208 bp, Mus musculus
  source 1..208: mol_type = other DNA
ttcctcagatagcatttaatctaacccaagttggcctgtacaggctggagagggtgttgagtgtgcaacacaataacttgctgcaagaggactttttgtcttattttgagataatccaggctggcctagaattcactctgtagaccaagctggcctgtgcttggatccaatgttttccatgttgtcagatcataaagagacgtcactg

SEQ ID NO: 39649 - DNA, 410 bp, Mus musculus
  source 1..410: mol_type = other DNA
cctaagtccaaatgatctcatcttgggctagccaagtggcttcaggccccgactccatgcgattaattaatgggctccggaaggacctttgtctccagcctcacttcagaggcctgtctaaaaagaatgttgaaaacactctctttcctccttctggccagaaaaaaagttatttgctgtgcggctacaagtagaggctcaaggcagctggcgttctccatcctctcgctccgttggggcgtggctactcccctccagccttgcagcccgggtgctagtccccgggtccggctgcccatcggacaggggcgcagcgccccatccacctgggcggaggagagggcgcagcgccaggtaggatgtgtctccgcctcctgctgcctgccctgccgggagggcggaggctgtac

SEQ ID NO: 39650 - DNA, 256 bp, Mus musculus
  source 1..256: mol_type = other DNA
ggagggagggcatcctacaatccagtgctggcaacaggacaggaagctactggcttatataaactgttacttcactttaggaaagtcagcgctaattgtcattttaactctgaaggcaacagaaaactaataaagatttgtatttgacttacttttccccctttctaggtggcccatgagtgagtggtgggcccagaatcaaggcgcaggccagggccagccctgcctcatctccctgtcccccacccagtgctgg

SEQ ID NO: 39651 - DNA, 324 bp, Mus musculus
  source 1..324: mol_type = other DNA
aatatctgtggtattgacctcacttgtccttagcaaagatttttttttaaggtgagatatttctagccatggcctcagcttgccctctagcacgaaatgtgaccctgtagtactgagcactgtcacacaggaccatgttcttctgaatatcagaccagtgagaacagcaggtggcacctgccggcagggtctcctgccgctgcccaacccacagctcgggactcgggggccaggccggtcctcacggcgtgtgttcgccctagaaaggggagtcgagggcggcccaaggcttgtggggtggagcctaaggtctccagcctaatc

SEQ ID NO: 39652 - DNA, 260 bp, Mus musculus
  source 1..260: mol_type = other DNA
ggggaggggtcccggagccagggcccagggtcccagtaacatgattgcacatggcttgctaagccataggtggtgacacccattagccaggatttgttgccaatgcaaagagttctgaacacactctttgcccccaaactgagggtcaagtcttgaacatgtgagtgacattcactgggaagggagagggagcaggctgcctgcccacccgcccggcccggggaacgtaaaggggctgggctgggcacgtgtgtcccgcc

SEQ ID NO: 39653 - DNA, 311 bp, Mus musculus
  source 1..311: mol_type = other DNA
ctgtactcaatttccaggggaaaaaagaatcttttaaataaaaataaaatatttctttaaaaaaaaaaaaaagtgtgggcctgaggacccgagttcaaaagtagagtagtcctcaggactccacacgtgtgctcttttttccttttttaagttgaaaagccatgcataaaaatccaaaaaagtgttgttgttgttgttgctggactgtgtcaatttcttcaaactgcccctatcccagcaggcacctgagaggaagctaacctttgactgcctcgtacaccctgggtggagtttctatccagggctgtggt

SEQ ID NO: 39654 - DNA, 388 bp, Mus musculus
  source 1..388: mol_type = other DNA
ggtgggaggagctcccgcagcttgggtggttcccacaacccctttctcacagatagggtgcttgctctgggccaggcctgttccaaagccttataggtttcagcttcaaactgcacttgtggagactatatttcaagattagatgatagtcgtcgaatcttactggatatgagagtcttttggctaatcatcaagcaacaaaagactctcccaacacggatggggtgtgtgtgtgtgtgatctgtagacacaattccacaagacatgagcctttattgtgacaaataacctataaggctttccggtcccaacgtaggcaacgtcacatgcggagtggcgtcacgaagctgggcccagggctccgtgtgggtggcagcaggcctcggca

SEQ ID NO: 39655 - DNA, 138 bp, Mus musculus
  source 1..138: mol_type = other DNA
ttactgctgcatgcaggctgcacgccaggcccctagcgcccggtcctttctagccttggcacctggagctgggggcctcgggctccgtcggctacactgcacctccctttccagggctgggcccaggggtgcggccct

SEQ ID NO: 39656 - DNA, 195 bp, Mus musculus
  source 1..195: mol_type = other DNA
tggtccaggagctgatcattccccctcctcacggtcgctgagactccccaacgaggattacgcccgcctgttctgagtttcctcaccaggggaggggattcaccgcgattgaggaacatctagatattaaaaaaagcgccgaagtgggtgtcccaaaagggggcccggaggaggggcgcgcgctctggccgaaag

SEQ ID NO: 39657 - DNA, 251 bp, Mus musculus
  source 1..251: mol_type = other DNA
ctcgtgacgcaatgcgggacactggtgacgtcacatgagcagggctgggacccggagcctctctggcctttccccgcacgccgaccgcttctcggtggctcgcggaggacccggtgggctaggctgctcaacttactaaacagaactgaagttcaggaaacccataataccttattattattattatttaatattttgtgactggttaactcgatgtacaactgaacagttggcacctcaccatttagtaa

SEQ ID NO: 39658 - DNA, 419 bp, Mus musculus
  source 1..419: mol_type = other DNA
gatgttagcttttatttatgttctcaaaactagctccagaccaagtgctcgggttaattttatccatcctgaagtagttactgatactaacagcggggagcagcggtcccgcggctcgaggccggactggactcactgggagctgcaatcagcctggctcatggagccacgagcctcgggaggctcccgggaccggccaccggctccggcaagttctgatcgaaggccctcgcctgcacccctccgtcgcgctacgagcgggacttgctgaggatggcagcggatgggccactcggggagaccgctcagcgagcttaccatgatggcgcctcctgctcggccaggtccggaaagacggaaccgcgccgtgcgagacgcactcgtgacgcaatgcgggacactggtgacgtcacatgagc

SEQ ID NO: 39659 - DNA, 262 bp, Mus musculus
  source 1..262: mol_type = other DNA
ttactaaatggtgaggtgccaactgttcagttgtacatcgagttaaccagtcacaaaatattaaataataataataataaggtattatgggtttcctgaacttcagttctgtttagtaagttgagcagcctagcccaccgggtcctccgcgagccaccgagaagcggtcggcgtgcggggaaaggccagagaggctccgggtcccagccctgctcatgtgacgtcaccagtgtcccgcattgcgtcacgagtgcgtctcgca

SEQ ID NO: 39660 - DNA, 479 bp, Mus musculus
  source 1..479: mol_type = other DNA
ccgtgacagtccccacagcctctggctgcgggtgagcagccgggcccggagtcgcatcctcaaggctgggggtaagatcctccagctggccctggagtctcccaagggccggggcactgtgctcctgtctggtcctcggaagggccgagaggtgtacccatagtggccactaggatgtcaagttgggctagccagggcctctgccacttctgaggtttccagtatgacaggaacaggtcctagtgcccctatgtccgttccaagggccggaagtttgagaactgttaataaaaaaaacattggatgatgatggtcctctgtgttcattcagggggtggggcctgctctgggacctgccctgcacctgggcagcccctgcctgtgcccgagccccgcctaggattagcttttcccaagaccttggtggaacaggtgaggccctgcctgggccagtctcgagctgctcaggaggaagtcgg

SEQ ID NO: 39661 - DNA, 466 bp, Mus musculus
  source 1..466: mol_type = other DNA
gcggcctggaggctgcgtacaggacaccctgtgagcaaggtcaccaggctcgagtcactccagggtggcagctaccccaggccctgtgaccttaggacatgatctcacagggctcagctccgttgctgccttgctgctagtcacaacaggccagcctcggctacgctgttccagaaaagcctaggctacatgctgccccactgagggacatctcagagtcgcagtttatcatgagggtgtgtgcactgtacaccatctgccacgcagaacatggggcccaccggctgcagagggcatcaagcaatactctatggcctcagtgggccaccttcaagcatccttaccttgccaggtgaaggttcttggttccctcagcctgtggtggaccaggctacctcccctcccccacccccagccaagaaccctgagtgtctgtgaggtcactgagttccatggcccaaaggct

SEQ ID NO: 39662 - DNA, 428 bp, Mus musculus
  source 1..428: mol_type = other DNA
attaagtttccagcctcctaatgccagcaacaaaagactttggggcttgaacttttcaagagaaaaaattgggggtgctcctccaaccaggtggggcatggttgcctccatgcctgagatgttcctctatgtcactcaggagtcccaatggagacctcttttgttcagaggcaagcttttaaaaaattccccagcatggccagtgctcagcacccacgctgccctgaggcgggcagccaggctgggctgcggtggccactcagggtacagccggaagtccccactgctggccctggactctggtcgtgtggagcctccaccctcgccctgggagggcaccagcctctccctccctgccgccggcaggaggcgtgggcagcagctgggagaaccggctgtgcccctcccctgggccggctggtaggcac

SEQ ID NO: 39663 - DNA, 419 bp, Mus musculus
  source 1..419: mol_type = other DNA
aagaggtagaccacattctctgacaaagttttattataaaactggtaacaaaatatgtcctaaacccacaggtgtggtctagatgcccatgtcagagctctgggcaggcacacgtgtactgggacaaagaagttttctggtcctagggtttggattctgaacacagcctcaagaaaattcttagcatgttctcttcagcttactccatcctgatgatgatgatgataataacaaacaaagacaacaatatatcaataatataatacttatgcatattattattaagtaatcgtttctaaaatgtgccagtagcgctgggatacagtgagactttcaaatactcaaaagtaaacatttgttgagtgaacttatgaatactggtagccagtgcccgcccggcctgtcaccctcaggctaaa

SEQ ID NO: 39664 - DNA, 235 bp, Mus musculus
  source 1..235: mol_type = other DNA
ggagtcctcataatgtgcacatgcacaatgtgcaaaccccgtgcctgcatacatgcatgtgttaccaaccagagtctggactgcctatgcattctcagatgtagcacacgtgtgggcaccagtgttgtgtcacagtggtgtcagggccacgcactgtggaccctgcctggcagccaatgcaaccgggaaccagttgccatgtgtcctcgggggcggggccctcgttctctccccc

SEQ ID NO: 39665 - DNA, 244 bp, Mus musculus
  source 1..244: mol_type = other DNA
cctgttcacggtacccaataccataacatttggaagaaagaatgcttttatttaccatcctttgattccctgtgtggctcgcagttgcttggcaaccactgcgggaggtgtggctcgagctgcaacccaaggttgagaccccgccgccccctaacaacgaatgcctgttgggggggggcttgtgcgcaggcgcaagaccgagcacactaccaaggggcgggccccaccggccgggcggttgggc

SEQ ID NO: 39666 - DNA, 315 bp, Mus musculus
  source 1..315: mol_type = other DNA
cttgttcaactggcctacgcttggccctgccttacaccaaagactaggtgcaggcaaagatccttgccttggctgttgatcaacttcaggaactttaatgagatccaagtagggagccatctggggtgccctcctgtgctgaccactactgtactggaggagggtctggggcttctgctgtaataaagggaggggtttggtatagagctgtcccctgcagccctctctgtttctttctggacccctggctcagtaaggcactgcctgggccgcagcccagtgccctgcctggccagcctccctggctctgttcag

SEQ ID NO: 39667 - DNA, 251 bp, Mus musculus
  source 1..251: mol_type = other DNA
aggaccaaatctagagacctactccttgctactggcaagattcattactccaatttgtagcagcagcctcaagagagactttctgattaagtgcctgctgaccagagctgccctgggaatgcctggttgggaaatggtctgcccctggaggatagatccaatccaataatgctaaagcattttgaaataatttaaaaccataagtgctcgtttacatacatgaataattaacaagtgacgctctcacttcg

SEQ ID NO: 39668 - DNA, 335 bp, Mus musculus
  source 1..335: mol_type = other DNA
tctctcacagcctggaaaactgcttcctttgtcacagacacagtaatcctaaactataaccctacttttgaggttctgaggtccataaagacctaggcctgtagcaggccctgcttctcgtgccctaagacctgggaagactcgggtcatgacagtttctgaaagagccaggacctggcattttgaagctagaattcttgttgttgttactattagtattaataatttgtgcaggaatagactgtcactgtggagccctaggcctggaactggggggtccctctgcctttagattcagaactcaaacttcaggattcctacagttccttactagg

SEQ ID NO: 39669 - DNA, 307 bp, Mus musculus
  source 1..307: mol_type = other DNA
gagcagctgctccttgggcccagtcgcagggctccttggggttccacatcttgcggtacacccccatcctgttctccagggacgacagagctcggggagtcccaggcaccagggaccatagtcggaccttggacccccaggtcacatgcaacatcagttggaggtagtacctccacccagggaccctgtgggccatgtcattgagccttctgcgcatgtgcagtagagctgggtcgggccctcgcgcgcgcccggccaacggcgacccgcccaacgtccgccccctttccatagtcagttcggatag

SEQ ID NO: 39670 - DNA, 233 bp, Mus musculus
  source 1..233: mol_type = other DNA
ccctcaagcctatttgaggtgttctgacatattgtcttaagactgaagcctcagagactaggggcttcccttctaaggacctgggggcggaagtgctgagaccccaagaagagaaccacctcttctccgagggccgaggacctgcgttcctctatccgaactgactatggaaagggggcggacgttgggcgggtcgccgttggccgggcgcgcgcgagggcccgacccagctc

SEQ ID NO: 39671 - DNA, 170 bp, Mus musculus
  source 1..170: mol_type = other DNA
atgagccagcccaaagttttctcatctgagccctgaaaggaggtcccagaacatgccttaggaaccaagatttcgtgccctcccctgactctgacttctttaggcaggaagagaccctccactcttaggggtaggaggtggtctctccactcagaccacaccctcccctg

SEQ ID NO: 39672 - DNA, 267 bp, Mus musculus
  source 1..267: mol_type = other DNA
gcagaggctgtgctgtgtggtacccagacactataaccctgggactagagtgctgtgagaattctaatggcctcccacagcacttacagggccattctgggacattttctccctagtgattatcctttctttattgactgtgtattatacccactatatagattagcaaactgaggcatgagccagcccaaagttttctcatctgagccctgaaaggaggtcccagaacatgccttaggaaccaagatttcgtgccctcccctgact

SEQ ID NO: 39673 - DNA, 240 bp, Mus musculus
  source 1..240: mol_type = other DNA
acactataaccctgggactagagtgctgtgagaattctaatggcctcccacagcacttacagggccattctgggacattttctccctagtgattatcctttctttattgactgtgtattatacccactatatagattagcaaactgaggcatgagccagcccaaagttttctcatctgagccctgaaaggaggtcccagaacatgccttaggaaccaagatttcgtgccctcccctgact

SEQ ID NO: 39674 - DNA, 191 bp, Mus musculus
  source 1..191: mol_type = other DNA
ggcacgcacttcttggaccccgaaggaccgcttaaaggtacaggaattatttttgttgctacttcataaatatctgtagttttgctacagttatgtattgtaatggttggaggctacaacggggtcgcgactcactggttgagaaccgcggcctgcccctgctctggcctggcctcctctgggtccaagac

SEQ ID NO: 39675 - DNA, 296 bp, Mus musculus
  source 1..296: mol_type = other DNA
agaaaagaaaatgagccctgacttaggaacacttctccttcgccgtagcattttaaggtgctgctgctgctgctgctgctgctgctgtaatatcagtactaataactaaaccgagccattgacttgcactgcttaaggtctttattaagattgttcttaataagcaaatacacacgtaaataaatatttttcaaagtaattcctgcattgctaagtccaaagtatgcagcaagtttgggagtggccggcccggcactcagctccacctctgtatgcagctggaccttgccctgggg

SEQ ID NO: 39676 - DNA, 404 bp, Mus musculus
  source 1..404: mol_type = other DNA
taggaaggtgacccacatcctcggagactgagcttccagtgagccccgggggtcctccagtctccacctccccagtgctgaggggggtcaaactcagatcctatgtaacccaagcagggctaaagttgcccaggttgaggcaagccttagacttgtttggctaaaacaaaattttaatatactaaataacacatttctaaagggctttttgaaattacatctggctgaaatatgtgagtcaaaaagacttgggctttgttgaatacattaatcaacaaaaaagcttccagaggctgcgcagagtcctccaggacgccagaggcgcaagcggccatcattccgggcggatcgcgtgttgggggcgtgggcgcagggccgcggcgcgcctgcgcagagcagctccg

SEQ ID NO: 39677 - DNA, 309 bp, Mus musculus
  source 1..309: mol_type = other DNA
cacagtccagggccctgttcatgaaatagtgttgcccacagtgggctggtattatttaggcaattcctcaactgaggctcttaattgagtccccatgggctctcttacacacacacacacacacagagagagagagagagagcaggttcccactggcatctccgggctcacccggcgcctgcgcacccagcgcacgtgcgcattgggtgagaccccaccctcgccccacaagagcagctggaagggcggggcccagcggcaggtgggggcggggcgggccggggcggggcggggcgggccgtgcgggag

SEQ ID NO: 39678 - DNA, 381 bp, Mus musculus
  source 1..381: mol_type = other DNA
aaaaatgcaggacgctctccttgactctcagccagtgtcttcgagaggccagcttgcccaccatatgtttagaacagtagggcatagccctaccctggggcttgtgagaagcccgttcttcctggaactttttcccggcaagactgtggactaaggccttgcccatggggggctatggacacacagacaacctctctgcagattgagcccagtctctaactgctgagtggctcttcccaggcctcggaggagtgggccccagaggccttccctggggaagggtttatggtaatgagctgggcaggcctgtcaccctagcctgggcacctaggagcagagccctgggccaggctctctgattgcctggcaccctgatgggag

SEQ ID NO: 39679 - DNA, 364 bp, Mus musculus
  source 1..364: mol_type = other DNA
ccagtttctgacttactcagttaatgacaaagaatcctaattagcattaactgtctagtcagctgagagcaaacctagtggggactgcctcaagtattaattgatgcaggaggcagtaaaggagagaggctggactacagcctggctactgacttacagaaagcctatggagcacagtgttttccacagcaccagagaacttatacttataccttagtctaggccataatttagccaccatgagaataggctgcttgctggcaaatggcagctttcagaaaccagggccgcccggctgaactgcaggacaggtgaccccgcctccgggctgtccccacccctagctctgagggaggcaggtcct

SEQ ID NO: 39680 - DNA, 573 bp, Mus musculus
  source 1..573: mol_type = other DNA
agacttgggaagaggtcatctcaacaaagttatgccgactctaccaactctacagtaggtgaggttgtcagatccttaagaaaggcatttcccagggggttttcttcttctcggtagaaacagctagacccccatgggtctctagacactcacagaaagtaagttggagggagcctccctctctctccctcccttaatgatgattcccactcgcatgcaaggacagcgctggggttctaagcttcccgtggaagaacagatattctctgagccattcccagatggagaatgaccaaatagcactgccaccgattcatttgtgccaggcttgctcacctagaggtctccagagtggagtccgaggtcagctccgaagtgagcactgaggtcagtacaggcgaggcttgggcaggctgcaccagatagccaagtgctaccgcgtatggctgccagtctctctgccctccttcctagctaggcagctgccccagcacagagtcgcgggagggggcactccctggccccagtggctaccctggggaccccaagcaggctaccctggataaatagccc

SEQ ID NO: 39681 - DNA, 398 bp, Mus musculus
  source 1..398: mol_type = other DNA
gaagttagaaatacgatctctgtcatgcatggctattgatcattaggtattattttacagtccctgtaagaagttatctctgaagtcaaggttagaagaggagctggccgccgcccttctcacctcggtgtgacgggggcgcgggcccagacgtcgctgggagcctccgcccaacaagtggagctcccctagggcggagcgtcggcgggtccccaccgagcaagggcgggcgcccccagcgccagggttgagggaggcggggttcggtgccggcctcggaggggggcgcagaatcaggacccagcgcggcgcctccctccgggggcgagtgcggctgcgcgcgccgtgtgcccgtgtccggagagccgcgggctggacgcggaccgcgcgacaggcag

SEQ ID NO: 39682 - DNA, 254 bp, Mus musculus
  source 1..254: mol_type = other DNA
tggccagtgtgcactggtacactgtattttgatagaaagctgtattgtatgaaaatctatcttggatgagaattatctatgctcgtgtcaccagtagtgggtttccgctgtggaaggcacacggctccccaagccttcgtgagctgctctgggcagcgtggcctggcggccggttgagtcccggcgctctagggcaggaccatacctagctacccgcgcccagctcccggactcgccctgcccctggcctccga

SEQ ID NO: 39683 - DNA, 374 bp, Mus musculus
  source 1..374: mol_type = other DNA
cagcactattttatatatatgtacatagcagttagattgcattgggaaataaaaagatgaagcctacaggatatatgcatgctatgatacattctttataacagcccggagcatcccccagactctgggagggaccatgctttggtcctttagtagagcgtctaataacggatgctatttggcttctgagcttctttttcttttttaatcacaagagtagtgagcctcaggagagactgggtccaagccccgtcttactcagactttttgtggctgaggatgcgtcaacattaacttaattaaaactcgggcaagctgctcccaccgtgcgcccggcgcccattggccgttctgacgatgccttctcctataag

SEQ ID NO: 39684 - DNA, 295 bp, Mus musculus
  source 1..295: mol_type = other DNA
actcccattttgtaaaaaataattgcagaaaaaaaaaaatcatttcccctggggtagaaaggctttaacaccaagctgggtggttatggttaactaaactaagtctttaaggttatagttgaaaatcctttctaagtttagcatgtatgcacacttcagtgtactactatagttctagctgctggaataattgaagttgatgtaaggtttaaatcagcactaatgaatagctaacatagaccccatggatcctacaggttcccggacctcgcgggagcctgacggcagggggcgc

SEQ ID NO: 39685 - DNA, 285 bp, Mus musculus
  source 1..285: mol_type = other DNA
ttcttttacatttaaatgggacacccatccacctcctatgcaataaagcagagaaaagaaatcaattttaaaactttaaaagaaccatgtcttctctaagtatcatatgagcaaacaggatgaagctcatcttggtgtgaaataagctcagccccagaggagctgagagacattgtgtctgtatataaaattgtcagagaataaaagatagttttaaaattgcgagagactaaagcagtcttgcctggtcactcaaggccagtctgagcgtgcgtgcacgagtgc

SEQ ID NO: 39686 - DNA, 310 bp, Mus musculus
  source 1..310: mol_type = other DNA
gttctcttcttggtagcaaacaacttggggaacacccctgagctattgcctgcttccagcccagggctcttagagcaggagactcaatacatttaatcatggtctgaatggctttcttataagctgcttttctggctctagcataatttagcattaatcaaagcagcttaaacctgaactggatataaagcatttgtcttgattatttccaaccaggatggcgaagacttcagctggccacatttctggaaatgcctagatggcgcaatctaaaagttatcttctgagtggagtgacagtatatatagat

SEQ ID NO: 39687 - DNA, 318 bp, Mus musculus
  source 1..318: mol_type = other DNA
tttgctttcaaagaaaatgagatagggtctcactctcaagacggggtctcactctatgtctctatgaagagccacgatcttgcatggctgtgatggtgaaccctggaaaggcatggccccaggggcttcatgcagatggctcagtggttaggagcactgactgctcttcatggtgactctgtgtctgaagacagcgacagtgtattcatatacataaaataaatacataaatctaaaaaaaaaagagcctttctgcctatactctgttatccctctttgatcaacatgaagatgaacaagttggatttaaaagcactc

SEQ ID NO: 39688 - DNA, 326 bp, Mus musculus
  source 1..326: mol_type = other DNA
ctccctagaatgttctatggcatctgtgtgtatccctatacatagagactggtgtgacagctagtaaaatgctagtagaagcctctctgtctgtttacaaatctagtttagacatgcattcaaagaaatttaatatcagtcagagaatggtgatgcatgtctgagagcctgagaaggagagagagcgacacacacacactgtcttcctctttgctacagcacagaaaactgtctcctgtgctcagagtttctgtcacagtctttacaagaaatgacttgtctgccaggctgtccttgccctcacctgagcagggaggctcagcata

SEQ ID NO: 39689 - DNA, 426 bp, Mus musculus
  source 1..426: mol_type = other DNA
tataccttgggttatattaaaaatgtttaaaaatcccagcattagggtggcaaaagcaggaagagaattctagaaatgtaaaaaaaaccccttaattaattaataattagtaaattaattaaatgttagttttatactcatgtttaatattttttaataattgtaaggttgatttccatattagtgtggattgtgaacaaaatatacactaatgagctcagtgctcagtaataaagttggtgttttagtcattttattgtataaaatccaaaacctgagcattgattacagaaaattgtctcctgtgctcccattgcacaatgaaaatgacctgtggataaagagctcacatttctgtcacagtctttacaagaaatgacttgtcaggctgtccttgcccctcacctgagcagggaggctcagcat

SEQ ID NO: 39690 - DNA, 588 bp, Mus musculus
  source 1..588: mol_type = other DNA
agaaagcctctcccgggcaggctccctaacgggaagggcctcggtgtctcggagaagccggaagaacctaatgccttcgggcagtacttcccattccgggacagcctgtagtgtcgtggagacgactacagcgaagggctcgatccgcctggccccgcgcccccggggcctgtcagaccctccacgcgcgggaagcgcgtcccgtcggatctgcctccgccgcgcttctcacagccgctgcacggaggaggctgaacccctgcggccgcagccgtcgccaccgcctctgttgccggggggtctcgcctccatcgctggctgcgagggcgctgagggcacgtgaccggaaacgccggggcgggcctccggagcacgtgaccaccaccgcggccgccctccggtctcgagcggcggagagatccggtccggctccgtggtgcgtcgtcggcccgaggcggctcccagactgcaggccgcagggagcggaatcgcgacccgcggctggcgtgatcgtcacgtgacgaggaagtgccgttaacagcgctttcctccggtccctggcgcccctggatgacgttgccagggagg

SEQ ID NO: 39691 - DNA, 559 bp, Mus musculus
  source 1..559: mol_type = other DNA
ttgaggacacaacttccggagatcggttctccctccaccacgtgggtcccagagatggaactctgggcatacgttttaacatcttttccccacccttgttttgcagatggtaaaatagacatgtgaggtcaacttcacatgaatttagtttctaagaacactggagaatttataaaaataatcacatacttccatgtattgatggttgttttagaaagcctctcccgggcaggctccctaacgggaagggcctcggtgtctcggagaagccggaagaacctaatgccttcgggcagtacttcccattccgggacagcctgtagtgtcgtggagacgactacagcgaagggctcgatccgcctggccccgcgcccccggggcctgtcagaccctccacgcgcgggaagcgcgtcccgtcggatctgcctccgccgcgcttctcacagccgctgcacggaggaggctgaacccctgcggccgcagccgtcgccaccgcctctgttgccggggggtctcgcctccatcgctggctgcgagggcgctgagggcacgtgaccgg

SEQ ID NO: 39692 - DNA, 345 bp, Mus musculus
  source 1..345: mol_type = other DNA
cctgttgtttgttataaaagagatcacaaggcaaccagcttgttcaaatcttgctcaagactgtaaacacatcccttccggggagatgggtgagccccccctccccccatggtttgggagatggaagtggggttttcccggcgccgggtgcatttcgggctcctgcttctgaggctgagcacacgtggagccactcttgcagggacatcgtgctgcgcgcgccgccccggtctcggtggcgcctagcccggctggacgcccgcccccggcccagcctacacgtgggttcccgcacgtccgctgggctcccactctgacgtcagcgcggagcttccatttaaggcc

SEQ ID NO: 39693 - DNA, 427 bp, Mus musculus
  source 1..427: mol_type = other DNA
tctttctcacttcccaagattatttttataattcaagagtggtagacaaaattatgcaaaggggagttaatagactttatttccacaataggaacttccttatccaataatgctcatgcttgcatgcattcattcattcaacggcaggttttccaagccaggttcacagaacctcaggctgactgcgggccctccctggcaacgtcatccaggggcgccagggaccggaggaaagcgctgttaacggcacttcctcgtcacgtgacgatcacgccagccgcgggtcgcgattccgctccctgcggcctgcagtctgggagccgcctcgggccgacgacgcaccacggagccggaccggatctctccgccgctcgagaccggagggcggccgcggtggtggtcacgtgctccggaggcccgccccggc

SEQ ID NO: 39694 - DNA, 249 bp, Mus musculus
  source 1..249: mol_type = other DNA
taatattattttgttacttcataactgtaagtttgcctaccctaacatagtgtgtgtgtgtgtgtgtgtacacatgcatgtgcaagctagtacacacggataatgactaagtaacaactctcctaacagctaggtggtctcttgagttgggagaccagcctggtctacagagttccaggaagatgtaagggcttacactagaggccttggaaaccgtctgggcacgcaccaaggtacctgagcaggcag

SEQ ID NO: 39695 - DNA, 262 bp, Mus musculus
  source 1..262: mol_type = other DNA
tggcacgtccggggcgggtgcttcggagcagccctaaacgcatgctaagcgcgctgcgtgcggagaggaagcgggaagagtcgcagtccttcctctgcacttgcactttggaacgatttcaaaaatagaggtgggagtgggctccaggcctcaggccctccgggccctaatccagatctcactctggcaccaggctaaggtggctgccagctgggctctagtaagggccaaactttgacgccagtcgctagacctatatatg

SEQ ID NO: 39696 - DNA, 361 bp, Mus musculus
  source 1..361: mol_type = other DNA
tttgtttcaaaaggttattatgaccacctgtccttataaccacctgtcatggtcactttgtcatgagtgcaaccacgtctttgttgtacacaaattaaaaggttttaattaattgcttgctttaattaattttggagaggcttcaaactcagaagtttgaaggggtaaattctttataatctgaaaagaagcctgccctcaagcaaggcagactgcggcctgtgggaaaaaaaatctcctttgcccttgcgacccaggaccttccgagccgcagcgggtggcaaggctcgcgagagggccgggacttcgggaccgcgattcgcaccgcagaccagcggccgggcgtgccggcttcctgctt

SEQ ID NO: 39697 - DNA, 267 bp, Mus musculus
  source 1..267: mol_type = other DNA
tctcttgagttgggagaccagcctggtctacagagttccaggaagatgtaagggcttacactagaggccttggaaaccgtctgggcacgcaccaaggtacctgagcaggcaggcggagtcagccagaggaagtggccagtgccttctttcacctgggaagctctagctagagaaggcttagagtccaggcctgcaatcctagcactcttgagtggctgaggctgagttcaaggccagcctagactacatattgacctcctggctagc

SEQ ID NO: 39698 - DNA, 450 bp, Mus musculus
  source 1..450: mol_type = other DNA
atttcttcatagaattcttctaaggtaagtaatattataaggtgatttatgcatatagacatgcaaaagaataaaagccattttgctatgactgatgtgttttgattctaagcatagcttactagccattttaataatcttgttagtgacacttgtcaggaaaaagagtctaatattattttagaccaggttggcagagaccagcctgaccctgtctcaccttgattttgaacattaaaattcggctacgggctcgcagggcgctccagtccccggagccctgggcggctgtcgctctgagatctggtctccgggtctagtcgatacctatgacggggcgcggcgtctggatgcatcctacccgagctccgcctactgcagaaggcggggaccgtcctctgcggaagtttgggcccgtgcggcctccgttcccagcgtgttttgaaacaa

SEQ ID NO: 39699 - DNA, 301 bp, Mus musculus
  source 1..301: mol_type = other DNA
tattgtatacacagtttaggggtatttccatcacaggtatacctagttattcacgtctactttattgagtcgaaatgaccaaattcactatattctgcagtgcgtcagagtcaatccaggagataactggcgtcccagggacaaccagctcctacagagcccagctctagaagggggtcgggtctctcttcttgcgaagatcctcgggctgacttgcgcaaatacttgcgagcgctgcggaggcgctgtgtgtgtgagtgtgtgtgtgtatgtgtgtatacatacacacacatacttcgta

SEQ ID NO: 39700 - DNA, 390 bp, Mus musculus
  source 1..390: mol_type = other DNA
actaagtgtgagactgtcagtgtttggtgacagtggttgggccaccctcaacattgcacaatcacctcattggtgtgtgttggtttgagccagacctcagtgtttctcacactcctcccacggggaacagagggcgacaccctattttattttatttagagcagtgccatttataaataaagactactcttcatagtcttaacatgctgaaggggaaagtaccccagaaggcaggggatggtagccccagcctcaggccactggttcaagccccagcagcagctaaaatgtaagacttttcttccttggatagcttaacaatagctaaaagtcttgaatagtttaagcaaatacatagcttgtcataggaactgatgtcacaattagtgt

SEQ ID NO: 39701 - DNA, 225 bp, Mus musculus
  source 1..225: mol_type = other DNA
tagcctaccttgtattgtatacacagtttaggggtatttccatcacaggtatacctagttattcacgtctactttattgagtcgaaatgaccaaattcactatattctgcagtgcgtcagagtcaatccaggagataactggcgtcccagggacaaccagctcctacagagcccagctctagaagggggtcgggtctctcttcttgcgaagatcctcgggctgac

SEQ ID NO: 39702 - DNA, 366 bp, Mus musculus
  source 1..366: mol_type = other DNA
gacatgcttcaaaccactagtattataaccattttattgtttttctgactttcatggtacggtgaaggatgatggtcaaacgcaatgctactacgagtctatatagtatattgtgtgcctggatacctcttaccatgctgaacgttgagtgtgtccattgggacacattgggacattgtcaaagacatgtcttaaagggtgcctgtctcttagccaggctggctatccaaccttggcgtcacgttccgggatgccctggcacgcctccctaagaggcgtggcctgaaggccacgcccacgcccgggggtgggaggatctcctttgagggagcccggccggcgccgccagcagggctccgcccatac

SEQ ID NO: 39703 - DNA, 426 bp, Mus musculus
  source 1..426: mol_type = other DNA
ccccacagagcctgcagtcgatggagagagaggtgtccacccgctcttgctctacagagacagaaaaagaaggacctcctccgagtcctggaacaggtcctgagctccgcgggtacaggtgccagctacagcatcctagtggggtccctctggcggttgccgtagtcgcgcagccccgacccggggctccggagccgccctctcagtccaggcaaccttggcatgggggcggcgcctgtggggactccgtagagccctaggcgatgctggagctccccacccccaccccgccaagcgggcgagccctgcgcaattcccggggagcggcgcaagcccgtccgggggcggggcggagcccgggctgggggtgcccagcagacccggcagctgcacccgcgactctgcagttcaggcgcatccgcggac

SEQ ID NO: 39704 - DNA, 195 bp, Mus musculus
  source 1..195: mol_type = other DNA
actcagtagctcagcctgacactgcagcgtgacatggcgctgacaggctcacaagcactcctgggcagccagggagtacgccctggttgtactaaaggaaattcctagagggtaagcaggagacctagcttgcctctgtgcctttcctaggcaaaagaaaagacccaaaggactgatatttctctcagaccaccg

SEQ ID NO: 39705 - DNA, 387 bp, Mus musculus
  source 1..387: mol_type = other DNA
cttttcaaaaggatcgctcggagtactctgcccccacagagcctgcagtcgatggagagagaggtgtccacccgctcttgctctacagagacagaaaaagaaggacctcctccgagtcctggaacaggtcctgagctccgcgggtacaggtgccagctacagcatcctagtggggtccctctggcggttgccgtagtcgcgcagccccgacccggggctccggagccgccctctcagtccaggcaaccttggcatgggggcggcgcctgtggggactccgtagagccctaggcgatgctggagctccccacccccaccccgccaagcgggcgagccctgcgcaattcccggggagcggcgcaagcccgtccgggggcggggcggagc

SEQ ID NO: 39706 - DNA, 527 bp, Mus musculus
  source 1..527: mol_type = other DNA
aacattggaagaaaaagacttgaaaatcagaagttcaaaatgattctcaggtatatggcaagtctgaggcaatcttggaatacatgagcccttctcaatagatagataggtacatagatagatagatagatagatagatagatagatagatagatagatagatagatagatgggggtcttttagtcactcttcagtatgtccagtatacatacaacatttttacatctcatggagttggattgtataattgttaacagagacaaattctaaaataaaaaatgaatgttttctgatcaaaactataagcttaactattaagatatttaggaataaatagtttaacacacaattgaagtggcctttattattattattattattattattattattattattattattattattatttgatttttgagggtggtctcaagacatgagctttcctttgatgcatttctgtgatatttggaagaaactcaaaatgtgccaacttctctgctttagcagataactcatgatg

SEQ ID NO: 39707 - DNA, 419 bp, Mus musculus
  source 1..419: mol_type = other DNA
ggggatgaggatatgtctcatctgaattcctggggttgattcccagcatgacataaactatatgtggtgagaagaaaatcagaagctcatcttgaaatatatgagaacacatctcagatagatagataggtaggtctcactcctcactatgactagtatacacaaaacattcttacacctcatggggttggattgtataattgtttacagagacaaattttaaaataaaaataaaagttcatctattaagatgtttaggaataaatagtttatcaagcaattgcttccaaagaacaaggttttgagagacattcacctttgagcatttctgtgttatttggaagaaacggggaattggccaacatctctgctttaacagagaagagactttgctccatccgtctgtctgataaatttta

SEQ ID NO: 39708 - DNA, 510 bp, Mus musculus
  source 1..510: mol_type = other DNA
taaattatctgtggtgatatatgcctattatcccagcattggaagaaaatcagaagttgaatatatgagaacacatctcagatagatagatagatagatagatagatagatagatagatagatagatagatagacagacagacagacagacagacagacagacagacagacagacagaccagacagatgattgatagatttttaagtcactcctcagtatttagaacaattgtacacctcatggggttggattgtataattgtttacagagacaaattctaaaataaaaatgtttcatctattaagatgtttaggaataaatactttaacaagcaattgatttcaaagaacaatgttttaaaagacattcaccttttgtttgatgcatttctatgttatttggaagaaactagagacttggtattattgtccaggtgacaggaaactccaagcagcagtcacttacagaaagtgcaagttgagggatttcctatgagactctgttgggct

SEQ ID NO: 39709 - DNA, 486 bp, Mus musculus
  source 1..486: mol_type = other DNA
taaattatctgtggtgatatatgcctattatcccagcattggaagaaaatcagaagttgaatatatgagaacacatctcagatagatagatagatagatagatagatagatagatagatagatagatagatagatagatagatagatagatagaccagacagatgattgatagatttttaagtcactcctcagtatttagaacaattgtacacctcatggggttggattgtataattgtttacagagacaaattctaaaataaaaatgtttcatctattaagatgtttaggaataaatactttaacaagcaattgatttcaaagaacaatgttttaaaagacattcaccttttgtttgatgcatttctatgttatttggaagaaactagagacttggtattattgtccaggtgacaggaaactccaagcagcagtcacttacagaaagtgcaagttgagggatttcctatgagactctgttgggct

SEQ ID NO: 39710 - DNA, 503 bp, Mus musculus
  source 1..503: mol_type = other DNA
ataagagattattttttctacttttatcatgtttaatgttccaaatagattttaaaaactggtttacttttagcttcagaagacataatgtatactttagaggcattcaactattataaattattttgatgagttaaaaaaggtcaatactgagttgtacattttaaaataaattttattagtttattgaaaagaaataaatcataaaaaggcacttaaagaaatatttgaagttcttagattctaccttatactctaaagaatagctaactattggactgcaaacctttacaaccacgttggaaatcaatttggtgctttctcagaatattggaatccaaggagtcttgctcaactcctgtttgtagcagcttatccagaaattgtaaggatctggattcaaatccctattacccacattgatactggttacttgcctaaatggactaacttaatacggtaagttcttgtttcaactttaactgatgagaatgactcaacat

SEQ ID NO: 39711 - DNA, 510 bp, Mus musculus
  source 1..510: mol_type = other DNA
cccttttaccaatgtacatggaaatccatatacaaagaatatcttttttaaaatttgaaatgtcatatagctactaaatttgccttttcaaaatagtttataaaagtatttagcatcacaaaatctatagctctgagatcaagcagacatggcttcactgcaactaaatacatttttttttggattcatttttttaaatcaaaggtttattatccatcatcttagcagtaggatgatgttccaggagcctgcaggctacacattcctgaaatccttcccctggctgaggttctgacctatgggatgcttctagtttcaaacctgagactcctgcctgatattttcaagtcattattctgcaaattcatcagatttgatcattatccttatgtttattgtgccataattttctagctttccaaacatgtcatgtctgaaaaagctatagcacttatttggcattgctcaccttctagatgcaagaagttgaaatctatatgctagaacata

SEQ ID NO: 39712 - DNA, 122 bp, Mus musculus
  source 1..122: mol_type = other DNA
tgggactttcaggtcgtaacacttgttggcaagtgcctttgaggaaccaggccctgatgctaaaagtatcttgctcaagagcacatcagctaacatctgtgaggttggagaaagtcccgccc

SEQ ID NO: 39713 - DNA, 420 bp, Mus musculus
  source 1..420: mol_type = other DNA
cttcgaacatgttatatggctgagatctctgctttatatctcagacgaataagctaatgataacacagatggagcagatttcttataaagcaatgctatgcccatctttgtgaaattaccacaagccctggtctaaaccatgaaatattccattaatcaatatagtgactcaaaacttgagagaaaacatttcttcagtgtgcgccaggcccctgagttctcacagtgcaatgacctgggtcttggaattccaaagggctcccaggcatggctcatgatccatttgcaggtagcctgcacagtgttgcaaaaatgattttaaatataaaaccctttgtacaagtcgaagtcttcagtcagaagctgtacacttcacaaatgcatcccttggtgccttaggcaaatggcaatatatattta

SEQ ID NO: 39714 - DNA, 434 bp, Mus musculus
  source 1..434: mol_type = other DNA
acttaagagggaactctgctgagcagcgtttctgcaaagagaatagatgtccattcccaaaggagatgagaatcgaggagtcctctttctatgccccataaagagatgatggatctcccatgtctgtctcctggaagacatgttatagcagaagcttgtataagggtcaagttaattagccttttaaatgaggaacagcacaatttactgtgttgggcttatgaaatgcattgatgagtcagagagtggagttccactctctaggacagggacctgaacagttggtttcaacagcacctgcctggaagggtgttactgcagtgtctgctccaaggccagtgctctagaacctttcacatcagtggcaatttctgagatagtactaactctatcacaaagtccaggcagggttcctatgagaactttgtctcagc

SEQ ID NO: 39715 - DNA, 688 bp, Mus musculus
  source 1..688: mol_type = other DNA
gctggggatggcggggagccctcgagtcctagccagccagctaaggaaaagtttttgaggacttttccccaagtcttcgtgcctacagtctgattcgccgcggcggcagtgcagaggcgcggattggcgcgcggggccccgggccgggagagcgggcgtgggggaggggaggctccgcgcccgcgggagcggctcgcgccgggagcgggtggctggactgctcctggacggccacgctcccgcggcccgcccgccggccccccccagccccggccccggtggcgcccccggcacccacctctgcgcggcggggctaagcgagtctccctgagacgcgctggctccctgagacgcgcagccaggattcggggccaccccggaccgtcagctctcccgggaaggccagggtgaaggcggccgtttcccgcctcccgccccgccggggcccgtggggaggagccgagctcccgcgcagagggcgggggaggggctcgcccgcgctccagccccgcgcactcgggggcggtgccagctacggtcccgctttccgcgccaaatttttaaatcgaaggcggaaggtccggccccgccttggggacctctagccaatcgcaggccttcaccgggcttactgattggctcggagctctggctgcccccgggggcggccagtgcttgcgccgggcgg

SEQ ID NO: 39716 - DNA, 199 bp, Mus musculus
  source 1..199: mol_type = other DNA
gagcttctttttccacttctgcaaaatgagggttttgacgagctggggatggcggggagccctcgagtcctagccagccagctaaggaaaagtttttgaggacttttccccaagtcttcgtgcctacagtctgattcgccgcggcggcagtgcagaggcgcggattggcgcgcggggccccgggccgggagagcgggcg

SEQ ID NO: 39717 - DNA, 578 bp, Mus musculus
  source 1..578: mol_type = other DNA
agtagtccaatcgattaaagttttttactatccttaaaaggaaaaaaagtaaagcaaacaaaaaatgacaaaccaggtttatttttgccttgaggacagacattgcctctaacagtgacagtcctctctcaggttcgagatggctgtagcaagcacccacctgtgcactgatccgggctgcggacggagcgcacgagcccgggttccgatggagcacgcaccgagcctgcatcggggctctaagcgcacgacgggcatttacaaagggctttggtggggagggaagaaagcgcaccgtacgctgcgctcccggtgcgtcccgcccggcgcaagcactggccgcccccgggggcagccagagctccgagccaatcagtaagcccggtgaaggcctgcgattggctagaggtccccaaggcggggccggaccttccgccttcgatttaaaaatttggcgcggaaagcgggaccgtagctggcaccgcccccgagtgcgcggggctggagcgcgggcgagcccctcccccgccctctgcgcgggagctcggctcctccccacgggccccggcggggcggga

SEQ ID NO: 39718 - DNA, 240 bp, Mus musculus
  source 1..240: mol_type = other DNA
tcacttgagatctcagaaatttctgcttggcagctaggtaccaaagcacgctccaaacctcggaaggtgctcaggaatttgcttcaagaggtgctgaatactcttcagtggcaatcgaggagctccgccttgagctacacacagtctggacagctccctggcgggctcctgtctggggaatgactttccagtcccggggcggggggagagactccggaccctgaaagggagcgctggggc

SEQ ID NO: 39719 - DNA, 510 bp, Mus musculus
  source 1..510: mol_type = other DNA
taataataaagacagattttttttttctaaggtgggtgtccttgaagatcagccccattcagtcctcagaccctgagtcagagagagaaaggaaggccttcagcctgggggcgcgaagcttccccatttcaaatacttaagtgcaacgtgcaacctttgaatgtcgcagagtgtccttcaggcgggggttggggcgtgcctccggaacccgcaaaccgtttcccccctggggcccaacggcgttttcaaaggcggctccggggacgcaggggtggcggcccgcggggaggcgcgcgccggggccgtgccgcagagcggccaccagctcgctgcggccaagcgcggccccagagtttcggcggcggccccgcggagttgaggccacgcccccttgcagtgcgagtcgcgaccgcggattggtccgcggctaaccaataggcgcgcgggaacggcccgggctgtcagcgcgcgccgcagccggtcctcccctgcgtccagccctgcagcccg

SEQ ID NO: 39720 - DNA, 266 bp, Mus musculus
  source 1..266: mol_type = other DNA
ctgtgtcttaaaaacatatttatttatttctaacaatgaaagaaatcaaatataagaaatattttcttatcaagacgaaaagaacatataataacatgaaataatgtatcataagttacttccaaggatcttttaaaccttctgaggatagttaaggtttctgagaacctctggagagtcacaccaggtacctgcctaggtgtgtttgaaaacacccaagcttcgcgcacgcgcttggctgaaatccagattacagctgtatcccg

SEQ ID NO: 39721 - DNA, 244 bp, Mus musculus
  source 1..244: mol_type = other DNA
gtacttacaataaataaataaataaatctttaaaaaacattcttgcacataaaattaattgattgaaattattttttcaaactaagtaatgtgaattgcggaggaaggaacagattcttcagtccctggaccgtggctataggcaactgtaatgtgaccttaaaggaagaaagaggccttttcttcaaatccacaaaataaaagggattttaaagaaaaaggtaacggagctctctctctctcc

SEQ ID NO: 39722 - DNA, 388 bp, Mus musculus
  source 1..388: mol_type = other DNA
ggctgccctcatcatggagatcatcgtgtgtaaggcatgacttagcgtgcaccaagtaggtcagccaaaccaaccaaatagatgtcactgctgttgggttcaattcccaggtattctgcctggtctgtttcctttccccccataagccggtctgtggctctgcccaggaaaagatccagcaacactcgtgagttttggtggaggagtcgtgtagcaccctcccctccaactccaatatgggaggtctgctttggatcacccagagctgcggcttccccacgcagcagcgggcggactcagccagttcccctggctgcccggctcccagcgcttgagggctgcgcttttaaatcatcaaaagcatgtacagtttactctgttgctggaa

SEQ ID NO: 39723 - DNA, 141 bp, Mus musculus
  source 1..141: mol_type = other DNA
tctgatagccaggcatgccagtgaggacctgcctgggtctgccccaagccgtgggtgggtgtttctgtcagggctcctgcccagggctcagcttctggcgacgcccttgccccttcttgaaacctttgccagaggcagcag

SEQ ID NO: 39724 - DNA, 292 bp, Mus musculus
  source 1..292: mol_type = other DNA
tttagaaagtatctcagagtcatagtattctaatcttggatcaggtttggaaactgaggcaagaaatttcagggtgtcctagaactcagaacattctgtttccaaggagaatcatccttgctgggctctgcgtatgccaggcaagcgcttgattagatctgtgctggggtgaagcacagccccacgccccccccacgccccgccccgctgcagctcagccccggggagtgtggttcgagccctgggtgcagctcccgcgcaggggcgggtcccgcgctcagctccagccctc

SEQ ID NO: 39725 - DNA, 277 bp, Mus musculus
  source 1..277: mol_type = other DNA
attgggaattagaaataaatagttttcccactaactttggaattcaactattcgggtgtgggagtgggacttctaaccggtatgttttcatacttaagggtgactatgaatatttattgatttattttctagtctcaaggaggccgcagataaatttagtgcgttctttaaataattccttttctatgatgtcatctgaaaaacctccagcgaagctttggggactcactgtatagcagagaggccgtcgatgcacagcgttgatgagcgccggcct

SEQ ID NO: 39726 - DNA, 452 bp, Mus musculus
  source 1..452: mol_type = other DNA
ctcagcatgggcccgcagaggcaccactccttctccctttatctttttataaaacacaacagaggggaagaaccaaagagcttcagtgatcagcagtacactggcctgcagcctggaggcggaggcagcctgagactcgggaaccctggtatcctccaagttaatgcctaaacttttcacacacgtgtaagtcttaccataaccatcaggttactgcagtcatgagagtgctttaaaggcaggttacctgctcatgcttagaattcaagcattcagaaatagagttcaaacttagggtgtttgtactagtaggggtgtggggcttgagtgcacacccacatacatcagcgttaatttcagagggcgctgcgataagtcggtgctcaaccttgtaagcgccggcgcctcggttgcgcaagcgtccaagccggagagcggtgccccgcccccta

SEQ ID NO: 39727 - DNA, 292 bp, Mus musculus
  source 1..292: mol_type = other DNA
cttcagacctgggcgggagccagagagccagccctgccctgggttgcggggtgggaaactgcattctccaatcaggccttattttaaaaggatttctaagtcagtatttaaaaataaataaataaataaataaataaatatagtttaaacgaaaactcggggtctttccttatgggatgtagggatctgaacaccacacacaggcatgggagagggagactgatttgacccccccccctccctcacagcgtactccaggctgttgtccctttaaaatccgaatccaaagggg

SEQ ID NO: 39728 - DNA, 431 bp, Mus musculus
  source 1..431: mol_type = other DNA
aggagagactcctctggcggttggggactcaggcatcatccgtcccctgcccccacccacttgctggagcgaatcggtaggtctggttcccctagggaacaaaacccacgcacgcaggctgggcggcttcggacccggcctggatgaactgttgcaacttgggcagcccgcagcgcggcgcagtggcagaggcgggggcgtgaagccgtgaggcgcgggtagccgggatccttgcatctccggagtccaggaggcgagcggaatccgcacagactcccagggcaacctgcgggagtggcggagccccgcgctcccgccctagctcagggggagcgcagctgcagcagggtttagggccccagccccgtgccaccgccacccgcggtggagggtgggctgggggcggggcagtcggggttgctttcccgggc

SEQ ID NO: 39729 - DNA, 439 bp, Mus musculus
  source 1..439: mol_type = other DNA
caatatgtgttggtgtcatattcagacaagaaatcaaaaacttagtgtggctaagaataaactcagatctgaatttgctcacttttttattggacaacatagaaagtatctactttatagaaatatttaatagagtttccaaagggattaagttactgacttcaattgatttataagattgcttttaacatatttgcttcgagcattacatgactcaaaattaaagctatatattaaattaggttttaagaaaagcagggaaggctggctagctctttgttctcttaaagacaggttaaagaaagagcagagtaggcagtcttaagtctttttgagatccagaaaaactttctctctcttagaatgtaagagatactttaataataattctatcaccatgtgactaagataatagtaaaaagaataatatgtttgtaga

SEQ ID NO: 39730 - DNA, 506 bp, Mus musculus
  source 1..506: mol_type = other DNA
aaaataaagtctagttaaaaaattaaattatatgtgcatcagtcatgtactatctagaacatggcatttcattagatgtttcttaaccatcagatcagaggaatttgatgtagttatcttatctacagctctgcagtcaattacttattctcaacattataatcagtcataagtctctgtattaatcactacctaatgtaaaaagatgttttgggatcagtggcacaaatctctgaatataaacatatttaaaagacagtttaataaaacaactatttagcaaacataaggaaaatcctaatcagttagtaggttattgatttttttttatagatacatataaaatacaatgtatacaggtactaagttttcaaaactatgagagtgactcagtctattgagatctaatatatgaaagagaattacattttttcaaaaaagcaaaatttttaaaaagtcgtatttttagagcagaaatgactcaagaaggaatcattgcctcagaa

SEQ ID NO: 39731 - DNA, 306 bp, Mus musculus
  source 1..306: mol_type = other DNA
gattttatttttacccgacagaaaataacccccaactgggaaaagggttttgtctcagacttattagtaggctgaggctgcctacgcccaggaacccccctgaggccccctgaggaggccccaaggagggagagtctctaggctgtccggagcctacacggaggggacagagcagcactatcactcaagggcagtgaagcgcaagagcttaactgccaatctgctggaccgctccaagcgccaggagtcttcggctcagggcgcctcgtccttggctcctcaactcgccaggtcatggcgagtgtc

SEQ ID NO: 39732 - DNA, 534 bp, Mus musculus
  source 1..534: mol_type = other DNA
catgcgaaataactcacattaattcagcacaatttaattgttttgcttaatgatataggttcaatggtattatatcttaagaaaagaaaaataaaatttaaatagagtgtaaatatattgaaataaatttttaaaacattatcagttactcttcaagcttagttataggtacaaattttacctgtaattagaaataattcagtattgtgttgtgcattagttaattaaagaaacttagaattccaaagaattggggttgaatcaaatacacaagcaatattattatgcatctcataaacataagctttatatcggaggggaaccaggtgttcacctggatactaaagtagaagcttctgcagtgttgcttcttcaccatgctgtcagagctagtatgtacatgctgggcgctttcctcctgagaactctgcagacgatagagccctagaaaggcccttggtcagggcgatccgcccagctcccctaggaagttggcgagcgggttagccaaaagcagcagccaaggttccttag

SEQ ID NO: 39733 - DNA, 437 bp, Mus musculus
  source 1..437: mol_type = other DNA
caagcaatattattatgcatctcataaacataagctttatatcggaggggaaccaggtgttcacctggatactaaagtagaagcttctgcagtgttgcttcttcaccatgctgtcagagctagtatgtacatgctgggcgctttcctcctgagaactctgcagacgatagagccctagaaaggcccttggtcagggcgatccgcccagctcccctaggaagttggcgagcgggttagccaaaagcagcagccaaggttccttagccacagctgtgtgtctgttattcactcacgttcgcaaagatcagctaatctgccactctgccgcagcctgaggcctaggaagctcccaagggttctgagagctatgagctctgatcagtctgattaaaagacagcggaagacttcaaaaccgggaatttacgttgtttttcgg

SEQ ID NO: 39734 - DNA, 575 bp, Mus musculus
  source 1..575: mol_type = other DNA
catttaaaattggcagggtctgtccagatgcccagcctgggaactgagaatctccaaggctttgcgggaccttagggtcaccagcacctcttcctgcagaaatggctgggcatggcacaagctctgcagccttaggcacagctcttcccaggcgtggcccacgacagtgcgtggtggcagcccgccacggaggccaggcgcttggctggcagatggcggcaaccacagggtccgtggcctgggctggccagcagcgcttcggcagtcacgtcgagcacgtgctcccgcggcccgcgcgtccacaacgtgtccaggagtttgcgcgcggccgcggagtcggccccgcccagctcgtgcaggcgcgcgtccagcagctccgcgtgcgtgcgcagcagcgcgctcctgggcgcgtccccgccgaggcggcacagcaggcgcagcgcgcttccgcggcgcgccaggaggaccaggcgcgactgcggcacgtcgtctcggtggtccgcggcggggcccgggaacagcaagctcggcagcgcgcgggcggcggcgggcgcgagcgcgcggttccgcagcag

SEQ ID NO: 39735 - DNA, 368 bp, Mus musculus
  source 1..368: mol_type = other DNA
taaggaacattagtgtttcctgtgggacagggaagctgctatcacatcacgtgacttagtatttagtaagtggatgaaccagaacactatagtctgggcagagtctagcataaatgtgtagattaattttgagcttaaactttcatttattgcaggactgcaaactgaaaggctgcttgcagggtcctggttccacaagacatccgcactgctaataatgatgaacatgggtcccctttcggggaagcgcctaaacagagtaaaagcttgggactttgccctagttcattttcagcgccaatgtgccccggaaaccatggtggcacagcacgctgaggcgggcgctcacgctcatgtccaatcggctc

SEQ ID NO: 39736 - DNA, 697 bp, Mus musculus
  source 1..697: mol_type = other DNA
cgtggcccacgacagtgcgtggtggcagcccgccacggaggccaggcgcttggctggcagatggcggcaaccacagggtccgtggcctgggctggccagcagcgcttcggcagtcacgtcgagcacgtgctcccgcggcccgcgcgtccacaacgtgtccaggagtttgcgcgcggccgcggagtcggccccgcccagctcgtgcaggcgcgcgtccagcagctccgcgtgcgtgcgcagcagcgcgctcctgggcgcgtccccgccgaggcggcacagcaggcgcagcgcgcttccgcggcgcgccaggaggaccaggcgcgactgcggcacgtcgtctcggtggtccgcggcggggcccgggaacagcaagctcggcagcgcgcgggcggcggcgggcgcgagcgcgcggttccgcagcaggcggagggcgagccgcgcgtccccggactccagcgccgcgaagctgcgcagcccgagcggccctccccgcgcggggagccgcctctcgagcgcctcccgcacgcggccgcggcccgcgaagcgtcggtacacgtggagcagcgcccactgcagcgccctgcgcacctcgccggtttgctgcacaagcggctccatggcggccgcttccgccctgacatcccgaggcgcgagccgattggacatgagcgtgagcgcccgcctcagcgtgctgtgc

SEQ ID NO: 39737 - DNA, 418 bp, Mus musculus
  source 1..418: mol_type = other DNA
aagtaatcttatttatttactttttaacaagggatatctgagaagcaaattctttttctgccactcctattttagatgtaaaacattaacatagttctatgctaaagttgcaagaaagtgctttccactaatgcattctgtcagactatgtctttgtggaaagagttcttgagagcagaacaagatcttagccttactctactgtgatgctatagagtcaatttgaatacccctcctctcctctaaaatctccatttaactacattttactgaagtggctgactaatagttagagatttctcctgggtttaataattaataacgagctgacatcttaaggctcattgctcattacaatattgtggtggtagaagtttttaaattttaacttgtataaaaagtctattggagtggataa

SEQ ID NO: 39738 - DNA, 346 bp, Mus musculus
  source 1..346: mol_type = other DNA
caaatggggcatataaagttgcaaagcttttcattttaaatttcataacttgacacaaattgtctgtgatgttcaacacaacagcacaatcacatttccttcctaaatctaaactatgatatttaaacagaattttaagacatcacattcttctatttcccaattttaacattgtgctaaagtcattgactgttaaaactcctgaatagtgtttgggggacaggcaaggggctggagcttggccccaactcggacatttgctgtccagcaagggggaaaaaaaaaagtaagcgttttacttcctcttggtccgttttctggcgtgagggcttaaaatcattttccc

SEQ ID NO: 39739 - DNA, 351 bp, Mus musculus
  source 1..351: mol_type = other DNA
gcagagacagcacccttgaaatgctggtttctgagtgtcaagggccagccatgcccagtacgcttgcgcagagctcctagaatggcctcagaaaccccccggggcgaagcaggttcgccctgggggcggggcttgccgcaggcctggagggacaagcgcggggcaggtcctggcgcggggcggagctttgcagcagggtttgctcctgggcggggcctgctgcagcccccagcgaggattcgggttcccggccctgggtgcctgcgtccccatggggctgtgcttcccttgtcccgcggagtccgcaccaccatccccgagcccggtgagtagacggcctccccgtgcaag

SEQ ID NO: 39740 - DNA, 210 bp, Mus musculus
  source 1..210: mol_type = other DNA
tcttactgtcattagcagagacagcacccttgaaatgctggtttctgagtgtcaagggccagccatgcccagtacgcttgcgcagagctcctagaatggcctcagaaaccccccggggcgaagcaggttcgccctgggggcggggcttgccgcaggcctggagggacaagcgcggggcaggtcctggcgcggggcggagctttgcagcag

SEQ ID NO: 39741 - DNA, 194 bp, Mus musculus
  source 1..194: mol_type = other DNA
aagcagggtgagcttacatagattcaatatggattccttaaattaaacaataaacttccttcaatgtattgctttgtggtgatgacatttcattacagcaacacagctgactaaggatgcaaatattatgtggggtcataatgcctattaggccagaaatgcagagctcttctgaagacttaggattcctgaac

SEQ ID NO: 39742 - DNA, 399 bp, Mus musculus
  source 1..399: mol_type = other DNA
ttttactactgcaaaaaggattgatatccttgaaaacattaatactcctattctagcttgagattcttacagtaaagttcttcagtaggtgtgtccttaaattaaacttcatcaagaagaaaacaaatacatcgttttatatatctacaaatatgtcttcaattctgagtttatctctgattcttatttaaaatgttacttatataacagttgggatggcacctgctgaccttgctttcatcacatatgtggtaggaaaactgtaatgttggtgtaaagatcccagagtttcagatctctgatctctgtgaattttgagattttgcaaaatggtagatttcgttaaagtttagaattcctaacattggttacttgatatacaacatttagaaaattaat

SEQ ID NO: 39743 - DNA, 274 bp, Mus musculus
  source 1..274: mol_type = other DNA
ttgctttcatcacatatgtggtaggaaaactgtaatgttggtgtaaagatcccagagtttcagatctctgatctctgtgaattttgagattttgcaaaatggtagatttcgttaaagtttagaattcctaacattggttacttgatatacaacatttagaaaattaatcagaacccagagccgcggactttgtgttggttctggtcgctagagaccactaactcagaaaaagagtctggagcaccgccctcccctcctgtcttcagtaggagcg

SEQ ID NO: 39744 - DNA, 329 bp, Mus musculus
  source 1..329: mol_type = other DNA
tttctctgtatagcctcttgagaacttgttcgagggttctaacaagaaagctcctgtgacagacagcgatagttacattacaattcgtaaactagcaaaagtataactatgaagtagcaacgaaataatttaatggttatggaaggttcagagccattgtaatacataaatgtctaatcagaagctcagaatttaaatcgttaatcaggagtatccagagtcccttattaacaatgattaataataaataatggttagctgtcaggcacagctccggggctgccggaactcatctcgaaccccggtgccgggacgggcggaactctcgc

SEQ ID NO: 39745 - DNA, 372 bp, Mus musculus
  source 1..372: mol_type = other DNA
aaacagatcgttcatcagagatctttctcctaagaggagaccttagactaagaaaagctcttagactcatccctgggtccagcatatgtgtgtgcatacattgatgcatttatatatgcagtgtttatgcacaattgtgggtatgagggccagagattgacatcatactcaatgatcatctgactcattaaaatgtttttaacatttattattgtatatcttaacatgtgtgcgccatgtgcatgcccaggaactggagttatggatggctgcaagccaccaatctaaaccactagagtctcgagtggctggacaccggctttcacgtgatctctgcagataggagggaagacttgggccacctgctgtccc

SEQ ID NO: 39746 - DNA, 371 bp, Mus musculus
  source 1..371: mol_type = other DNA
tctgtatctcttttgaagttcaacctcatggatttactgaggcttctcaccatcactgaggacaagtggcccatggctggcccacacccaattgctgggaaacattcatacacataatgaattccttttttttaaattttttttaaagtatctttagtaaaacttccagaggtcccccaaatcagggcccagccggcttgacgggtggagcccaccaagcaaatcccggcttcctttgctgcggtgacctgagcagcaagcggcttgggggccgaccgggctggcctagaggagccggacccgccgagccgagcagcgccgccccgggtgcattcccgacccgcccaagtgactcattggggtaggaaagc

SEQ ID NO: 39747 - DNA, 316 bp, Mus musculus
  source 1..316: mol_type = other DNA
tcattctgtatttacctgatcatcaaaagacacttgggtatctggttgtcaagttcacagcagagtagcttttaaattagctacttagcgagataggaaaactacagtgctgtttttaatgtttcaataaatgtataattcattttacaaggattttcagcagccttcaatggtcttttcaaagcaaaagcagccgagaaaaagctattactttgtttcctgtgcatctcaaagattcctccggctcgctgtcagggcggggcgaagagccttgcggaggcggggcctgagctgtgcctgcccagcgcgcgcggtt

SEQ ID NO: 39748 - DNA, 527 bp, Mus musculus
  source 1..527: mol_type = other DNA
tagttccaccctcagaaaattactaaatacttagatatatagttactggccttcctgttctttcacttagtaagtactgtaagagcttctacataatgaaaaaaatctcagacttcctcttttaactttaaaaataattaatatggtatcaaacgggcacatgatatagaatctcttctgccggattgaatggcaatcaatccgactcactgcggatccccggggcccttctccgacctcaggcggccgacacagcccgcagctccgccctggagcagtagctaccttagggccgtcgcaggccggcgggcgactcggctccctccgggacgcgaccccggtgcccgctcagacccccacgcaggcagctcgctcctgcgcgcacacagccaccgtctccggcgacgtcccgcgggaagttgccgcctcctccatgggagagccgagaggagcctacctcggacagccttcggccgcaccgcggccagcaccagaaccgcgcgcgctgggcaggcacagctcaggcc

SEQ ID NO: 39749 - DNA, 381 bp, Mus musculus
  source 1..381: mol_type = other DNA
cttgttcagatacttttgagttgaagctgaaacagagatgtgatgtctcataccactgtggcattttaaaactatttcatctcatggaaaagtttaatttccacatgcttgaagattatgttatgatttgtagttatttgattattccatgatgatcagagaacatattttgtggacgctgtcgttaaagcacaggggactgggcaagccagcgtgcgtgcgcacaagtcccacctcccggcgtctgcggttggctctcgctgaggggaggggcgtgcgacgctgctcgtccattggctgaagccgtctctcacccttgcgctattgggcgggcgcagccatgcgtcagcgtgcgcttcgggccgcagactggatcgcgag

SEQ ID NO: 39750 - DNA, 546 bp, Mus musculus
  source 1..546: mol_type = other DNA
tgaagagcagcctggtcttgaattcacagagatctgtctgcctttgcctcctgggattaaaggccttcaacacacaaatagtccaattttatattgcttcggcaataatactgcgttatagagtttcaaaaagacatgtatacttcctaaaccaacttttttttaaattaagttttcaatatagcatgattatagaatagagaaaaccaacaatctgatgaatggtttgatacaatatattttcatagacatcacacagctattaaaacaataattgtgtgataacatggaaatagattgctatcaaaataactttcccttataatcttgatatactttattaagaattaaaatgaaacactacagtatctctttggtagtacagaacagagttcctagaagacctgagctcctctggggacagcttgaccatccccaccagacgccctagggctcttggtactgcagagctttctgccccaggcgctgcaccagcagcagtccgaccccgaaccccgcgccgctccttctccaagcccgtggggc

SEQ ID NO: 39751 - DNA, 318 bp, Mus musculus
  source 1..318: mol_type = other DNA
acttatagaaactccccaaaaatctataaaatggctcagcaagtaaaggcacttgctgcggaacccagtgacctgactttggtcacactcatacaaaatagtttaaaaatttaaaagtctgtgaatgatatgaagataatgagaaagtttatcctcttcagtagagaacaatttatatttcctcagttcttgccttaaggtaaaaattttccaaaagcctggcttctacagcaaggctctgaggctcctgcatgctgctggaccattctcaagagggggctggagccaggtctgtgggcgtggccagcacagggtgca

SEQ ID NO: 39752 - DNA, 390 bp, Mus musculus
  source 1..390: mol_type = other DNA
aaatgtgtagataatgtgattgaacagtttagccacggcagtaatactactagtagcaccagcaacttttgatatccctgggagcattttgttgaaatgaaactcagtgaggaaataaacgatagcccactcttttccatagcatgggctgcagtgaagttgagaatcactgtttaaatcaatgtgacaattctacaaagcctacatggcagctgctcactggaactgccatgaagatgccactccctggggtttgcctgatggctgatctggacaggcaacaaggcgagcaccagtgtagctggtggtaccaactcttcgagctgacaacagagggaagctcattgttcacaccaacctcatgattcagttcttgactgccatgggaga

SEQ ID NO: 39753 - DNA, 423 bp, Mus musculus
  source 1..423: mol_type = other DNA
gcatccagtattaacgaaactgtcgtgctatgattagtagttgaaaatatatttctaaggtttttttttttttaattatggaagtaaaattccttgtttgcatgccaaaagattagcttttttctgcgaaaaggggacattgttgggacttccccagcaagccacaggctggcattgccaactcctccccgccgcggccggcgggcaccaccgaggcaaccgcgacctcccgccacgcttcggagcgcagctgccccagcgcagagccccgagccggcccgggaggtggggggctcgggctgcgggaggagggtgcccggccacctgctgcccccccttccccgtgctatcgctcccgagagcggacgcaccccagctcgtgtgcgccccgcagagccggaccgtcggggacgcggcgctcgg

SEQ ID NO: 39754 - DNA, 396 bp, Mus musculus
  source 1..396: mol_type = other DNA
atatgccggattacatagcgcagggaatggaacccagtgctttctgtacgctaagcaagctctaagcttactccagtggaaacaacacactgcagtagagaaaggagctgcctctgagaaggtaatatcttccttccagcccccagaggggcacagaaaagctttgcaccgcctgaaagggtttcactgtaagatccagcaataattactcttcgtgaattaaatgatgagggttcccagtttctttctgaaaagaaaggttacccgaagcgctcccatgcccgcttcctgggctgagcgggggccgggggccgtgcatggcggcctctaccgggcgcctaggcagagggagtccgccgggggcgctgggggaatctgcagcggggcaacgcgcgg

SEQ ID NO: 39755 - DNA, 440 bp, Mus musculus
  source 1..440: mol_type = other DNA
ttccagaaaataattagggagctatatttatctctgaacctcatctacagttctataaataaaactgctgattttcagaaaagcagagatatttaaaattaatataaaaaacagcttgagaataaaagtctagatttagatatttacctacattaatctggtaacagaaaaaaaaatatattactatgtttgacgcatggtttaactatagaaaaacaggcaacccgtgtctacaggagagtaggcactccttacactaggtgaacagtggcgatataaaatcagagtgtgtaccaactggtgtttctaagactactaaagaaggcctgtaaagatatttaccttcaaataagggtggatgtatctggtctagaaaagtttctcatcttcataatgacaagctagggtctcgggggaggcggggatccccacgtcgccgt

SEQ ID NO: 39756 - DNA, 486 bp, Mus musculus
  source 1..486: mol_type = other DNA
catcttcataatgacaagctagggtctcgggggaggcggggatccccacgtcgccgtcagcgccatgtgctccgggctccaggccctgctgctgccaatctggctttcctggaccctggggacgcgaggctcagagctctgcagcttggatccggaccaggcagagcgccaaggctcggtgtgaagcccactggctctcccgctgagcagggcgggcgcccggccgttgcaagctctgaggacttggctccgtggcccatcccccgccctgcaaggcgccacgcagtcgtggccctcgcccgcagtgtccagcgcggatctgcggccgcacgcaagcccttccccgggagtccggtgcggccgctgccgcggcttgggagggcgccggcgccccggagcgaccgcggacccatagggggcgggtgctgttcttgtccggctccgcccccgcctccgcccgcccagcgcacccgcgccagccccctc

SEQ ID NO: 39757 - DNA, 414 bp, Mus musculus
  source 1..414: mol_type = other DNA
catctctgtatctgtaaagaggcacacggagtggaagttgtgggcccctactagatctctagaacaaaactgccctagggaatctcagtccttgtttaccaggcagggaaacagtgacccaaatgtttctttggatctatattataatcttctcttctatgaagaaatttaaaaaaaagtcctatttgaaaaagaaaatttccagttcaccaaaaaattatgcaatgcgcttttcaaaacataatttggaaactggaaaatcggtatactaaggattctgggtttagctctagttagagcgcgcgggctagggtcttcctctcttagtggcacagtgagtttgcaaactctctgggacaaagctctctaaagtttccagcgcccaatctgaatctgggcgctgagtgagggcgg

SEQ ID NO: 39758 - DNA, 528 bp, Mus musculus
  source 1..528: mol_type = other DNA
tggggagatctttcatatatatatgatgtgtatatatatatacacacacatacacacacatttaaacagaaaagcacattaatacatgtgattgttacattttgagctagatgattaaggcttactaagttgcaagaatgtcagctagtctttataataatttagtgtcaaaatcattaacaacaaactcttctcagttgacatctactggaagacaacacacctactagtctggtaagccagtgacatatcatgttctttactcggacagttcggtgccgccagtaggcgctaggctgggtagacctgtccgctctcgcgagtacaccgcaagatggcgacgatgctggccagcttcccccttcccaaaggcccctgcgccgcaggcgaaggcgagccccacagagctgcgatcggggcggggcagagcccgtcgccatcccacgcacgtcgcatcccgcctccggactccgagccctcgcccggcagggttggcgcgcgctgcctgtcgggatactcggtccgccc

SEQ ID NO: 39759 - DNA, 702 bp, Mus musculus
  source 1..702: mol_type = other DNA
tagcagaatatgacatattgtacaagtactagtcagtatagtaagtaatgaaaaaaataacagacttgcaaatttgaaaaggaggaaagacatttattcatagatgacatgtttatctataaaaaactgaattcaactagaaattggatatctaacctataatcagagtaattatctttgagatacatcattctaagaagctacttgtttaactaggttacctgctaaagttttatttaaacaccatcaatgaacaaagactctttattctttttatcagtgacatcacttaagtacagacaatataatacttaataaagtaccaaatgcagagctcaattttggcctgttaggttaagtttatagataaacatataatactagtagaatgattatatatgtcttctaggaaatccttacctactgtttcccaaaattaagaaaatcatagttgacaagaaaaacatattcttatcaagaatattgtttatgagtgcttatttacttggacaaaaggtatagtaaatggcttctcatatgaaaattgaattggctatacaatacaaacataaaaatggtacttttctttttgaataagttagactgattttcactcaacctgtctaacttgagaacatttgatccaaacgttagacaagatggcacaactttgttatctacaacattctcagttaagaactg

SEQ ID NO: 39760 - DNA, 394 bp, Mus musculus
  source 1..394: mol_type = other DNA
gtgtacttagatataataataaatcttttttttttttttttaaaaaaagcagttaagggaaaagagctgtagaacagtcatagtttaaaaatgacagtattaatggcatgcataattaatgatatccatatcttttaaaaatagtaatttgttaaaagcacattttaaaagtttttgtaatcatcaaaatgttcagttagacataagggtgttaaatgaatcactctattttttttatgctgaggtttaaacccaagggcattgtccttttgacactgggtctcattatgtaactgagtcacactggcatccaattcactcactcattcattagtgtgtatctgtaactacatacttagccaggccagactatattatttttaagctaagtccc

SEQ ID NO: 39761 - DNA, 641 bp, Mus musculus
  source 1..641: mol_type = other DNA
taatcttcaaataattgcatattgaagttactaccacaataatacttttactaggcaattaataggtcaaaagtaactgaaataaattcttatatatgtatccacaatctacaaaatgtttttgtttttgtttttagatattgttacaaattgaaatgcaaaaatactgctttcttagaatatttctatgaggtcatatatttgttagtaaatagtaagaagcagatacataagtttcataactgaatgttcttcctattaaaatttaatcacaccatgatctggaggaaatagttttctcccagtcatatgttctaacacagagaaagaaaatacaagtaatactacattaatgtagaatgtagaattaggaatcaggataacttttttttctgtacagaattttaagtatctgacagtgtgatacactatgtaacatgatatagcctagaaaccagtctgagatcaaaccttttttcctctcccacataataaaaatctgtgtgatgcttgcaatcacttgggagcaatttttttaaaaaattaaatgtatttagtaataggcaattatatccattattccagattgacattgcggcaaaaatgtgcgcatgtgcagccattgcctgggacgcatgcgt

SEQ ID NO: 39762 - DNA, 528 bp, Mus musculus
  source 1..528: mol_type = other DNA
tttcagtaatgtgtagactactataggcacctacacatatgctatgaataaaattaataaaatctagctaactgttctctgcgtccagctaattctaatgagtaagaccctcattagaggtctagcaacaatttttaaaatgagagaaaaaaattcatcacaatgaaaatcaatattgttattaaacaacaaataatatgttcataagggtttcatttacatgaacacataggaaaatttaaaacgttgttaaaggtagcatcttttaatctttagtgatttctcctgatagtactataagtatctagtgcttttgtcttttctttgtatagaaatcaaatggtgaatataaatcaatattgtgtagtcaccattgcccacaaaacaccttgaatttattcctgaacaatttatataggggtttttgaagaccttcctctttcatattagcgataggagagctgacagcaatccctgcagcctggcaaacatgcacgcatgcgtcgttgaaggtgtgctagctcaata

SEQ ID NO: 39763 - DNA, 419 bp, Mus musculus
  source 1..419: mol_type = other DNA
attaaaagtggtggcacgtgacatttttttcataatctctgagttaatatataagtattcatggcaacaattttttaaaacatgaggcaaaaattcatcactgaatgacaaaccaatgctttcataaaacaacaaataatatgttcatggtaagagttccatttacatgaacacataggaaattttaaataaacctgattaatgcagaacgttgttaaggtactgacagaactacaagtatctaaccactctttctttcctttgtatagaaatcaaaaggtgaatataattcaatgttatgtagtcatcattgcccacaaaacagcttgaatttattcctgaccattagctttagaaaagattttaaatccctgcagcctggcaaacatgcacgcatgcgtgattggagggctgtgcag

SEQ ID NO: 39764 - DNA, 444 bp, Mus musculus
  source 1..444: mol_type = other DNA
atcagtgacaagcaatttaaagatgaagcttctggggtttgcctttctaaattacacccattgcatttgagcaaaccatgaggaagctcacttgcccactgcatttcatcttgcaaggtattcttcatgaatacggggagatttttaaccttgtatagcaaattttagaacatcaggtaaagtttagctaggtctacctagtcagcacatattaatctggtacacaatgagaacactatttgctgaaaaaatatttttataggttttctttgtcctacgggtaggcaaatatatatcccagaattgtctattcctgtaccaagttaagctgtggacagatattatttgcccagttttcctgatagattgaataagaaatgttcctcacagattctattattttgattgttgttagatatttcatctttcagcatcctataggag

SEQ ID NO: 39765 - DNA, 639 bp, Mus musculus
  source 1..639: mol_type = other DNA
gtataagatggcctagtcggccatcaatgcaaagagaggcccattggacttgcaactttatatgccccattggaaatgtaaatgagctaaaactctgagttaaaagcaattctcatgtttcaaaataaacaaatgaaaataaattaaaaaaatatatcatagtaacatttatttaaagacaggaggaaaaaatttcatcactgaatgataaaacagtgcttttattaaaccaaatattacgttcatcctaagggtttatttttcgtgaacacataggaaattttaaagatacatctaattaagtaaaacctgattaatgcagaatgttgtttaagtagcagtttttaataatcgatagtgatttctcctgattactacaagaatctacagcttttggaatttccctagtttttctttccttggtatagagatatgaaggtgaatataattcaatattatgtagtcatcattgcacagaaaacatcttgagtatattcctgaccaatttatgtaggggtttatgaagaccctcctctttcaagcttacagcgcttttgtcattagctttacaaaagatttgaatgcctgcagcctggcaaacatccacgcatgcgtgattggaaggctgtgcaggctctc

SEQ ID NO: 39766 - DNA, 731 bp, Mus musculus
  source 1..731: mol_type = other DNA
ttcatctgttaccatatgaaaactccttagaaaaaataaaatgttttttaattgatttttttttacttttttagacaatgggactaatgtctatacccactttgaatccactctcatttaaattatatatacatatatacatatatatatatatgtatatgtatatattggtccttaaatccttcaccaagttttcataatcatggaaaacccagacattaaataatgactaattgttatggtgagttacatttgtgtttatggaaaatgaactatattgtatactgtggcaaagtattttacttttaaatgaatataaatttttgtattacatacattttaagtttttttttgaaattattgttatattttctaaaataaaaaatgtattgcttttaaactatgaagtcaaacctataaataaaaggagacatgatcttctgattttctaggaaagctcatagatcttctggattcctaaacagattgcatggtgaaatatttgaggttttaaaatctggtattcctattaactatatttcacatttaaattacagaggcggaggcagcgcccaacaggagcagcagcagcagcagcagcagcagcagcagcagcagcagcagcagcagcagcagcaacagcagcagcaacagcagcagcagcagcagcagcagcaacagcagcagcagcagcagcagcagcagtgccagcagtgccagcagtgccagca

SEQ ID NO: 39767 - DNA, 652 bp, Mus musculus
  source 1..652: mol_type = other DNA
tttaagcatgattattttcaggctaattcatctgttaccatatgaaaactccttagaaaaaataaaatgttttttaattgatttttttttacttttttagacaatgggactaatgtctatacccactttgaatccactctcatttaaattatatatacatatatacatatatatatatatgtatatgtatatattggtccttaaatccttcaccaagttttcataatcatggaaaacccagacattaaataatgactaattgttatggtgagttacatttgtgtttatggaaaatgaactatattgtatactgtggcaaagtattttacttttaaatgaatataaatttttgtattacatacattttaagtttttttttgaaattattgttatattttctaaaataaaaaatgtattgcttttaaactatgaagtcaaacctataaataaaaggagacatgatcttctgattttctaggaaagctcatagatcttctggattcctaaacagattgcatggtgaaatatttgaggttttaaaatctggtattcctattaactatatttcacatttaaattacagaggcggaggcagcgcccaacaggagcagcagcagcagcagcagcagcagcagcagcagcagcagcagca

SEQ ID NO: 39768 - DNA, 602 bp, Mus musculus
  source 1..602: mol_type = other DNA
agatctctcagcatctgagtacaaaaagagatcatattaaatggccatgaactattagttataaatattgtgagtaacctaatgtagtataagtaatggttgtattttcaacacattaaatgacatattaatattagataacatttacaaaataatgacattgtaataacaattctataagatctcatattgtgctgctctgcataaaaataatcacatatatattcacacacagaggcatatgatatgtctagattttgcatattccttttctaaaataaactccttttagtatttctttaccatgaatggaatttaagatgatactggaaataaatatgccttttgataattcaagtgcattatttgtaagttgtgaaatgcataaatatatgaacttttgtgataaatttccatatatgcatgtcagtatattgccacaggaacattacaaaggttcagttattacaggtaccatggacagttttctctgtttttaattagagccagaaaccaaagaataactatataatatttcaatctttctatttcttctttattaaatctccctggtaacaacaggcttatgcctctatcaattt

SEQ ID NO: 39769 - DNA, 761 bp, Mus musculus
  source 1..761: mol_type = other DNA
ctgagtacatacccacacttataagttggatgattgtgtattaaaaagagatcaaatgtaatgcccaattactattagttatagatattgtgagtaaccctaagtatttttaacatagtaaatgacatatgactattaagataatgtttacaaaataatgaaatgttaataacaagtctataagatctcatatgtacatcattctacacagtgtgcttctctgcataaaaaaatcacatatgtaattacgtacaaaagaatgatttgtaatatatctagattttgaatgcttcttttctaaaataatctccttttagaatttctttaccattatgataatttaagacgaggcatattattaggcacaaatatgccttttgataatacaagtgcattgtttgtaggttgtgataagcataaatatataaactaatgtgcaaaaattttaaaatatgcataactcctcaggatattgtcacaggaatattacaaaggttcagctctgtgatatatttgacagtccatgacggaaaaaaaatggatgctttattacaggtatcattagtcatattcattctaaaaggctcaggcattactggacagttttctctgtttttaatcagagccagtaactaaagaataactacataacattttctttcaccttctatttcttcattattatttgttggaaaaatctccctggtaacaacaggcttatgcctcttttatcatttttgagatcatagctgaagaaattt

SEQ ID NO: 39770 - DNA, 638 bp, Mus musculus
  source 1..638: mol_type = other DNA
atgattatgcccttttcaattttgaaaactatctatcaaaagccaaacatatttaaaaaacaggaatgcctagtacttattttgcctaatgactactttaaatttcaggtataatgtggcttttagaacctgcatttgtagtatttccaactaagattatgaaatttcattttgtaactcatacctgaatgtttttgtcctgatcaaaaaggtagataggaattcatatttttcctctgtatattttgatgaacatatagaacatgcatgttagaaacctttctttcaaaaatacaaaaatgtcctaaattatttctctatcattatgactcagagatattcaatgttaaataagtagatttagcttgtgaagaacatttctatttacattttaagcacccttatataggtcattataatagacataaatatattatataatcatgcagatcaaatggattttttcttgtagatcgtcaggatctatgataaaattcaattggaggcagagctgagaacaatttttttcctccttgcttctactgtaacacccagggggaaactagaggtacatgaatcagcatgtctgatggagatctccatggtgactgcaggcatgatagagaaaataaaattct

SEQ ID NO: 39771 - DNA, 418 bp, Mus musculus
  source 1..418: mol_type = other DNA
gtagatggtgccatatccatgtacagacaaatgccttaaatgaactcagatttattaaagagcatatatgtaaatggaatggatttcataaattatgactatcacaaatatcttacatatattcacagagaaattttgaaaatatatgtatattttaagcatttctgaggtaacaatttctaaaattattttttgtcattatgacaatcattatggtaactatttttcctagcagattttaataagacaattcaatagctatgaatatattatgtagtataattcaagaatatattcaactgaggctttcttctatatatacacaatatatttctttccttgtttctgtggcaacacacagggaggagggatctgtatttgcatgtacacattccaacaagggagcaaataaaaattt

SEQ ID NO: 39772 - DNA, 531 bp, Mus musculus
  source 1..531: mol_type = other DNA
ttgtattcaatgatcgatagaagatagtcagattttctcgttgcctggagaggaaatccatgtgccagtagatgatctcaggtccatgcacacacagatgtcttaaattaattcatttgttattaaagagagaaaatacttctttcaaatgcattatttcatatattagttttggataaaaatgttaagaatatcaattgtgagaaataatgattgctgctttccagcagacacaacattgttcagaatatacatttatttaaaaatctttaataaaataaatacctattaagctatttccttatcattatgacattgtgaaaaataccctagttggatacattttaagtagggcttaaaggcaagatttccttttcaaaccaaaacagcttttgataagtaatagacacaaatataacatgtactgttataattcaagcatataatcataaatggaggctttcatctagatttctgctgcaacacaaaggctccaaggttaccgcaggcttgcaggctttataaaaatct

SEQ ID NO: 39773 - DNA, 575 bp, Mus musculus
  source 1..575: mol_type = other DNA
cctcaaaattaattatagaacgggtgagcatgtgcatgtacaccatgtgcctgtacacattaaagctaatataaatctattcacattaagttttagtcattcaggctaatggaaagagctcagttctagccaggggcttgactgctactcatgagaaccatattactattttctttagaaaataaattcctcttaaattatttatttacaacaatgatactttaaaacatactatttaatatgattgagagagttattaattttagataatctgagcatttatttttgttagctttaacccacataaactgtgatctagtgtcatagatcatcatataatcatgctgcttgagaaatctattgcaaagactcagcatcagacttcatattatactccacaaaaacagaggctcttttctataaatggctagatccaggcttgagcttgcaagccagaattaagtggaaatataaatatttattctgttttactcttcccacttccaccctgcctgctgcaacacccagggagggggaagaagctgcttcccgcaacagcaggctaatatgagtaa

SEQ ID NO: 39774 - DNA, 575 bp, Mus musculus; identical to SEQ ID NO: 39773
  source 1..575: mol_type = other DNA

SEQ ID NO: 39775 - DNA, 424 bp, Mus musculus
  source 1..424: mol_type = other DNA
tttagattatagaatgtagggtaggtattaaaaacacataatatttataatgaataaaatatgtcttaagaaacataattatggacctgtcttaaaataaattttcatactacctgttaaattatttctttacaatgactatactttaagccatttcatgttcattagatatatttcttttttaaatctaatcttctaatcattctaatagacataaagttctaatcatggcgcagctgggtagaaagcatcagcagcagctgcatctggcagctcaaaatcatgtcaagtggaaccatgtaaaattgcatttatttattatttctcatttcactgttcctgcctgctgcagcacacagagaggagaagcttgtatagaaatctccctcagaaggctattgatttacatagctagttttgagat

SEQ ID NO: 39776 - DNA, 436 bp, Mus musculus
  source 1..436: mol_type = other DNA
gccctaaagcctctaaagggttaggtgtataggcagagaagcaagagtagagtttattcttttgctgccatatgtccatgaaactacctgtgcttgtgtgatgtacacacacacacacacacacagtcttaaatttatatagaacttaacaggtttttatctctaattgatttaaccatcttgacagtttagaatactgtagacaaacagagtatcttccttgaccatgattaaaaatcaatatttctttcttcaatgcaagcatcattttaaggcactctaatagaaataaaattctagtatgctgagaatcagaatcagcagatacattctcagcctctaggtgcttttatttaatgttcattagagacagagcccagactaaattatattttatcatttctctgcttctgctacagcatacagggagaggaga

SEQ ID NO: 39777 - DNA, 323 bp, Mus musculus
  source 1..323: mol_type = other DNA
caaatcctcaaatcaaaggtttgtttttattgtaatgcagatagaatatatgtcagaaggttaagacattaagtaattcttgtgtaacttaagtataaaagacaatctgtatttaatttttaagggatgcataaaacttgacattacttatagaaagaaaatttgctctttatattgcagaattttgtaatttatttatcattacatttatttttcaagaaaagcccagaaggctcttttcagggttatttctcaaattttcaggcttagctaaactttctagatcaagtagttcagaatggcctgccgggaagctgcagatg

SEQ ID NO: 39778 - DNA, 554 bp, Mus musculus
  source 1..554: mol_type = other DNA
attagtcatttgtgaatgacataatttaagaagtagaagatttcttaaaatacactgtcataaaatgtgtattaataaatatgttgatcattttccactagaatcttaacggaagctttagatgaaaatctatagttattaaaataattcaaaaaaactgagcatccaatgatgaatgaatgcatatatatatattttatatatccctcattttcatgtgtctcattttaattaaaattttaaactcccatcaattatgctatatgaatctactacttctagaaccagtgtctgtaactacatctgcattcagatatgtaagaatttatctctattaataatttctcaatattccaatcttaaacaactcatcatcatcataaggttccaaaagaaaaaagaaaaaaaagtcatttctgtttctcttattcttttgtagaaaaaccaaaatcaagaattaagtctttctccaggaccttcacatttaatttgattttgcacaaactcagtgtgtccgaatcgcatcagccccgcccgcccgctgctgcggaagg

SEQ ID NO: 39779 - DNA, 247 bp, Mus musculus
  source 1..247: mol_type = other DNA
tttccagaaaacttttctagaactaatttccagcacattgcttacacttttaaacaattgtatccactactactactatgttttgataaagaatgcctatgttatccctgggttgacttgacagaaatacctgaatacagtacatgttccatgttataatgcagcaaactcttgcttaaagagtatgaactagcttggtcgggggcggggaaggggcgggattgagccccctcccccctccttctta

SEQ ID NO: 39780 - DNA, 310 bp, Mus musculus
  source 1..310: mol_type = other DNA
gattattactaaaaataaaaacccacgtaaaactatactataaaatttagtatgccactgtagtaagtacatgtagcagtgtagaactacatataaaattattagcccaatagtatatatgggtcattctcagaccttgccttattaagtcttcatcagggacactgtccagaaactgaaaaataatttttaatgtgagtgaaatgttttatggcaatgtgtgtagcgttttcttaacacacacctggagagtttaaaacatcaacctacaaccggaagtgtccgcctgcctgtaaacaggtaggaacta

SEQ ID NO: 39781 - DNA, 478 bp, Mus musculus
  source 1..478: mol_type = other DNA
tctattctgacaacagtataaaagtataataatcacagagcaattactttcagatctcagagcaaacaaagggttgattcatcaagcatgaacacttacgagttaggcttctctaaaacagttcaaaattgagattctataagagacaagtttcaaccttggagcatacatagaatttgaaaaactaatataattatccaagttcccatgaaatcttgttttagattgatattcccaacactctttgcccttaaagagcaaaatgagaactatgtaaaaatctagttggctcttaaagtaagattacagtttttttaatcgttactttcttctatgaaacaaaacagaaaagtttttacaacattttaaatcactgtagttttaggtacaaacttaagtgaggaattgattagaacagcagctgtaagaacttttcaaaaaaaaaaaaaaaaagttcacttctcttaatcaagaatga

SEQ ID NO: 39782 - DNA, 343 bp, Mus musculus
  source 1..343: mol_type = other DNA
tctattagtaatcaacatgggaatccttcaagatactcatttccagggtattgcatgcccagtctgatgacacaggtgtaccatcctcccaatatggcagcaaggattctttgaatcaaagaggcaattttctgaatctgttttaaaagaaagtgagactaggttttaaacaccaggtcttgcagggaaaacataggcttacattctggtaccagctgagcagggatgcagttcccggggcggccacggagctgcgcggctcagagagcgctcgcgaggcgggggcgcgctgtcacgtgtgggggtgcgcggcggcggcgggcgcgcgcagcgctttaaaggc

SEQ ID NO: 39783 - DNA, 322 bp, Mus musculus
  source 1..322: mol_type = other DNA
tactgttatttcagtttcttgaacaagagaccaacttgatatgtaaacattatgcgcgtcttcgcagagctcggcgcgaccgaggccaacggtggccacgagcacgcgcgctcccctacccgcaccacttcggcgggggcggggcacggtggaagcggtgacgtcaaggcagggcgcgcgcctcggggccgcggacggagccgggaggcgggcgctgcgcgcgaccgcgggcggagcggaggggcgcggggggcggagcgcggcgcagccgaggagaggcccgggcgccgcgcggcagctggggagggggccgcggctgggc

SEQ ID NO: 39784 - DNA, 557 bp, Mus musculus
  source 1..557: mol_type = other DNA
agttgtgtatgttttgtttttaaagataagttaaaaatgttgacattaacttatatcgaaaatcagttttctccgccctgaaggacaggccttatgttcaggagtagctttacttgttttcagagaattaatttaaagttagacaggtagtaatttaagatcgaaaaatatgatcaaaatatatttaaatttaaaattgttttaaattctgctactgctactactagtagtagtggtggtgatggtggtggtggtggtagtagtagtagtagtagtagtagtaataggataaaaagtgagttataacgaatggacatttatttctcacagttatagatgctgagaaaaccagtgattctgtgagtaggaaaggctctctgctccatggaggggaccttgctgtatcctcacatggtgagaagcaggacagatgtccactgtgaccctgccttctctagagcatttatccacttcatgaagaggaggaccatctcttcataactcatcctggggtttaattttgacccactgactttgaaactcacatgcacttgaac

SEQ ID NO: 39785 - DNA, 149 bp, Mus musculus
  source 1..149: mol_type = other DNA
agtgaaggctgctatcaccatccagcagcttgaattaatctgcttttgatgaacttaggggtagctgtgaccccacctcccaatgagcacagcatgagatgctctggcacaatgatgtaatattgtaacatattacacacacactgtgt

SEQ ID NO: 39786 - DNA, 653 bp, Mus musculus
  source 1..653: mol_type = other DNA
caaacccggccaccagagaactccgctgcggtggggtgaggctccataggcgaggtcggccgcttaggtcccatagggaccgatacgccaccttgcccgcactcccggcgggcggagcgaccacagggtgggccggcggggttcccgctgcgggaggcacgcgccccagccctgcgccgctacacagcggcccgccaccctcggacgtcatgcgtctgcgcgccgcgcgcccggctccgattcttgcaggcccaggggcacgcccactggcgcgcgcaggtcccgcggccagtagaaccctctcgaggaccttgaggcgctccaggctccccgcccccttcgtgcgcgctgctccctgcggccgctgccgcctgtaacctgcgccgccaggatgtggctgggggctgacgtcgggtccagatgtggccccggccccgcccacccccggggccggtccgcccacaccgagccgcggcgcgcacggaggctgtcccgcctgccacaatgcacggtggaactgcgaccacaacttgcaggggtcgtgcccgctcaccctccagtgcccggccaggcggacgcggagccgcgcgggtgacggcagaagcggctacgcgcccagcctagcccagcccagcccagccggagaagagggc

SEQ ID NO: 39787 - DNA, 378 bp, Mus musculus
  source 1..378: mol_type = other DNA
ggggaatttagactcccctaaagtgtgcagccgggcctgctccggttcccacacagatgggaacctgtccacagagaggggtctgctcccaggagccagggatacatatcaaggggcctttctggactttccttctagcaggcagagaaagcatgccaacagcaggtgtgtaagctctcactgtggtggccactgtgaccccagtcaggcgaagcagaatgattatgcccaattgtctcaattatgcaaagtgggctgacaaccacgctgagcagcctgggagccaggtcacgaggctgcctctgtctcacggggatcatgaggaccgggcataggcacccacatgctcttcatgtgggctgctcctcttaaagagtg

SEQ ID NO: 39788 - DNA, 627 bp, Mus musculus
  source 1..627: mol_type = other DNA
tcgcagctggtggtgtttgaagcctccaggaccgcggtgggaggaaggggccccgtgttccctgaacagccgcgacctggcagtggtgggtcctgcatcagccaggcagttcggccgcgcgggggcggggcggccccagtggtgaccaaacccggccaccagagaactccgctgcggtggggtgaggctccataggcgaggtcggccgcttaggtcccatagggaccgatacgccaccttgcccgcactcccggcgggcggagcgaccacagggtgggccggcggggttcccgctgcgggaggcacgcgccccagccctgcgccgctacacagcggcccgccaccctcggacgtcatgcgtctgcgcgccgcgcgcccggctccgattcttgcaggcccaggggcacgcccactggcgcgcgcaggtcccgcggccagtagaaccctctcgaggaccttgaggcgctccaggctccccgcccccttcgtgcgcgctgctccctgcggccgctgccgcctgtaacctgcgccgccaggatgtggctgggggctgacgtcgggtccagatgtggccccggccccgcccacccccggggccggtccgcccacaccgagccgcggcgcgca

SEQ ID NO: 39789 - DNA, 351 bp, Mus musculus
  source 1..351: mol_type = other DNA
gtgtgtgcatgtttgcgtgcacacgtgtgctcgaatgtgtattacacgacagtagagagggagttgaactctagaaaccttctgggccactgagttttttaaaaatgcagctgggcctcgttgattagctagaccagcttggccaccagagcccagggattgccctgtctctgcttcccagtgctggggttatgggaacaggctgcttcagctggctgtctacgccgcacagggacacagactcagtttcaacaaagagacaaacagtgacacccagtgggataaattattcaaatagcattccttcagttcacttgctttaaagtgatttgcttttcataataaaaactc

SEQ ID NO: 39790 - DNA, 478 bp, Mus musculus
  source 1..478: mol_type = other DNA
aaaaaaaaacctaaaaacttgttcccaaagatttggtataattcagattgtgacccaatgagtgttgtaggatcattacatatctctatagctctcagtctcccacatggactaagatggtgagataagggacatctgttcctgatggtcaccaccagatgagaggacccataaccttctgggattctgccagacaattatgaaatgatctcacagaatatttcattcttacaagtggttagaactggctatagatttccaagaatcagcttaaactatttctattaattctctgagagttttatacaatttagttttatacaattattctatgaattcatgtcctcttttaaagaaatgactactcaatcacaggtgtgggggcatccactagagtgtggtcattcagaagggaatttgtaccggcttgatcctgtgcagccagccacactgtttgcctaggcctctgagtgaggca

SEQ ID NO: 39791 - DNA, 432 bp, Mus musculus
  source 1..432: mol_type = other DNA
attaaataaccaaaagggcagcccagtccctgggttggagccggtatgctaaccataacaggtccctctttataaatatcccttttcacttaaagtttaacgagaagaataaaatcagaaaactaaactgggggttctggtttgaccagtggttaaatcaattggtagcaagaggtgaaagaaaagtcttccctcctttagccatcgcagatgccggaggactcgggtcctggaacagcagctaccgtgcaccccctgcgggcctccgtagaagcgcgctctcaagatggcctctcgggtccccgtggcgccccactccagcgtcgcgctccgtgagctccgcgcgagtcgcttccggggatgggcgtggctccaccaggctccgcctatttcgggcgggcgctcggcctggtccgtccccgcccgtcagtc

SEQ ID NO: 39792 - DNA, 327 bp, Mus musculus
  source 1..327: mol_type = other DNA
tgtcaagtcaaactaatcataaaatatttatcatgattagcgtatcatagccatggctttaatcccagtctacagagtgagtctgtaggtctacagagaaataatgttctgctacgcgcggggatccagcgccttgctctggctggtccgggctgcgcagagcgactgccgactcagctagaacagagcatgcgcggagctgcaggtccgctccgatctgtatcccccgtaaatgtataaaaatatttttaactcatgtattttattttgtaggaagaagttgaacgaataacgacatcaaatgctatttcactttgtattagttca

SEQ ID NO: 39793 - DNA, 291 bp, Mus musculus
  source 1..291: mol_type = other DNA
atcatgaaaatgcattggtacgtactttcagtgtgtattttggggacaaattcagaaagcatattccgccctcaatgagcctggcccgcccagcaccggtgagatgcgcgctgctcttacgtgaggaaacacccagagtctgtcgaccacgcgagtgctgcgagccggccggccggccggaagcagtacgccaggttccggcctatagccgcaaacaaaagagccattggtcatctcaagcgttttgcattcgatacaataagtattttaatgtaacggtctcgtgacccc

SEQ ID NO: 39794 - DNA, 359 bp, Mus musculus
  source 1..359: mol_type = other DNA
cctatctcttagagcacacatataataaataacctctagatttactgcaagtcctgacttgcttccacgtttgccaagggcaacccctgtgcacagaggagagtgcagctccgggagcccaacacttcagacccaggccttggccacccgcggcctcccgtccagcgtgccccgcacccggagcccctgatggtgccccgtattcacctgtagcgcccgcagccaacgcggcggccttcactacggggtcacgagaccgttacattaaaatacttattgtatcgaatgcaaaacgcttgagatgaccaatggctcttttgtttgcggctataggccggaacctggcgtactgcttccgg

SEQ ID NO: 39795 - DNA, 468 bp, Mus musculus
  source 1..468: mol_type = other DNA
cccactaatagaaaaatctccccaagttggtgtttgtttctgagacagagtcacactatgcagaagaagccttgtagaccaggctgcaaaaacatcctaaattttattcaaaataggatttatctttttcctctgaataaatacttttgagtaattatttagcagtgatttaactattacatagtttgtatttttgtggaaattttaacaatttgctataccaggctcttgtatgtgcacatagttagaactacattttaagtctaatcggactagttttacctttaaagtatattaatcatgaccatttcctgtcattattgactgtcaagtcaaactaatcataaaatatttatcatgattagcgtatcatagccatggctttaatcccagtctacagagtgagtctgtaggtctacagagaaataatgttctgctacgcgcggggatccagcgccttgctctggc

SEQ ID NO: 39796 - DNA, 319 bp, Mus musculus
  source 1..319: mol_type = other DNA
actgccagagctgctctgccaggcctaggaggtccttactaggttcatctcaggctaggacggggctgaagtggagccccccattgagaagaccttgtggccagaaggcttctggagcaggacaaggcttgcccctcaggaaaggctttctggggccacaataccctagttcgggccggccggggctccgcatagagcggagctggcagagcagggcgcggtcgccgcagcccctcagcgccgcacgctctccggagcccgccagggggcagcgcggcgtcaggggcagggtgcgggcaccggcagcatctccttcacc

SEQ ID NO: 39797 - DNA, 431 bp, Mus musculus
  source 1..431: mol_type = other DNA
agaattaagaaattcacattattgctactcccaatcattgtggagaactaagtcacgttatttggtcatctaactgaaattcaatgaagagaatgtgaacctgaaaattgcagaagtcttgcttttaagaataacttcccttacagaacagataccgggacagggtcccctagtctgtcatgtccaccaggctggcctcgaacccagagagctttgtgttccatagacaaactttgtagcttaaaaactaataacatgttagaactcaaccgcacacttgccgagaagttttggttcttgttttctatttatatgagctcataaacaccattcaattggagctgctgccagcgccgaggccctccgcatgcgcagtagctatgaagagtcccgtcgtatcgctccgcctcccggacgcagcgcgccggcga

SEQ ID NO: 39798 - DNA, 294 bp, Mus musculus
  source 1..294: mol_type = other DNA
atgctcatggcgctcggccggtgtacacccctaagggttacaggaccctaatgcagcatggaccataccaagtggcttcattgtaacaggcaaccccccgggggtgccagtgctacccggctgagccaagccagctgcattggtttgatgaagtgaatgaaataaaaacacgtagattttagcttcaaaatggagagtgcctggcactattcagatgcagtcactgccctgggaaggttggccagcgcttcggtgcccagtgctgttgacttcagcctgacatccagctgtaca

SEQ ID NO: 39799 - DNA, 470 bp, Mus musculus
  source 1..470: mol_type = other DNA
tgccccttcaaggggaatttgcattttaatagggtaacgctgaaatttcaagcaccagcaattggaggactccataagtcctgccaagaggtcatggaagaatgacctttgaatttcgggacaaccgaatttccaggtttccttgcaatttcaaggaagccaatcattttaatacaacctccatttacatttgctcttgtatactgttttaaaggctaaacttgggacttgttttataaaacggccccaggggtgtcctaggtggcttctagccttggccaaagggtccctccccagtatccgactcggcccaggaggaggcaccaacgcggaggacacacccgcgacctctcctgttccctcccgggccccggcgcacagcggctaggctcgctcccgaagcccgcggcggctcgcgcccggcacggcggctcgcgcccgcgctcggccaggggagcgcgcggacgggc

SEQ ID NO: 39800 - DNA, 280 bp, Mus musculus
  source 1..280: mol_type = other DNA
gccctgagctgaacacttcaggtggctacgatctgagagagagtatgtacacacacacacacacacacacaagtgtttgttacaagaaaagggtttcaggcctgaaccctgagagttacatgtaatctaaatgtgactgaaagatctatgttccaggaaccataaattcataaacacatacaaacatgcatacatacatacatacatacatacatacacacatacataaagataaactctagctgagtttgagcctgcagagctaggcaggcagcgatgc

SEQ ID NO: 39801 - DNA, 498 bp, Mus musculus
  source 1..498: mol_type = other DNA
agaaaggcaggcagcctgttcaggggccaagaatttcagcaatcttgatagcctaaaatatttagaacgcttctgttgtgctttaaacaaaaacagacagttgtgaccattgttacaaaaagctttagtacccgcctagcaagtaacttgggtagccgagccttccgcgcgggggtcggacccggcctggccccgcccctcgcggaggccccgcccccgccggctgggcatgctcagtggcccggtccggcaggttttgcgtggccgcctgagttgcccgcgacggctctgcccgccgacggcacgtctctcggcggccgcgcgttccggggaagttacgccggaggcccgggtactgcggagcggcgagccggcggagggcggcggaggccgagcaggcggccgggtgtgccccgcggagaagcccgggcggggcggacgcttcccggacccctccccgtgggccgggcctttccggcctcccccgcccctgccccg

SEQ ID NO: 39802 - DNA, 445 bp, Mus musculus
  source 1..445: mol_type = other DNA
tttgaaaccttaattgatgtttacatttcatgtatggatatttccaagttagaattaggtttaaattggtcatatagttgaattctcaaaagacaacaatactgtagcactatgctaggtactttaggatgttatctaatgttactaaatttttctaatattccttaagagctttgcagtatacagaatgtaaattaatgaagctcgaaatagttttctacctaatttttagaaaggcaggcagcctgttcaggggccaagaatttcagcaatcttgatagcctaaaatatttagaacgcttctgttgtgctttaaacaaaaacagacagttgtgaccattgttacaaaaagctttagtacccgcctagcaagtaacttgggtagccgagccttccgcgcgggggtcggacccggcctggccccgcccctcgcggaggccccgcc

SEQ ID NO: 39803 - DNA, 172 bp, Mus musculus
  source 1..172: mol_type = other DNA
tagggcaactcctcccccagggggcagcagggcttcagccctttcctgctccaggaatgtttctacttaaaataatcttaagacagttataaacagcatttacaatgtatcttccccagcgatgatgccgcgctgtctcacagttgccgtgcatcgctccgccccatgcagg

SEQ ID NO: 39804 - DNA, 552 bp, Mus musculus
  source 1..552: mol_type = other DNA
tgccgactcagctctccagacccacttattgtcttggcacttaattaaaataccgttatgccaaagagaaattagttacagatttatttcactaggtgcaattcaaattagatgcagagaagcatcagtctttgatatattattgattctcctgaacatgaagagtgaagcatctgtaaccatttttaaagctaacatttactgcaggattgttgtgcgccgaacaagatgtgcaagtgggaatttggggaccccaaagtggcttcctgaagtatatgccatagaaacaacgtaggttagagagcagctccccctcctcgaggttgctcgtgtcccccaacaggctgtggtaaaacctaaggcaggagccctgggtcctggtgcatgggactcttggagctgcttcaaagagaagggcatctcttcaaaggcagtgaggggttggccaacagcactcgagctgggaagcaatgacacccgccggcggcgccccgcagcagtgcgcctgcgggccgcgcccggacacgcccccttcggcgcgcccccaccaca

SEQ ID NO: 39805 - DNA, 430 bp, Mus musculus
  source 1..430: mol_type = other DNA
aaacaggctagcttattaattatagacagcccagtctggtgtcccaggaggccccggtgacctggcttcatgcatgggccaggatagcctggccagggtctgcaggagtgagggctgatgatcttgccagcagccacctcccaggcccagctgcagggctgggcttcgagtctggagcaagacagctgacccctgcctgcctgtttacagttttcacagggctctggggacagctgtggcctccccacccctgtggcctcatggtggtgatgtggggggggtaggaacatcatcagctgttcaagagctacagtctccccatagctttcagcaaatagtgggtggcccggctccggttaaatattaacaaagaacggcccccatggccactcctggggtgtctgttttgaatgacattttggctaaattt

SEQ ID NO: 39806 - DNA, 416 bp, Mus musculus
  source 1..416: mol_type = other DNA
aaaactattaaaatcataaaactttaaaaatttagcaattttttaaaaaagccatgttgtgtctgaaaaaaaaaatcagcaaattcatggctatcttcatattcttagtcatcaaagtctattttcaaggtggttgataatgtgaagtgactatttccattttggagattcaaagtcctcacctcaggctgagtttctctggggacaaatatgggaaccattacaaaaactgtggtaatgtaacacatagttgaagtcattactacattaattccttcccttgagacagtggatcagaagaaaggaattctaatagatcgctttccgcacgttaggggaggggaatctccaggaggtttcaaatctcttgagcctgcgagtcgattggtcgagcgtcgaggtaggtcgagccacga

SEQ ID NO: 39807 - DNA, 301 bp, Mus musculus
  source 1..301: mol_type = other DNA
tacattaattagtaagctatgatttaaaaaaatatgcacatgattttgtgcatttaagcctttggagacagaggccgcaatttctgatatgggatggcctctatctccgagcacagctagtcaatatgaatatcacttatggtttgttaagttgcaagcctaaatgtacaggctacaagttcaccctcaagctttaagggcccaaagtctctgttgggtggagaagggagagtagtcccaactacccctcccttgatgagacagagtcgcgtgttcttatcttttggattaaaaaaactgg

SEQ ID NO: 39808 - DNA, 570 bp, Mus musculus
  source 1..570: mol_type = other DNA
ggaccaatgggccgtccgaggcttgcagccaggtgaggatgagtcaacttacattcacactgactggtcctagctcagtgggtacttttaagagtgtacaccatctactgaataccggatagatgctattgttatccgcatcttacaagggtcagctaaggagttcacctgttttagtggacgcccagatcctgggacaccccagtgttttcccatgttcactccacagctaagttgagcaaggctgcctagccttggggaccccagcaggtgagttcagcctccaggggcgggaactcacgtgggatgcccagagccctcccggcttctagcagaacgcgcggagcccaggctgccactccgggcagcgccgtgttccgagagacccgaagtctcgagcctcccctgcgccggcccccggctgctggcgggccgggagactgccgcacgagcgcgggcccaggggcgccaccgggccgcgcgggcgggaacgcgccgcggcggcctcctcctccccggctcccgcccgcggcggcggcgcttccccggcgcggagcggctttaaaaggc

SEQ ID NO: 39809 - DNA, 547 bp, Mus musculus
  source 1..547: mol_type = other DNA
ataaaattggtatttacaaacatttgtcatgttgaagggctttcgtttttaacaaaacgtataaaagttaagtaagagatcctgtttcaaaaaactaggtgtatggctcccgttttataaatctactcttggtgccgctcgcctttaagcccagcgctcgagaggcagagacagatctcagattctctgagttcgagggcagccctagctagcgaggtgaactgtggccgtgtgtggctccagccccgcctgcagcgtacaaagctgcagtgtggaccccgctgtcctggccaccgagtcgggaggtcggcccggggaggagccggtcaactcagtccacgtgcggtgccggaccgccggctcccaatgctggcgacgggggcgtggccgcgggtaccgggcagtgggggttggagggacgcccgccccgctgtcgtcccacgcccctcctgcctggccgcagactgcggggcgggtcgccaatcacgaggcgcggacggatcccgagaggggccacggcacgccgccggcgggccgcttcttaacg

SEQ ID NO: 39810 - DNA, 472 bp, Mus musculus
  source 1..472: mol_type = other DNA
gtaaatctcaggcggcccacggcttctcaaattctgtgacttggtctcaggaatattcattcttaccagtaagaagcacttcggtccagtactgattttctaccaaggattatcttttctcggggaaatggttattaacttcagtggaatcaactgacaacagaaaaatattcatcagctagtaatatctttgcaaacgtccataatttaagttagcgaagaaaaagcgcagtttacaaaacatcaacttttaaaatgtagtttctgcaccgctccataaagctctcttaatatttacagtcacagtatatggccagcaaacaggataaaaattaatcaaccttgtcactgtgcctgtccgcagtgagcttggtcacccaggggaggtcggggcggccgaccctctggcacagccctgcttccgcgccacccgccctctccgcccgccaggcggccgcaggattgaggaagt

SEQ ID NO: 39811 - DNA, 315 bp, Mus musculus
  source 1..315: mol_type = other DNA
gcagtttcatcttctcttgttaagataaaagaaaaaaaaagaaagaattgctaaaagaatcaatgcatttaaacaatgtatcaatggcgatcccaaagagcgtgctctctcgcaggctgggcgaggcagcctggaagctaaccgggtctcgagcgacgacgagtaggggccctcatcgcctgctctcggcagtcaacctgggcttacctggctgccatcccgccgggccacgcagccatcgcccggccactcgtgcggaaggccttgccgggcttagagtctccaggctgggggtggcgcgtggtttacggcttg

SEQ ID NO: 39812 - DNA, 325 bp, Mus musculus
  source 1..325: mol_type = other DNA
gggcaggcaggctagagcagggcttctcccccaacccctcaagggaggaagaaactgactttacctgtgtcctcagtcgtgttcctgatcctcctgggtgcgccccaacccagagagcatccagatagtcgatcaggctgcagcctccgggaaggggcgtcccggtccaggggctcagaccaagggtctgccgcgcgccgggccggaggctttcagctgtcccgacagggggctttcgggatgcactttgcactgggccacccccgcaagccgtaaaccacgcgccacccccagcctggagactctaagcccggcaaggccttcc

SEQ ID NO: 39813 - DNA, 685 bp, Mus musculus
  source 1..685: mol_type = other DNA
gatgaagcttaagtcttaagtcctgggctgaaagaagcgtttcctaaacgagttggacatgaaacattaagagcttttagtctgaaagcaactagctcatttttttaaaacggaagtttaatttgtgcgtttgaaaaattaaaataattgccatatgaaggtttcctgccagccaggctcagagtagacctcctccgctggcggccctagcttgggaaggatggagccccaaattgaggcagccacgggtggtgaccacaagacgtcgggaggcacaacgcagggtcccggagagagcgctcactcccgccgaagttttggagagccgctgcggtggtccggggaccgcaggtgccgcccagagagaggcctgttactgcgatcgctacgagccggctccctgccctgacggatgtccgacccttgggaattcccggccttggtgcccccggcccccaagttcgcagaagggcagcctactaggctgcggaagcccgcggtgtggccgcccagcgatgcgcagacagagctctctggccgcagcctaggtcggtctgggaccgtcccgctcccggaggggcagggacaacaggaggggtagcagcggcggccgggtcccctcctcctctcccgcgccaattaggcggcccccttgggcgggaggcgtggggcgctgcataaaggc

SEQ ID NO: 39814 - DNA, 389 bp, Mus musculus
  source 1..389: mol_type = other DNA
attttaactttactttttaatataagagatactggtattataacacattggcttattgtaacactttatattttatactgtgggcaaaatattttaatgttgattatttactgtgttttaaactttcaagatttttttaaacataaaatagctgcatatatttgttttatttgaaaaataaaaagtaataattggtctttctagttccaaatagtaagccctgtcttattttttagtttaagtagtattcttacacaggatatgtttttaaataaggcagacagccttcctcactgatgtgaaaaaaaagaatagtactttttctataaagatgtctcctgatgcagacagattattcaaagccaatttaaacaagattacatatttta

SEQ ID NO: 39815 - DNA, 365 bp, Mus musculus
  source 1..365: mol_type = other DNA
tttgaaatctgtgacaaaggccaatgggattacccataggggtcgaaaggctgggttcaagttcaggctctgcctctcagctctccagggtcctgcgatgcaccttcttggattctgtgaaagtatagactgcaagaagcctaattcaggtgtgctagacacggagtcacttcaatacatagagattttctttttctaactgaagaccaggctggtgtcctcctggctgctccaagatgctgcagctgagccggctcgcgcctgccacctggtgtcagaaagtgcttacaacctaactacgcacgttggtttcgaccggccctaaccaatcaccgcctactttccaaggagaaggtggggcttag

SEQ ID NO: 39816 - DNA, 428 bp, Mus musculus
  source 1..428: mol_type = other DNA
ataagatcatactttccctaagtgcttactgtgtgcaaaccactgtgtctcagcactgtgtgaggtgacaactgttctcagctctctgacactgagaatcttacacttagaatctttggacaaaaggaacaaccatagttctcttattttgagagcaatggaaaaacctatcaaatttcaatttgtccgtggctggaatgagactccaggcattcctggcggtcccttctgcatggccctttaagggaactctcaaattctgagcccctggcacccggggcggccaaaagaggcctccgccctctgtggacacaggcactggccctggattggcagccctccactgagcccacagtgacagggccagaagccctggcccctgctccaggttcgggcccgccgattggctgcaaaaagcaggcgggcgg

SEQ ID NO: 39817 - DNA, 321 bp, Mus musculus
  source 1..321: mol_type = other DNA
gtgatacagatagataaatgtcattcttctacttgtggacatacaatttggcatctttgtcaaatattaaatggctgaagttacatatattactgtggctcgaatcctagtatacttattctatttctgtcaagaataagatggtagaatggacattttcaaatatttactaatccatgagcatgggcttcagaggtttaaaattttcattataaaggtccttgatttatgatgttgattgtatatcctaagttttttggtagaactttgaagatctctaatgtcatctgctaataaaggtagtttgactttcttatatag

SEQ ID NO: 39818 - DNA, 193 bp, Mus musculus
  source 1..193: mol_type = other DNA
acaaatgtttaaacagagggccatgacctggtagacatttagagtaagacttttagttttattctaaatcataggaagaatttctttattcattggatgagtcttactccattaaggattcagggacggcgcaccgccgtccagggtccacgctggagccccgcccatcagggcccgcccgcctgctttttgc

SEQ ID NO: 39819 - DNA, 732 bp, Mus musculus
  source 1..732: mol_type = other DNA
cgctgtgtgaccctgcgtggtcagagtggttctcagttttcctttcttatctgccgaatgggaacagaaaatgaggtgaacttcactgcgatgtgagtactaagtgagatacagtttaccactaatccatactagctagtattagtagcccaaattccaagcccctgctgggattgggtggccagggacagcatccaactgctggcccggcgggggtgacccagcagctgtccaggcctggacacaggtgtggccccgaccacagtgagggcgtggcgagccgaggtttgggcaggcccggcgcacacgagggcggggagctggcctcggtcccgagcaccgcacagggcgtctgggccgtcccgccgggtcgggcctctcggctgtggtcacggaccaagcgcggggactagtcacgcgccgcgtcaccggagccgtgggcccgggctggaccaggaggcggcgggggcgcgacgccaccggcccgccacgcccaggccccaggagaacacggtccttcaaagagggaagcgcgctccaggctgcagccccggcgccaagcagccgtcatctccttcctgtgccgggtgatctgtcgcctcaccagcgctagctgttgagaaggcgcggctctctctgactagtcccgtcttgtccgcggagggacaccaagacgtcctcgcagtgcgcacgcgcgccgcgaagaacgagttccggcctggccgaggcctg

SEQ ID NO: 39820 - DNA, 156 bp, Mus musculus
  source 1..156: mol_type = other DNA
gggattcaggcgtgcagcaccatgcctgcgccacgcgttacctaagcccgacggcttctgtttaagtcagactggcggatgccagggatttaatcgctcgacgtcgcgtctggttctgaaaatgactctctcagcgaactatcgcgaggtttcggc

SEQ ID NO: 39821 - DNA, 664 bp, Mus musculus
  source 1..664: mol_type = other DNA
cagcctggtctacaaagtgagttccaggacagccagggctatacagagaaaccttccaaagtattgagttcaaaatgtgtaatcaattcatatacacagagtgaagaatgagtttgagtgcacacttggttaaattgtgtcacatagttatcacaaacacagaagccagtcctatgactgcagcttttgccaaaagaaaaggctttgttgcttgattgactgtcaagaagagcagacactctaggctcaggtctctcctctgtcagcccttcatagtatcttttgaaaagctggtttcaaaccttagagtcattagtgaaaagcccttaggtatttcctggaagaaaaaaatctcacatctgagtgtgtctggtcttagctgatttcagaacccactacagcactggtttaattcggcataaaaaaagccttcacaatttttctgctttgttcttactgacattttagcactcactaaagatagtcaaaacatgaaagaaaatttctaagttatattttaaaatactttggggatttatttttttacctacaataaattggctggtttgaaatcaagtgttctaaaatacaagaaaatcagttttattactgattttatttttatcatggcatgtagctctgaatatatatagtttcagatgag

SEQ ID NO: 39822 - DNA, 604 bp, Mus musculus
  source 1..604: mol_type = other DNA
aagagagagacagtgtatgcacatacataaaataaatacatctttttaaaaacaaacagaaaaccttattctttgtcctttaaaaaaaattgatgagcttttgatcagtcctggctcgacaaaacaaaaacaaaaggatgtttgttaatttgcataggggcttaactatccagccatctatctaattatctgtaagtaaaaataatatgaggagaaatagtattctgtaattatgatttcaatatacatgtatatataatactaataattggagttcacaagaaaaggaataatagaaaacatttctggacttagtttttgtcttaattttgcacattgaggtccaaattttgctcatgaaaagtgaatcatgttaaaatagcttttatctccaaattgatgttaaaattcctatattgatagtatgaccactgttagaaatttagttgttttgcggaagatcaatttacatatttaaaaaataagactctaaatggattttttaaaatatttatttatttatttatttatttatttatttattttacaatctacttccagggattggattacaaagtttgacaaacttctcttctccactccc

SEQ ID NO: 39823 - DNA, 552 bp, Mus musculus
  source 1..552: mol_type = other DNA
gtctagaatgttctgtgctcagagcacttcaaagtctttcttttattcccactctgcgtggaaaggaagtaacaactgcctttaactccagtttcacggggatttgactgtgtgcaccgtcgtggtacaaaaattactgaaatggtcttagtttaaaaaacataacaggtatatgtgtatatacggatgtgcaatatacatgcgcgatattgatatccaggcctggcatattcgcaagctctttattgttgaactataactctagtttaaatagaagcttcctctacgaaaaggatctctcatttaatggcaactatttttcattaaagaaagctgggactcaggggtgccttagttgcgccctaggagtagcaacggccacgtgggattaccctgggccaccaggggggccagtgctgggcagcctcgccatggcccgatctgtccggcagggggcgctgtccggccgcagtggccgcgcgggccgcgtcctgattggctggaggcgatggcccaagtccacagccgcgcgaccgggccactaagtgggga

SEQ ID NO: 39824 - DNA, 318 bp, Mus musculus
  source 1..318: mol_type = other DNA
tgtgtgtgtgtgtgtggcagttctcaatcactgaaacaaacattgtaacctcaagataaaatggattgttctcagccacgtggcggttcgaacttaaaaactcttcgggccacggcttcgagtcccctgaacccgcgtgggtgaccataaggcgcccacccccatccgggcgggtccccaccctagggcattggatcctgcgggttgtttaccagctggccatctccccagaccctgcgcggtgccgccacctgccggtgggagactgaactgcacccgcgggtgcgggccagcaactgcgggctgatgacccaacgc

SEQ ID NO: 39825 - DNA, 549 bp, Mus musculus
  source 1..549: mol_type = other DNA
ggagtgtgcgcgcgggcacgtgtgcgcggccccgagagcgcgcgcgtagagcccccagtgtgtggcggcggcggcggcggcgcggtgaggctgctccgcgcgagcgacagggaagctgcctgcgagcctgtcccggcgcgcccggcgctcgcagaccctcggccccgcttgcctgcgagagctccacggcacgcggcgtgctcggctttgaccttcagcgagccggagcccccgcgcacggagtcggcggcgggcgggggccgacgcggggcggcgggagcgctgagcgctgcgcggccgccgcttttcgcggcggcggcgctgagggaggaggcggcggcggggggaaccgcttcgccggcctcgcccgcgcccgggacttcggaccagcccgccgcgtaggctccggtggtcgttccctccgcgtttgcaaatggaggccgacgacgccgacagcccgccccggcgcgccccggcttcccgactccgccgccccgtgggccgctgctgccggcgctgaggggccgccccgcgccaccctccttgtcc

SEQ ID NO: 39826 - DNA, 283 bp, Mus musculus
  source 1..283: mol_type = other DNA
cggtacggagtccaggggctgccccgccctgccacctctttttttaaccaaaccttgactccgcaaagtctaatctacaaaaagaatgacttttgagccaatagtgagtttgttgctgttcttgaactaccataaacacaggcaaggcacgcctgagttcgaggccagcctggtctacaaagtgagttccaggacagccagggctagagagaccctgcccaacagtctcctggaaactgagctgtttcaaaacgagcggtgagtgatttcaaatttcaccttt

SEQ ID NO: 39827 - DNA, 715 bp, Mus musculus
  source 1..715: mol_type = other DNA
aaaaaatgccgcatgcatgcacttatttatttattttgcaacagctgcaagaaacaatgaagctcagcgaggccgcactccccgcccaccgcgcccgcagcccgcccgctctgctgcccgcccgccctgccgccgcccccctggccaccgagtcccaccggcgccccgggctgcggacagggccggccggcgcagtgcgggtgggggcggaagcgtgggcgcgcgcgtggctcagtgtgcgcgcgggggccggcgcgggtggaggcgcggggggcggtgcctcctgggcccggctccccacgcccgcgctccgctccgcacgtccctgcgatcccgaactccggctcttggcgcctgccgagtcggggcccggccctcggcgcgccgggactgcggctgtagccgcttggagtgtgcgcgcgggcacgtgtgcgcggccccgagagcgcgcgcgtagagcccccagtgtgtggcggcggcggcggcggcgcggtgaggctgctccgcgcgagcgacagggaagctgcctgcgagcctgtcccggcgcgcccggcgctcgcagaccctcggccccgcttgcctgcgagagctccacggcacgcggcgtgctcggctttgaccttcagcgagccggagcccccgcgcacggagtcggcggcgggcgggggccgacgcggggcggcgggagcgctgagcgctgcgcggccgccgcttt

SEQ ID NO: 39828 - DNA, 407 bp, Mus musculus
  source 1..407: mol_type = other DNA
tctctctctctctctctctctctctcataagagagagagagttgttgttgttttatatatatatatatatatatatatatatatcaacaacaaacaaaaaaacaaaaacaaaacttaagtatttttgattctctgacagattttaagagctcaaagccagtctgaagccagcagacatcagccagctggtgagaccctgtcgctccaggcagatgcagtctaagcgggcgggggtgagccccactccgccccactgggtctaggcagcaggtgcttgcaagcaccgcctacagtcagcttccagtgagtgtttgcttgtttaaacgctttgcagaattcagtaaccccacagtcttgggacaaccaactaagctgagtcagtgtccaaagcccgaggggcgtggcct

SEQ ID NO: 39829 - DNA, 271 bp, Mus musculus
  source 1..271: mol_type = other DNA
tttcctgagggcaaatacgttgtgacagtgacaaacggactttgcccagtgttccttgtgaacacctgtcattctaagtgcaggaggtgggtcagaaattcagacatcatgatttccttgatgtcaaagttcacttttcccaaaattttatgacacgtctcatgagttccacattgttgtgtctgtcataatctaatttaacccagtctacaaaagagagagaacaaaaactttcaacttgtctttaatctatagatggccaggacatgtc

SEQ ID NO: 39830 - DNA, 427 bp, Mus musculus
  source 1..427: mol_type = other DNA
ttccagacataatatttgcacactttacaacttatgcatgtatataacgaccaaatagagtattattcagtcaataatggataagtggcaggtgctgttttaaaaccacgaccttagacggagtctggctggacttgctctcagctatacaggaattctgtctgagacccaaagaggtgtggctcagaatcatgaaagttagcagattctgatatctgctttaaagtaaaccttttgctgggcactctgcagaagtaatcttaaactgggcctgctgcagccacaagttcatgttctagttgtggcccaggactgtgccaaaggtcctgtgcacgtgcactatggtgccctcctgatcacgcaccaccgtcctgctcagcctggtgtgggcgcgactggccaatggcagtgctctgtaggcgggccg

SEQ ID NO: 39831 - DNA, 364 bp, Mus musculus
  source 1..364: mol_type = other DNA
gagcaaaaatatttttaaatgcccttcttaaagatgctcagctgtcttaactctaagatttaaaagtcctaaaattaaaagatacaactctatatgttattatttttaaaaactcctttactgcaaatgtaaatctattttaatgagaatgggttaggggaaaacatttgtcttaatatgaaaaaaatatatatcctcagctgtctgtaattctttacagattaaatcacaatatgaagtttaactctgagctcagtagaatccaggatcccactggcttgtggtactttgaaaatcaccaggggctgtagaatgaaacttctgtacattttaatctgaataattcttcaggattgaaaattat

SEQ ID NO: 39832 - DNA, 249 bp, Mus musculus
  source 1..249: mol_type = other DNA
tctgagttcagagctcagaattgcgaatgctaaattgtctttaagtctcagagtcctcagtctgggtgagtgacttccagccaccctcactcacatgtgtttagtaactgcaagtttgcaagactcgcgctctgcacgcccagctagcctagcgaacgtgtcacacctggaagagtcacccgcagctgcccccgcgctagctgggaggcggctccaaggtgacgcgaccgcctcctcccctttaaggcg

SEQ ID NO: 39833 - DNA, 529 bp, Mus musculus
  source 1..529: mol_type = other DNA
ccagtctcaggaaactgactccctcgtcgagaaaatctaatgcaactactctagtaagatgcaatcaagagttgcatccaagtgtcattcatatcactcagggatgagccatggctcaagtcaggcgctgagctgtacaatgtacaatgccgacggccccggggcaggtgctctgcaacccgggcctgggttaagtgagagaatccggtttcaccgtggtcagcggggtgatcagatctgtcaagagctctgtgggtcaggggggctctcgcctccggaagaggtggccgcgcaggtgggtgggacaggcgccgggtctgcccagccacgcgcagcgcctactgccctcatggcagcacggcggagcgcaagtgtccgcagcgccttggggacctcaggaccccgtgcccccgctgtccgcgcttaccttggcggctgcatgagcccctccagcccgcggggggttggcgctggcggggctgcgcgcgcccctgggtgaggtgggaggggcccggctggcgctggtccc

SEQ ID NO: 39834 - DNA, 568 bp, Mus musculus
  source 1..568: mol_type = other DNA
actagtctaattcatttggccaatatttcattaaagttctcatcctatcaaaattccagcgctattggcagcgctaactgttcagtgataatttgagtgtgagctgtgtgtcccggctgacttcacaccccagctagggtttcagacctatacgtggtgttggcggaggttacctctgagctgaagacagtctgtttactccagactgcgtgtattcgcgcactgtgcatgcaatatacatattatttattttttccaataagattctaaataggagtaaaatccctatagaacaaaggtgactttcggcagatgtcaatatttatccaggctcccaggttgaaaacgtggactccaagccacctggctcagggctgctcgaaccctgggatcgcgagcccgcagggagagtgtgcgctttctgcaggctcaccccctacgtcctcacacacccactagcgcggatcagcaagggtgggaccgcggcggggcggggcctttggagcccagaccccacccctccccctcccgcgctcgcccccccgcccgctcccggggtgcccggccc

SEQ ID NO: 39835 - DNA, 424 bp, Mus musculus
  source 1..424: mol_type = other DNA
gttatcctctgtgggcacgacacttgaaattctcgtcgccagattgagaggaaagacagttttctctaagggtatatcccctgataaactaacccaagaatatttatgtttgggcaacacagattggtcttgagttaaatatgattaaaacaagggatgtgacaccctctactggcctgtgtcagcacctgcacacatgtgcacatagtcacaaatatgtacatatgcatacacacacacacatatatacataaacacacacatatatacataaacacatatatacatacatatgcgtgtgtgtgtatatgtatatatatatatatatatatatataaacatatgtttgtaattgagtctcccctcaaggcagcacccatccctagcagcgatgctgggggtaaatccccgctgccactgggcc

SEQ ID NO: 39836 - DNA, 389 bp, Mus musculus
  source 1..389: mol_type = other DNA
aggagacattttttttttctcctggaaaaataagagaccgaaaacgggctcgaccctgcgctcccccgagcgatctcagttgcaacaggaccgagttcttgcaaagcatggaggggaccccagcagagtcctggcccaggctgacaactccggagaaggcttttcagtcttctgcaccggcgagctctctgagatcctcctgtcctgagcgccttaggccacctgggtggagcccaggaccggccaggcactcgcgggcccctggtttctccaggtcccttggctacgggcccggccgcctgggccgccctccctcccgcctggatgaaacccgagctcgggagggcggggcgcgcggcggcggggcgcggggccgctgggaacggggt

SEQ ID NO: 39837 - DNA, 506 bp, Mus musculus
  source 1..506: mol_type = other DNA
gtgtacttagaattcgatttcaaacatgagtgaaagggttctgtaatttcttgaattcgaagttattaattatgcccaaatatatgtaagaagtaaatatgtttgattactgcagttgaacactagggaggcgctcttgagttgtaaaaaattaccccttccttccagttgaggtggaaaattcccccttaatctttagatgtttttaggcaccataaagaaggcaagagttgatttaatttatatttacaagccattaattattttaaagattagttcttaaactgagctttagagtctcttgaaattatctttatttcaaaatggcttgataaaactccacttcctgtccagggaggaagttattttagctcaaggactgaaatatttagcagatctttagacaaaaggaacaaattacatttctctctggcttaaaaagcttgagccagagggggttaagaagcccttccccctccctctgatggagtggtctggaggggcag

SEQ ID NO: 39838 - DNA, 366 bp, Mus musculus
  source 1..366: mol_type = other DNA
gagtctctggcaggagaccccctccaaaccttgagccaaaggctttttcaaaaattcaatctccaaatgaggccttacgaagccactgtctttttatgtgtgctatttaaaaagaaaggcctctgtctctcagatgacctgtgcagtgtgcaggccttgatacagggtagatgggctccccaccccagtgcacgcagcccaccctgccaggctgccaagatctgtcagtggccagctccccagaggtggggcactctctgcaggcagcaggtactcagctgtctgcctggaaagacttttgataagtaatgggaattgtcattaagtggactgagcattttgctgagaattttcacaacattccaa

SEQ ID NO: 39839 - DNA, 406 bp, Mus musculus
  source 1..406: mol_type = other DNA
ctctgttggaaattctcaccgttagaacttgggacagatcagctcccatgttagtttgatcttaaacttaacaagatacctgttatggaagcttggttatgtaactatagacaatgaatgcatcgttatatttcttgttctgtatgtttagatatttactgatcattggggagcaccttccagatcatccaaggttctgtaacggttgctccagacaataaattactccttggagtttgaaatttattgtccctgcgtcattctgcctgcccggagcagagtgagccaagcagttaggattcctccatggggtcttaggtcctgatcgggttgggctacccaggggcggagcgcagcggggacccagccgaggtctgccccgcccacgcggggccgaagcccgtcg

SEQ ID NO: 39840 - DNA, 359 bp, Mus musculus
  source 1..359: mol_type = other DNA
gaaggcttttgatcatgataggactccaggggtttattgattacagtaccagccacaatgtgggtactatgcctgctcttagcaggtactacggggatccctgggttctagccatgaccgtggtgttgtgcaggctgagcacctcgcccaccaattgccatgaacatcgctggtgaagttggcccctcttgaagcgtagagaggataccgcctcctcgcagcgcgccggagaccgtccccaaggtgagcgacgctaggcgtttgccaagcagccccgggtgctccggatggccggagcccagccttcctaggccgggagtggcaagctccctgatgcgcctggagcccacggagagaga

SEQ ID NO: 39841 - DNA, 384 bp, Mus musculus
  source 1..384: mol_type = other DNA
ggggtggggacacagcaggcttgtggctcatcccttcctgtccaaccctggagaactaaacaaggccctctgctggagactccctgaagctctaacttcccttctcatggcagctcctacggtaccgcactagaagtagggtgcctggaggtgccctgggccccacaatgcctcctagtggcaccaggactcctggatttagggggtagttagaccccgccggccttgaccatcagcccttagtgccccaagcaggtcccctcgtgcctcccagggacgcacccgcagccagtagcggcgcagcccggggctcaaggcggcgatcaggccccggcccgggcttggggcgctaggaggcggcggcagcagcgggcgacgcgagcg

SEQ ID NO: 39842 - DNA, 417 bp, Mus musculus
  source 1..417: mol_type = other DNA
cgtttgcaggtctagggagttagaagcaaagagctttccgcagtgaacacagtgcctggactaggctctggctgatccttctaaatagactcaggagccccgggagggctggggtgctgcagggtgctgggagcgcgctgcacagaggctctgcacagcggaggcaggtgtgccctagggagagcctgcctcggttgggattaccaatgagctgccgcccagacttacggtgttcggctgctgtgcggggctcccaggcctggcatgctgagacccgtgctgggacctctgggtgcgcaccgaaaaaggagcacttgctgctgccccgggctgcagagaacagattaaatacggctttttttttctggatggatttttagcgcaaggaaaagaacatgatttagggaggagcaaggc

SEQ ID NO: 39843 - DNA, 236 bp, Mus musculus
  source 1..236: mol_type = other DNA
ggtgtttgtcccccaccgggtcaagtatttgctgactcagggaagacgcagattgtgcctcactcacaagttacctttaaacggagcctgtttgcatctgcacccgacagatgagaaatctaccactggtctgctgcggagggaacagcagcgccttgctcctccctaaatcatgttcttttccttgcgctaaaaatccatccagaaaaaaaaagccgtatttaatctgttctctg

SEQ ID NO: 39844 - DNA, 458 bp, Mus musculus
  source 1..458: mol_type = other DNA
acttaaaggaaactgtcccccaatggggtatttatctgggtacagccacataatattttcatattaatatgttttgatcacctaaataaaaatgcaaggcagtactcgcagagaataacatgtcaaaatagtttggcattataggcatgttttcccttaataacacattacaatatgtaactatcaaaaagaagtttctttttgtaccaattaattttctccgaagcaactagatggtttctgaagtccatagcaactcaaaggcaatgattttgtggtgatcgaatagctcaaagtcactgtgactccaccttggactcttaagaagactctattgagtcttagcgtggtgggtgggcatttccccagcagctgctgccagccacccgcctggcgaagccttcctattgggctatctaattgccaatatgcaccgcccaccccgggccgcaggcggc

SEQ ID NO: 39845 - DNA, 236 bp, Mus musculus
  source 1..236: mol_type = other DNA
cttcatcagattgcctgtaggtaagtcagtcccttctcacagttagaaaaacactacagaagactaggcccctgtactgttgtttaattccttctagaaggaacggaaaatcttcccagtttcagttccaaaggagttaagaatccgaggacacccccagtccaagaccgagcttggggacagagcttggagtggcgccgggaacaaacctaatagaataagacgtttgcaggtct

SEQ ID NO: 39846 - DNA, 349 bp, Mus musculus
  source 1..349: mol_type = other DNA
actctactgtgaactcaggagttcacaatgaaaatggattgagcaatctctgagtgtttttcataatgaagttattgagagttcattgcgcagaacaaagtgatcaaggagcgctccagttcttgaacgtgcattcattgtctgtaaagactgtaatggtaattcagttttagctcccaagtttgacatttgttaaacttaaattttctttttttttctatgtgaataacatggacacgtttacagggattcaggactcacagtctttgttattggttagttacataatataaacaaatactgtatttgcctatgtgtagtataaatggtcttttctagtctttttaca

SEQ ID NO: 39847 - DNA, 308 bp, Mus musculus
  source 1..308: mol_type = other DNA
gctgatgcttcaccagctactgcttttcctggacaaaggtgtcactgacttacaggaagtcatagagacagggctctcagtgaaagtggcacaggcagaccgccactaggatagtggaggccgtcatcaggcaagtcagggcacacagagagtgcatgcgctttcctgcctggggagaccccgctgtggtgattattctacctgagttataagacttaacagcttaagaatcatgtctctagttgccaagttaatagtcactgctgtcagaaaacacgtgtcatcttaggttggacagattttactac

SEQ ID NO: 39848 - DNA, 365 bp, Mus musculus
  source 1..365: mol_type = other DNA
actgaaacaactgctgttcaagtttaggtgttaacactcctgctgaggcttcacctgcattgagttctgaagaagaccagagctccccggtgcttaaggttttggacaagaacctgatacttccatagcaggctcaggcgctgctctgttctacagctgaggctggcacgccttctgctgaggctacacatcagccgctagcctgcctgaaagcacaatggtgcagccaagcacacttctgacactgtgaaaaatacccagaaatctgtgggggtttgtcatctctgtgtttcagatgcaaagaatcacgtgcttgacagcagtttctctctggcaagcagtccagagagtgaatcagtttctct

SEQ ID NO: 39849 - DNA, 266 bp, Mus musculus
  source 1..266: mol_type = other DNA
tctcctgaatgccaaggctgtagtacagactagtagtgtttagtataacacggaaaaggaagccttgtttgggactggctagctagcggcagccagctagtaagtcaaaaccagcccactctagaaaatacctccagattttttttccttttaaaaaaaaaaaaaaaaacctttgtcttcgtaccattatgaaaagatctgtgcttctctttcagtcaagatctgcacagcagcgatcttactgcagactgcttttattatgaatt

SEQ ID NO: 39850 - DNA, 383 bp, Mus musculus
  source 1..383: mol_type = other DNA
aaggacttttaaaccagttcctagtatgactcaaaagttctctgactaaaaaggactttctcgcctaccctaccttctaaaaggataggaccaagtttcttgcatagcaccctatttttaaatgtcattggattcttattccacagtacagttaaatgttagcaatagttaaatatagacatattaaatttaagaataataaccaattaccattttaccattgtcaacttttctaaaatatcttcttataaaacattgctcaggcggatttctgagttcgaggccagcctggtctacaaaaaacaaacaaaaaaaccaacattgcttttttatgcagttaggctacaatgcaaatgttaagactgtctcaaggaagcaggcag

SEQ ID NO: 39851 - DNA, 393 bp, Mus musculus
  source 1..393: mol_type = other DNA
acattgtctttaatctaagaactgaccttagatgacatataaacccacatcagccctggttggggtcgtgttcccttggcttattttcaataatgatgcaggccatgggactcctggaatgcaagtaaaccaagatttggttttagggtttctctgtgtagccctggctgtcctggaactcactttgtagaccaggctggcctcgaactcagaaatctgcctgcccgccactactaaaccagggttttcaaaaatatatgaatcctttgttcagcctggtctataaagtgagttccaggacagccagggctatacagagaaagcccctcgctggaccagaggctggggcagcccaccccttcctccaaatgcagctgtagtatgggttcgtcg

SEQ ID NO: 39852 - DNA, 474 bp, Mus musculus
  source 1..474: mol_type = other DNA
ttagctcatttacattgcaccttctagcggcagcctggaaaaaggacctggaagaagctctgaattccaaggtattgacagttggactctcagacgttatatccggagacagccattgttgggctaccccggcactctaataaattccattgttgtatgtatgtatgtatgtatgtatgtatgtatagatatagatttactctatcagttttgtaccgctgagagttctaatagtgaaccttgaaatctgggaattcccagtatagacagggattcgtgtgctggtctttaaaaagatcaacccttccttaagagaagctctagaacccagaacagaaaggcaatggcctgtccctttaagaatgccccgccttccgcggcaccgatggcctggacgaccgtccctttcactgtattacgggtcagtcgacccatccgtcacagaggctgctgcgcttcgggccgcgaggcggg

SEQ ID NO: 39853 - DNA, 412 bp, Mus musculus
  source 1..412: mol_type = other DNA
tttcccctcggctgcagcgagcgggcgcgggcgtggagcgggcgggcagcggcgcggctgcgggtggcggtaccggcgagagccgagggaggggagggagggggagattccgctctcctgcctctcccagcccgggcggggggcgggggggggggaggacccgtgcgtttcgtaaggctcggagcatgcaggcgcgtagcgagccattcgccgcgactgctgcagctcttctcggagtcggagagcgcgcctcgtttccagagcttctggaccccgcaagccggcgagcgccgagccggccaccatgcccggcagaccgcgccactaggcgctccccgcggctcccacccggtggcggcggcggccgcgatggtttccgacgctgaaggttcggcgtttcaaaggcagaggc

SEQ ID NO: 39854 - DNA, 455 bp, Mus musculus
  source 1..455: mol_type = other DNA
cagagctgacactcagttcaagtatgatctagtctttttgatctctgctgctgtgaagaagggctttcagcaggaagtgatttcctcttctgtaaaacaaaggtagttataataaaacttacctctgttcgtaaaaaaatgttcagggggacctcagagagccctgggcttgagccacagttgtgcaagcactcttgggtctcctgttacaactaggaagtctgaccaggtcagctgggaatgcttgtcaaccatccagggttgaatgactcatgagggtgccctccagggctcacctaatccccacagtgggagttagggggtatcccctgtgccgaaggctaaggttgcacaggggtaacttcaccctctgcagcatgtgtatctgaggcctctgcagctcagtctcctgcaaggcaggcagcgaggtcatcttggcaggcatcatctctcta

SEQ ID NO: 39855 - DNA, 302 bp, Mus musculus
  source 1..302: mol_type = other DNA
tatatacattggacacttagctaacagttgctaattgaacagctaccgaagcgacttggagccgctttacctggtcattccatgtccagcccaggaccgcaggagccacgacccggagttagctcgagccagcaccatgagcctctgtgggggtgctcacagacaggaaatcacctgataaatagtcctgtaagtattttttcttcaaatttaaagctctataaaaccatttatgtagaacccgcccctcgccggcccgcgttgcctcatgggaacctggggttggctgagggctctgccgg

SEQ ID NO: 39856 - DNA, 470 bp, Mus musculus
  source 1..470: mol_type = other DNA
aacacttgggttttttgtctttcacagaaattgctccctgaggtaaagcaaacgcccccggatccctacagtattgagtaacttcatcttctccatggaaatcaagacctccttgatactgttgctaggaagcgccatctcttcctgcaatggagtgagcgccttggtgatcagcggtggccgctgcagacacaaggcgccgcgccatggagaccggctgcttgaggacgcagcctctcaagctgccgccagcctctagccagcccgggcgcaggtaccgcggcgcccggcagagccctcagccaaccccaggttcccatgaggcaacgcgggccggcgaggggcgggttctacataaatggttttatagagctttaaatttgaagaaaaaatacttacaggactatttatcaggtgatttcctgtctgtgagcacccccacagaggctcatggtgctggctcgagctaa

SEQ ID NO: 39857 - DNA, 375 bp, Mus musculus
  source 1..375: mol_type = other DNA
ttctctggagagggttgggagagagagcaaggctcaacctagcctctaattctatatcctatgtctcagaagagctggggataactgatggaatatttactgagattctataagatgtcaaacaatccctgttctcagtttataatctaccaaaggccagaagccttagatattttgggtttggtttcctgccaaagcatcaaaaataaaccgcgcgcgcgcgcatgacatggtgcatgtataatccatcttccaccagtatgcaagaagcaggtgaaaacttaactcctactcatagtagttatgaacgtgccacgccagggtgcgctgcgccgctccttagctgcatgcttctcgctgcgcagcgcttccggt

SEQ ID NO: 39858 - DNA, 88 bp, Mus musculus
  source 1..88: mol_type = other DNA
tgcctccggagtgctgaagaagcaaacctgattttttttcccccaagcctggaggggctgcagttcccgaaaccggagggcttgtccg

SEQ ID NO: 39859 - DNA, 316 bp, Mus musculus
  source 1..316: mol_type = other DNA
ggccgccgcagagctgtgctccagcccaggctagggaagagtaattatccttcagctgccgcagaaatacaattagggcctcttggagctgccagcccgtgcaattagaggctggcccaggcagcgggggcctcgcctaccttgttcatcttgggccctggggaccctgaaggaagaagcagcctgggacgggcactacctggcttgctttttaggcgacgaagaagatatagccacctgcttcaagaaaatcatttctccccaattgctggccttcccggaaggtggctagcgtgaccacggtcgggccaacaac

SEQ ID NO: 39860 - DNA, 347 bp, Mus musculus
  source 1..347: mol_type = other DNA
tgtacatggtctgcaggctagcatgggctgtcatgtggacccacagaactgttctgacaggtttctgaggaactctttgtgagaactttgagctatacacaagaaaccctatagtccagcttgagctgcgggccagactgtcattttggacaaagacagtgggcctgcccttgacctaataataggtatcactctaaggattctaagtagaacccaggagcagcctggcttgaggccctgagtctaaggactagacagttaatggtaccagcatctcaagcaaacctcccagggtagcacactgacagcaggtgggaccttccccaggctccaccggagggacagcc

SEQ ID NO: 39861 - DNA, 358 bp, Mus musculus
  source 1..358: mol_type = other DNA
gtacatggtctgcaggctagcatgggctgtcatgtggacccacagaactgttctgacaggtttctgaggaactctttgtgagaactttgagctatacacaagaaaccctatagtccagcttgagctgcgggccagactgtcattttggacaaagacagtgggcctgcccttgacctaataataggtatcactctaaggattctaagtagaacccaggagcagcctggcttgaggccctgagtctaaggactagacagttaatggtaccagcatctcaagcaaacctcccagggtagcacactgacagcaggtgggaccttccccaggctccaccggagggacagcctgacgcggccac

SEQ ID NO: 39862 - DNA, 343 bp, Mus musculus
  source 1..343: mol_type = other DNA
actgtcattttggacaaagacagtgggcctgcccttgacctaataataggtatcactctaaggattctaagtagaacccaggagcagcctggcttgaggccctgagtctaaggactagacagttaatggtaccagcatctcaagcaaacctcccagggtagcacactgacagcaggtgggaccttccccaggctccaccggagggacagcctgacgcggccaccgttagagatgagtcacttcccaaagtgacatagctgcccaaactggccagcaagctctgggacctatagcacacagaagctgaaggctggcaagaggccagcttctgttgccaggtggc

SEQ ID NO: 39863 - DNA, 535 bp, Mus musculus
  source 1..535: mol_type = other DNA
tagatttttctttttccgggaaacaaatttattaaagtgttctatgaagattctttcaaatcgcattcccagagtattttctgggtatcagctgcaaatcgcatcccgataccccctgacagcaggagccgggtgccttcggcactctgcgggcgcagccctccggggccgcctggactgcggagctgccgaccgcaatgcagacgcgggccctccagtgctgcccgcacagctttcctccgcggccccaggagctgcggggtccgcgctcctctcgtgccctgcgcgcccggagccttccccagctgagcgcggtccccagcccgggtcctgcgcgctccggcctccccccgcagattggccccgggggtggggtttccctgtgcgctcgcccccaccccctccccgcggtgccagaggggctcacagctgaggacgcgtgcggaacgggccggctagcatctgacgcaggtgcactgcggccaccgcccgaggggacttgcggagaagacgccggcgggagaaggggttcgca

SEQ ID NO: 39864 - DNA, 393 bp, Mus musculus
  source 1..393: mol_type = other DNA
tctccactcatccattcagtgaggagatgttaagtaagtgttgcttctaagctttaagaaagtcatgttcttaagaaaggagaagcacctcttgtctttctcataagttatttccagtgaactggcaaatccactctcaggaaaaaaaaaaggttttcacctcatgggtgttttgctttatactgactgtggaaagccagtctgagttgagtgtagcactgcctcggtttccctgggacgcctgggaggccagttcaactgtattgctcacccctaagacctcgggctgaaggacatctatctatctatctatctatctatctatctatctatctatctatctaactatctattaagttagccatgatcactactttgtgaagctcacaaagt

SEQ ID NO: 39865 - DNA, 355 bp, Mus musculus
  source 1..355: mol_type = other DNA
gcctggctcagccacagccacagaggcgtgttttggtttgttcctagctgggacacacacacacacacacagggagggagtcagggctctcccaacaactaggccatgtaggtcaggacctggtctttttggacaggaaagaaaacaagggctctgttagaccccccacccccaatctcctgggggtggtctatcatccgaagcaggaatacctcctgatctatctagggcagtcatagcccaccgcagagtgctgaaggggcttccctttttagaagcctgggtattttaatgggacctcgctggaccagccctaacagcagctactcccccggggccaggcctttgggactgg

SEQ ID NO: 39866 - DNA, 519 bp, Mus musculus
  source 1..519: mol_type = other DNA
cacagtggccaaaatcctaaaatatttctaatttgggacttttacacaagtttaagcattactgctaggtcttaaggcgttgatatgtgacattttgaaagacattaccaaataaagacttatactctgtccaaggtccacagcctctgctgttaacagcctaggaaacactgtactcattgtagcctgaatttgctgttctctgattacagataagaattagcatttaaactctaaacagttatttttaattaactaaacaacaaataatcaatatagcccagactagtctggaactcgcttcctaacagttgggagtactccccctgtccagtctattcaggaagccggggcctggcctcaggctgaggactggcagcggcatcagggcgtggctcgccgggaggctgaggcactggaccccccactggtctcggagctccgcccagagtccgcccggggctgtacggggcggagcccttgggccagtgggcggagctgaggcgcctgatttattcc

SEQ ID NO: 39867 - DNA, 263 bp, Mus musculus
  source 1..263: mol_type = other DNA
tccatcaggcacgtgccgttgcgaacagagcctcaacccagtctaggtgaatagctagtcttgataaacgcccgtgagtcagttgacttcaaaggtcactctgtaacaggtaggtcaaaggctgctgcctcctactaagttaggactccgcacaccagtgctgagaaccccacaggcctccaccttgaggagcagtcctactgaccaatgggcccaatggtggcggcagttgcctgggcggggccggtagcggcgggagctgc

SEQ ID NO: 39868 - DNA, 327 bp, Mus musculus
  source 1..327: mol_type = other DNA
atgcatgtattcagaccttctggaagggaaagcctcaggagccaggactaccatgacttgagccaaggctgaactagagctccagagccgtggactccgtggagcgtgtgtggctctcttgacccactctgaaaatagagatgtgggcccacggtcccatacacacctggtacctccaggtgctgttaaagtctccggggatttaagtggcttgttcattgttctgaactgctcatgagattacgggaagaacaccaagcgccctgtgggtatgtgtgaaacatatccagagtgggtcatgcctctgccatgagatgggctccgctc

SEQ ID NO: 39869 - DNA, 409 bp, Mus musculus
  source 1..409: mol_type = other DNA
tgaatttaattacagacagaggcccccacagagatccagagtctgggttgggtatcagaactcaatacttcccagggattgggcagctaagcccctgaagtgggtactttggggactgagtcatgtcgtggtgacagggagatctgctgaggccccaccccatccccgcggagggtcagggtacctagcaaccgctccatttccctctgccacatgggacagtggaccataggcctgggttgcacctgcctcccagtttgagaagcgagatggcagggaaatgagacggggctggcccagatcccagtgaagtggcttcgcaggagctcacaaagcagggctttgatggtagccccgcaggccgggcctctccccctcctgtgagcctgactgaatggggtgggcctga

SEQ ID NO: 39870 - DNA, 364 bp, Mus musculus
  source 1..364: mol_type = other DNA
aaggtattatcctttggtgttggctggatttcagagaacgacctgtgcacatgagctcaacagatgaatttaattacagacagaggcccccacagagatccagagtctgggttgggtatcagaactcaatacttcccagggattgggcagctaagcccctgaagtgggtactttggggactgagtcatgtcgtggtgacagggagatctgctgaggccccaccccatccccgcggagggtcagggtacctagcaaccgctccatttccctctgccacatgggacagtggaccataggcctgggttgcacctgcctcccagtttgagaagcgagatggcagggaaatgagacggggctggcccag

SEQ ID NO: 39871 - DNA, 424 bp, Mus musculus
  source 1..424: mol_type = other DNA
ccccagtactgggctgctgcatcagcagagccttggagccctcagttgtccagaactgggtggtacagagctctgctgtagactacttaggagccattgatgggcgcttctgcatcagcatccacgacgaggttcgctacctggtgcgtgaggaggaccgctaccgtgccgccctggcactgcagatcacgggtcttagggctcactgagctcactgagaactgactgtttatttttaaagttgatagaagtcctaaaaaggacctagtcctcgatgtcctagaacactatatagaccaggctggccttgaacttggagatccacctgaattcaccaccacttccccaagtggtgggactaaataaaggtgtgtgccaccacacctgttgaattgtatttatttatactaaaaacctagctcat

SEQ ID NO: 39872 - DNA, 421 bp, Mus musculus
  source 1..421: mol_type = other DNA
aattaataaataaaataaattaaaaacaggtactatgttattcatgtatcattcatacaaacaatttaataagtgttattagatgcacacatggaatgcttatttaatctgtatagattgttaacagatttacccatctgtttctttagtgaagtaaaggattcccctcagagaagtgagaggaatcctttgcttaagcaccttcacatgcttagctagccaggagcttgttgattctgggcactgtgcacaagctgcaccctcaatctaaagcgaatgtattgaacattcactcactcactcactcactcactcactcactcactcactcactcactcactcactcactcactcactcatgcgggcgcgcgcgaggtgcttgagcctcccgcgaatttgggccatcatctccgcaaagat

SEQ ID NO: 39873 - DNA, 430 bp, Mus musculus
  source 1..430: mol_type = other DNA
tgaatccctgggtcccagtcagatctctgaagcgggatgcttcagctgtgcccggtgggcgcgaccaatggagactccatcgaggcttagcctttgcggtccataggtgacaaatctagacttcggacgcgaccgctgtcaccgttcaagaattaagtttagactagaagttggtcataaccatcaatttcgctttatttccaaagggaatcttgggattcttctgatccgaagtcagacgccttatccattaggccacgcggccgccagcgagaaggtgcctttacttagcttaaagcgtgtagccgccttcaggctcagtagcggaggacctcacccggaagtccctctgcacccccgcgggcgggcggctccattggcggcgctcttattggacgctcgggggagtctcccgcctgcctctgggtag

SEQ ID NO: 39874 - DNA, 448 bp, Mus musculus
  source 1..448: mol_type = other DNA
gtctggctcaggatgaatgagagggacctcccctgctggtcaggcactcgggtctgccgaattttcaggggctctgactctgagtcccagaaccctgccgagcgcgatgcagccgggctctggagcctgacccggggaggccggattcagcagggccggtttgcggcccgtctcggaggagcgtgatccaggttggaacgcaaccgggttccctcagccaacacttgtgtgtgtgagcatcctggatccctgggcttggagctgcctgtgaggcttccagcccccaccaggtggttggtggcttgggcgcgggcaggctgggccgggtcgcagggcagggcgcccctcgtctcctgcctccgcctctcggttccgcactggtccgagtgaagccagggggggcgggggggagccgcgctgacgtcactgcgggccgtgcccgcccgag

SEQ ID NO: 39875 - DNA, 253 bp, Mus musculus
  source 1..253: mol_type = other DNA
cacttagggattcttaggtcttgaactctgcagactccactatgccagcatggggattcattcatctcctttaaagttcatgaactgaaaaaggaaaggaaaccaatgagcatcctctctcccagttcacccgaacgggacgcgcagaagttggggcggtactgggctcgggaggccccgcgggactctcgccggttgggtagagcccgaggcgcgtgggcggcaccatggtcagctgttccgcgtccgcccc

SEQ ID NO: 39876 - DNA, 261 bp, Mus musculus
  source 1..261: mol_type = other DNA
cagtttgtaaactctgcagacgtctgattaggtatctttatattacattttcctactgaaatgttcctttcgtcttttacagaaaaaaaaaattaagcctaaaagacttaagagtagtctaaagtgaacttgactcaagcatcctaacacacactcacgtacgcgcgcgcgtgtacagacacacacacacttaaattttaaaagtgcttacgtaacttacgttcagcctgcagccatgggtaccagctcctccaatagctg

SEQ ID NO: 39877 - DNA, 450 bp, Mus musculus
  source 1..450: mol_type = other DNA
gcaatatatatgggatacattgctgcggtggctgccaggcacctaagacgttgctgggaggtgtgtgcatccaagcaagcaggcctaaggcttctgagggcagaagaggcgctcccctgtcctcgcggcgcagaagccgtgaacgccgaggaatggaagcccgtgataggccgatcccccgactgacgtcacttccccgcggggcgattagcctgcgagaggagggatggtccagtgcgctgggggccgccagggcgcccgaggctgcccaagcgcagagcgccggttacccgagtgcgccccgggacggcgtcgaagcgggccgcgcacgccctctggctctccgcgtgcgcccggggctgcgggagcggagtccgctcaggcccccgcgccgggtcggcggcggcacgtggggcccacagcgcggcagcggtgccggcgaatgggagg

SEQ ID NO: 39878 - DNA, 414 bp, Mus musculus
  source 1..414: mol_type = other DNA
acatgtaactttgagtttagaagtttaatggcacacagtggcttctttatggaaagcaatttctgtccattgaaagccagaaatattctggaacttctctgggctctgacaaatgagtccttcctctgagggtgagcccaggggacaccctgggtcagacagctaaggcaatgggccggcccagcttgcttccacagcgctgtcgctgctttctcggtgttacaggcaaggagctggtggcttacccataagacagctctctgagagaaggcttaaccttgctggcaaggtgaagaaaagactaagctctacctaacactcattgcctacattaatttttcttgagcaatttaaaaaaaccatcaattttgagaccaggaaacttcttgtgttgggaccccaaggaacaatctc

SEQ ID NO: 39879 - DNA, 386 bp, Mus musculus
  source 1..386: mol_type = other DNA
aagccatatgagtcatctctcacattactaataatgttttaataatgcttatcactaatagttattgctatatagcctaggctagcctagaactcatgatcctagctacatgtttttattaatgttaatattatcaagaaccttggtagtccttcccaaagttaaggaaatgacttttgtcactgaagtgctgcttggcttaaggtccggaggcagagctcaaggtgctgcgctcgccctccaccgcgcacagccagtcccgcactttgcgggcggcagcgccaggcagcccgggctcggcctgaagctctcgcaggaggctgtaggcggcgctggtgcgggcccggcagcgcgcgcactcggcccccaggcccgcagcgactgcc

SEQ ID NO: 39880 - DNA, 344 bp, Mus musculus
  source 1..344: mol_type = other DNA
caggtcagaaagcactctggcatggagctccacccccagcccctagcacaacagccagttttctttaaccctgggggtttacagaggatgagagtcatccttgctagcaaacaagaaaggatggaataatgtttgaatattgttccatagaaacttctacatgtaactttgagtttagaagtttaatggcacacagtggcttctttatggaaagcaatttctgtccattgaaagccagaaatattctggaacttctctgggctctgacaaatgagtccttcctctgagggtgagcccaggggacaccctgggtcagacagctaaggcaatgggccggcccagct

SEQ ID NO: 39881 - DNA, 719 bp, Mus musculus
  source 1..719: mol_type = other DNA
agtctcaccattaggacttttcttacttgtatgcttagttaattttagaggttgaccacttaaacatctggaaaagaagtgttgttaaattaaactcctatgtttcacattttaaatgatcaccgaggggcattcaaatttctcttttaaaaaaaaatgaagtaggattagttttaaacacgcattggtgatttcgaaagtacactatgtacttgggaggtattgttcaaacactttgtccgctgtacagtttacagtttacaaagcagctttttaacagcttgataagataaatctgtctttccgtttccttagctacaaaagaagctccaagtttctctggaaaagaaatctctaggaaagatgtcgagcggctgggaactttccctctcctggggaaatgtcacctcccgagacaccgaggtggctgacacgcacagtccctccgggttcacagggaggaggggctcggctcgcaactcctcagtgggagctggccgcggcctcgtgcctcgatttaccgggggggacgggggcggaggccgacagcacctgactcacctgaaaagtcggtcccggatgaaggcgtccatggctcccacccacagcgcgcccgctccctcgtgggtcccctgggacgtcgccggtcccgggggacagcgggaacagattgggtgggacttcgtctctccgcccacacgggggtgggcacaccttcg

SEQ ID NO: 39882 - DNA, 345 bp, Mus musculus
  source 1..345: mol_type = other DNA
gctgtgccaggtccctgcagggatcagtgagcgtagctcagctggctagagaggcgtcactgaggggtcctggcccaaagcacctctggggcatcccctaagaaggttgacccaagccatcagagtcattgctggaataaacgatcagcggtgcaatgtcactgatggatttcctcaggaatcatttggtttttcaataatcctaatagaaaatagctctgttgcctgcatcataaggcctgacactgggaaaggacctgcacctgatggggttcatgggtacctggggacacctggacgcctgagtcgaaggtgtgcccacccccgtgtgggcggagagacgaa

SEQ ID NO: 39883 - DNA, 228 bp, Mus musculus
  source 1..228: mol_type = other DNA
ccaggacagagagccgagggcggtgctgtctgtcatttacttctttcatttcgccttctttctgaagactgtcccaaggggcccctggcatctgttctgcagtcgtaaccacacactgtgttggttacagctctccagagcctgggcagagccttcgcctgagctctggttaatatttgtccgacccaaaggcagtggggctccaccccctgtgaggatataagctgg

SEQ ID NO: 39884 - DNA, 363 bp, Mus musculus
  source 1..363: mol_type = other DNA
cataaactcctggatgcaatcctttatttgctagaggcttctaataactttgacttcttgaagacagcctaggtgtcaagagttagccagagcttggcctggagaggctgaagtcaaggtcagtctgggctacagtgagttcaaggtcagcctggatgattcagtgagccctttcctttaaaaagaaataaaagaaaaaagctgagcagttctgtggaaagcctccagaactgtggggattatcctgtaaacttttgaggctgtgagcccctccctccagctgcagatgtctcccagatgtggtgggcgaggtctggcgcgctgggggccaggggccgcaccgtcgggggagcggctgtttgc

SEQ ID NO: 39885 - DNA, 494 bp, Mus musculus
  source 1..494: mol_type = other DNA
atccatataaatgtaactttaaaacatacttcaaattatcctgcttaaacttcaatgcaatagtcatttgaatttttatttactaaaatcccagggatcccagcatttggtcacagaggcaggcgaatctctgagttcatcccgtatgatgtcaactttcaccatctaaaggagagaatgaccgtttgactggcagacaaaagcctagcttttgctagtccaaggttagacggctgctggcaggaattgccagtctcgatgcttgctgccgacacggttggctccaggatggaaccagaatgaggggctcagtcccagccaggcttggattcgttcccaggctggccaaggcgaccgtgctcctgggcgtgctccccaggaaagcgcgccgacctctcagggtgccagagcggcaggacactttagtgctcggtgcccaggggtaccgagactaagtttccggcagcgggacaccaacaggaagtgttcgtgtt

SEQ ID NO: 39886 - DNA, 302 bp, Mus musculus
  source 1..302: mol_type = other DNA
gtttccccaaaggaaatgtttccagaaaattcaaatgtgcacgaacaattatatgatttccccctaattttaaaagagactttctgcaaccttacaggataagcaagtgattccacgaaagaacttctctaatgcggcacactgtgtactgagtctgtccctaagaagcaggagctgctgagcctcacaaaacgctggtagaagcggaccagccgcggttttccatggttgttgaaaaccttcttccggcacaacacgaacacttcctgttggtgtcccgctgccggaaacttagtctcggt

SEQ ID NO: 39887 - DNA, 255 bp, Mus musculus
  source 1..255: mol_type = other DNA
tcgtcggcgtcagacggaggagccccccgaatcgggtggtcttcccagctgcggacagtctaaactgtagtttagcggccagtctgccagtgaggggacacttgacctgcgggccctgtgccctatcttcgaagggcactccaaaactcccccacaggtgtgcggaggactttgtggtgtaagtaaaaaagcaaagttcatttctgccgaagagaaaaggccctcctagggaccttcaaagatccgtggagctag

SEQ ID NO: 39888 - DNA, 502 bp, Mus musculus
  source 1..502: mol_type = other DNA
gggtgtccggcctgtcccagagctgggaggaggccaggctatgccgaaccccgggccccgcggggagccacaagggcccaggaccacgcctcggcgccctccagcagtgcaccccggggtcgagcctaggccctgggcttggggaggatgcgagggaccccgaactcctctgaaccccattcgcacccgggtcccggtgatagcagccggggccgttccctcgagtctgaccgtccagggctctgcgaacagctgtttaaaggctctttactgttgagggcttccacccctgactggggagggggcaggttgagccctaacccgtaccccaacccccattagctcttatttgggatagggcaccccagacttcctgggggctgctctctggagccccctttgtgcctggcagggacagcccccccatttccatgcgaggctttgttccccttttctgctgagaggaggggaaaaaaacgattttaaaagagagataaaaggg

SEQ ID NO: 39889 - DNA, 294 bp, Mus musculus
  source 1..294: mol_type = other DNA
cccttaaaaataaagtgtctgagaccacacctggcaacagaatgtggccacctgcgccagaatttggcacaattctttctatttttgctgagcaagaagcgtaggctcatgggatcccctaagccattgcggaacgggaggtccaaaagggcagagtccatggagaccgctctagacagaatctctgtatagtacagatggggaccgaactctcgatctttctgtcttagtctataaggacatgaaggacttcccggatctgttaacccgggaagctggtgctgcagcgacctc

SEQ ID NO: 39890 - DNA, 338 bp, Mus musculus
  source 1..338: mol_type = other DNA
atagcccagcctagaactggctacatagcgggcagctgggccataatggccttggctaatatattattcgatgcctgactgaggcccagtgactatttgactgtcagtctttttttgagaaaatatgacagaactgtggcttccagcattccggtcactagagacccagtgtgctgagcctgaaatcacttgccagaaataaatcatgttctgagtgactggagtcattgctcacagcgggcagtggccttggggctcctgtcattaaagacccaggcctttgggcctatccctgggggggagagacatctgcatctgctcctcgctgggagaaggga

SEQ ID NO: 39891 - DNA, 446 bp, Mus musculus
  source 1..446: mol_type = other DNA
atttgtgatatttgatacacaaaacccagactatgtttctgtttgtttccccacgcaaacaggtaaacctactagcatagaatataattaacttgggcagtggttgtactattgaaggatcctggcaggcactcttatgtccatagcccaggctggtctagaacttcccaactggacgctacctgggggagacccaagttgccatggtctaggtaagacggcaaaaagcggggagtcttgcagccgtgagcccccgcggcccgatgggtctccccgggaggctcccagaaagcgcgggctcagcactggggccgcctgagctctggaacaggcccaagggtgtcgagcaggctcctgccctggcgtggacccgccttctcccgggtgagacccaatggggcggcaggttctgcagctccgccccggttgggtcccagccaccaggg

SEQ ID NO: 39892 - DNA, 410 bp, Mus musculus
  source 1..410: mol_type = other DNA
cactccccgtgatagtagcagggtttgtagaggagtcaaaataaccatggtttttgttcttggtttttctgctatcctgagaaggcagagggaccatgctcttaggactcctctggccctaaaccagccagctctggccagctcagccactgacaagcccagaactggttgtttcaggaaccgcccagaaagctgctgtccttttctggaagatagcagcaggagcagtttatatttatactcctaactcgccgcgggtcgacaatactaccattattgagggttgacagttcagttcacaggggacctggattccaactctgggtaggagtggattccacagagagggtgcagcacagtggacttcggcctacgtggacaagggcttggaggctgcccagcatttccgg

SEQ ID NO: 39893 - DNA, 497 bp, Mus musculus
  source 1..497: mol_type = other DNA
gcccacatgggcacacatgttcattgccacaagaacaatgaacacatatttttaagtttttaattttatccattcacctaggaaaagctgaaacgggtttccaaaaccttggggtacctgcggccggccccgggcttcgcgtggacagaattctaagcatgccgagcagagtatctagattctagaccatgcctcagacgggagccggaaggagggcgggtccgtgcggctttgcgagctcctcggcaagtcgggtgactcgatccagcgcccctcgtacttcagcgcccaggaaggaggaaaggaccagctaggaggcccgcctacccgtctgctccgcgccctcctccctgcggcgagagcgcggggctttcacccgcagcactgggcagagggagcctacggtgcggcggcccacgtgaccaccttccctgccgcccacccccaggtccagaggcggaggccgagggaaggactccgggccgaaccgcggggcg

SEQ ID NO: 39894 - DNA, 601 bp, Mus musculus
  source 1..601: mol_type = other DNA
atttcctcctccggaagcttggaatcttcactttttcacacagtgtaaatatgttcatacttgcatctgattattattcctacagctggaagctcgcaatttgtaatgggcgataactgcacaatccagtaagagccacttcaagaggaagctaagcttcttctggaagaattggcacgtggcagaggctgcagctcttgtccctatccgcagaggggcaccggatctcctccagcccgggagcgagtatggaggttacccgcctccacccagagctggggtcttctgcacttgatttaggtggacgggtcccggaactcagcaaacgcgtgaagaccgcgacgcaggcgcagtctgcatcacgtgcgcatggctcgttccgccccgcccactagaaggcggggccacgaggcctgggccccgccccgatgcgtccggctcctccccgggccctccctccagctctcctgggcccgcggggagccgggagccggcccgctgagcggcgctaagggtggcggggcactcaggggcgggcccgggggcggaggccaggcagcggttgctacggggactgggcggggacgcggccccgaggagc

SEQ ID NO: 39895 - DNA, 497 bp, Mus musculus
  source 1..497: mol_type = other DNA
agtctcctacccagaacatctagcagttaaaatattctcaaataaattgtaattgacttggccctgttgtgccaggatttcctcctccggaagcttggaatcttcactttttcacacagtgtaaatatgttcatacttgcatctgattattattcctacagctggaagctcgcaatttgtaatgggcgataactgcacaatccagtaagagccacttcaagaggaagctaagcttcttctggaagaattggcacgtggcagaggctgcagctcttgtccctatccgcagaggggcaccggatctcctccagcccgggagcgagtatggaggttacccgcctccacccagagctggggtcttctgcacttgatttaggtggacgggtcccggaactcagcaaacgcgtgaagaccgcgacgcaggcgcagtctgcatcacgtgcgcatggctcgttccgccccgcccactagaaggcggggccacgaggcctgggccc

SEQ ID NO: 39896 - DNA, 554 bp, Mus musculus
  source 1..554: mol_type = other DNA
taagggttcagtaaacgttaacggttactgaattaaaccctcttggttttgaacagttcaacttttcctggatacacagaagtgtttggtgggacttgcactctgagcctccgactccagatccactgacacaggaggatctcctgcttggtcaggaacgtcaggtcctgaatcccctgcgcgggctcgcacgcgagctccgcgagaactggcgccccgcgcacctggtactcggccagcagctccccccatcgccgcggtgcgcgcacagctaggccaactctccccgggacgctcctcggggccgcgtccccgcccagtccccgtagcaaccgctgcctggcctccgcccccgggcccgcccctgagtgccccgccacccttagcgccgctcagcgggccggctcccggctccccgcgggcccaggagagctggagggagggcccggggaggagccggacgcatcggggcggggcccaggcctcgtggccccgccttctagtgggcggggcggaacgagccatgcgcacgtgatgcagactgcgcctgcgtc

SEQ ID NO: 39897 - DNA, 445 bp, Mus musculus
  source 1..445: mol_type = other DNA
acagggtttctctgtatagccctggctgtcctggaactctgtagaccagactggcctcgaactcaggctaatgtttgtctttttatgaataataataataataataatccaaaattctctggattttgctacaacaaaataatctgaatcatatgttgggttggcagagaaattgaatgaggtcattctgttatttcattttcttgagacaaaagtatttatggttgtgggtaccacatcagaggacaatgtattgttttcttcttccaccatgaggtcgaactatttgctaatgagccatttctaaatgtggaagaaccacaagcagctattttgtcccaaacataaacatatttgggttggccccaatatgggaggaggccaagatgggccaaagtgggtgtggttcccgggaaagccacgcccccagaacgctactgcaata

SEQ ID NO: 39898 - DNA, 493 bp, Mus musculus
  source 1..493: mol_type = other DNA
catttctaaatgtggaagaaccacaagcagctattttgtcccaaacataaacatatttgggttggccccaatatgggaggaggccaagatgggccaaagtgggtgtggttcccgggaaagccacgcccccagaacgctactgcaataggggcggccttcgtgtccatagcgacggcggcggcggcggccgtctgcttgcttaagaagtcgccgccgccgccaggatctcggagccaggagttaaccccgagggggagcgggctccccctcgcgacagcggggacagacagtcctgtggaacgacgagaaggtccccgacggctgagtccagccccgagccgataggggcagctccagcagcccctgagctctcctcgaaacgcgttcacgtgctgagttctggctcagggaaatcgccggccgataaccttacctttgatttacagctgtatcttattttatttttttttaaagatttatttattatatcacc

SEQ ID NO: 39899 - DNA, 343 bp, Mus musculus
  source 1..343: mol_type = other DNA
aagcaaggctggggatcttcccctatgccctgcctctgcaccagtactgcagcacttcaatctttgctaattgaaagattgaaaagctctggccaggacctttgtttgcaaaaggagacaccaagagttcttcaacattctaagattctttggggatcgggtatgcatcgctgctcaccaagccttaggctgagtttatccctaagcgatgggtctgaaccctaaggaattcccccttcctgccacagtggcagaatcaggcaggcctgggcagcctgtgccagaggggcggctctgggcagttccaattacttaggaagttgtagaccgtttcaaacatttt

SEQ ID NO: 39900 - DNA, 192 bp, Mus musculus
  source 1..192: mol_type = other DNA
ctaagccctcagaaggtgagttctgatcttagtgacatggacaaatatctgctcttctcagataagacaattgacttggatacaccaaagtccagcttggtgaaccattgagtttctcaaggagagcatcctttcctctcagagaacacagtcctaaataattgaaatagttttatatttttgaaacagctc

SEQ ID NO: 39901 - DNA, 335 bp, Mus musculus
  source 1..335: mol_type = other DNA
acagacacccaccaagatgacagactgcctttgttttctttcttttttaaacaacaaagtattataattgtgaccttgtttcataaacaaattctatgtaaacaacactatatagatgtgtttctgtgtccaggagcgcactctgtaggacaggctggcctctgattgtgccacaagcttaatggccattccaagggttacagctggcaagccttaactttttaacagctgagactccagcaatcagctctctctctctctctctcacacacacacacacacacaaacctgtgaaaaggctaactgggagacccggacttccgggatgtctagga

SEQ ID NO: 39902 - DNA, 460 bp, Mus musculus
  source 1..460: mol_type = other DNA
cattaggtaatagtaaatcattgaaaatgaagaaaaggacacacaaatactttggttgttttttgtttttgttttagccctggctgtcctggaactcactttgcggaccaggctggcctcgaactcaggttttcctgatttacctaaatcttataatgtgcaattgctcacagctaaattgggcaagtcagtttatctttttcttcaggatagtgatgatcattattaacaggtgtgttctaatgatggtaccaggaccaagagcctggtttttttttgctcctcttgggacattggagagtagcaagaagtcgagtgggtaccggtcttgaggcgggcataggtgcacgcatgcgcatattgaggcccgcacgctccccgtgcaagcatcccaggcctaggcagcagcccttcgcaggaggggcggtaaccaattgtcatttggcaccgcctcaattcc

SEQ ID NO: 39903 - DNA, 467 bp, Mus musculus
  source 1..467: mol_type = other DNA
tggctactaaaagcaacattcatatagtaatgttttcagaagttcatagtactgtggcaacgctaataaatgcctctagcactgtgttaagtatttattataaaagttaagtagaatgtacatggaccaggaatttactgtcacaacagatttgcattttctaatgctttatacaaatagactcatgcagtatattgtattcatctatgctgtagaatgtattaattcattcctctttattgagaagtattctcttttatgcatatataataatttttagatatgtatatgagagagaaatctttaacggtttctagttactgatgaaacttccagacactgtggactgctgccataagtagttatgtaagtttatagtgccatcaggtggctctgaaacattttttagttcccttaaagctgtatggtactatacacagctggatgatgttaacctcacatcaatg

SEQ ID NO: 39904 - DNA, 386 bp, Mus musculus
  source 1..386: mol_type = other DNA
cctcatcctcacatgctgggagcatcatcagagcctgccagcaggctcaccccgcctcaggagcaacagctggacatcagcaaagtgtgctgtagagcgcgcccatggagaacctttgttgataatcctttctcaaccgttaagagttgtaggaattacaagtttagcctaaagcttaggaagctgatcaaatttcagctctgtatagccctggctgtcctggactcactttgtagaccaggctggcctcgaactcagaccgcctgcctgaaaacatttttctgtaactctgccaggttgaaggagaggagtccaggcttggcactcattggctcagtacaagtaagtgacagagcctgggccaatcagtgaaggcactagtacta

SEQ ID NO: 39905 - DNA, 436 bp, Mus musculus
  source 1..436: mol_type = other DNA
ggtaacctcccttctagcctactgttgccacctgcaggctgccgggggttcctgctgtaccccgcagaacactggcagagtgctcccgtgtcttgggcacataattacaaccaatgctgtaaatgaaaacaagtaacagaagctgctttgtcttaagatttgtatgcaaaatatgtgtatgcatctgcaaaccctgacttgtagcagccagtagacaaccttgagtctctcctgtctccccaggggtccaggcccgctcctagcactgggcatgactacagatttcgtgcacttctgccgtggtcaaaactccagcggctgccgccgcctttcctttagagcctcttccgcgcgccctctacaggttccagtgggaacagactaggcgctcgtgaagcagccctgagcctgagcctgcgcctgcgcaacgcgagta

SEQ ID NO: 39906 - DNA, 300 bp, Mus musculus
  source 1..300: mol_type = other DNA
cccaagctagggaagcaggctccctcatgattcaaacggtttctgtagaaacagtgttgtgtcccatctctaggccaagatgttagttctcgtggaagacgctgtctctgccttggtggggagaacgctgcaccagccgctgtgattgttgaaaacttctatatccaggatctcggtctttaaagaaagattattgcaatagccaggtaaaaaagctggggatggcaacctacgctagtcttgctaggagagtctttgtctccaaaaactaaggtggagacttatagcgggggatgaatg

SEQ ID NO: 39907 - DNA, 384 bp, Mus musculus
  source 1..384: mol_type = other DNA
aacttcaagatgtggtagtccaggactagtgggccagcttcttttgaaacaggattgcaaatgtgtagtccaagatagcttcgaatttgtgaattcagagatctccctgcctctgccttccaggtgctgggactaagcaacatccatccaaatattaatcttaaaaggaagaaaatcttactcttggaagaccaagaggcgcgaccttgctggggttccgccactcccgccctgccgggtcaacggctgcgcacagccgccccgcagccatagcggaccccggcaccgacccagcgggaggcgaccgagtcgggtgccagggggcgctgcggaacccggcggggggcgaggcagcggcgggacccggcactaggggacgctgcg

SEQ ID NO: 39908 - DNA, 624 bp, Mus musculus
  source 1..624: mol_type = other DNA
atcttactcttggaagaccaagaggcgcgaccttgctggggttccgccactcccgccctgccgggtcaacggctgcgcacagccgccccgcagccatagcggaccccggcaccgacccagcgggaggcgaccgagtcgggtgccagggggcgctgcggaacccggcggggggcgaggcagcggcgggacccggcactaggggacgctgcgcgcggtcccccgcgcccctcctcctgccgggcgcaccgctcggccccgtggaggcgggagcgcgggagcacaggcgcggggcgagcgcagggagcgcgcagcggccctggcccccgcgggagcgcggctgcggggccgagcaggggcggtgggtggccaggcgtccctcttagcctgcgcaactgcccgcgcgcgggccgcggtcccccgggatgcgagcagtggcggctcggccggccgggtcccgagcggcgcggaggccggccgcgtacggtaacgggccaggcggggcgtgggcgaggactccagcctgcaggccgcgagcgttgcggcccccgggtgccggttgagccccgagggccggaggggggctggttacatctcggcaggtaattgccccacggtgacccaccc

SEQ ID NO: 39909 - DNA, 279 bp, Mus musculus
  source 1..279: mol_type = other DNA
cagctagccgagctgaggcagggcatctcttcatctgaggctgggggaacctgagtccctcatggggaaataatttctcctcaacccgggcccgagaagcaggctccttagggaatccagaggagggaccacacaccctgggtgccccgggggtcccaacaccctgcctgaggcctcaccttgcccccgcgttcgcgggaccctggagagtgcctggttcacagggctgtggcccagggcactcttccctatagtggacccgccccgcggcggaactgg

SEQ ID NO: 39910 - DNA, 481 bp, Mus musculus
  source 1..481: mol_type = other DNA
cttaaggaaaattatttaaactttgtgtgcctcagtttcctaaccataaaaggaggtgggctatttctgtttatccacctgtcgaggcacgagggctgccctgccgctgtgagatccgacctgagagtggagttgccccaggtccgccatccggccgcgggctcccagtccgggtctccgaaaccatctgcccgggagtttgcggggccaagacgcggtgcggaccgaggggcctggggtggcgcgcagggaccacgctccctacccgccccgctggcagccgcagacagggcgccccgagaacgcagggcccgccgcgtggagctctctgaacaccggccgggcccggccgggcccggcctgacccgacccgggcggcgaacgggccgggccggctgcggccgccgagcgcggaggtggcgccgcgagggggaggggcgcggcgcggaggaggaggagcccgggccgccgccgccgccgc

SEQ ID NO: 39911 - DNA, 232 bp, Mus musculus
  source 1..232: mol_type = other DNA
tagatctgctttctaaacacacgtgtaaagtgtgatgtcttcagatgtcatgaagatgtgagacatagtatgctctgaacactaaatggctcattgtcatattgccatactcctgtggaccagaggtctccttgcccatcgtggacactactggcccaaggtgtcaatagtgttgggcttcctgagcacctcgcaggtgttcagctacctccaaagtattcattaggtgcct

SEQ ID NO: 39912 - DNA, 279 bp, Mus musculus
  source 1..279: mol_type = other DNA
ccttgctagatagggccaaccctgtccctatttcccctggatgtttacctatgtggtggtgctggtgggggctaccccacagtggtccccacttttaacggatgctcaaataacagattcagttaacccgcaaggatttgagcccaacacaaattggcgaccttggaacaacccagcctgggaagatcttggcccgcttaaggaaaattatttaaactttgtgtgcctcagtttcctaaccataaaaggaggtgggctatttctgtttatccacctgtc

SEQ ID NO: 39913 - DNA, 259 bp, Mus musculus
  source 1..259: mol_type = other DNA
tgttgtaacagtttgaagcatacgcctttgatcccgaggccagcctggtctacagagtgagttccaggacagccaaggctattaaataaataaataaataaataaataaataaaagcttctcctacacaattggaggtgcattcatggtggaagctacccactagaaggggataccgccccagcagctctaggggcggggccaggagccagatccttcagggattacccaatcagaatcatccttcttgccgcgcagag

SEQ ID NO: 39914 - DNA, 433 bp, Mus musculus
  source 1..433: mol_type = other DNA
gaagagagctcctgggattctctcttcatccgcacagaggccctcttctcttcagcttgcaacagcggaagcaaagggagttccccgctgatcttccttctagagatggagaccaggtcttctcaggaaagctaaaatatgtttttgtttttgagactgcagattacaggagagcacgctcgcagtctgtaaccctgacctctgaggatgtatacagtctttatttagactcaaaatcccagcactggggagctgaggccaacacacacgcacacgcttatctgttactgtgtttgtaaatctactgcagagctacaattcaagtgacaatagtagcctggtgtaaggctataagatacccgattatgctatagtgcatgcaaccctcacttgaggtaggtaaccaacttaacatttcaaaatgatcagctgg

SEQ ID NO: 39915 - DNA, 498 bp, Mus musculus
  source 1..498: mol_type = other DNA
gaataataagtatatgttaattttgaaaaaatgaacagtagtgttagacatcactaccaacatagttactttttatggagacaaagaatgaggtggggttcttttttttttttttttaaataaactccaagcatatgaagcaaaacgatttttaaaaagtcttattgtgtagtctcaggagtcagttatctccttccacatgagtcatttagctggccccaaaatgccttttaaattttatttgcagtgttggaatcaaacccaaggcctagggcttgtcacacaatccaggacatcttggtctcttacggcgtgggtgcctgcatgcacatatacatatgtacacatccacactgggccgaagcaggctggggaccgtgggctcagccctcggtcggctcgccggaggtcgagctccccggctgggaggccgggcttcggggcccggaggccgggcgggccgcgccgagggcggagccgccgcgcgggggcggacct

SEQ ID NO: 39916 - DNA, 445 bp, Mus musculus
  source 1..445: mol_type = other DNA
agatggtctggattgtaagtagaagccatcaactagtcctgagaatgggacttttactttattattattattattattattattattattattattattagagccagtgattcactccaatccaggctggttcagaatagaattcggttgaataagatcttgcagattgtaaagagctgatcgcagttctattctttagcactgttgctgacagtgggtcctacttgctccacttgcaacggctccttgaaggagccgcgcccgcctcctcgcttccgcaagtggagagcgaagagggcaggggcgggtcctgtaatactgaccacgccccttccgctcgctccggggagcgcagctgggcgtggactcaagggcggggtctgcggggcgggacctgcagggtggggccgatggcgcggggcggggctctgaggacagcgacagc

SEQ ID NO: 39917 - DNA, 338 bp, Mus musculus
  source 1..338: mol_type = other DNA
gcgggcactaaaacaaagtggcacacttttcttggagtcttggggcttaagtgccctcaggcactccatgcatactcttatctagagtaggctgaaagggtaggggtgcaaccccggagtgcaaatggctcatttgccactgaaaaacagctttcattttttatagataaatacacgctctgcagtactagaagacagacagctagtcctgggtcgtcctctgcctctgatccggaggcactacatttcccgcaatgcatcgggtggaacttccctcccaactttcaccaatagtggagcagaatttcaggaactgttgtggacagccaatgagagtg

SEQ ID NO: 39918 - DNA, 341 bp, Mus musculus
  source 1..341: mol_type = other DNA
tgaatcccaccgagccgcctccttgaccaggttccgtagtcattttggacaaattgacactatggtgtaatgattttttaaaaataaatattcattgctttcataatacttaaatagtttttaattccactgctttgaatattttgtagagctactcagatctaggtgtgtgtcccccacaacagcataccaactgtttacatattatttacacttaagtatatgttgtctagagatgattccattagtaatcactatgatgttccatatgataaggatgagtgttatcactgaggttgaatgactaacctctttcacagtctctgaagggagtctgaact

SEQ ID NO: 39919 - DNA, 387 bp, Mus musculus
  source 1..387: mol_type = other DNA
gtacttaggaacctgaggtaaagggtccaagacctaatactctattccatcagtcactccttgacttagtttctaatgagtaagtgaactcttgtgaacaggaccacaatgctgggtcggagcacaccctgatcattcagaaggcagagttctgcttctgacctacagtatgataagccaggccctttaaagggtaccactataggacataattctgtccccgttctgggcacagaacttgtttgtgagcacaacaaaagcagggcttcttgttctgctttagctttaagaaagaaagctgtgttggtggcctggggcggggctctggggcggagcgagctccgctcctcaggcaggctccgctcccgactgtagtttaaaaggctg

SEQ ID NO: 39920 - DNA, 493 bp, Mus musculus
  source 1..493: mol_type = other DNA
ccttccacccacatttgaggaaagagggctagggtggtcttagaaaagccccatcccagccagctctcagcagtcaggtgttgtgttggctgcacgtggggggttagtgcactacctggtgcatacgggagagagccacactagaatccagccctgctgctccatacacgtgtcctgtgtaacagtagacatgacctaaaacttctgatcagtcactccgtgcatgccgggcaagcactctagcagctgagaacaagattcctttcattttaaaaaataaaaaagtccttaagtatcctttacggacaatacacgcaaacttaaattaactgttcacttgaagtgccaattaagtctgtatttgatcctaaatatacattaggggtatatttgatagggcttcgcgcagcgctgagcgcttccgccccagccagcggaagaccacgccctctcctcgcgagagcgcgcgcctgcccaggaagtctggctggcg

SEQ ID NO: 39921 - DNA, 509 bp, Mus musculus
  source 1..509: mol_type = other DNA
attttcttttataaaactttctaacttggaaattctaaacatttcctatccccagtaaatgtaaggtttctactaatagttgaagatagtctcagctgtgcggccaccactgggaatttaacagtgatgttggttttagtatatacatggagttgtacactgcaccaccagtgccctcatgacactaaggcatcttgtgatcaatttgtgtgtgtgtgtgtatacaatgctttaaaagacacacacagcgcagcacgcaggaagacaccgacttcgcgctggcgcagactcggcttccgattggccaggcctgtccaagggcccgccttccgcacgctgtgggcttagctaacctagggctgtcttcgggagccgccgcgcgggctgagcacagaaagcagccttcagccggttctcggccggagaaggctacggtcctttgacaaggccaggccctgggcttctgctcagaagggaggagcttcgcctgctcccgccccggaagcgga

SEQ ID NO: 39922 - DNA, 631 bp, Mus musculus
  source 1..631: mol_type = other DNA
tgctcatgcttagcctggcaccagaactggcctgccagttcccaccgtgtccccaagggactccaggttcttggaaaggagtcacagcctccctggtgagcctgcgaattgccagtccccttggctcccccagaggtaacacgtctgagcgccccgcgcccgcaagcatagctgcctagggaagacttcttccgagctcttgaggcgctcggcgtccggtcggcccatagccgcgaaggtacaacgcgtccctccggcaggcggcctgggccgcaccgaggcctcagaggcgcgtccgagcttcccgggcccaggtggccgggagaggccgcgccaagggcggcgggagccagcccaggtcggagtcccggtcctgcctgcgccgtcctcgccccgcccctccccggagtcagcgtagccagggtcgcaccagcctgaggcgggagggaggcggaaggcgcggggccgggccaggccaggccgggccgggccgggccggggcagctctatagccgcaccgccctggccggtgcccaggcccgagtcgccttccgcccccgcggcctcagccaggtcccgccgccagcccggctcccgcccccgctccgcccccggagccgcagccccgccc

SEQ ID NO: 39923 - DNA, 472 bp, Mus musculus
  source 1..472: mol_type = other DNA
gaaggcatgtacgtgagattaagaaaaagctctggctgaaccctactttttactaagaaattcatgagagcagaacccttaaggtcactatggtcattaaatttcaatatgaattgtgaaagaaacatttaaaccacataagtaggctaggtatcttatattttgttggtttttgagacagagtctcacatagtccaagctggacttaaacaagagcactgactgctcttgaaccacatggtggctcacaaccatcgtgtgtagatgattggtaatttagaaaattaaacaaacaaacaaacaacatttagtgttatttaatttgtgtgtttgtactacacggacattggttcttttaaccatgtgggttcagaggatcaaactttgttgttaggtttggcagtcttcacaagagactatcttttttttatttacactttcaacttaaaatagatgggcagctcagaaaagc

SEQ ID NO: 39924 - DNA, 395 bp, Mus musculus
  source 1..395: mol_type = other DNA
cacacacgtaacattatacagactgggcaggttgtgtgtgtgtgtgtgtggtgtaacaacaattaaagaaatatttgtaacaagaaaagaaaagaaaatatagggaatgcattttttttttaaagagtctcagcaattgccttgaagcaggtttaagctgtgcttagcagctctaagcattaggacttggcccattttctgaccttaggaaatagaagcctttccaatcacacaatgtatacccaggaatcttgcccacagaccactggctggtggctgtttctacttgtttctctaaaaactgaaagaaagccctctgcaggcctccctggctcccgggttaggctgagtagctgcctaaaccgggggagggaagcaggtgacagcagccccgg

SEQ ID NO: 39925 - DNA, 480 bp, Mus musculus
  source 1..480: mol_type = other DNA
taagaaaaattcttaggctctgtatattgcatgaccaggggtgtggagatgcacacctggaatcccagtattggacgggttagatgagacgatattctcctaaccccaagtttctaagaacagggggtaccactttgtgaggcatcttttgtatcataaaagataattaattattaaagagtgtgcatcatcaattattaaatcctgtcaggtaagtttaaatttagtttgaagactgtagatccaactttgcacgtgtaactcgggtgtcactctaacagcgctttcaatatcttctagttttggaaaacgagtcgccgaggaggcgtcctggcagaggacccggcttgagtgagccaggctaccccatcatgctttttctgaaacaggctggggtccccgcccctgcggtggccctgagctctggggaagccctttggactctgcccaggaatttccacagaagtgaacaggccaaag

SEQ ID NO: 39926 - DNA, 259 bp, Mus musculus
  source 1..259: mol_type = other DNA
tgggaattcactggtaatgtacgatgcaacccccagggattacagaccctttggtctctgtcctcacctagagttgaaggaccttggcccctcaaggaccctgtagctcaaggctagaccctactaatctctgactacggccgagctgccggcgtgcgcacgcgcagactttcgccccgcccacagccaggcagcctcactccactccgctaggggccgctgtgggactctcgcgagccaggcggaagcggctttctgg

SEQ ID NO: 39927 - DNA, 738 bp, Mus musculus
  source 1..738: mol_type = other DNA
gttaagaggaccccccagtcccacaggtctgagtgcaaccagaggcgtgacgtgccaggtcttggagcaagggctatccctggtaaacgcctggtcggtaggtgcccctgcggtcgcggccgcgcatgctcttggacgggcggtacagggagcgggcggcgggcgccccagctgctttgcattgacgccagcagccgctggaggtcaccgctgggggctgggcgcggcgagttgcccgcaagacgcggtccggagcacggagcgggagtctcggatgctcaactcctggctcgcgcagccgcctcggcgcttctcgacggcgcggcccgaccggagtcgaggcgctcgctccgtcagcgagcgggtccccagctcggagtgcgggcgccgagggctgggctcccctacggtagcccgactaggggcgctcacccagccgtccgccgggccgaggagaggcaccgccaggcgagcgagcgcccgtttcctcgagagtcagacgaggcgagggcggcggtgcaaacgcggcgcgggctcgcggctcccggtggcgagagcgcaaatctccacccccgacatttccccggaagcgcggcggctgcggcgcgcgcggcgatgtgagggagacagcggcggctcccgcctcaggaagggcatgttcggaggggcgtccgcggcgcgcctctcgccccagcgccccctccccacggccgccgcgcccgcagcgcaataaaaggg

SEQ ID NO: 39928 - DNA, 402 bp, Mus musculus
  source 1..402: mol_type = other DNA
agacctggcaacttccaagcttctttcctctagtttccagctagctgcagaataaaccggaatggtctggtccagccctagctggcccatccggggaactgcaatccgaaggaactgctgttttcggaactttcccgaatcccctgagctgcgctccgggttccagctcgctccagatgcaggttcggtgccaccggggcttccacgcacgtcaccggcgccgggcgagggacttgctcaggcctgagccccctcgggctccggggaggcagtggtggtctgacccccaccccccgttcggacccccaggcccagggtgggcggcggagcgcgggggacgaggccgggcggggccgacacaggtgctcctcgtcaggccagcgccgcggagctttataagcc

SEQ ID NO: 39929 - DNA, 285 bp, Mus musculus
  source 1..285: mol_type = other DNA
cagggtgttctctctaatccagaagtcttaggagctaagcttgataaatcacaaagtcctggagactttcccttctagatgtcaatggacaggaacctaaccaattttcccaaacgtaatttggcttcttccaggaagttgcccctctctcactgcatgggtgggcgggcaggaggtccgcatccctccaaagactatacagtcatcagccctgcagccttgctcactgtgagatgggacagggcaggcgctgttcctccgtgctcagccctgattgctgaatct

SEQ ID NO: 39930 - DNA, 247 bp, Mus musculus
  source 1..247: mol_type = other DNA
cccagttatagtctattataatgtattttaactacagtggtttaaagccaggaacatggtgtgcatccatggttttagacactcaatgcttctacatgcactaagagtttcaaattccagctagctcctagtctctgatagtcttcatatcagatatcaaatgttgaaacctggacgccagccctcaggctcaggcttctcgcctgccccaggtcagattggcttgggcactgatactcagaatctg

SEQ ID NO: 39931 - DNA, 258 bp, Mus musculus
  source 1..258: mol_type = other DNA
cctggagaactctggcagcttactagggtgctcagtaaaaatgtcaaatgtcttttgtttacatttgaggtatcctcaggaaatttatccaaaagtgattttacttaatcaaggctcctggatgaatatgcattgcagtgcaggggcgggacggcgtacttcagtccccaggatgccgcctgccagctcgctctgagcatgcgcactgggaagagccaagcccagccgcgccgcgcggtgcctgacgtggacggaagt

SEQ ID NO: 39932 - DNA, 252 bp, Mus musculus
  source 1..252: mol_type = other DNA
ttagatcctgagcagatatatttactgaacatggtagaactttctattgatcttagagaattgggaccctagtctacagggtgttctctctaatccagaagtcttaggagctaagcttgataaatcacaaagtcctggagactttcccttctagatgtcaatggacaggaacctaaccaattttcccaaacgtaatttggcttcttccaggaagttgcccctctctcactgcatgggtgggcgggcaggagg

SEQ ID NO: 39933 - DNA, 421 bp, Mus musculus
  source 1..421: mol_type = other DNA
ggaaactattgaagggaaaaatagatttagttatgcacagcagatccttcaaaaaatgtgttatgtaaaagcatattctatgttagaaatgtcatttgttggccatctatgtatttctctacaaaaaaataaaaaatttttctttttcttttttaaagatttatttatttatttatttatttatttaatgtatatgggtacactttgtttattattatatcttagtactctgtagctatcttcagacacacatcaaatctcattacagatggttatgagctaccatgtggagcatcagtgctcttataatcataagtctcttactagtaagctcccaataaaacttttagtgtacaatttttggtaaataatttaaaagtaaaacagaaatgcatatgtagagtatgtgtatatgtgtgtg

SEQ ID NO: 39934 - DNA, 333 bp, Mus musculus
  source 1..333: mol_type = other DNA
cgaggagtgtcctagagactcagatcctgctccaaggagtgtgtggagggaagccctaccttgctcctcctcctgaacaggcatcctgctaaagagcaggctctgcgagtcttcattgaaggggagcacgtcccacactgtgggagagaaaacacatagcctttgcattgcctccagaactgttggctcaaaacaccattctggcccggccatcagccacctgagtctcgggtctcagcccccacaggcacagcatgtgacctcccctggtgacacgtggcaagtggcaggcctatatttggactgtcactcatcccagggtgaactaggcat

SEQ ID NO: 39935 - DNA, 360 bp, Mus musculus
  source 1..360: mol_type = other DNA
cctctataataccccggcggcatgctttcagtagtgaggccatatactcagtaagtttactatattgacaaaaataaatgtgtctgcgatctagtttttgacaccccagagccctcagtaagtaaatattgagttcaaatagaagtttgatcttgccagtatgtttgtttcaggagccacatacttaataggatcctgttgataagagttgttaacagcccgatgtcgatagcggctgtatgcctcttacgagttcaaggctagcctggttcacttagagggagactttgtcccgcctcaagcctccctcacacagcctatcagaatgagggggcgggagcttctgcgcctctgactgac

SEQ ID NO: 39936 - DNA, 432 bp, Mus musculus
  source 1..432: mol_type = other DNA
tttcagaaattactgaccaccgtgagggcaggggcacggtggtggcctgtctgtccagagatgccaggcttggcctttggtagggaatcatagccaagcttaaggaagcctctcaaattttgccctcttaccctccaggattttaaggtcctgcccatgagactgccagctgcgacttcaagtccagcaggtgggacatcccgtccgaggcgcggcgccaagcttggcagggcgcgcgggtgcggcggcgactgcgcggcagcgcgggggacgctgcacacgctgccgcgcccccagctccaggcgggcggcggcggcccgggggccacgaggttacgtaaggagcgggcgggagggaccggcggctccgcccgagcgcggccgcccagcccccggccgcccagcccccgccctcccgcccgcccgcgcctg

SEQ ID NO: 39937 - DNA, 320 bp, Mus musculus
  source 1..320: mol_type = other DNA
tggaaagaaaaggtattctttttttagctttattttatttatgagtacactatagttgtttccagacacatgtgagccaaagaagagcagtaagcccaggccggctaagaaccgggtgggcatcgcccaagcagagcagtctcgtctgctcctccgccccgccgcccgggctccggctttgtaccagtgcaccaggcactgccagttcgggcactggctgcgaatgaccgcactgcccaccatcgcgaccctgcggagcttccctagggccgcgccaaggttcgatctagatctcgagagacttggcacgagactccgcc

SEQ ID NO: 39938 - DNA, 331 bp, Mus musculus
  source 1..331: mol_type = other DNA
gccttatcttaggatctatttattgctgcagggttcaaaaagatatgtagctggcagcacccttcccatttgtcaggctgggttcccagttccatccgggctgtgacagggccaccatcccgcctttagaatagcagggtgtctgtctcatccaccaagcgggctgaggcggcgtcctcgcagggtgacgcggggaggcggcctgaggaatcagcgcggcgcgcccgcacgcccctcaaccctctcgcggccgcgcgcctcccgcctcagcaacgcggccccgcgggagggcgggcgcgcgcggccggaagcgcctttcccggaaggcagg

SEQ ID NO: 39939 - DNA, 346 bp, Mus musculus
  source 1..346: mol_type = other DNA
atttgtaatgtatttcaaaaaacacctgagtcttaggctcacaacacaccacttaacgtgtcatgtggaaaggagagtaaaatgagacatcccattctgatcccaaactccagtctttgtgaataggtccgcatttaggtagcagatcttcctacggccagtccctcgcactgccctgtgcgaattgccatggtgccgcgttgggcaggcgagcaccgaggctggctgctcttgccaaccctaaggataggtgacaattttccctctgctggcaggtggcactcttaggtgccggccgacgcgcctgccgcttccgcccatgacttgcgcaggcgcacagaactct

SEQ ID NO: 39940 - DNA, 407 bp, Mus musculus
  source 1..407: mol_type = other DNA
ttctgggagaagctttgcgagataagaaaagggaaggagagctggctttggaacaaccgactgtctgcaggttcattttcctcacattgaaaatgagccgcgcctaggcccagggggcttcctgagcacaccctgctcaagcagctctttacgtctgggaatattccacgaagagcaggacctgccaggctagccggtggtaacctggcagcctcagtgtcttacatcaggagtgtgctgagcagtgcagggcaagcactccattcacagagaaatgatacagaatgtttcagtaacttgatcaaggtcgaaaacaaatatttccacttggcctgtccccacaggtctctgagccgatctcgcgggcctgcgggctctgacaccctcctctgctggcccttggctca

SEQ ID NO: 39941 - DNA, 166 bp, Mus musculus
  source 1..166: mol_type = other DNA
cctagagggtctccaagaacagacctaggaggaagtgtcttcctctctcagaggtagggagcatgagaggacagcctgaactaattcatgctgcctgccattccagggagagccctgtctccaagtgggtacagccagaataggaagtcctgccagtattggcaat

SEQ ID NO: 39942 - DNA, 444 bp, Mus musculus
  source 1..444: mol_type = other DNA
cttgcttctgccccaggccttcccctgggtcctagacaccagttgtcctataggatttgtgggagtcactgtgagtcccttagccataggaatcagagagacacggccctcatgagcatgtaagagcatgcattcagttaaaccatcagtgaatatagtcgcatgactaaatttgtccagcctcatcaagtgactggactgaccagttcttatcccgttggccatcaggggagtgtccactgggctcatcctgtggtccttatccccacgagaagcacagccgatcgctcttcagagcgtaacgcacagcacagcagactaactgaatcagtctgtacattttacaagagtacattaaacatgaatgttccagataccaaggcagtgccttagagccttaggttgaaggaattcctgctggactttactgacggatattcctga

SEQ ID NO: 39943 - DNA, 584 bp, Mus musculus
  source 1..584: mol_type = other DNA
tctaggctctcttacttcacagaaacctggttctgtttcacaccagctgtggacaatcttcccctgttcttagggccgaaggattctttttctttgtcctcaggccccggaaagcaggttctcctggcgagcccctccccatcggctcccagggaccggggtgtttgagttcccaatggggcgggggcagtgcagccttctgcctggtccacaccgggacccgaggcgcctccgggggaggcgagggaggctgcatcagccgagcgtttcgccctcgccggggagaggcaaacaccgacacagcccgccgggggcagacacctccgcgcccgcggccgccgaggtctccgctgtgcgcggggggccgcggcctggcctcaaccgaggcgactctgcgtggcctccccacaccccctcgagcgtcgcccgcagcccccggcggccggagtaggggcgcggggcggggcgagcggaggggcggaccccggggcgcggggcggacgcgagggtgcacgaggggcgcaagggccggcgcggtcacccggcgccgcggggagccgcccacttctcctgcgcaggggggg

SEQ ID NO: 39944 - DNA, 503 bp, Mus musculus
  source 1..503: mol_type = other DNA
gcagatgcagaaaagagtgaattattttatttacctctcacaaaggagaatgctataaagattctcactcccaaaatgtctttttgaaagcagtcagctgataaaacaagttacgaattgaaaacaactgatttgacttgtcagggtaagtcctttgccccaaaattattggcccatgaaggccatatagatccatgttcaaagcccgtcggtgaggactggccttgactccagtgaagtcgcttgccacactgcatcattaaggcagacctggggcaagaaccttgccaggtacctcccaggcagtgggtggtgattggctgggcttcaccaggcagctcccggccaacgggcgtctttggagtaggcgctcccacccgcggggcaccggcttcgctgctgcgggaggacgcgcccaccagcagcccgcggagcaagccaggcggcgcgcgcggtttctccgagaaagccggccgtgcacctaggaattaaccggccggcgg

SEQ ID NO: 39945 - DNA, 533 bp, Mus musculus
  source 1..533: mol_type = other DNA
gaggcacaatggtgccttaaatggaacacctggcctaggccccggggctgcctgacaggtctggacttctgtgggacccaaacctgaccgtttaggtgtccctgcctaaggctaccagcaggagtgggtagactctgggcagcctctgcagggtattacttaagatcctcgcactggtctggctggcctggctggcccgtggcgcagcggacgcctccccagagcgcgctgccgccggcggcagccggagctcctggcaccaggcctggctgcaggcccagggcaaggagtgccagcggagtctcgccgtggccgcggcggccccgagcgctccgagccgcctggctgcggctcggtggcccgcttgtccccgcgttcccagcgcccctgggttagggcagaggacgcagggcaccctagacgcggcgcgcacttgcgggacgggcggcgcaggtggcggcgcgcgccctccgcccctgggtcggggccagcactgcgctccgcgcgcccggaggggcgggacaggcggggcg

SEQ ID NO: 39946 - DNA, 310 bp, Mus musculus
  source 1..310: mol_type = other DNA
cagattccctatttccttctggccctgaggggatatagtcctttagacatcctgctgacagtacttgtggggtgagctgggagtttccaccagagacagacagtcagtctctctctctctctctctctctctctcacacacacacacacacagcgctgccgctgagagtaccgggtccctataaagtgcagccgcaccgtctggtcgccggcgtccgtagctaagtcgcaggagcctgggggcggggcctgtgggcctgtgacctctgacccgcgcgccaacttggagttccgcggtcgccttgacgacg

SEQ ID NO: 39947 - DNA, 418 bp, Mus musculus
  source 1..418: mol_type = other DNA
attcaaatacattttttttcttacatacaagattttgcagattcaagccttaaaagttatgtttgcatctgttcaaacatacaaacaatgtttattgcccttagaaggggtacaaaggtcagttactcttattcacttatcaaaggtgatctaacccctgggtaaacatacaaaccaatgaatactgttcttttaagttaaccaatagaatcggtgggtgacacatactacttagctgatctgaactgtattttagcttaaatggtgtgcgcggcggggctcgcggctctgcggacgccacaccgggcggacgttacccgccgcaggcttaggctggcacacttcagagcagctacagcgtccgccgtcgtcaaggcgaccgcggaactccaagttggcgcgcgggtcagaggtcaca

SEQ ID NO: 39948 - DNA, 518 bp, Mus musculus
  source 1..518: mol_type = other DNA
ctgttcccgggcagtgtagggctggcgtcccggcagtgggcgcgcggcgctcgtgcgcgtgtgggagcccgcggggtctcagtccgcgcgccaggcatgtgcgggaccctagaggtcacctgcagcggtgcgggtcgggccctttctgcaaccttgggcaaagtgctacccaagcgcgcgcgcgaggcgtgcgctcccgcgcaggtgggcagctcgcgcccagcagcaatggggcccaggatctcgagcctttggttccgcgtcccagggttgggccgccctgtggtacagataccttgtacagtataccgtccacctacctggagaggaaagcgcggcggcggcgggggaggggcgcggccgggaggaggccggggcgggctgcggcgagctcgatgggggtggcgctggctccgctctctcagccccggcctccgcccgcccccggcctggcgcgcgccaatcgcctccccctccggagccgtctggctgcagaggaggggctccttaaagaaacg

SEQ ID NO: 39949 - DNA, 446 bp, Mus musculus
  source 1..446: mol_type = other DNA
ttagctcagatgacattagaaaagctgagatgatcatgccttgattgtagacaaggtgcagcacattctcgaatctgtcataaagtcctttgtgcacagtagtgcacctcagagatcactgtctagctggctctcaggagcccttctgcctgccctaggctatgcaagcagttcccaaggaaaggaaaagctgcctacaagttgcgcagcaagctttgctcacatcacccatgctggcattggcatgtgaagtagctgtctgagtcacccatgtgtcgtaactccaagactcttgtaggttcactaagctagacttgaatagaaccacttcctgggtctgtttccctctatttgagatgaacaaaagtaccttccgcaagtgaaatactgggggaaggattttacttacaaacttgctttcaagtgaagagcatgtcgatgacaga

SEQ ID NO: 39950 - DNA, 338 bp, Mus musculus
  source 1..338: mol_type = other DNA
tcaaaaggcatcccctgttcctggcacagttggggtaactgcgccaccaagaactttttgttaattttttttttttttttttttttttaaatcagaagcgccaaggaaggaaactatttccctgtcactccctgggagagggattgtgttggtacttggagtttcagatccaatcctaacctcctagcaggagtttggaggactccaaaccctgcgagcagtctcccagcccgacgcgtcccgccggtaccggagcaccttctcagctgtgccacacaggttctgctgggaggaaagctgggccttgggcggagcctggagccccgccccgagctccg

SEQ ID NO: 39951 - DNA, 456 bp, Mus musculus
  source 1..456: mol_type = other DNA
gcaacatacatggatttccagagtcttgttttctaagcatttctgagagagagaaggtcctctgcaagagtagcaaattcttttaatttatgggacatttctccagagatgaaaataaaataatatgaaataaataaaaatcttaatttttctcaaactcagctttatgggtcattatgcatactgatatgtccatacttaatacatgtaagactagaactaaagtaatcccgttttttgttactagaacatggaagtcttgaaggttgaaacatcattatttctagagtttactggtttctaagcatttgttaggtagcaaggttcatggtactgtgatgtcaacatttctgtaagcttgacatctttcaaagtacaaaatcaaagaaaagaatagagtgctattgtctgtgcctggaagcagtgcacttgctgtctctatttgagccctgtctg

SEQ ID NO: 39952 - DNA, 227 bp, Mus musculus
  source 1..227: mol_type = other DNA
gctgctcttacagaggggataccagtccacactctgcatgattaaatttcccaggcagaccttcctgctggatatgtatatctatcaagagctccctgggtgtctagaactaaatagatcaaaatcgcttcggtttctgttatcaggccgggccaccctgcagaatcccactacgaatgcctctcaaagcctgcggagctcggggcggggctccaggctccgcccaa

SEQ ID NO: 39953 - DNA, 279 bp, Mus musculus
  source 1..279: mol_type = other DNA
gcccgaagttgggtgctgacttggcactaagcttgagaatctcagattttctagtagaacagaagcctggatttgacttccaacactatataaaacaatatggtggcacatggcttgaatccatttaggtttgtgctgtaaatacaataactaaacaaataaagaacttaattatcttaacttaggcaacattagataaagttgtgcttccgtgtctatgatgcatagacccctttctcatgactgctgggaatttcgcactgttgctacaggaagaca

SEQ ID NO: 39954 - DNA, 355 bp, Mus musculus
  source 1..355: mol_type = other DNA
gaaggtagggctggggcccaatgacagcacctaactctaggcaagtgcatggacatggcactaccatttctttttttaaaaattttgtcttgagacaaggtcttgcttagctgcctaaactggccttgaacttgatcagaactgttgccacatttatggaaaactcctgacaggtgtcatacctgtgaatgcccaggacactgagggacagagaaggagtctcactgtgtcacaaatctgtgccagacctgtccagagcaggtggcagcatctgacagggtgtgccatccctctgagctggcatgtgactcagggctggcctcagtgtgacagaggagtattccccttagcagat

SEQ ID NO: 39955 - DNA, 388 bp, Mus musculus
  source 1..388: mol_type = other DNA
ctgattaatgaatgtattcagctagcagccagcagccagcagccagcagcaggtggtactcctctttaggaaatgttggctacacaaacttttttaaattaaaaaaaatttttttttaatatcaggagtgcattaatatgaaccaagcttccacagaaaagctaggggcactcgggttccacagcactttaacttagattttagtttaaaaagcaaacattgtaccagcgcaagacctgactgtgttacatcataagttcaaggccagcaaaaagtttcaaaaatttctccgcctagggaacatttggaacagtgtcccccgtacttattggccagccaaagagatcttgcaactggcaactggcaactgcctggtcgtcatggcaac

SEQ ID NO: 39956 - DNA, 404 bp, Mus musculus
  source 1..404: mol_type = other DNA
taaattaataaataaaaggggagccatctgggccaccagtttcccagcctgtaacccagaactggctctttacttaacaattacagtaacttgggagagacaacctcagggagggtctatcactgagtcaaacaagctgtgggctccctcggcagggaggaagcatcgagtcctggggcatgctgagagcttacgtaaggccactagcggctgcgccccggtgtccccagggtatacacagcgcctgggcgcggagcgagggcgggccttccccaccacacacgctctctccggatgcagggaccaccggccccagggccgcagcgtcggggctgggcgcggcgtcctcccacggcccccagcttcccgggggaggagcagcgcatcgcgcaagcatccgggat

SEQ ID NO: 39957 - DNA, 380 bp, Mus musculus
  source 1..380: mol_type = other DNA
ccaggctacttgacaggtacctcagaactgcaccagggcctgagtcagttttgtcttttacgtgaagaaatccaagcatttatttaagcctggtcacttgacgacatttaacagtgcactggaacccctggtctttgtccctcctcttccagacatggggcaggagcctagtgccttctgtttgtcttctggggacacaggctgcattcagcaccagctgctctgcccagaccctgtgcacagccccaagagtggggcacattttccacatgtcggaccctctgtctcagcgttctccgaggccacgggaaaggctgatctgagggctccctccagtccactgaaatattttttttttcctttcctccctcccaaaacag

SEQ ID NO: 39958 - DNA, 454 bp, Mus musculus
  source 1..454: mol_type = other DNA
gagatacatttgtaaatatagaaataaattgtatgcattattaaggtatagtttttgaatattttccaactacaccaaggtttcatgtcttatgatataatttgaaattttaaagaaatcagatctgccacttaaagcttaggaaactttaaagtatctctgaccccaagtattttaattttgaagatcttagtggtcaaaatcttgtaaaatagaaaataaaattagggtggttttgtcctataggttaaactattttaaacaataaaaatggttatcaattaaatgggtttttttttccagtttaattgacagtgatattgaaccctataagaaggcttcgaggactctgtcactgaaacgccaggccaactcgcggggcggagcctggcaaggggaccaggaggaagaacccttggtccccagccaggtgagctcccagagctatggggca

SEQ ID NO: 39959 - DNA, 287 bp, Mus musculus
  source 1..287: mol_type = other DNA
actattttaaacaataaaaatggttatcaattaaatgggtttttttttccagtttaattgacagtgatattgaaccctataagaaggcttcgaggactctgtcactgaaacgccaggccaactcgcggggcggagcctggcaaggggaccaggaggaagaacccttggtccccagccaggtgagctcccagagctatggggcactcctcggaggcggagccatgggccgggggcggggtgggggcgaggccccggcgtccggactccgcacgctgtctgcgcaggct

SEQ ID NO: 39960 - DNA, 253 bp, Mus musculus
  source 1..253: mol_type = other DNA
tatggtcaagtaactggcatgtgcagaaaactgacacatgtgaagacaaaagtactggatacaagctgcgcttccatcactaagccctcggaggtccgcagctttcgtcctaggctccagcgccctcacctggtggccacggcttgtcccggcggcggctctcgggctcaggtctgcggctcccggagcggccgccagagcccgcccgggtccagccccgcaggccgcccaccgcggtgagtgggaggacggt

SEQ ID NO: 39961 - DNA, 518 bp, Mus musculus
  source 1..518: mol_type = other DNA
tttcatcgtgttgacaccatttgttgtaaaaccaacaggctctgctgtaattgttattacagaaagacctcattgattagaggaaagcaaggcatttttaatgtactcaattctctttctcaataattatcttttgaactgaatcctaaagtatctgcacacccgccccagactccagagcctcgcttcggaccggggagtttgttctaacgagtagccccgcccagactcccgcccaagaggcgggagccccgcccagcccggggagtcctgcttcagactggggcgtccgttccgatgggtagccccgcccgcctgtgggggcgcgcggcgcggtaacccggaagtggcagtagcgtgcgggggcggggcggcgcgctggagcgggccatggccgccgccgccgcgggctttgtgtgccgcgcgcgagccccggccgtccgcacctcgccggggctgcggggctgccgctgacccgccccgctcgccgcgccgcgcccgcctggccccgcccctgg

SEQ ID NO: 39962 - DNA, 758 bp, Mus musculus
  source 1..758: mol_type = other DNA
tgcgcagtgcctgccacgcggcgcatgtctggcccaagtccacggcgttgccgtgcgagaagagcagcgtgtagcggctggagggcgcgcagcgcacgaacatgcagcccagccggttgtcgcgggccgtgcgcgagaagaagacctcgacggcgtccagttcgcgctgcgagtactgccagtcggcgcgctcgctcaggtgcaggctgcacgcgccggggcccgcaccctcctcggccggagcgggctgcgccgccggggcgggcgcgggggtcgccgcgggagcgggcgcgcgctgctcgggcgccagcaccgtgtaggtgggttcgggcggcaggaaggccagcttggcggcgatgcggctcgagctcgccgagcgagaagccgttcatcctggggccgggctcgggcatcggggcggcctggcgcccgccgcgggcgggagggaagcgcaggccaggggcggggccaggcgggcgcggcgcggcgagcggggcgggtcagcggcagccccgcagccccggcgaggtgcggacggccggggctcgcgcgcggcacacaaagcccgcggcggcggcggccatggcccgctccagcgcgccgccccgcccccgcacgctactgccacttccgggttaccgcgccgcgcgcccccacaggcgggcggggctacccatcggaacggacgccccagtctgaagcaggactccccgggctgggcggggctcccgcctcttgggcgggagtctgggcggggc

SEQ ID NO: 39963 - DNA, 427 bp, Mus musculus
  source 1..427: mol_type = other DNA
acaatgatggtttaaaaacatactccaatcatcatttccctatagggctcatatggaggtgtgaataaggccctcgagaggactctaataaatgctgacagtggccatgtcctcaagaagtagccagggtgcccgggagctcagtggcgcggccctggcatgccgctcctccgcgaggggacagcgcctctcggcgatgtgtccctgatacctggggaccctacggcggatagggagtgcgccgaggcctctaacctgggcacctgcgcggacccgaggagggtcccgctgcccgctgcccgctgccccaagtctcgcggtgctacggctcggacccgggagccgcgggcccggcaccccagccgcacgcacggggagcgcgcggggcgcggggagcagcgcgggcaggagcgcggggcgctctgag

SEQ ID NO: 39964 - DNA, 172 bp, Mus musculus
  source 1..172: mol_type = other DNA
gcaggcgtgtcacacttctcagggcaaggtctctggaccctgactgacctctgcagtatccagtgacaccacaggagcgttttgcaaaagggcgaggcccaatacctggatccaggtgctggacccggtgaccccaggactccgggcaccccggggttcggggcggtccctg

SEQ ID NO: 39965 - DNA, 269 bp, Mus musculus
  source 1..269: mol_type = other DNA
tttggaattaggttttctgagttctaactcagaaacttggcacaatagcttggggtggtagctctccacccaaaggctgagttccattcttttaccagaaagaaatagctttcacttattagtgaggagaggatttatcattcacattactaacaataacactgtgaatttgttgtttttatatctgaatggagttttctaagaatcctcaaatagagagcctgggcgccctcccggagcaggaggcactgcaccgggggccgatgcca

SEQ ID NO: 39966 - DNA, 458 bp, Mus musculus
  source 1..458: mol_type = other DNA
agtgacttctgggccagtctgagctatataggagggtggcggaaacctccctgaactttctacctgggacccatggttagatccttaacactgtgaaataaacaagttaactttgttcctgaaacaagttgtccttttgccgtgaataatcagttttaacaggaaatagatcatgtcttacagaacacacgcagtttgttcttagcaaaatttatagtgaattttgtgtagatcctcacaatttttcagacaaaatttgaactctgttaaaagggaaaatctgttaatgccacattatttatattagaagtgtgaatcttgcgaaagttgattctgtgaattttcattgtattttaacccaaacaaaagaaagcaaattgcttatgatgttacagcctgtttctttaagaaaccagcttattgtgtttaacctaaccgcagttctttaaaatggagga

SEQ ID NO: 39967 - DNA, 628 bp, Mus musculus
  source 1..628: mol_type = other DNA
agtgaggagtctgaaattactttaaaaactttgtgatataactcatattgtgagttttgacattaagtatggctgcagtcaaaacaccaccccgagacagggtttctctgtgtagccctggctgtcctggaactcactgtgtagaacaggctggaatccgtaaaggcgtgcgccaccacgcccggcttacgtgttttttaaatgttaaaaaaaaaaaaaaaaaaaggaaaaaggaaaaattaagacaatgtcttttctccatttaaatgttcatggtttatgccataaaatacttcataaataatctcaaaagcctacgtggcattttaattaggaaaaggataaatttcgaatatagtttgaaagtgacgtttaatttcggttttcggaaccactaggtgctgactaccaagctagttagcatgcacggcttggaggtgaccccaaggcttccacgccacactccgtgtagcttgtttacgcatccaacagtgagaaacttgaaaacgctctcagaggattggagatgagccttctctagcctcagcctaccaaagggacgtgaggacgctgcccggcgtgcggcagctgctccggactggccccaggcgcgcccaccccgaccccg

SEQ ID NO: 39968 - DNA, 398 bp, Mus musculus
  source 1..398: mol_type = other DNA
ctattactgtaaaaatagggcagaaatttcagggggctggggaaatctcaggagagctgtcccccacttctcccgcacaacctgtgcagggctgctgcgtgtaggtgtgtattacacaagcgagcacaagttcagaccttggaacaccagctctagacaagggtagtctatccctgggaggatgcagagcccggagctacgtcatcctagcccgctgacctggccgaggcaggggcgtggccgagagaaaagcagcgcctctgtgcctccggccccgcccccacgccgcctccggcccgcggccccgcccgggccggtcataattaggcagcgggctgggactgccgcgtcagcgcgcgttgagagccaatcgcgggcgctcccttgaggccgcgtca

SEQ ID NO: 39969 - DNA, 402 bp, Mus musculus
  source 1..402: mol_type = other DNA
tagcatttgaaatgtaaatcaaaacctgcatattttccaactctaatatgcagtttagtttctacttaatcattgattaggcattcagatatgcatgagtcacacaggatcatgctattttgtctatggctatgataagctgtttctgaaacttctactttgaaactcaatttggaatggctggtgcaattcattttaactctttcaaatggtgatcagaaaaacagtttggtgaactaaacaggttagcaaattttcttaagtttcatgcctggagccttagaaaagtaccaaagttcatacatgtttttctcagtactaactacaattataaaaaagagtcacttgggctttggccttgactcaggctcgatgtgataaagatgttatctttcatgtctt

SEQ ID NO: 39970 - DNA, 436 bp, Mus musculus
  source 1..436: mol_type = other DNA
catgatttattaaattttagttccattaattaaacttttacttcaattgccagtgtgataaaatgttttttcattttacaagaaaaatcttggatgacatgaaattagattaagcacatcaaatgccttttctttcttttttacctattacgtatgttagttaataaagtcactgaacacgattatgatacagacattatttcatatgattaactgtttaactaattaactatgactttgcaattagcagtataaagtgcacattcctagagggaatcaaatttctttaccaagtttctttcgcacaaccaggaagtagggtgtatgcgccccgggtgtctgcagctggacaggcccggctggaggctgcaggggacgcctccaccttcccacggctcgcgcgagacaaaggggctggcgcagggcggcgcgcggg

SEQ ID NO: 39971 - DNA, 274 bp, Mus musculus
  source 1..274: mol_type = other DNA
gccagatatttctagaaccaaaaagatgtgcagttaaactaacatattttctttattcagtatttctatctgaatctattactcccgaactaagaaaagatttgttggactaggcattgtgaccttcagaccggttgccaaggcaacattttaatttatctactaatgtacaaataacttttgggaaaggagagtgctcactcatgtgtgtaagtattgctagtttattgaagttagcagtttcccttagcctaactacattcccaggggaata

SEQ ID NO: 39972 - DNA, 372 bp, Mus musculus
  source 1..372: mol_type = other DNA
ttttacctattacgtatgttagttaataaagtcactgaacacgattatgatacagacattatttcatatgattaactgtttaactaattaactatgactttgcaattagcagtataaagtgcacattcctagagggaatcaaatttctttaccaagtttctttcgcacaaccaggaagtagggtgtatgcgccccgggtgtctgcagctggacaggcccggctggaggctgcaggggacgcctccaccttcccacggctcgcgcgagacaaaggggctggcgcagggcggcgcgcggggccagggggcgccgggtggagacctccagccaggcctccagccgctcccctgcaggcggcgcccctggatctgc

SEQ ID NO: 39973 - DNA, 475 bp, Mus musculus
  source 1..475: mol_type = other DNA
ccagcattatcaggaaagcaatgattttcctagataacggtttcctcaaatcctacagtataaattaaaagaatactcacttccacattttatgagcaaaataataaaatttatctttggaataatcaattcaagataatcaaggaaaaatgagaggcaactattttagactgattacttttataaaataaataagctcagcttagccagatataagcaatattctgagttctgaagaaaaatttttgacaaaatgagttctataaatgttattgtctacttatgatctctaaatacaacaggcttgtattcagaatctagatgtttcatgacctttattcataagagatgatgtattcttgatactacttctcatttgcaaattccaattattattaatttcatatcaattagaataatatatcttccttcaatttagttacctcactatgtacaaaccaagaaaaagttagtc

SEQ ID NO: 39974 - DNA, 514 bp, Mus musculus
  source 1..514: mol_type = other DNA
cagttttctttccagctgaataaaagttttatatgtatatataacatcgttgtataatacacacatatgggcaaatgtcttttagttccttactattatatcaccgaagtaatcaaagaaactgacaaacattagtagttattaataactggtgtccttgacttcatgtgcatgttttaatcattaattcagctactgaaagtacctggctcctttaatttgctcaggcaataataatattacccaattattcttttgtttaaattaagccatgcaagtaatttatagggatcccttttattctttttctttcagatataatgtgaaggtaaccttagcatttttgatgtccatagacagtactaggggaacatttttaagaagtgcagacaaatgcaaaatgacattattaatgactcaagaccattaaatacattggtcctctctctctctctctctgtgtgtgtgtgtgtgtgtgtgtgtacagtctgtgttcagagagaagctgattatc

SEQ ID NO: 39975 - DNA, 516 bp, Mus musculus
  source 1..516: mol_type = other DNA
tagttattaataactggttgtgcatgttttaatcattaattcagctactgaaagtacctggctcctttaatttgctcaggcaataataatattacccaattattcttttgtttaaattaagccatgcaagtaatttatagggatcccttttattctttttctttcagatataatgtgaaggtaaccttagcatttttgatgtccatagacagtactaggggaacatttttaagaagtgcagacaaatgcaaaatgacattattaatgactcaagaccattaaatacattggtcctctctctctctctctctgtgtgtgtgtgtgtgtgtgtgtgtacagtctgtgttcagagagaagctgattatcaagactgccctggcctgaaccctgagaccaagaggctctaggagcagtgttcactcactgagagtaggagccaacccagcgttgcgcttccagctgcgtctgcccgggcgcagcacgtgctccaggcgctggcgcgagagagcgagcgcc

SEQ ID NO: 39976 - DNA, 283 bp, Mus musculus
  source 1..283: mol_type = other DNA
gtattctcagattagctcagaatgatcatgtccctctcgcccttgggaaagcctgattgctttcattctgaaaacagaagggcttgagcaatgtgatcacaatgtgatcacccattcacccaacctgtaaaggttcactacaattgaaatcttaaattctcaagactatcttaggttagctagtaaagttctttaagactcttgtcaagattctaagctttggcgttccttgaaaggcagaggttgtaaccccgccccgcggaccctgggtttccgggctctt

SEQ ID NO: 39977 - DNA, 206 bp, Mus musculus
  source 1..206: mol_type = other DNA
tttctttacatttctaaagtgggactcctcacttgtaaaaggaaaaataatgatacttttaagacttccaggatggagaagatttataaacatctgcgagaagacctaagtctacctcagaagacctgggtatttttcgacacgcagtagcactggggtcccgggtcctttatctcctcccactctggagtccgcagagtaggaag

SEQ ID NO: 39978 - DNA, 469 bp, Mus musculus
  source 1..469: mol_type = other DNA
tgaagtggtcattttataagcagcacagctatttaacatacataaaatgtatacagctaggcatcttgcagatagtttacactagaacattagtttcttggcagcagaaacacagcttttccacatctgtctgtccagggtttcaaacaggggctggaaaatcatattagtttagtaaatattgtagaaggaactgtctaaaggtaaagcctttctgctttaaaaagtacagaatttacaagggattgtcatggcaatcagccaggcaggagttctattgcactgcagctgcatgcatttaaacacatctaaattagtattttcaagacttcaaggctttgacaggacaagggctgagctatatagcccgacccaggcgggatccaccgaggggagctcgcttcctttgcccgtccggagcccgcccatccgcgggagcgcgcatgcgcctcccctccccgcctgcgcg

SEQ ID NO: 39979 - DNA, 473 bp, Mus musculus
  source 1..473: mol_type = other DNA
gggcggcgggccgagaagcacggagcgtcccggcctcatgtggaatttcatttcgtacggtgaggaaatcggagcgcgagcccatcggctgctctgttgctccggagcgcctcccccacggcgactgcagaccggctgctcccggcgcaggtcgcgccgagtgcggggcggggccggggggcgggcgccagccccactggctagatgaggaacctgacgcggagaggttgatctgtgtaaaccccaaataccgtgttctttgtgtgggcaggagccacggggctccatcgccgcctggccacagcgtgcaatggatccgggtgggaggacgccgagcgccgggaagccaagcggggcggggcgcctcccgcgggcgggggcctgacccttacagcaggagaggagccccgccccttcccgccccctctgaccagggggggctttcaggacccccgccctgcgaacctccagcg

SEQ ID NO: 39980 - DNA, 532 bp, Mus musculus
  source 1..532: mol_type = other DNA
gcagtttttacaagggaaagttttattttcaaaactaaaagagatacagtcttatatgggtatcaatatagccaataaattattgttctcttcaaggactactacgtaaatgtttgaatccaaaacattataaattgcctattgaagactttgctatcattatctggaagcataataaccacaatatcaatatatgactctcagaagaaaacatatacatatacaaacataagaattcatattccctgtgtgtcacgtatttgatataaacctctgaagcaagtttggatcagacaaaaattagaattctccaaaaactgaaagtttaacttccttgtcaaatacccgaatactttaaagtctctatgcaaaagtatgctttcagactgcttaaatgctataacgcacacaacagttttaaaataatatagccaataatttttgccatttgaagaatactcattcatgtccaccccctgaaccactggccccgggctgggcggtacaccaaattgccgggccggtcattggg

SEQ ID NO: 39981 - DNA, 442 bp, Mus musculus
  source 1..442: mol_type = other DNA
atagtcttaagagactactaagactatatagcattagatatttaaatagtgaggtcaccaggctgactcagtcccgaggtggctccaccagctggtgccctggtgccccagtaaaaggccgggggcgctgggacccagtatgctagcagctgaactgcagggcctgcaacctcggtagcctgcctctggattaaggagcttacaagtttgaattctgctttgcaaacttgcctagcggcgctccacgcacccggggtgctggaggactgggacacggtgcaggggcatcgagtacggggacccgctggtggtgacgcgctgcggagacccacctgcgcggggcccgagggttctggacaggggaggcgacggccggcgggctgcgcggctcgcggctgggggcggggcgggagggccaccgggtgctgcaggctctgctgga

SEQ ID NO: 39982 - DNA, 297 bp, Mus musculus
  source 1..297: mol_type = other DNA
caatgaactagtagatgacttgttcatttattgcatcccctggggatggtcagcactgaagccaggctgggcttaaccaaggccttatttcctttagaaggaatctcttacttaaattcagggacctaacattcctagaaacttacttaggaagctgtagactgggatttaaaattgtattttatttagaaattttatttactgtaaaatggatttaaaattgtattttatttagagtattacagctacatactatatcttgctcaagaggtgggggcgaggaaaatgagcttcatc

SEQ ID NO: 39983 - DNA, 239 bp, Mus musculus
  source 1..239: mol_type = other DNA
tctctctctctctctctcacacacacacacacacattagaaagttcaaacactttcaagctaatatatgtgaagctgacagccattgcagcaggaatagatctgccccattcctttctctataggaaagggaaaaagcattctcctactcgctgtcggccattctcactgccctgagcaagaaggaaagaacaaaggttttgggtgttttgtttggggccgggccttgaggccctagca

SEQ ID NO: 39984 - DNA, 349 bp, Mus musculus
  source 1..349: mol_type = other DNA
ttcctagaaacttacttaggaagctgtagactgggatttaaaattgtattttatttagaaattttatttactgtaaaatggatttaaaattgtattttatttagagtattacagctacatactatatcttgctcaagaggtgggggcgaggaaaatgagcttcatcggccagagagtgacaggggacagtagcgccttgccccacctgtcgcttctccagttccttggagagtattctcccatatgggggggaggaggctagcgccttccagcctctccgagagctcaggtccggcgccctgctggcgcgcaggacctggcttgcctagagggcacccctgaccttggt

SEQ ID NO: 39985 - DNA, 376 bp, Mus musculus
  source 1..376: mol_type = other DNA
tgagaaaacttagattattattttttttaaaaggcatttttacaacaaaactccctgtggcagttatcaattaattcatcatttaatccttccagttatatagctctacagttgtacagcactacgtgttaaaactagtatttagtggaaaaggacttctggacctctatagctttagtggtccacgcctataattccagcaatgccataaaaatgagataaaaatatattaacatttttgatataatgtttgtcgttgcaacttgaatttacgctccaaaaatcaatttttcaagccgtataaaacggagataatatttatcccattctaaaggcgtagctcctccttactaccttagaaggaggaaatgggtgt

SEQ ID NO: 39986 - DNA, 650 bp, Mus musculus
  source 1..650: mol_type = other DNA
gtatttttacttaagtctaaatatgtaatttaaaatacaggcttacttaagccaatagtggcaccaaccggttgaatataaccaatcattgtaataagtatttattagataaaatatctgcccgatttggtaccgttttgaaatcctccccgaagcttcagaaaccggtggggaggaggggccaggaggcggcctgtcgtctccgtaacccagcatacgcctcagcgcatgcgcacctgcaggtgggacccgtccatgtgcccgatgggggaggagattttgaatctctcccttctcccccctccctcgggagcagtggtgggccgacctttgagttccgcctcgtctctaggcgctggtggggaagggggacgtaggaaacccctgccctctgagccagcagatccgacgcctcggtgcaaagtgtcgagagggcggcgggaaaaccgcccgcccggaccaaggacgggaagcagccgggaagccgtgcgggagggcgcgcgcgtgcgcgcccctttttcagcagtgtggcggggtcgcacgcacgcccgcctcggcggctgggcgcgatttgcgacagtggggggggcggcggcggtggcggcgccggcagctttgcggcaggctcgggccgggcgtgcttgacggcg

SEQ ID NO: 39987 - DNA, 472 bp, Mus musculus
  source 1..472: mol_type = other DNA
gctactatgaattatgacaattcagaaccatgtaatttttatttatttattcaggctgtcctggatcctcgtccatacaattaaaaaaattttttttcaaacaggtttttagtaaatagccttgaagaatgtatcatgcatcacaaggtatttttacttaagtctaaatatgtaatttaaaatacaggcttacttaagccaatagtggcaccaaccggttgaatataaccaatcattgtaataagtatttattagataaaatatctgcccgatttggtaccgttttgaaatcctccccgaagcttcagaaaccggtggggaggaggggccaggaggcggcctgtcgtctccgtaacccagcatacgcctcagcgcatgcgcacctgcaggtgggacccgtccatgtgcccgatgggggaggagattttgaatctctcccttctcccccctccctcgggagcagtggtgggcc

SEQ ID NO: 39988 - DNA, 515 bp, Mus musculus
  source 1..515: mol_type = other DNA
cattttttttctctcttttgagagaagagcagagtaccgcggagccagtgacactgtgctgggccgcgggtccgccaccccttccgctccgcagccggcggggcctgggacccccaagcgcccgagggtccccacccacccccaccggctccccgcccgcctgccggcctggggcggggctcagggccgcgcgccgccacccgctccgagagccccggctcgcgtgttcccccggcgggctcccacaccaagtcggggccactcccgggtcccgcgcctcagcctcggcccaccccttccctggtcagctggagcccgaccgggtaagagggccaggcagctgcaggaaaatggcggcgccaggctcctcctcggagctttccgggctgcccctaggtcacgtgactcgggttcggcgcgcccccctccctcgctccggcgagggaagagcggggcggcgcccgcgcgctacgtggtggaacccgcccggcgggcgcaacaggaggcccgcccgc

SEQ ID NO: 39989 - DNA, 398 bp, Mus musculus
  source 1..398: mol_type = other DNA
tcttctgggtatatgcccaggagtggtattgctggatctcagtagtacatttgaaatgtaaataaagaaaatatttaataaatgtgatgtaagtctatttattcaaaatatgtttttaagtgttaacaaattcagataaattgaaattatgtatcttttctcgtcataatgcaataaaacttaaattaagaaaggtggtgaccgtccctacgtttcagatggaaggtatcctcgacacgtaaaaaaaaaaaaagtgccgtttccgttcttttggataagcacaggaggcggccccgcaggcgcgggcgggcggggcgagccctgtgctccctggaaggtcccgcgctgccctcccctccgcccgccccgaacagcggcgacacctgggtggcgcagcc

SEQ ID NO: 39990 - DNA, 244 bp, Mus musculus
  source 1..244: mol_type = other DNA
tcacaaagaaccaaaaaaggtttttaaaaattccttactatgttttaatctattttttaagccaactagatcacttggaagtgagtcggaggcctaaaagagcctggcttctgacttattgctttgttaaacgcttaaacttcagtgcctcaagttgccctgtgagcacttgaagaagcagagcacctctgtcacaggagttagtcattttatatcagcaaatatggtggcgcgcgcggggccc

SEQ ID NO: 39991 - DNA, 391 bp, Mus musculus
  source 1..391: mol_type = other DNA
gtcgtatttctatttcgaggcgaagccccggagcccaggcacctccagttcggggtgaacgcacaggcagcagctgcctcacgcccacggcgtcagcctctgacacgagggcgggcgtcctcgcctccggggtgaaagaggggcgcagcgggccgcccctcccccccgcccccctacgacacgcggggccctgcctcgggcgacctgttggcagggcgcgtcacgtgacgcggcgggccgcgccgtcccccgcgggcgggcctcctgttgcgcccgccgggcgggttccaccacgtagcgcgcgggcgccgccccgctcttccctcgccggagcgagggaggggggcgcgccgaacccgagtcacgtgacctaggggcagcccggaaagct

SEQ ID NO: 39992 - DNA, 393 bp, Mus musculus
  source 1..393: mol_type = other DNA
aggggatggccactgcatgactccatggaagcaagtcccaaacaaggccttttatgacatggcttgggggagaaggattttcacagcatcatcctaaatgcagactttaatcaatcattagaggaggacactagcttccagttataactatgatgtaggcactagtacctactctatcattatggaagggtaaaaatatttactgagaattagataagttcatatagcaaaactattatcctccatttaaatggaatctcagagatttgaagatattaatcagtacaagatctcacaacaaataattaatcccacatataaaattattttgttttgctactattgtgaatcatcatgtaagtatctgatagtgacccctaaaggggtcatgac

SEQ ID NO: 39993 - DNA, 404 bp, Mus musculus
  source 1..404: mol_type = other DNA
ataattaagaagcttggaatctaaatatccaaaagaaacagctaattgagcattatcatgtttaaagggaaatcataattaatgagaattatatccatttatttttactgacttgaaataccatctaatttttgcttgcatttgttggatcattaaaatgtatttatttatttctctttcaatttttattaatatgtcaatcttatctgacttccagtgtggtctgtccatttattttcccaatagataaacaggaggattaaatttcatttagctaaactctcctttgtgtgcacccattgtttctatagacagcagtttcttttcagaataaagagcagagtaagtcactgtaagcttactttgtttactcttatgaaatagcaacgcccctttgaaatcag

SEQ ID NO: 39994 - DNA, 470 bp, Mus musculus
  source 1..470: mol_type = other DNA
gtacagtcttatttagaaataaataaatagatagataaataaataaataaataaataaataaaggaatcggacagggatcttactcattagtcactcacaattttacaaaataaccaggtaaagaattttgtcctttcctgttttacagatgcagatgaaaactgaggtgtttggaattcacactgtacgcagaccagactggcctggaattcatcctcaggctactgaattctgggaaccctgtttcacagaagcagtgttctagaggagctcacgttctgctggaagcctagcggctgccatgcaacctacgccaggatcggggactcggaagtcgggctgcgtgcccaggcggggtggtgtcgagcccagccaccgccacaccgctgtttctgtgtacccgggatgggctatagcggactcgccagtcctcaccgctccagcgtctcctggaccggaagcccgtgga

SEQ ID NO: 39995 - DNA, 470 bp, Mus musculus
  source 1..470: mol_type = other DNA
tgtacttacatataataaataataaataaatctaaaaaaataaaataaaataaaatgatttaaaaaaaatgcctaaaattaagaactctgggatcatactcttgaagtttgaatcaacactggctactcagtgtgttaaactgaattacatattcgttacatcagtgctatgtgcatgaactcattgaataaaaagtgaagtgttttgttcaagacttggtcttttcaaaaagctggtattttaaaaacggtaattctgcaagtgaccttattgcaataaaaatgatgtaataatgacaataatagcagtaatagtattatgaaagatcattttctgagactatgttttttgcttgcagtttagagagaaacagcaaaaataaaagcgttcacaaaaacagtttttttttaatatagctacgtcaaatatgtctagatgtcataggaatctcgcgatactctggctggag

SEQ ID NO: 39996 - DNA, 352 bp, Mus musculus
  source 1..352: mol_type = other DNA
acactatgcaaatagtccgcgattatgagagtgccagaaaagacatttcgtttcctcgggcaagagaaacagcagcactagaaattatataactctcgaatttggcttcacgtgcacggaagcgcgcctgtatttctaactgaaccctttagcaggctagcccgtgctgctgtggccgcgccggggaaccagggctcggttaccaggcgcgcagcaacaggcctgcgcccgaacccttcaggttggccaggctgacaatttggcaggctggctaggggcgggcccctgaccctgagccttcctcggcgacgccacgcccaacctccgcccggctggagggcgcggcttttga

SEQ ID NO: 39997 - DNA, 350 bp, Mus musculus
  source 1..350: mol_type = other DNA
ctgcagtgagaacaaaaatccaattaatttgcagtatctgttgcttgtcaaggatatcaacaatgtttgttaattaaaaatctaaacattttatatcattttttcacgctgatagttgtttatcaacaaagcatagcattgatgcatggttttgttagagagcctaacaactttaaatatgaggtggtacttccttgccctggagggcgagcacccctctgctctgttccacacagagaaatggaaggtatttgccaaacaggatactgcatcaaaagggttccctcttcaatctgccagatgcaatcccctggtaaagaatataagtaactcattggttaaatttcaat

SEQ ID NO: 39998 - DNA, 502 bp, Mus musculus
  source 1..502: mol_type = other DNA
aattcaaaaagacaatgtcatttctaagtgttgttgcatttagttgccgctttggaaagaaattatttaaaattggataggtttcactcatttttagttaaatattttgaaaattatgtcttagaaaaaaaccaaactatgaatgacagggttgaatacatctttctctttaaaatgcaaagtaaatcctcagaataatttgaaatactagtttagaataaaccaacctatcatctttgaatcttaaaagtcatcatattttgaaagaaatagaattaataattgttcatactatgaagaacatatacttgtattatagcatgtaatcatgatttaaaatgaattaaattcaaattttaaaggaccccagtagcactttgaccttgataatttttttttcaaaattaatttatactttttagagttaatattgaagctctgatttatgtttctcgaaagaaagagtgtctgtgagttgagtcatctattgacaaagagctac

SEQ ID NO: 39999 - DNA, 472 bp, Mus musculus
  source 1..472: mol_type = other DNA
tactgtagggactgtagcaggcttctgtctttggtgaaagaaaaatcagaatataatatatcttgagagtctagtcatatttcatttagtgttttttccttagtgaatgaagtacacagacatatttctttggaattaagaatagacaaagtcatggctgtccttacattatctctgcataagcagtacaaagttcttctaactacttttaaattctaacatatactgcttgcatgatttgattaatgtaagctttctctttaggataaagtcttaagtgtggtatagtaagatgatgatatacatgctacaccagaattagatctatgtcttaaatgaaagctggagctagttaaagacagtgtgcatgcctttctcagtatacctaatacacgtgtatacccaaagcttgtggtagaagcatgattaactttttttaaagtcttaagaaagtttatgtaacagatctgca

SEQ ID NO: 40000 - DNA, 315 bp, Mus musculus
  source 1..315: mol_type = other DNA
agtagcatttaaattttggtaatgtcatttgtgaaaggcaaataagaatcctttcaaccttcattttacctttttaataaaatatgattaaagcattttcatcatttgcttctactttctttgctgttgttatagacctgtaaaaatatatacctacaatatcttcagtctgtatgacaaattacagttctcatccctggggaagggtatgtgtttttcattgttaagtaccatgggtgaaacttaagtgtcctctgatcatgtgattctgttccaaaaagaagcttctctgatgagtgatgagagcttcattta

SEQ ID NO: 40001 - DNA, 311 bp, Mus musculus
  source 1..311: mol_type = other DNA
ggggcgccagggaggtcccgagagcactcttgaattaaaagtcctcttgcagtttgcagcaagaccgtggtgtcgcctctcctgagtcagaacgtgggggagtacagtaagaacttaaattgttgttggaattctttctttaattattaatctttaaacctagctggcattcagatatttctgaaaatgaaattggaaaatattttaaagtctagagtataccagggacccacctggcagaatcaattcccacaaagttgcaatctgggtaagcgacagactagttagtacattgctttcaattttcgttt

SEQ ID NO: 40002 - DNA, 330 bp, Mus musculus
  source 1..330: mol_type = other DNA
gctaggacccgcttcataggagcattctaaagataaaatgaattgatgtatgctaagcatttagaaaaccgcttggcatgtgtatgtgaaacaaggctcaagcatgatcctgagcaagtcattaaccttacagacacaagagcagggtggacttgttagtctctaggtgaaaccttcctggttactgagagactcggcactatggcacactgtgccggtctttacagaacgattataaaaaccccaaatagcacagttctatatgcatgcatatatatatatatatatatatgcatctctctgatggggtggatccaccttaacaaggta

SEQ ID NO: 40003 - DNA, 310 bp, Mus musculus
  source 1..310: mol_type = other DNA
acagtaagaacttaaattgttgttggaattctttctttaattattaatctttaaacctagctggcattcagatatttctgaaaatgaaattggaaaatattttaaagtctagagtataccagggacccacctggcagaatcaattcccacaaagttgcaatctgggtaagcgacagactagttagtacattgctttcaattttcgtttgggtcccatgatgaactcgccgcccgcaaatgggcgccagaaggttctccaagaccccgctttcttaactacatttcccagcatcctgatggtgagaggact

SEQ ID NO: 40004 - DNA, 330 bp, Mus musculus
  source 1..330: mol_type = other DNA
caatttacctcgagagaaggtatattgttagggtttttccaaatttgttcagagaatataaatagaaatgaaaaagattgctttcccccaactcaatgagaaagtgtggtggcaaatgcaagccaataaggacgatgcttaccagttcttgtatgctgaagaatacattttaatgctacaagaaatgttgcatttaaaataggagcactaggatgctcattgacaggtcagctccgcgaaccgcagtcctgggacctccatttgggggcgatacccacgacagggggttccagaaacaagcctcggcaggctcctgcggctaaggtgacg

SEQ ID NO: 40005 - DNA, 359 bp, Mus musculus
  source 1..359: mol_type = other DNA
tgacatttagacttgacaggtctcgactcctcctgagggctgaggttcaaggcctgagccatcaatacccttccagaaatgtgacttcttcaaaagatctccagctcctctgggaaagcttttctcacatagcacctcctaataaaagcggcgtctccgccttaatgcctgagggacagctggctcagcgagccccgcccaggctcccgggagcacctgagacggggcgactggccttgactggagccaacccccgcccgcacccaggaggcaagcgggaggaggcagtccgtctccgagccggaggtgttgcgggccgggggcggggcctgtgacacgcgcgggccagccaatcccgc

SEQ ID NO: 40006 - DNA, 345 bp, Mus musculus
  source 1..345: mol_type = other DNA
tcagcactggggtcgtggaatgacaggactgcagtcccccctcctagccttaaaaaggttaaagggagtggcaccagtcctctggcgggggcaggcaaattgcacagagctatttagctcttagcagcgcttctcaaaagaaaaacgatttgaataaatcacttcaactcacctggtttgttttctcctcctaagtccaaggactggagtcagtccctgccctggtcctgctgctactcagggctcagctggagcgagcggcaatagcgagcccagcagcagcagcggcatgctccagagctgtgcactctgggaccaggatgctctggtcagagcgcccagaga

SEQ ID NO: 40007 - DNA, 161 bp, Mus musculus
  source 1..161: mol_type = other DNA
actctcccctctacttaggtgaggaaacaagtacagggactcgatgctgggcccctcaaaggaaatggagcgaggttcacagatcgctctgcccccttccagccttctctggcttttctgattggctctcctgaaagtccgtcaagacggtccttccggcg

SEQ ID NO: 40008 - DNA, 319 bp, Mus musculus
  source 1..319: mol_type = other DNA
ctgtctagcaaaggatttctttgaccggcgcgaggcccgtgcccagagagtctccccaggaagtctaagggtgcgactccctgtgtcccggggtggcgaggccttgtgcaaccccagcgggttgcggttcactccgactcgcgatggcatttctggctcgacagccctgaaggtcctcgaaacctcggctcgccgcagctccagggctccaacatggcggccggtccagttcttctctgggcgctctgaccagagcatcctggtcccagagtgcacagctctggagcatgccgctgctgctgctgggctcgctattgcc

SEQ ID NO: 40009 - DNA, 129 bp, Mus musculus
  source 1..129: mol_type = other DNA
agagaaggctggaagggggcagagcgatctgtgaacctcgctccatttcctttgaggggcccagcatcgagtccctgtacttgtttcctcacctaagtagaggggagagtcgagctacgagctgggccc

SEQ ID NO: 40010 - DNA, 309 bp, Mus musculus
  source 1..309: mol_type = other DNA
gaagtggctcagggagaacctttgggccaagggctggctttgacttaactttaagctagtagtaacttctaccaatcctagaagcactgatcagaatcttaggatcagaagtagacagattaatcagtttgggaaggccaattctccgaacttctcagaagtctagtttcttttgctgaatggtaacaaaacatgtagttcattaaatgataagtcattaaatttccaaaactggaatcgaaacccagatgaagcctagctggggttggaacacaggcttctcacccctggcccgggaccggggcggtc

SEQ ID NO: 40011 - DNA, 268 bp, Mus musculus
  source 1..268: mol_type = other DNA
cagacatgaaggacagaaattccttggactataccatggctgtcccaggaaagaaggcctttctttaaggcatcttgcattcccaaggaaggaactgttaattacttctggggggaagggggcgcatcacctgtgtggcgccccccggtgccgtggtgaagccctccaagcgccgctcggccgggtgtgtgcgtgtgtgcgcgagtgtgtctcgctcgctcactcgctcgccctgtgtgtaagagagcgagggaggggcgggattgca

SEQ ID NO: 40012 - DNA, 282 bp, Mus musculus
  source 1..282: mol_type = other DNA
gagccggccccagactctggaccgtcgatccagtgcagcccctctgcagactcgcccgccccagactcacggcgggcgctggaggagcccacgaggcggcgccgggctcccgctctgcaacctgccctgcggggcgagagctggctgcagcggccccggtgcgcgctgcggttagagccggtaacccggggacgcgacccctgtgatctctgagctccttagtcattttcctagtgatttaaaaatccacaccactggaaattcaattgcgtggtctctaac

SEQ ID NO: 40013 - DNA, 540 bp, Mus musculus
  source 1..540: mol_type = other DNA
ggggaagggggcgcatcacctgtgtggcgccccccggtgccgtggtgaagccctccaagcgccgctcggccgggtgtgtgcgtgtgtgcgcgagtgtgtctcgctcgctcactcgctcgccctgtgtgtaagagagcgagggaggggcgggattgcagctgttacatgtggggcagcagtgctggcaggaacgccggccgggagcggccgggagccggagcccggcgtgcgcgcgcggctggaggctcgctggggctccgctccccgcgggagctattgttggtctcaccggagctgagctcagaaccgggacctgctccgtctctcgcggagcggcggagccagcggcgcggtgcctcgcctccccgccgtcctcgtccacgcttccccggcggtggcagcctgcagccacggtaaggctggggaccacggcggaggctcgccagttctgtcgcctccgggcagctcaagcagcttgctgggggctccgggagatgctagcctgcttccctgctccgcactggggagggagggaggaag

SEQ ID NO: 40014 - DNA, 285 bp, Mus musculus
  source 1..285: mol_type = other DNA
agatataaagccctaaagctctgacagtggtgtgcatctgtaagcccagcactattccgttttgcaagaaatgaatccgcatcattccaagaatgtttttaactgtagctggggactgtgtatcaatagttatacatagctacagtatcaaaatcctcacacccctgtgacaggggatactggtttttgtcagagtcatctgggaagaggctcctcaattgagaaaatatctccatcaggttgacctgggtgggcaatcactgtgttacctctgagcaggtggcc

SEQ ID NO: 40015 - DNA, 411 bp, Mus musculus
  source 1..411: mol_type = other DNA
ccatgctgacaaaatagatagcaattcttactgtgctctttgtctatgatgatgatgatcatcatcatcatctaggttgataataaaagtcagaaccactgagactcaatttttttattctgttatagacaggatctgcctgggcaactctagttgtagccatgcccagctttaatatggcccagttgcaaagaaatttaaattgttggaattttcacatccgttggaaaactgttagccattctaggcctccatcggggccctggaaaacaagatcctggggtacgtgtgctgcacaaatttcctcaagcagctgctggcttggagcccaggtcgtgccctgtgtgctttgcacccacacaaaccagcctttgtgaaggacaaggcagcctcactctggccatgaggtag

SEQ ID NO: 40016 - DNA, 398 bp, Mus musculus
  source 1..398: mol_type = other DNA
tgagtgcattaattataaacccagagtcaccaataatgtgttttgctctgtaggatactttacaaaatgtttcagtagtgttttacaaacaatattacaaacatcattgtttatgaagcaatattctttatgttatgttcaacattgataatgggtactcattttatgagttttcagtaaatgatttttatgacatatagtttaaaattacagatatgtattaacttaggctataaagaaataaaggcaagtaaggttgcttattattctcttaaaggcatgttaaataaacaggctgagtacacatagcagtcttaagtgacctcaaagtgttcaggcagcctattttggttgatcatgattctgtgactataagtcatgcagacactgtctggcaa

SEQ ID NO: 40017 - DNA, 457 bp, Mus musculus
  source 1..457: mol_type = other DNA
gtatttttattggagatattttcaagtctgtccagagaagagttttacaattctttcttacaggaaaatttctgacattctcatctggaaacacttaccacacacatatctatgtgtgctccttttcatcataagctccttgatgaactaattatttcttgtttaactagataaaagcattatcatgtgtctcactgagttacgaaaaaatatttttgtgtaaacttaaaatgtagctgaatatatgcaaaggccatttttttcttttcaaacaaatgcaagtaagagaaaagatttgcccattctggcaggcaaagctcctttttaagcaacgaattgtttggctaccaggagactgacttcccagagcttagctatttctgagaactcctgcaccgcccctaccggtgcggcgcctcacgactcagactccacccagcgtgatgacggaagagcg

SEQ ID NO: 40018 - DNA, 409 bp, Mus musculus
  source 1..409: mol_type = other DNA
atatgggtaagacctattagtttattctgtgcttttaggaatttattcaaagctgtcacaaataacagcatctaacatccgtttaattttcagaactctccaaaatatagactattatctccattttcataagagaagcagcccttagcttgtcaaactacaacattctgctctttctcctagtttaaatacatggaaatctcaggacacagtaggtggagacctcatgttgcactatttcctgccagccaggtgaacaggaaaaaaggaaagacagaatttctgttctcaagttattactataaaactaaataaataaataaataaataagggagtgttcatttcaacttttcaacccttgtcatgaaaactcaagactctggagacgcgtcctggaccctgagggcg

SEQ ID NO: 40019 - DNA, 564 bp, Mus musculus
  source 1..564: mol_type = other DNA
atgggtataattatgacctatccaatttgtaaggaaggtgaatgcagtaagctcccagcacacagtatgtctgtttgctgcttctctggcctagagatgtgagagttaacttacagtgaagcaggactcatttcagccagaatcggacttactgagaggaaaccggagcagtcctttctctgtcctactcttccacgacgctggggaagaggggttgagcataggctcaacgttcgacctagggtggatagcctccgcctgcagctccaggcctgaggacgcagctgctggcgacagctcgtctcacggcctccgggcctgtggggtccaggctaactggcctctgcgccggctgccctcggggacctcgcggggctgtgggcgtggcgagcgcccgcctgctgaggcgcctgtgtgtgtgtgtgtgtgcgcgcgcgcgcgcgcggccggagggcggggggggggggtggaactcgagcgcgcgcaggcagccgggcccgcgcgcctcactgcctcgtcctcgccccggggctgccgggcccctcccctcccccgcgagccgcg

SEQ ID NO: 40020 - DNA, 321 bp, Mus musculus
  source 1..321: mol_type = other DNA
taaagccaagactggcctagaaccagcctaggctggtgttgtgtgacttttttctgggaaaatgtgaataaatgtctactcagtttagatagtaaaccagtgagttttattggagtaacttacaggagcagaaatgactcaaagacatctgtattacccagagccctgtgtgacagctccagcagctcaggctaagcttccctccagatggattgtttatcccagaggaactaacagctggtgtcaaagagtaatcttggcatacaccatcatgtctgtctcagaagccaaaggctgcctgctgagacagcttctcctcac

SEQ ID NO: 40021 - DNA, 453 bp, Mus musculus
  source 1..453: mol_type = other DNA
cccagactttctctgagggaggacaggcgcttaactccaggactctcaggactgagaggtacagaagctggaactactcagtacttcagagggccccactcctgggcggggcgcatgggccggactagactaggctgggccagtcgaggtcagggcgggtcctccgctcccctaccgaggggtcccagaccgcagggatcctagatggacctgggcagtgcaactgcgcggtctcagagctgcgggacggaactgagccacagcgggggttaccctgcgagctcccagtcgggccgcgtcccctttaaggccagctggtcccagtgccggcggggcgggccagtagggggctggctctccgcgtagcctcctgggaggtggagtccgggcccggcacgcggcagactacaagtcccggcggccagcgcgcggcccgggacgacccgcccctgc

SEQ ID NO: 40022 - DNA, 186 bp, Mus musculus
  source 1..186: mol_type = other DNA
taaccccagaaagcttgcttttataggctttagataaatgaactagccattatgaccacttgatttttggatgctaagataatgttacatacatacatacatacatacatacatacatacataccaatgtttccctgtgggttatttattataacccacttagaagcccggaacctcgcgttgggt

SEQ ID NO: 40023 - DNA, 335 bp, Mus musculus
  source 1..335: mol_type = other DNA
tgctatgaatgagacataaattcagattaataccttgctgtacatctttcagtaaggcatttaatttctctaatccattacaacttgaatccattctcttaatcttattaatttgaggtaaaatattttttatccttatgaatgagatttcactgcaggcgcttaagcccttgtgaaccagctgcaactcaggcattgtgaatgtactatcctttacggtccgtttccaaagggccttgggacaggggtcggagcaggcacagcccagtcctctccgcgagacgagggcgacagggcgggaggctggcgccctttgtaaaggccttatccgcatg

SEQ ID NO: 40024 - DNA, 484 bp, Mus musculus
  source 1..484: mol_type = other DNA
atatttaaaaaaacaaccagccaaaaaccttatttatttatttatttatttatttatttatttatctatttattttgatgagatcaagtacatgtaacctaggctggcttggaactcattatgaagaccaggttggcctccaaatggtggtagtcccactaagattctttaacatatcgattttgaatagtccattttgaatgctcttttccaatttaatttaggaaacaatttgatgccaagtcttaaggactgctgtccagccctggcggctctttgtcctgtacagagctgttccagttcgatttcgggtaacctaaaagaactattgattgcctgcagtcctctagctggctgggcgagctgctgaaggaagagttggcctcctgctgaagcagtcatgacaagcagaagcctggcaggtttgtcgatcacctgatacaggggaccaaacgctgggattggctcaaaacagggctgtgtt

SEQ ID NO: 40025 - DNA, 317 bp, Mus musculus
  source 1..317: mol_type = other DNA
cgggcctggtgcacgctaggcaagttatttgtttaatgacattaagtaagcttgaaacttggtttaattatacttccattcagggaagtcaaacccagatgtcatacatcctaagggagtgtgctaccactgagctatagctctgcttcagtgccaagtattaatttgactacctagtcagttagtatttttaaagaagtcttttctagcacagaactaaggaataaaacagacaagtttcacaacatctatctttgagtggcagatggttttctagggcggggtgtcaggaacctctccggctggtaagttatctc

SEQ ID NO: 40026 - DNA, 440 bp, Mus musculus
  source 1..440: mol_type = other DNA
ttcattattgatcttaacaagggttaaataataacaggaactctattctactcattgttcaaaatgagatttatctttctattatgtagactgttttccaaagaaagactacaaagaccttcttgaaaaacaaggttttctgaaacctaccaactacaatgaagttaaaaacctgtaattgagtttatgctaaatgctaatcataataaagttccctttttattaagctttgcttgcttgccaaagtcataaagaacctttgtaagactttgttagtctcttcaccagagagtattcttaaatcttcagacttgcagagtagtaccattcagaaaaatgatcttaaacctttcattgattcaacacttattgatggataacttctaaattactgtaacaaagtaacctgactcactgggcagtggagcttcaggaagagg

SEQ ID NO: 40027 - DNA, 224 bp, Mus musculus
  source 1..224: mol_type = other DNA
agtgagctgcctgcaggctgtgcagctcagcaaactttctgagacttctcagaaaactcacgcagcgcttctgttcgccgagggactctgagccacagcggttcagccaagtgaagggcccagagtgcctctctgtccccgatctgctccgggccggcgtggtgggatcgcggcgcctggcgcgagacgctcgccgccgcaggggcgtccactcgagagcgcct

SEQ ID NO: 40028 - DNA, 507 bp, Mus musculus
  source 1..507: mol_type = other DNA
acaccggcgcgggggacccggccccagagcgtcaggccggcccccacctccgtccccgcggggcacggtggccctagggggcctccgccccgcctccccagcacccaggaacccccgggctacgaggagtagggactccgcggaggccaatccctggcgagggacggccgcagagccccagggtatctatggagagctaaagcgcgccagggccgcttcccgccgggctatgtctggcggcggcgcctgcagcacccgctccagctctgggaacggcaactcgggcaggtccagcagcggcccgcgggcagcccggaggagccatcgccgctgccgctgccgccgccgccgccgccgccgccgccgccattttgaactggaggatggaggagaggcgctctcgagtggacgcccctgcggcggcgagcgtctcgcgccaggcgccgcgatcccaccacgccggcccggagcagatcggggacagagaggcactctgggcccttcact

SEQ ID NO: 40029 - DNA, 467 bp, Mus musculus
  source 1..467: mol_type = other DNA
aaatattttttttgaagagcaggctagctcggcctcagaaatgctgggattcccggctttttcagcctgccagggctaaaaggagcttactttgcacagacactcactgtgttagtcactcttcttgcagcaaaaaagaaaaaaaaaagttactttggctttagtttgaaaagattccatcattttctaaaagtagtattactcacaggggtagtccaggctggcctaaaacttaagatccttcttgttgattattataaccacagtttagtagtcttgttaatacctaagcttacaacaaataaaggcaaatactatatctgtttggcttctttcttgagacaaattcatatcgcatgagatcatttcttttgctgcttaccagtaatctactgcatgagtactgttaggaacaaagatgctatagcaactataacagtagtcacaggaatgaggtcataactgag

SEQ ID NO: 40030 - DNA, 243 bp, Mus musculus
  source 1..243: mol_type = other DNA
tctccacatagaaaatgtgttcatattgtgtatcataaagaaaaaaattaattgtagtaccagtaaactggaaaatcgattatgtattggaagccagcctgggatacttaaagaagcattcactgggacctagcgaacagggaaggcaagggttcctaaccagtggcctacctttggcgctcgatctctccggcgacgtggggcgagggactcctgggggccagccggctcgctgcggacctc

SEQ ID NO: 40031 - DNA, 601 bp, Mus musculus
  source 1..601: mol_type = other DNA
ctgcaggcaaggtgcttccagcaggtggacttgagtttgatccctgggacccaccttgcccgtatgtatgtatgtatgtatgtatgtatgtatgtatatacatacatatatatatatgtgtgtgtgtgtgtgtgtatgcacatatataaacataaataagacaattagataattaagcaaatgcattagataaagtgtgaatataattaacgtcaattttacacataaatggatatatatattttcccccacacttacgaaaaaagttcgagtgtgggtgaacggggtggctgcaaagatgacctctctcgatcgccacatgctctagcaccagcgtggtgcggtcttaggctcggggtccggcgctgagagcccagagctcgggcgccacgcgcgtgcgcagtggtctcggggccctggccctgtgctgagggagaccgttgtcccctccgccagtgcccagggacagccccggctcaggtcacatctgcacagcgcagccggggaggggaggagccctccagcgcggaacccgggctctccactcggcccgcccctgaggggcgtgggagggcggggcggcggacttcggactccagcc

SEQ ID NO: 40032 - DNA, 580 bp, Mus musculus
  source 1..580: mol_type = other DNA
ctggaacttgactctcagctggtgcaagacttcagctccaggaggattctgggaagccaaccaatccaagggtttccttcccacactggatgccaatgagaacaagcaaacaatgttttcttagtattttaatatctcatgatgaagataacataaacattataaactttgacctgcaggcaaggtgcttccagcaggtaaaggacttgagtttgatccctgggacccaccttgcccgtatgtatgtatgtatgtatgtatgtatgtatgtatatacatacatatatatatatgtgtgtgtgtgtgtgtgtatgcacatatataaacataaataagacaattagataattaagcaaatgcattagataaagtgtgaatataattaacgtcaattttacacataaatggatatatatattttcccccacacttacgaaaaaagttcgagtgtgggtgaacggggtggctgcaaagatgacctctctcgatcgccacatgctctagcaccagcgtggtgcggtcttaggctcggggtccggcgctgagagcccagagctcgggcgccacgcgcgtgcgcagt

SEQ ID NO: 40033 - DNA, 353 bp, Mus musculus
  source 1..353: mol_type = other DNA
atcagaaatagctattattttcaagggcaatgcatgctaaatcaaattcaacttattaagaaattattcaacttaactaggctctgagttttggctcagactgggtccgacgtgacgtgagatcagacagttttcacacacagcagacgcccgggcccaatgacgtcacgcggcagccaggtgattccctagcctctggcgtcaagtgctgatgacgtcatcccggcgccccacctccctggccgtgttggcctggttgggtctgtccggcgctccccgccccctcccacctgcggggggcggaggccgggcagagggggcgggccctggcttgggcggggtcgtagggcgcg

SEQ ID NO: 40034 - DNA, 567 bp, Mus musculus
  source 1..567: mol_type = other DNA
gtcatgcgcctcatgtgaaggtacattttttaacatttcagtcttaaattctatagggcctacttcataactctgtgaaatagacataggtttgtaaagtgtggggacacatagtaaatagcccttaacaaatagtagctctctgttcaaaggaggtggttggtattatctttcatgggacacattttagagagtcagcagaaaagaataacctctccattctagtctgaatgaatcttgaatctaatttgagtaggtcttgattctagaacagctgttctcagctccagatcccttgaggggttgttgaactaccctttcacaggggtcacctaagaccattggaaatgtcagatatttacattacaattcatagcagtagcaaaattacagaattacaaaattatgaaatagcaacaaaattaattttatgattgggggtcaccacaatgtgaggaactatattgcagagacaatcagaacattggttatgtatttgtttcccgcccctcagcgcctcttcagaaaaaaaggggcgggggcagcgctctccccgcctcctttcct

SEQ ID NO: 40035 - DNA, 325 bp, Mus musculus
  source 1..325: mol_type = other DNA
agaacagtcagtgttgcttgaaaggccctgcatgaaaagattgaatttaatccatagtttacagagttcgaagtacatacaacagcatatgctactgaagacagccaatgtgctgtccagtttctgattcagtgagtgtatggtaaacctggctcattatcatgtttgaaacaggtttgttttcctttaatagctaccatgaattatgaaagcaataataactacgcctatttttatattaaccatactacagtacttggtcctaaaattggctgcagccctgtgtgagtgtggccacgcccccacgacgagtggccacgccctg

SEQ ID NO: 40036 - DNA, 272 bp, Mus musculus
  source 1..272: mol_type = other DNA
ggaggaggaagaggaagaggagtccttcagcctccttcctcatctaacacacacaccgggtaagtctgtcctgcgtgaggtggctcctactcaggtggctttgcaaactgtctggataagccaaggtggtcttagtagtgccctggatcaggtgtacacatgtgagaccctgaggtcctgatggttggccccaggcccgaggttcccactggccagcagtgccccccagaccttcgaggcccccagggctccgcctcctgggagaaggcttt

SEQ ID NO: 40037 - DNA, 263 bp, Mus musculus
  source 1..263: mol_type = other DNA
ctgatcccctagaccgttccagtgtgatgttccgagacagcagcatctctgtctccaccactcagagcctcacgtctcccacgggaggtggtcctgtggctatgtggttggatcgatcaaaccacggcctctgggagccgagccagccgtctgtctggcagtgacaggacctgacaggctaccactgtagtcaaggtggttgccacagcagttgatatcagtgctctggtccccagggagcccacactcctgtgtgccttctt

SEQ ID NO: 40038 - DNA, 326 bp, Mus musculus
  source 1..326: mol_type = other DNA
accaggtcagacaagctttgtctctgtggccttagcctactgttggccagccctggtcattctccctgggattccctgaggagattgcttattccagggcattctgaagagagggtcaaaaatctgggccctgctgctttagtctatgcccaggaggtctggacaggatagggccagcttcccttaactgacctgtctgagcccggctaagcacttagtggggcacgcaggtcctccaaggccaatggcgaggtaggcagccaacgtcccgggatgctctcctatcgccactggcggccagcctgcctctggcctccaatgggagg

SEQ ID NO: 40039 - DNA, 363 bp, Mus musculus
  source 1..363: mol_type = other DNA
tgaatcatttacattttacattttacattcttgagggctaggactatattcatatctgtcctgagtactctcagaagcactgagtgggtgaaacttttcaaagtaggttcaaatcagtatactctaatgtcattttaattatggggatttctggctttctacaaggattctaggagtcaaaacgcaggcctctatatgcaacttataaagattttaaagaatagcctgtgttagcagcagcttctatagaaagcattaagattgtttgttcatcctacaacattctagcttgatctgaaaatgcaagcagttagttgcacctaccttcaccctacccctgaggaggaggagtgatggcggatt

SEQ ID NO: 40040 - DNA, 307 bp, Mus musculus
  source 1..307: mol_type = other DNA
acgtttttttttttttttaagaaaagatttgtttgtgggtacactgtagctgccttcagacacggacctctggaagtccagtcaacggtcctaacagcggagcccctcagtgtatacttttaaaggatcgacactgaggtgtctcattgtgcaagtttaatcttgacagagaaaggtttctttcggggtcggccgggttccccccgcgcctgccccgggaggacgggccagaggctcggtgggcggggcctgcctctgggcaggttcagtgacggctctagccccgcccctgccctttgggtaaggg

SEQ ID NO: 40041 - DNA, 364 bp, Mus musculus
  source 1..364: mol_type = other DNA
agtggcttcccagcaccctctgaggggacaaggaaggcctccttcttctgagaagcggtactgtttcagaggcagacattgctcttacccagtaatgggccgggagccccagcctgcagtgggtgctgagaacaagactggcattcaatgtcacaccctgtgttgttcagatgaactctcatcagctccagtctcagtgggaagagaagcctcttaggttaggctccacccaggcttcagctctgacccagcctagggcagtagcagcagctgggcccaccagggaggcctcaacctcccttgcacagcagagcttcccaggaagatctccctgaacatgttccaccctctggcacagaggaga

SEQ ID NO: 40042 - DNA, 434 bp, Mus musculus
  source 1..434: mol_type = other DNA
gggccacggcagggaaacatggctggagttccccacccaggggccctttccaaggtggcaagttcctgggatgtggatagaagtacctgcagcaggcaatttctctcttcactcatgtattttttttcaaacacacacatgtcatatatcatatatatttgcatatatatatatatatatatatatatatatgcaaataatttcggcatggaaatccagccagaagttgactttccctccaggaaaaaaaatatgggaccttttttaaaactttttttttaagtggggtaggggagaatttgagagaaaaaccctcacccaccctagggtggaacccgtgctcggccggcgggggcagggctgctaaaaccggtgcagccactgggtgccgagcaaggggagcccggcggcgggcgggggcgcggagaaaagcg

SEQ ID NO: 40043 - DNA, 427 bp, Mus musculus
  source 1..427: mol_type = other DNA
gaatgaatgaatgaaattgtaaatgaatgaatgaatgaatgaatgaaaatgaattgtttaagaagaaagacatacatagagcctctgtgttttctccaggactcagaaagcaaaagacttgagcactatgctgctatgctacaagtggcgtgtggtagaaagtattgaaggagacttccttccagtgtatggggacactcatcaaagcattgtctgtgccaggctttgtatgggggggatcacagccatctcacagtgagtgagagctgtgcactgccagggttgctctgtctgtgggagatcagaaccggacacagatgtgagcacttcctagcacctgttggacctgagagaggggctacagctgtagaccctggcgtctgggccccaggcccctccctccagctcctctgtctagaagacagaa

SEQ ID NO: 40044 - DNA, 232 bp, Mus musculus
  source 1..232: mol_type = other DNA
gcatccaaattcgatgggatttataatactagaaattaactttgagttcttggatcagagaaacaatatattgggtccctatcgatctccacaacattgtgtggttaagaacaaaggctgatggtggccacacgtacggactcggactacaactcctgtccgccctttcctttcaaaaggcagaggaaaagggatctacacctcccggcgagccgcgcgcgcctgcgcctgc

SEQ ID NO: 40045 - DNA, 569 bp, Mus musculus
  source 1..569: mol_type = other DNA
aagtgaagttgcaataccatattcccaccaaccaagggagacaatgagtcggcatttgaacactgggttgcgccttcgcgcccccgggtggcacccactgggccgggtgcccgcgagcgcacgtgcgcgcaagtccctgaagcttccgcgccccactcacctggccgggtcccgcgggaacctgaagaaggccaggaagttcggcatggtcgtccggccgccggccggtccagccctcccctccccgcctcgtcagggcagcgcggccgccccgcggggccggggaggggagctgggccggccggccggctccgcaaggccgcgcgcggaggaggggctggcgcgcgaagccgcgaggggcaggaggggcgcgcgggccgaggctgggctggggccgcggctccacagtgctgtgtgcggccgggaggatttaccgccgccgccgccgctgctgcacctccagcccgcccgggagggtgctcttcgcaggcgaccgtccctgcgggcgggcatgcgcactcgagagggtcgggccagctggcacatgcgcacaacccaacccgcgcaag

SEQ ID NO: 40046 - DNA, 398 bp, Mus musculus
  source 1..398: mol_type = other DNA
ggagattctgtgttaattcactcagcagatgtttactgaatggtacatatgccacgcactgtgtgcaacacagcggtgacactaactcactgttaacaagatgacccttgccataggcctctgtgccagaagtcttaaattttattatcctttacatagatccatattggtagaaaaaaatatctaaggaaacagaaatacgggcaaaatttatgcttaataatctgaaagtctaacagcagaaattggttaaataaattacagtctgactataataggctagtatacagtcatgctaatgaagagtattcaacaaatgcttgtgatgtttaaaaagataaaaattatatgcataaattttaaaaagttggggtgttttgttttttaaagatttattt

SEQ ID NO: 40047 - DNA, 454 bp, Mus musculus
  source 1..454: mol_type = other DNA
gattttacgcaaaatttgatactttgttctaaatagcggccactcattttgaaacaaatggaaaccaccaaggaagttactgcacgggttaaaaattaaatcctctacaactcatgtttgcgttcaacccgcgagttgtttcaaagcaatcgcaagggctttaagagtctacggtgactaacccggggttgcgctcgccagtcccggggagactacagcgcatgcgcaattccttccttgcgcgggttgggttgtgcgcatgtgccagctggcccgaccctctcgagtgcgcatgcccgcccgcagggacggtcgcctgcgaagagcaccctcccgggcgggctggaggtgcagcagcggcggcggcggcggtaaatcctcccggccgcacacagcactgtggagccgcggccccagcccagcctcggcccgcgcgcccctcctgcccctcgcg

SEQ ID NO: 40048 - DNA, 307 bp, Mus musculus
  source 1..307: mol_type = other DNA
tgggagatcccagggaagcccctcttcaccatgttgggactgagagagcccctactgcccgctgggagcccttgcacctcttagaggtgagcgcccctctgagagctcagggctcaagacctcggtgggccgtccctgcgcccggcgcgccgctggcactcaacaggcatgtgtcccggagcgccgggcgggcgccgcgggtccgaggcgtcatggggaccccgccccgccccgcgcgagccaccgggtggggattcggcgcgctgacgtgggcggatcaaagcgacggtccgcgccttataaaacg

SEQ ID NO: 40049 - DNA, 267 bp, Mus musculus
  source 1..267: mol_type = other DNA
aaggactccatggctaagcaagcgttagtcaggtgagacagtctcttggctggctggcacactttgtggctaagcttactagatcgcggctcggtggcggctccccctctcagtcccgccctccactggaggctctgttaagcgctctagaggggtttgacagacgcaattgaggccatcctagagtccctccgcccctagccattgcggccgacgacggacgggcccactggccaatagcacgtcccttggccgccaccgggtccc

SEQ ID NO: 40050 - DNA, 301 bp, Mus musculus
  source 1..301: mol_type = other DNA
caacctgactgtcagcttgaacctgtgggctgaggggtcaccacttatttgtgttgttacttcataactgtaattgtattactgttatgaatggtaatgtgaatatctgatattcaggatatctgatatgcaaagatcatttgacaccccctggggtcgtgacccataggttgagaagcaaggatgaaagaggtttctcttccgcctttagcctggtctaggcaggccctggagctgggctgggctgggctgggctggggctggactggggctggcctggcctggccctgccccttcaacc

SEQ ID NO: 40051 - DNA, 410 bp, Mus musculus
  source 1..410: mol_type = other DNA
acatttaggtcatttcaaatattactttattctcccacagaaatatttgcatatgtgctagaataaatatctaggctaggcatagtagctcacacctgtagccacttgggaatctaagacaggatgatctttctaagttcaaggccagaaaataatgaataatacttttttaaaagatgatatgccttgtaacttacatgtaactagtaacttacatgtaactagtaacttacatgtgggatcttcctagagatgtctctaggagtctccttaaaaatttttagcagtacgttttctgttcactattaataaactataatatttttaacttgtgagaaattcctaaaatttaggctagcctgggctacataatgcctcattctacctatgtagatgaaaacattagcttt

SEQ ID NO: 40052 - DNA, 245 bp, Mus musculus
  source 1..245: mol_type = other DNA
cagggtcactatgtagcctgggctggcttcaaactctttttttgctggtaaaaggtaactgtcaggtccagctgtaacctaataggcctgccgcacggtccggatcgtcccgcacgtgctcaaagcccacgttccagctgctctatagactctgaaccgtacagttcagatggcacagtccggggcggacccttttgccccgccctatagcgtcacgacccgccccgttgtgaggttataaagtg

SEQ ID NO: 40053 - DNA, 494 bp, Mus musculus
  source 1..494: mol_type = other DNA
cccacctcccttgctgagccgcaaaaaagggtggggccgcctctctgcagcagaagacgacagcggcagcggctgcggcatcaccccgctgccaagcctcgctaggcggccggctgcttgctctgccggggtctgctagacaccgcagtcgcagagagggcgcgcccagacgccctaggcctggactctgggacgctgagcctcgcacagcagctcctctgcagcaggcgtttgcagccggcaagtgcatcacaagggcctgctgcatcgcccgcttctggaaccagctggacaaggcggaccaagtactcggaggccaccgacccctccgcagccgccagctccgctgcagcccgcgttagcgcccccctcgcgtgctgtcgccatagagacgcagccagcccagggagcagttgcccgggcaacagggcctgcgcccgggcccagcgtcgaccgcgagactgtagccgcccccggccggagcgggctgggct

SEQ ID NO: 40054 - DNA, 281 bp, Mus musculus
  source 1..281: mol_type = other DNA
agaaggaacagccagagtatggctaggccggcctctcccaggccggcctctccctaaagtatctattcaggggctgagtggtggcctcagcaggcaccagagcccatgttggcgcacgcctttaatcccagcactaggccagcctggtctacagactgagtttttttaggacagcaagtcctcaggagcttgggacttgaacctatcaaggacccagttctgctgttgcaacctctcagctgcgcgccctcccacctcccttgctgagccgcaaaaaaggg

SEQ ID NO: 40055 - DNA, 283 bp, Mus musculus
  source 1..283: mol_type = other DNA
caatgctgtatttaattcatccaggatgttccctccccagggatcaagggtgaaccctggcccctgcctctgactttttcctaaggcaaaggagagggcccctgactaaggacttgtgtggggaagacgacacgtccaggaccgcggaatcccaagaatgccctggctcccaaggtctagctggtgcgggaggagagtcccctctacctagtagggcggacccaggggctgggagagagcccgcaggcacattccaactttccagaagttcatatatagatcc

SEQ ID NO: 40056 - DNA, 314 bp, Mus musculus
  source 1..314: mol_type = other DNA
tgggctgggctgcctcatcctagggctcccctgggaaacagatctgctttttatttttacaaactttttactgctcccaaatgctactcagtgcaaggagccctagcagcggggaggagcaagaggctggctgtatcacgctacgccccaggttccgccatccgatctccaggcggctgggcgccggggaccggcgccccgcctttgctcccggcccggccaggggcggggtttctgttggtcccaccctttaggggaggggccaagctcgcaggcgctccggagctgtctcggcagggctcggctcggctcgg

SEQ ID NO: 40057 - DNA, 443 bp, Mus musculus
  source 1..443: mol_type = other DNA
ttatggaggtcctggggaccgaactcaggtcctgagggctgagattcaccccaacagagtttgagtgtggcacagtggcagaacacttgcctgtcatgcacaaggctttggtcacatacacagtatgtgaagtttgaatatatttctgtcaaaaatgtaaactagggtgaatgtgaaaacaggaaactttattttatctttgcagaagttgtcattatacatttattataattaaaccacctacatcctaattagtacaagattataaaattagattcctagcctggctagctcttgcaatctcaggtttaatatctaacacacacacaaaatcaatatataaaataaatatatatttttttatagagtgaggatcttttatatgagcacagtgaaaattgtcaaatattgtaagatgtcccttgggtaccatgcacttttta

SEQ ID NO: 40058 - DNA, 233 bp, Mus musculus
  source 1..233: mol_type = other DNA
gtcaccattaccctcctgctgatgagtcagtgttgtccagtgacaacactgtgacagtgacagtatgacaactgtgacagtgtcctgacacctggattgctgtgctcctgtgacaagccctgcagtccttcaactgtctggctccgggaggtcaggtggactcagagcatgagcatctgtactacagtcactgtgtgtatgcactcacacacatacaagtttcctcccgcagc

SEQ ID NO: 40059 - DNA, 297 bp, Mus musculus
  source 1..297: mol_type = other DNA
gaggggcctcccagtgtacttctcaaaaaatgctgtcctgacagcaaaggtccttggccaccagacaaagttgagcctgacagcctgggtttggtgtctaaaggaaggaaactgactcctccatgcagtcacgtcatgtgcatgctgcatggtaatagtttaactagtaagagatgtaaaaacatgcctctctttgagtttggccagcccagataactggctaaaccaaatacattgtgtctttggtaataccagatttcacagtggagaccctgttaactactatgtcgacacagc

SEQ ID NO: 40060 - DNA, 406 bp, Mus musculus
  source 1..406: mol_type = other DNA
agtgagccacacactgcagtactatggcctagatttatactattcaacagcaaaacaaccaaaaaataaaatttttttttcccacaggttctagtctcactaccagaaatcccagggtttacctttgtaataatattaaatctgtgtgcatgtgcgcacgcatgtgttttatgcttgcatatatgtatacgcactctgtaacttactgagccatccagctggtcctctaaatacatttcaatgaaagttttcattagcgtgtttacgtttttacttttgagtcagaaactcataaaggccaaagtcaatagaactttcagaccggaactagatgtctacttctcatttcccatgcaaaacttcatttcccatgaacacttgcaagggtcgccgcgctgcgcggcgt

SEQ ID NO: 40061 - DNA, 320 bp, Mus musculus
  source 1..320: mol_type = other DNA
agaactttcagaccggaactagatgtctacttctcatttcccatgcaaaacttcatttcccatgaacacttgcaagggtcgccgcgctgcgcggcgtttcagcggcgcgcggctgccgggagtccgccgcgggttcctgccgtctcttcgagcctcggatggctcgagttctggaccgactcgaacaccgggcgcctccagttccggactagatttagtaagtgaagtcactcgggacccggagcatgcacacagatgataaacctgttttgagtcaggattcccttacagtcccagctgtacatgtgctacttggagac

SEQ ID NO: 40062 - DNA, 419 bp, Mus musculus
  source 1..419: mol_type = other DNA
ccggagaaaatggattcaaaccctacttctccaggggtaggactgcagacagtagactctgctggacaccgctgtgtgcaggtgtctgcccgcaagaacaagcagattccttcaacaattgaacaggacatctgctggtcttaggacccagagcctgggtgctatatcaatgatgctagatgctacaggccaccagctagttggctctcgaaggcctggctaggctttacaggggcgcctctgaggctgggccttgaagtctgcggattttccgcttgcttctatccgcagacacaaaggccagtcctggcgtgcgcgggagagagcgctcgcacccacgactgtgagcacacacacacacacacacacactctctctctctctctctctcgcgcgcacagccgtgcacacgcaccagc

SEQ ID NO: 40063 - DNA, 620 bp, Mus musculus
  source 1..620: mol_type = other DNA
acagtagactctgctggacaccgctgtgtgcaggtgtctgcccgcaagaacaagcagattccttcaacaattgaacaggacatctgctggtcttaggacccagagcctgggtgctatatcaatgatgctagatgctacaggccaccagctagttggctctcgaaggcctggctaggctttacaggggcgcctctgaggctgggccttgaagtctgcggattttccgcttgcttctatccgcagacacaaaggccagtcctggcgtgcgcgggagagagcgctcgcacccacgactgtgagcacacacacacacacacacacactctctctctctctctctctcgcgcgcacagccgtgcacacgcaccagcactggcacgcgcttgcgtgcacgcgctcccgtggaccagccgcggccggccacgcagccctcactctctgggcgcgcacacgcagagccgcgcacggaggcatacacgcgcgctcacacccgcacgctccacgcccctggcggcggcctgggcgctgtgctgctcgagcgacgggcggggacccgggcgggggcggcggcggcgacagcggaggaggcggagcggggtagccgggagcgggctggcccg

SEQ ID NO: 40064 - DNA, 196 bp, Mus musculus
  source 1..196: mol_type = other DNA
ttcagaaatgaagggggtcattcgatcacagtccttctctgaaagtgtctgaaggcatggtcagacttgggcggagcttgagcttaggagcctcaaatcccatggggcagatcctgccagcccgctggaaggatcttctcgaactcagctgagcttggctacttcagagaccatggcgggtacggttctgcaccag

SEQ ID NO: 40065 - DNA, 257 bp, Mus musculus
  source 1..257: mol_type = other DNA
gaaatagaagagattttctgtccttcattgattagtctaaagtccctaagatatggagtcttaaggtcagtgagtaacttgcctaggtcactgacctactctaggaggtactatgcatagggaagggccaggctgttctgctggactgagcaccagctcttgttcatgagagcagcctaccagctcctaaagagcagttttggggagatgactgctctcaaagcccagactttgtgcaccagaaatatttcgctaac

SEQ ID NO: 40066 - DNA, 384 bp, Mus musculus
  source 1..384: mol_type = other DNA
gctgagtgcctaagctccagccagatctgtatctcagatgtccagctctatggccaagtgggcgtctccttttggagatggagttgtgctcatttctgtatcaaattggggccaactcttccctgagaagagagatgggccctagggagcctccccagcccagtgaaggctcctgtgatgcctgtcccttggctagggccagcactgggatgggatcattcttccagccatctagaagacctttgtccagacatctcttttcatctaggtggcgcagatggcgagactgaacattctggaatgtttgtctctagaatggtcctgaacttaagagccataaacaactctggccagggagggaccagcctcctcactgcatggggg

SEQ ID NO: 40067 - DNA, 285 bp, Mus musculus
  source 1..285: mol_type = other DNA
actattataagtgctaaatgtcctagttcattatgttaacctggtacataaggaaccactgtgaattttgataccaatgtttcagtacttggtgacagatacatgtatgtaaatgtgtgtagacaatatacaataagttatccgttgcacctgctaggcgagtgctcatacttttttttaaaaatcttgcgagaatccagacagatgaaatttaataaatatatacattttggaacccttccacaggcactgcgcggtgaaggggcgtggcctggccggggaggt

SEQ ID NO: 40068 - DNA, 535 bp, Mus musculus
  source 1..535: mol_type = other DNA
catctgtacacatatggaaaatatgtaggtataaaaactaaataatgcaatgtaatatggcataaagtgatattactatgagatatcccaggtctattttcaatatttttttctctcaatatttataaaaatcacattgtcaaactggaaacatgcttttaagtttaaaaaactaaaaagttggttttaagttgtctatacagcattatcctgagacagacacagaatggtgtaagtgcatgtagggcactgcctagcaacattactaacagctgatggggtgaagagcaggcaaaattcggcgtcgtttccgcctccgaagagcccgcggaggcgatgtccctgtcaggcggagtgcacgcctgcaagcctcacgggaatctcggagtcgctccacggtggcgcttgccacagccttccccacccactccttagtaaccgcgaggatgtggctagcaacggaggcggcaaccggcgagcggatcccgatgggctctgcgctgcctatcagcagcttcagccaatcggcttcgga

SEQ ID NO: 40069 - DNA, 336 bp, Mus musculus
  source 1..336: mol_type = other DNA
atgctagttactcagtaagtaagtaattgtgatatatctgggaatatacatgaaactaaaagactttcttcatctcttttgaccctaaaacctttcagtgtatttgtagacacaacttgttatgattctctatgaaaaccacacaatgcatttgctgggtttctatgagactaaatgaaatttcattttcaaatgtttgtcgtgtaacaacacagttaccagctattattagtgtgtttataactccagccaaataatcttccgggaaactcctggtaagaacagggtggtcttcaacccgccgccgtagcgcggcgccttggttgccctgggaga

SEQ ID NO: 40070 - DNA, 339 bp, Mus musculus
  source 1..339: mol_type = other DNA
gtttgcagaagtcacagctgccagcccattttggccagcatgcagatatccataatgataaattcaataactctgaactgcagataggtttgtgtaataaagtatgctttttttttttgccccagccaaggttgttatttcaacaatcactcaagacttttggtcatgataggcctcatgctaatcaccattttataaagttcagggtcgctcaaaaattccaaataaattctttcagtctctcaagattcagtgctagaaactacatatataaagaataatcattaaatattaataagcagtctcctgtatccgcagatagctgtccgccgcgcactg

SEQ ID NO: 40071 - DNA, 202 bp, Mus musculus
  source 1..202: mol_type = other DNA
aggtgagtcttatctatacatacatttgtctatatctctaggttgggagagcccagctgggggacatgaggccacccagagcccagctgggggacatgaagccacccagagcccattttccaatggctccttggtcatgtcctgacaacaggggccactttccaccatgtaactctaaggtggtatgaatcagagtttctga

SEQ ID NO: 40072 - DNA, 259 bp, Mus musculus
  source 1..259: mol_type = other DNA
tgaaaaacaaatcaactggtttgtacctggtcacctgctcttttttttttttttttaaaaaagagaattctaggctctctctgttgctgtgataaaaacactggcaccatgtggcacaggcttgtccataggccagcattctagttagggtctgttgacaaaaacaaacatttgggataaacaaacaattaactatccctcgagggaaattagactcatgtctcttaggtacttctgatgcgctagatcccaggggaga

SEQ ID NO: 40073 - DNA, 557 bp, Mus musculus
  source 1..557: mol_type = other DNA
agggctcaggaccctttataagactttgataagacatctacctctccaaattgaatcacaattaatcctcaagctggagctcccttcagagatcagggcttcataatggaagcaactcctacaaaggtaacggtgcctatctagaataattctaatgggtcataaggaaagaatcgaactcaacatattactgaattctgtttttctttccatcattgaggaaaatacgtaataaataaattaattaaattaaaaaaaagaatttacatggtgaaagaaagacaatttctgaatattgtcaaaaaaaaaaactttaatattagcttgtcagctgtgaacacctaagcttccagggttggatcttcgtttctcaacacactgcacggtccatcctgcagaaccaaacatactaaaaaatgattattggaatgaatgggtggttaagaccaatcctgcctggacttcgggtcacacaggtaggcgggaactgaagctccactcgggctgaagctcaggggcgtggcccagagtccccgccccgagacccgccagaaggc

SEQ ID NO: 40074 - DNA, 272 bp, Mus musculus
  source 1..272: mol_type = other DNA
tattaggtaatcatatcctaatattctgatccctatttctgtcatcaacaggaaaatgacacttatcagcgtctcttctatatcaacagaaacaatttttaatatcatcagaaacaatttggatgttggctggaaaacaagtgttctgagaccaagctctgaccgagctctgcgctgacttccccaatttctgaacaccaaaacctagcgcttggtctgggtttctgtctgggatccaggaagcaggtggttccccgcaaccgcacccggtt

SEQ ID NO: 40075 - DNA, 261 bp, Mus musculus
  source 1..261: mol_type = other DNA
caacacagcatcctttttaaaaggaccttgatccacacattgactctgtgaagctctctccccatcaaagcatgccaggggaagcccctctttggggatgaggtcctcaccttaaatgaagcagcctagtagaatataatgatggtatttttgtgtgactctggactcgatcctagagttcacctgaggtcctgtcctcgtaactagagaaatcactgctcacccgcgccaggcactaaagggcgggcgacggaaggctgc

SEQ ID NO: 40076 - DNA, 482 bp, Mus musculus
  source 1..482: mol_type = other DNA
agaagaaagaaagtgaaggtgttcatttcttttttcctccatgaattttatgatgtttgtacattcttaaaatagggttaaatgctgacccatcatctgacaactcaggaacgctactgctcagaaaattcggtttgcctttcagttccttctgtgtaaagtgggaaaggaatatacatacatgctttttctctccgagggaagggaacgtgaggcgtcacgcgcgccactttgggctcccaagcgagaccaagccctgaggcgaagagggtggggcctgcgcgcgccggggactctcctagagctgtgcactgtcgcctcagcggacagcaaacgctgcagcggaggtgcggggcgcgcgctcccgggctcgcgcctcatgcctcgggcactcggacgggccggggcgggcgggggcggcgcgggcggcgcgggggcggggcctaaggcggcgcgggcgaaggcggcgacccagacatctg

SEQ ID NO: 40077 - DNA, 379 bp, Mus musculus
  source 1..379: mol_type = other DNA
cataaagagcacgtttcctttccattctttaaaaaaaaaaaaaattctcttaactttccttttatgcttttctcaaccttaaagaaataaagttaccaggccctacgcaggtgccagctcctaagctgcttcccacggcgcctgcgttccccggcaacgggcgccgctgggaagcctgggacgcagctttcaccaacagttcccgaaataccttggccaagttggaccagggcacctgcatctgcgcaagcgcaaatgcattgccttcaagaggtctcttcctgctagggttgtcgagttctctgataggagtctgagagatccgcagactctgagccagtgggcggtaggcggcgctgccggtggctggttgctgtcc

SEQ ID NO: 40078 - DNA, 359 bp, Mus musculus
  source 1..359: mol_type = other DNA
ttttaaccctcaggtaaaaacctctccagtggactactccaatggcctgggcctggtctcctgggagagtggtacaagtcacgtaccctctgactgcccccgctgccgggtagaggagggcgagaaggtagggtgcatgcttttttcaagggccgacatcaaagggaggccgcacgtcgacagcctttggacagcaaccagccaccggcagcgccgcctaccgcccactggctcagagtctgcggatctctcagactcctatcagagaactcgacaaccctagcaggaagagacctcttgaaggcaatgcatttgcgcttgcgcagatgcaggtgccctggtccaacttggccaaggta

SEQ ID NO: 40079 - DNA, 376 bp, Mus musculus
  source 1..376: mol_type = other DNA
cagatggaccagcctacggtggttgctgcatccatgtcatgaggaatggcaagtcaggcctgcagtgacctagctgtctgtccttgacagtcagttttctgtgtaaagtaagcattgacacatgagggctctacacagtacgtcagtgtctaccggtacagtgcagtgtgttaacaccactgtattctatattgaactagcatgtagtagttgatcaaccagactgtactaaacactattgtgtgctctatgtgggcaaatcacatgctgtgtacaatacatctgttgtcctttggattagagatgctgaaatatcaagcatatttgtcctttgggctctcaaaggagtgatcagactgtcaactagcttctcaga

SEQ ID NO: 40080 - DNA, 411 bp, Mus musculus
  source 1..411: mol_type = other DNA
aaccactgcctgggggccctgtcaggaaaggtagctgaggcttagagacattagcttgcttagtgtcaccagtgtctaagccaaactttgtaagagcactgactgctccatataagaataagtaaattattttaataaaaaatggatgtcatcgctacaccacctaagctccagtcagtgtggtgatgcctttttgctaaatgcttcataatgctcctctaaccctcagagaggctaggctctgtgagggtggctgtagccaggccttggctcccccaggcttctagtctgcctgagttgtacagtgagacaagcctctagcagggtaggcatgtttagagacatgctctccattgccctacagaagagcagcaaggcttggctccttcccagcagggaggcactggcttc

SEQ ID NO: 40081 - DNA, 323 bp, Mus musculus
  source 1..323: mol_type = other DNA
ttgtttaaaaattgctgattgttacgaataactgctgttagttcatttggctcccaaaattataactttgtgaaccttttctttataatactttgtctaaaaatagccagagtcttacctagagaactctctctagttcttttctttattataaaaagcctctaatttattaaaaccaaaacggctagcctccagcccacagtgctgggattaaagatgttgcaccactacaaccggctttgttctgaatattttaaattaaaggtgatttctgtactaaaaaataatttcgggatcacggaaccaggggtgccactcgtggt

SEQ ID NO: 40082 - DNA, 490 bp, Mus musculus
  source 1..490: mol_type = other DNA
aatggttaatgatgacctggaaagattacgagcttctattatagtatattcggacccctgggcgcctaattcctagggagtgcaacaggcgaggctctgccctgccctcttccttgcggggcgccagcctggctgcactcggtgcagaggggaggggaggccaggtgttctcgccccactccagccgttaggtgccagtgtcccccgggacctgactgggagcggcagaaggcgggaacgccagccttgccccgtcaccacacccgggttgttccggtccccgaagcccgcgctccgcccggtccccaggtgccttgcagggagggggagggcagagcagctggccagtcagtctgcctgtcctcacaattgtctgcctaggggtttcaggcaaccacagatggaaacgcctcctcacccgggggcgtgggccgccctggctccgcctcgtcacgccacgccccgaccacgccctctagacttaagttct

SEQ ID NO: 40083 - DNA, 286 bp, Mus musculus
  source 1..286: mol_type = other DNA
gatctcaaatctggttgacaattggaaatgcttcagatggcaaatttaaggaagccccactcaagcacatccagaagtgctgctttaaggagaaaggatgatcttttaaatactccttctatttcatatctgtaatatgtggagtttggcttatatgatatctaaactctgatgttatgggcacctaaccatgacatgacacgtggattttgcaacatactccaatttcctcacccacaaaatcctccgcgcgagagtcgcgcgcgcgctctcgcgtcgccacctc

SEQ ID NO: 40084 - DNA, 331 bp, Mus musculus
  source 1..331: mol_type = other DNA
ccttatatgccctagtacagggttcaggatagatttgaaatttgaaatgtatataaagaaaatatctaataaaacaggcttggtggtgcatgccttcccagcacttgggagaggcaggctgatttctgagttcgaggccagcctggtctacaaagtgagttccaggacagccagggctaagaaactcatggcctctcaataaaagataattattcttaattactatgaggatagtgtcctaagaagagagacattaaataatatgtagtctcataggtgagataccaaaattgagttttatcccttgggttttaaaaacttccggaaccaa

SEQ ID NO: 40085 - DNA, 272 bp, Mus musculus
  source 1..272: mol_type = other DNA
cataataatggtatgtgaaatgacagataatcaataaaatgagcttttctcacagaatttaggaatattgggttcctgagtaaagttgccggacagaatcaattcttgccttgggaatgaaaaatgtcccatttgaaatttgcggtaacacttcagacatgggtccagtcagagctcttgctctcaggtggcctggagtcacctgagggtgtgtacacagtctctcaggctccttccgccctttcccggaagaggcgggctgaaggcgggct

SEQ ID NO: 40086 - DNA, 284 bp, Mus musculus
  source 1..284: mol_type = other DNA
atttcatatctgtaatatgtggagtttggcttatatgatatctaaactctgatgttatgggcacctaaccatgacatgacacgtggattttgcaacatactccaatttcctcacccacaaaatcctccgcgcgagagtcgcgcgcgcgctctcgcgtcgccacctctcccggcttctccagacgcctctccaccgcacgggaggagccgggattgctggcgaaaccggcgacgcgcacgcacgcactcacgcacgcacgtccgaggccggcagggcggcaggct

SEQ ID NO: 40087 - DNA, 402 bp, Mus musculus
  source 1..402: mol_type = other DNA
tcttgaagattacaagccatgatgatgatgtgtgtgcacgtgcacagccacccttgccatgttttctgagacaaggtggcttaggggctggaaggccagtgagccccagggatccaactgtctcagaaagtcttgtaatacattttttaaatgtaatagaaaaattgcccagcagatcatttgagggcaaagagaggaaggaaataaaattacttacttcttctgggatcagcacaggattgttattccgggctgcttctgcccagtgtagaactgcagactacaaatcccagcatggctcgtctccacgccacgccccctccctgggagtgagttgggtctggagggcggggccccggggggagctatgccccaggcactgcgcagtgcctgggaagtgaa

SEQ ID NO: 40088 - DNA, 460 bp, Mus musculus
  source 1..460: mol_type = other DNA
cttaaagactagcagtgcttgtctcttcacagttaggccctggccatcactctgcagaccaggctggccttgaacccaggatagttttgttttttaaagacagtcttactctgtaggcctggctggcctggaacttgttaggtagaccaggctagcctccaattcacactgccattggagcccgtttccacacagtctttgaaacagtcgcatagttgttatttcatgtacttcaaaaatggccactgtgggtgaaaaaggcttttcctgtcatggaaattcgccattttctaacattttatgaacattaaaaattcctcatgcctttacctgcctcattcaggccagaggagcatggaacagggccttgccaaggttctggaactcagcctggcctgggctcccatccccacccactcccctgaccctactgggacagtgtccccattctttgcaggag

SEQ ID NO: 40089 - DNA, 296 bp, Mus musculus
  source 1..296: mol_type = other DNA
aaccagagcagcaaaggagaatcttcagagctgctaatgaacttcaggagtatctagatgagaatttaactgatcattatcaacataatagcgactatagaagtattttagcggcttaacctgccaatattctcgggagagatagctcccggctgtcctggatcactttgtagaccaggctggcctcgaactcagaaatccgcctgcctgagtgctgggagccctggctgtcctggaactcactctgtagaccaggctggcccttcctcccatcccggttatagaaaggagaaaaa

SEQ ID NO: 40090 - DNA, 390 bp, Mus musculus
  source 1..390: mol_type = other DNA
aagaaattgtgaaaagcctttcatgtctaaagatatttaccatcattttaaatggctgcttagcattacgttgaatacatacatcactatttattaaatcagccctctattgatgaatatctacataaccgtgggcattgttttccaaaaatttttgataatctttttagattaaatacttataagtaatgtaaatgtaaacaaatgtgctttttacatgaggatttaagaagctgatgcagcatgaggaaggactgagaactgcatgtcccagcatttcgcaaggccacactcctgggaactgtagtaccgaagaggcctttgtccaggaccggagcgccgcgcaggctgtgggacgtgtcgggacagcgcgccgactcctcctccccc

SEQ ID NO: 40091 - DNA, 348 bp, Mus musculus
  source 1..348: mol_type = other DNA
ctagaaaccagcttgggtctccagtggcagctgtggccctagttacacaggcaatgcgcccgcacgcgcgcgcgcacgcacgcgcgcggcgcctccctgatgcgccccaagggatgcgcctccctgatgcgccccaagggatgcatctaagaacatcctagtcgtagcccctgcagttcctaggaggctcaagaggtggcgatgcgtgagcccttggcccgcagaggggctcggggttaggggccgcaagtcggagctctgacgtcgggggcggggccagaagccgtgacgcgaggggaggggccgcgcagcttcccggccaggccggcgattcattcaaaaggcgcg

SEQ ID NO: 40092 - DNA, 224 bp, Mus musculus
  source 1..224: mol_type = other DNA
ccgtgcaaacacctttcggggaaccacaagcgctccggtgggcctgccccacctagcccctgcggcagaggttcccgcgtgaaagcggggactactttatgcagatgtccactctcagctcctgtgggtaggagtccccagggaggatcagcccgcggctttcgcagccgactcccctagccggatgggcgccaggccccgcccctttcctctgcctcaaagtt

SEQ ID NO: 40093 - DNA, 410 bp, Mus musculus
  source 1..410: mol_type = other DNA
ctgttctcagactccaggcaggaaagaaagtcctccttgatgcctgctcgatgctcagcgcaacatcaagcaggtggctgagcgcatcaacaagggtgtgcggagcgctgaggaggccgagcggcatgcccgcgtgcttcaggagatcgaccatcgagggcatggaggatgtacgtgcttgtgtccctgtctggcagcccagtgatgcaagcgaggacaggatgtcgctctggctgacctcgttcatagagtggtcaaccgatcactgcagggttaactaataaaccagctccaggcccccctgcggcggttcctgaggcaggaccacacaatgggttccacataagtgggggagagccctcacccctcccttggcaccattggaggcaagaaggaccgatccctcttcc

SEQ ID NO: 40094 - DNA, 472 bp, Mus musculus
  source 1..472: mol_type = other DNA
gcctgcagagggcttgcaggccaggctctgggcacaaaactgaagcagggcccaggagcctgcctggccttagctcctggcctgcttccatcctgctccaggctggagttcagtccacttgaggagaccctaactctactcctccgatcagagactttgcggaggggctgtccgggccagtcaagtacccaggcagagctatccattgccttctgctggtcctgcccaagccccaggaggaggttagggaggaagagtcacccctgttctgcccttcagacaacagattctcccaggctctgtccaaacttgagagaggccaggaagctaggagcctccctgtgcccagccctgggcctcaggctaaactgatggtccgacggtccccatcgctaggtccggcagtggctgactcagccttgtgccagacacttgagggcctgagagacagtgtcacttcccctcctggtag

SEQ ID NO: 40095 - DNA, 262 bp, Mus musculus
  source 1..262: mol_type = other DNA
catttgggccctaggggttgaactcaggctgccttaacactcagactagcaaaccgtagctaagcttacaatgtctctgcccgcatgctaggcctatgtgtgtctactgatgaatgcatgcgattctgtatccgactcctaacgatgcagacatctgcagcatgtgtgcctgtgcatgcacatatgtgtgcagttgccatggacaccacagatatcagatcctacaggagcagtagccgagtgacttgagctgctccagtcc

SEQ ID NO: 40096 - DNA, 352 bp, Mus musculus
  source 1..352: mol_type = other DNA
ccctttctggacccctccaggtcaccataggaaaaggcttgttctgaacttgtgagtcagaaatgggagggggcagacaccctctcattcatccaccccttcacaggacagcagtgaggtggctggcaaagatttctgctggtaccagcagtctgggtgagctaagcaggtgacctctgctcagccaggccgtggcggacacgctgaccggcggcgacactgaccgaccgcgtccccaagcgggttgggggcggctccggcgtctgcccagagtctgccccgccctcctgctcacagccaggctatggggtgcggagcggggcggagtagggcggggaccgcggcgcttcca

SEQ ID NO: 40097 - DNA, 604 bp, Mus musculus
  source 1..604: mol_type = other DNA
caatgggcagccgcagatgcaggcgggaggcgggggcggcctgtgcgcgtgcgtcggagcagagtcctctccctcccacgtgcgcgctcccggaggagtcgcgcgccccagcgggctggcgggaaggcgcgcgggaagcccccagctgcctgctcggtgtggtccggaacgttggagagaactggggtagttctcgagtcccgttcccgagatccggagccccgtggcgcggcctggctaacctccccccctccactctgaagcaggcggtgtggccgggagcgcatcccctctgcagccggagcggggcgctgtggcgcgcgccaggggccggaaattcccgcggcctgatctaacaggggagcgtggcgccgccttcctccttcccgggccgggcgggggcgttgggcaccgcgagggccgggctgcccgagtgggtggggggccgccgcgtcagccagctgcagccgggccgcggcaggcggcgagcgcggacgacgcggccgctcctcctcagccgcccggcgagccgcgagccccccccccccggcggcccccgccccctggccgtccccccgggccgcccgggccccaggccttcccg

SEQ ID NO: 40098 - DNA, 341 bp, Mus musculus
  source 1..341: mol_type = other DNA
aatcatgtctgtgctgtccaagagaggcagcagataggccctgagttagaactctgggttgctggctagctcagctcaccccgcgcagggttagcacattggaaattttcatgtcatcagaccatgcccccactcaaccaccttgtaggtgacagtggggctcccccttgaggccccgccctggacgcgcccacaggcgacagggaggcttcaatccctgctgctccgggacagaaacgcacacctcactgagggtttttgctgggccgcagcagcaccagcccggggattccccgctgctgccgccctgacgtcatggagtccccgggaggctccgcccc

SEQ ID NO: 40099 - DNA, 396 bp, Mus musculus
  source 1..396: mol_type = other DNA
ctggtactactaggtcagtggtagtcacttattaggagctttccctgctcgtctctggcccagacagtgacaagactgccatgctcatactggcctggcccacagagtagagctctggtccactctattctacagaggggtggagggggcctgtgctccagtgttctgcagccctgtgcttaactcaggacctctctctggccagagtgaggctgaagtggaaattttgccaaattctggccagcctttgaaccttgagcctttaaagtcggatcaactttgggtttgcacaccctactggaaagtgtgcccacccttgaagctctcagttaacttccagccccttccccggggcttacgggggcgggcgctaggacccggcggggcggggcgggg

SEQ ID NO: 40100 - DNA, 572 bp, Mus musculus
  source 1..572: mol_type = other DNA
gtgtgcccacccttgaagctctcagttaacttccagccccttccccggggcttacgggggcgggcgctaggacccggcggggcggggcggggcggggctcggtgctcccgcagttcttacctccgcccgagcgaggcgagcggagcccgggagccccgagcctagcgggggcgcgcggggcggggggcgcggagcggggcggggccggcggcgggacccactgctcctccccccagggtccccgcgcggcccccggtcgcccgggcagcggaggcagcggcggcggcggaagagctcgcacaccggccccggcgggccccggcagagaagcccgccccaccacggccccgcgcggcttgctgctgagttagttgtgcgagtccggccagcaccgcgcgaggactccgtgccagccttgcgatcccccagagtcccgcccggctctcgcgggctcctgcaagtgactgtcctgtgccggtgcacaaccgcctggggccagtacctgccagctgtccgctggtccgggaccccggctagccccacccgcgccccccaggaaggtggcgtcagca

SEQ ID NO: 40101 - DNA, 653 bp, Mus musculus
  source 1..653: mol_type = other DNA
ccacaagaacttggggtctggaaagaactcaagatggaaagccctgccagtggaaaaccttactgggctaacagtcaagtgtttcccagagaacagtttctgtggagaggcctggacaggaaccctgagaatgtcagactctcatttcctaacctataacctagggtgataatttttacccttgtgtgagtttttttttttttttaattaatcagaacaaattgttcaccctgattaaagggcatcttcctcctagggcaaaagctgttcctatggaattggctggtcccagaggctagcctcaggatccagaaatacctgccaagtctagggatttcatcctgccagactctggtgggcctttcccagcgccttctgcagggagatgagacaggactcccagggaaggtggttgtcccgcctccaatggttgtgtgtgtgtcctctcccagaggatagactcaccagaacaggggtgtcgaggcatggagactcaaggatccgtggagtctcagcgacacaaacccggcggtccggtctgcctagggtatccggactaggctgggggcgggaccggccggctccctgcccgttccccgccctcacgtcccccggtgtcacgtggggcgggcggaagcgccgagcgaggtggg

SEQ ID NO: 40102 - DNA, 280 bp, Mus musculus
  source 1..280: mol_type = other DNA
agacctgcatgctgcagcttccagtccctgagagtcaggaagtaacctctgagctgggagcccagccccccgagtcctgtggacacctaggagggtggccctgccacaggtattccctggttacttggcccaggcaaaaggcagctctgcccagcagctgctagtgaggagaaggcctagagcaaaggccacaggtaggcctggggctgccttccccttcctttcctagaacttggagcagagtccacctggccacgggccctccagagctggagtggga

SEQ ID NO: 40103 - DNA, 369 bp, Mus musculus
  source 1..369: mol_type = other DNA
tcccacctgtggggtgggggtgccttctaggtcacagagaaaacaaggaaagatgggggttccctccttcctgtctagagaagcaggctggcatgcagcctgaagaccccatggccatgaactggctgaggggaaacttgccgtgttcagatcctgcctcctgaccctgttcacccggcttcaggtgtcagagacaaaatcctcaggacttgcttctttggatcacagaggaaacatttctgatggtacttggatacctacaggtatttgaggaaaagagtggctagccactggctggagtcacaccttgcaaggtttcccttctctgacccagagggcagaaaccataccctgtgaggcctcagggga

SEQ ID NO: 40104 - DNA, 292 bp, Mus musculus
  source 1..292: mol_type = other DNA
gaacatgaataataaactctaaagttaacagttcatatgctctagtcatatgaacctttccctgggtcccctaaaggaatcctcagccttccaagtcctgggattgaggagtaagcaaccataactttgatagcatgcgcatgtgtgtgtgcacgcgcacacacacacacacacacacacacccaactctttaaggaaaaggtgctgttctattttagcatgagaatcaggagttcagattatcctcagctgcatagcctaacaaatacaacctatctaatttaacttgttc

SEQ ID NO: 40105 - DNA, 335 bp, Mus musculus
  source 1..335: mol_type = other DNA
gcaatggccccgggcttctgggctgctaatgtgcctcctagtgaggccctggagcccagcagcagccctggtgcccggcggtatcggatcagcacacagagcctctgggatgaatcctgccaaaggagtgaatagatgaggccccatatgggccccaggccccagaagattgggagccaagtcttagaccctgatctggctcagaccgcttgcttagaggcagcagggtaacattgtaacctgtgggcggcagtccagcccagcccagtctggcctaaaagccagaagggtggaattagctacaacgctcctccctctgcccctgctacaaggca

SEQ ID NO: 40106 - DNA, 425 bp, Mus musculus
  source 1..425: mol_type = other DNA
cccatcttatagcaagcagactactggggtcagggtgcacctttgcgatagaacaccagggggcgcaggagcgtcacggctgctgcaagtgcctgagcacagaggcggctctgcagagaaatgcgctcccagctctcggggtccccccttttcagcctcctgggacgccgatgaaggcctatctggtagccacatttgggaacggtgcgcggagcgcctctaccctctgtactggaaggagtgaaaggactcggggctcccggactgtggccgcggcccctctccccgcactgcgctggactcggcctcggggactctgggaggggccctaccaaccgaggagtgggagccctcgtagccgaccgggacgggggcgggggcggggcgggaccagggcggaccctcgcgcggaccggcgaagctgt

SEQ ID NO: 40107 - DNA, 263 bp, Mus musculus
  source 1..263: mol_type = other DNA
tctgggagaattgaattaacttcccagcaccgcggggcctgcctccctagcttccacggggccgcaggtgggaggcccaggaacgaggtcgggaccctcctgctggtcccacgatgctccgcctgcacctcgggagccctaagagggaggccctttggggtgggggaccaggtggctaggggcggggtctgggccgctcaggccccgccccgcggagctcgccccgcctcgccccctccgcggggtcctgcgcgttaaaaggc

SEQ ID NO: 40108 - DNA, 369 bp, Mus musculus
  source 1..369: mol_type = other DNA
agttttgtaattctgtgagacacaacagacacagatatatgagtagctaattgtcagctaactacagaatgaaacacaattcatagattcactattatgtaacaagtcttaaagtcttttgagacagagtctctctggctcataacctcactatgcaaactagactttctcaaattcagagagatctgcaatgctgggattaaggacactttttgaaaagttaacaggtcttcatcgaaaatgcaattttatttaaacactagggctctggaatcttgaatcctaatgtcagcggtcattgtgatgtcattccacagctgtggactaccactcccgtgaggtagtgcgcagtcccaccttataagcggc

SEQ ID NO: 40109 - DNA, 440 bp, Mus musculus
  source 1..440: mol_type = other DNA
agaccccactgcacacccccgggatctggggtgggcgtcctccattcccggcgggaggacagaccctgggttaagccaatgcaaattggcttatcctctaaacagagggaaactcctcagggttgaccccaggctcggttaccagagcgagctagaggcctgcgcctttaaggagccatagggcgggccaaagccctgtttgggttccgcccctccgccccaggggtcggtggatgggaggtcttagcagccagagtcttaggagctccctgctcgcagctgtcaccttcgttactccttaattaataataaaaatagccgccgtcccggagcgcacgctgcatgccaggccctgagctttacaggcagagcaagagccaaggctgtcccgaggtcactctgcgggcgtgcggcggagaccgggacgcgggcggacgagg

SEQ ID NO: 40110 - DNA, 295 bp, Mus musculus
  source 1..295: mol_type = other DNA
tgggtccctggggttcggcaaaagcgcctttacctggaagctgtaaatatattgatggaagtctagaccaaggaagcagaccccactgcacacccccgggatctggggtgggcgtcctccattcccggcgggaggacagaccctgggttaagccaatgcaaattggcttatcctctaaacagagggaaactcctcagggttgaccccaggctcggttaccagagcgagctagaggcctgcgcctttaaggagccatagggcgggccaaagccctgtttgggttccgcccctccgc

SEQ ID NO: 40111 - DNA, 346 bp, Mus musculus
  source 1..346: mol_type = other DNA
catacatttaaaataaaaataaattagtcctaggccagcctggtctacccaaaataataatgacaataatataaatggttgagatattgttattatcacactaaagacaatttaagtttttctgtatcccagagaaaaattgtccactctcaacataagttgacagaaatcatttaagcctatgaaggatgcatcatacaatgtgtatttctcaaaaatgttctgggaagctcctgagatctctcacagggcgatgtacctctgtcagcctggcttcccctcagccggggggatacctctatctagctagccttgtccactgtatacacatggaacatgtacataa

SEQ ID NO: 40112 - DNA, 465 bp, Mus musculus
  source 1..465: mol_type = other DNA
tgtagaccaggctggccttgaactcaggcctgcctcagccaccactgcctggcagccaagctctttttacagaagttgaaaacttgtgacttgttatgaacaatagtcctcagcattccaagaagtttacaaattagaagcattttttgttttatagatctttttagcatagtaatttcaatttaaaacatcagggccctggtctctgggtacactgcatgcatgtggtgtatagaatacatgcacatgggggaaaatgaactttatacccttctaaatttttagacttcctgtatcagcttttataaaaatcttttcaaaacttcacactgaagcattccaaaggttttgacctgtgtgagtctcaggaccactaagtctaacaggctgtgttgtctctagggcatctgagcctcacagagtctgggaagactgacctgtgagtgcaggctccacccactggag

SEQ ID NO: 40113 - DNA, 223 bp, Mus musculus
  source 1..223: mol_type = other DNA
tgaatggcgcacatcgggggcccgatactcacctcagcctggtcacaagacactagcaggctggtagacactgacagtcagtttagctgctatctcagggagatacttcttggactggctccaagtgctagtggtcaaatgatctcaacgggcattagggagaggtcctacacaagctctccagcccagggcctgggccgcaggagctgaggcagggcagggt

SEQ ID NO: 40114 - DNA, 244 bp, Mus musculus
  source 1..244: mol_type = other DNA
gccagtgctcttaataaaagtttgtattgagactttgaatactctaatccctgattagtgtctgccatctgcctactcaggcagaattcaccttagtcaagaaactctagaagttattctgaataaaaatacatatgcgtttaatctctgaattcgagttcagcctgggctacacagcatacgtagtgagaccttggtctctctcgcacagtgaagtacatctccctccagtacgtgccgcggg

SEQ ID NO: 40115 - DNA, 325 bp, Mus musculus
  source 1..325: mol_type = other DNA
atcttgccaactagagtttctctgtaagtccctctaggtcaggactcagaagacctgaatgagcatgagtcatggtgacaatacactcttgcctcttaggccaagtgagagaagcaatataatttttcgggtggcagacttcccacacctgccagccagggttggggaatctctatttaatatatactccgtgcaacaatatgtgcaaatcatgtttctgaacagctttaacaattaacattttttataagctgtgcagtgatgacacatgcctttagaggccagcctggtctacagaatcgagaaacaaaacaacaacaacaaa

SEQ ID NO: 40116 - DNA, 247 bp, Mus musculus
  source 1..247: mol_type = other DNA
tgttacaaccaacaggaagacttcgaagccaacctggtctagatgtatattatgaataatgtagttccatgacaggcttgtcatgttcctttcatcccagcatttgggagtttctgagttccctgtctcgagaaaccgcttaaaagcattgacttcattacagtgtacttacatataatcgcaggcgaggggctagcctggaccctacttccggctcgaagacgcatgcgttagtgagtcccggatt

SEQ ID NO: 40117 - DNA, 324 bp, Mus musculus
  source 1..324: mol_type = other DNA
acagcactgctctacagagcaccctgctcgggtttctctgtgtagccctggctgtcctggaactcactttgtagaccaggctggcctcttttcctagtctcaggaaaaacatgttctcagcgttactttccctaacagaatggaaaatggttcctctctctgagggatgtttccattttaacagggaacaatccctaaacccaaaggaatgaatcccttatgatggcgtttcatgtttatacatagttaaacgtgtcagaaagggaagggctctcaaacacccatccttctactaggcagcaggcagtctctatggtaactatt

SEQ ID NO: 40118 - DNA, 290 bp, Mus musculus
  source 1..290: mol_type = other DNA
aacatcttacatttgtacttttgaaggggcttgcaaaaacagtattatgtgatttgcctctcacatccaagaagtaggcaagttcatagtttacatacgtacaaggttattaaaaaaaattagaaagatgatccttatatacaagcataaaagggcctagccgtcccctgagagcacccaggccgcacgccagccaagggcccgcgccggttacctggccgcgcgctgctccgcctcgagcccgccggtttgccgggcactctagcggaccctacttccggatcccggac

SEQ ID NO: 40119 - DNA, 285 bp, Mus musculus
  source 1..285: mol_type = other DNA
atctgtgaaatagaaatatcactgattcatagagttgttttaaaagaataaaaaaaaaacttggtaagttactaaatgtgctaaatcttttttgagaaatgtggatagcttccagaagcttgtccggcacacatatatgtgttggaagagttaaaaagccccgtgtcattttctacatttccccgtgtctgggacttgaggggcgctatgggtatgatagccataatcctgaagagttactcgtccgggatccggaagtagggtccgctagagtgcccggcaaac

SEQ ID NO: 40120 - DNA, 230 bp, Mus musculus
  source 1..230: mol_type = other DNA
ggttctggtgacagaatcacagacctaagagcacagcactttgccccaaggagctactggagccagtggcaggccaggcagctatcctggctgagccttagagctccaagaagctattcggggacagacctgtgagagactcatctttctcaccccttcgctaaccttagagagaggggtgaggggcccattcggaacagcctgctttcgattgggattcctagctaaga

SEQ ID NO: 40121 - DNA, 434 bp, Mus musculus
  source 1..434: mol_type = other DNA
ttgaagttcaagatttcccaattctgtttcccgagaggaaaaatttgattttgtgcttgaagatccagattaaaatattacttcagttttctaagtttccttacatcttttatatgagttaacatgtaccatcttaaccctagctcagacgataattcttgtatgggtattaacaatatttaatagcaatacattacacatacttcattaaatgtttctagttgtaaagtgagggaatagcagactctgagccctgtgcctgttgagggctctagccagcgcctgccatacacagctgggattttggcggccattaggcgggcgggcaggcagggcgctctgaggagggtgtggcggggagccggcgggcggccgtgcgcctgcagacacgcccccctcgccgcgccgcaggaagctgcccctgtacaaggcct

SEQ ID NO: 40122 - DNA, 287 bp, Mus musculus
  source 1..287: mol_type = other DNA
gccttctcacccatcctccctctgtgagagtgtgtgtgtgtgtgtacggcatcaggggccctgaggccttcacccccagtgcagaaggccaagagacaggctactcttcctttggtatttgtcctcccctctccctaaggtgaaggctacgtctatgtggtgtggatgcacaacttctggacctaactcctagagatcctggattctgagggagggttctggtgacagaatcacagacctaagagcacagcactttgccccaaggagctactggagccagtggcagg

SEQ ID NO: 40123 - DNA, 465 bp, Mus musculus
  source 1..465: mol_type = other DNA
attcttacttaatatttaacaagtgtaacaactatatggttatgtcttgacaaggttgtgactcattcttacttacatatctaacgtaaaaggaagaaacacccagatgattagcaattatctgctacttactgtgattcttaaacgctcagattctgaggcttaaaactccggaaccggagctccggagctccggatctggagccgctttttctgaaagacgacttccaagaggaaataaacaaaataacaaaaccccgcgtgcgtgtatatatatattttttcttccgggtcggactcagtgcagcatgggaagtcgcgaaatttgcgcatgcggacaatgaaatagttcaagaacaacttttcgttttccgagaacgctctcctccgaaggagcaggtaggctccgcccaggccgcgcctccgattggctacaagcgcttgagcggcggaagcagctggctc

SEQ ID NO: 40124 - DNA, 328 bp, Mus musculus
  source 1..328: mol_type = other DNA
cattcattcacaatcattcattcattcattcattcgttgaccaaaaatataagaataagatggttcctgcctataattaaaagctgtaatactagtatattagcatcagtgaaagcctcggccttgccttacagaaaagtccgaacgcctcggggtccctgagtcagaagccctcaggagccagctgcttccgccgctcaagcgcttgtagccaatcggaggcgcggcctgggcggagcctacctgctccttcggaggagagcgttctcggaaaacgaaaagttgttcttgaactatttcattgtccgcatgcgcaaatttcgcgact

SEQ ID NO: 40125 - DNA, 352 bp, Mus musculus
  source 1..352: mol_type = other DNA
ccagagagctcgccgtatctgtgaattacagttctcagcaagacctgagaacactgtggacccagcttgctctttgtcactatggtacccaattctcaaaggatattttccccttagaacttctttggtagaattgatgcaaggccttaggatactatctagaatccatttctactaacgagttccatttcatgggtatctgtctcagatgtagtcagatgactctgaaactttacttctcatgggtgtgaaatggatcttcagtaacatgaaaaccctcttcctactcacatttcagattcctttatctcattccaactatttgagatagttggaccacagtgtctcccaa

SEQ ID NO: 40126 - DNA, 219 bp, Mus musculus
  source 1..219: mol_type = other DNA
cgaagttcccctgtactggggcatataaagtttacaatgcatgttgtttagggcaagctttgttctgccctaaagaacctagcttttctctttagccttcaggaaggattggaggagaaaatcctatgctaatggtggccccaacaggaggcatctctaaccattcccttctaccccggcccttcggaccgtgcacgtgacccaacgtgtgtcgtatgc

SEQ ID NO: 40127 - DNA, 168 bp, Mus musculus
  source 1..168: mol_type = other DNA
tttctcctccaatccttcctgaaggctaaagagaaaagctaggttctttagggcagaacaaagcttgccctaaacaacatgcattgtaaactttatatgccccagtacaggggaacttcgtttgaaatgtaaaccctgcttcaagatcaaggtcagcctggactttgt

SEQ ID NO: 40128 - DNA, 218 bp, Mus musculus
  source 1..218: mol_type = other DNA
attcccttctaccccggcccttcggaccgtgcacgtgacccaacgtgtgtcgtatgcaaattgtatgcaaataagacagatttggggcctgggggtctgagggccatggcccggcccagggccaccggacttagttcagatcttacagaaagaagggctatagttagccccggggacgcctgccggcagaaccatagccctgggccgggccgctctct

SEQ ID NO: 40129 - DNA, 201 bp, Mus musculus
  source 1..201: mol_type = other DNA
gttcactgttgcttgcctagcaggcaggaagccctgcctgcctgcatctcagcacgtgggcttaatccccagtacttgggaggtcgaggccagcctggtcttctgaccgaatgagccatgtgaagtggtctgactcagctcactcccatccagcataatgttttgcacttctgagttacacaatttgaataatttaggacc

SEQ ID NO: 40130 - DNA, 300 bp, Mus musculus
  source 1..300: mol_type = other DNA
ctactggttggtcctgacaatcctcaagatgtctgtaggtgggtaggatagttttttcaaaaacaagtgggaaaagaacacctggacctggtttcttctcctccctcgcgtgcgccagtgatgtcggacagcatagcctcttctgataaaaggtgagaacagctttggcccttggggcaaatttggcttaatatttcagaagtgcaaatttgggccccattgaattaattttacattctttcaacaggtgatggcatgcgacaagtgacttattcaaaacgggaccagtttcctctttaa

SEQ ID NO: 40131 - DNA, 386 bp, Mus musculus
  source 1..386: mol_type = other DNA
tttagagcactcttctgctctctgctagatcctaggagaaaagtgcctgaacttcaccgggacttgtaaaggttacgctaggtggccaaggagccttcccgaacaattaccaggtcatccttgggacttccttctgattggccggagcttccgtagcgagtctccgcgctccaaggaagggggcggggcctggacacagcgtcactgcgagccctcttcgaggggcctgtgtgacgtcatgagcctctctcagccaaccgttgcggcagagggagtgggactctacatccctcccgatcgtctaacggtgtgggcctcgagtggcggaccggcccgccaatgcccggccgccaagggcggagcggccggagccgatctctgacggt

SEQ ID NO: 40132 - DNA, 282 bp, Mus musculus
  source 1..282: mol_type = other DNA
ttttacatcaggcctccctaagtccatctggcagtacaggcacaagcaatactatttattcctattgctgtcatgtatggatacaggctggacactgatagcccatattcaatgtgtgtgtaagcacatgcactcacgcctgcatttgccatggcattagggtgcatgacacatgcaataaaaaatgagccagatccctttttttctttctctgcctggcaaagaagcttagtggagggcaggccctgaggacctgggggtgggaccctctggtcccgagca

SEQ ID NO: 40133 - DNA, 293 bp, Mus musculus
  source 1..293: mol_type = other DNA
ttcttagaagatctcaggagatcacgtgattagactagggattacctgtgactttccaaagaaagtccggaaggtctgtgactcatcctggtctttgggactcaaacctggaatcctggttgaaaggagatagatttacccttgtctaaatcccagacagactaggggtcctggtaggccagaccccatcagtgagctccgccattggtggggaggtcccccaacgctacgtgtggcgatgtggtggagaacctcgcgctgctcgtgctcacctcctcctccgaggacttcag

SEQ ID NO: 40134 - DNA, 228 bp, Mus musculus
  source 1..228: mol_type = other DNA
ttttacatcaggcctccctaagtccatctggcagtacaggcacaagcaatactatttattcctattgctgtcatgtatggatacaggctggacactgatagcccatattcaatgtgtgtgtaagcacatgcactcacgcctgcatttgccatggcattagggtgcatgacacatgcaataaaaaatgagccagatccctttttttctttctctgcctggcaaagaagc

SEQ ID NO: 40135 - DNA, 553 bp, Mus musculus
  source 1..553: mol_type = other DNA
accttgcggagctctgcacgtggtagagcacccagccagagggcgccctcgaggccgtccactcgccggtctccagggcccaagccggacctcaggcctgggcgcggtcctaccgctcccgcgcgcacgccccgccccctccccagggccccgcggagctgcgaggtgcggaaccacgacacgacatcctgttttgggggcccgcgcgtttcccggggtgctgacggcagctgccctcccggggtctgggcacccagcattctcccaaggctcagggcaggggtggggactgccccagcctgacccattccggctaacccctagccagccgcggctacctctagatcccgggctgcggcatttctcagccttcccgcggaggctgcggggcggggagtgcccagcgcctagcttagggcccctgctgggcttgagaggccagactcaaggggtctcaggctggagggtgggggaggcctccgacttcctagtccgccccgccccggccggcccgcccccgcgccccgccccggccctgccggcccggccccca

SEQ ID NO: 40136 - DNA, 603 bp, Mus musculus
  source 1..603: mol_type = other DNA
ctttaccccacaaacctcaagagggtggggcctggaacaacttctttaaacacttgtagcctctaaagggctttcccttcccttcagtaaccctctagaaagggtcagggccacctaggaactagtccttttgcagtacttccaccagggaccgctgcgtacggtgcgagcgctgggggctgggagcgcgccccttggccaaacctagcaggaccatagtcaccccaggcggctccaggcagtggagtccggagagcagcgctgcggcccggagatccggacagggcagtagctgtcaccgccgccgcaggcctgagtgtcaggggcccgcctgcgggcgggcgttagagctggaggctggggtgcgcacggcagaggccgaggccccatccttgtcgcggggccgcggtcctgacgaccaccagcgcaggcagggtccccaagagaccccgccagttgcggggggctctggcgggcgctctccaacaggttattccgggataagccggctctggggcgggcccgggcttcgctgggggccgggcggcgcggggcgggccggcggtagagcacgcccccgcccacttcgggcccgccccgtgc

SEQ ID NO: 40137 - DNA, 386 bp, Mus musculus
  source 1..386: mol_type = other DNA
gccctgggcatgctgccttagtaagagcatagagggccttgatttgagtattcgcagatgtcttggctactaccatgagtttcacagtgccccactctttaactgaggagtgtagactttagtgcaaaccagaacaaaatcttggtgtttccataatgtccataatgtaaaatagtctggttggttacttttttgttatgaaataaaaatactcgggagatttgcttgcccacaccaatatggcggcaggagaactcgttcccgccaggtccgctttcacccaatgtggtggaaaggagcgctttgcccacattcaactcccggcgttgaaacgtcaagaacgtcattcgaattccgtccgtcgcgttgctctgcacgtcacgggt

SEQ ID NO: 40138 - DNA, 312 bp, Mus musculus
  source 1..312: mol_type = other DNA
tgtgtaaactgaaacagagcatcttgtgctccaggaaccaagccccagtacaacctaagagagatctcttaaacaggactagaaatttcaaatgaatggttttgtttcctaaatataataaatagcgaggaaaattccactgctgtttttagcgcaagttataatacaatatcaatggtatacttcaagtactctgtacaattaatatatactaataaaaaaggagtcttctctcagaagctcccaggtaaggacaggtactgagttttttccctgcctgtggccaggagtctgctagacctgcctctgaga

SEQ ID NO: 40139 - DNA, 444 bp, Mus musculus
  source 1..444: mol_type = other DNA
ttcaattacaaatgaaaaagatgtccccttttgatttcaattcccttgactttaaggcagagaatgccagtcttgcaatccaattttttaaatggtgtcaccctgaagaatgtcaaccaagctctgacattgtcatggaacatatcactggaagctggattcattcttctcttgcttactcagtaaaagtagaaaaatccaggtctatgatttaacacgcttggcacactgctttaaaaagatttttttactggcagcttatgatcaggacttcgtaatttaatatgttttctaactctgaaacaaacagaagcatttattaaaacttttgcttaattgtctgagcagccacttgcagctcgtgttccagggaaaggaagcccggctgcgcacccacgctaggtagctgagtgggtcctgcagctccgggcgcggctcttgccg

SEQ ID NO: 40140 - DNA, 410 bp, Mus musculus
  source 1..410: mol_type = other DNA
tgtgtttgacataaaacttctaactgtaacactgaacaacacaactaaaatcacatttgtttaaataccaatgtaattttaacttatttcacaagtaagccacttagtttgacctggaaattattattgaactattattataaatgttctctcactatttttactcttaagggaaagcagatgacagatagtataggggcggttaaaccaaccacattaccttcagagagataggctgccaatctaggtctctacagattgtctttgctgtttgacagctttgtgaagaaactgtgaaagaccctagacacatcacatttgagaaaggactctctcatccttttaagatgtagaaatatctgcagatggaccctcttgcagcctgccagacctccctcaggaaggaggaa

SEQ ID NO: 40141 - DNA, 541 bp, Mus musculus
  source 1..541: mol_type = other DNA
gaaaaaaataaagaagaaggtattattttctgtgtacctaaattatggactgagatgttttaccaccctgtttacaaaacacctgtttctaagataactttgtttttgattagcttttattattattaatccctagcacttacagaatagctatatgaaatctatatgcatagatgactgtacaagttatttcctaatcttaagaggtagttacttaatgatccagtgttactatgaataatgccagcccattggacttgcaaactttatatgccccagtacagaggaaaatgcctaataaaaatatttttaaaaaaacattatggagtgaagtaaacttattaccatagcaggagatgttttaagcatatgatatttcatttttaaattcacctcaaatgatttttcttaaaaactattgagttatacactataaatgagtcaattttatagtatgtgtactgtatctcaataaagctgttattaaaaaagaaaactttctcataaagcatgtaggcataatcacattcagtcctcgggg

SEQ ID NO: 40142 - DNA, 520 bp, Mus musculus
  source 1..520: mol_type = other DNA
gttcatgacttcacagaaagtttcaataatatccatatattcttgacagtcaaaactatcgcttatttgtgacaatttatgtttcctacatcaaaactctgatcataggtgatccatatttagtttcttaaaaataggcatttcacagtaaagaattaaatgtatctgggatatctgaggtatggcagatacttcctttattctatacactttgtctcaaagactctcttgtagattgcctcttgtctacaacaggtagtctaacctaatattggttaaaaacaaaattgccaatggttactcaaagtctacatgaagacattgtgagatgaagtcaaattgattcaagaacaaacaccagtctttgttctcactttcattgaaactggctcaatagaacatgttttattcacttcctaatgttctaatgaaaaaaacaataaaattgtagtttagaatcgttcaatatcttgaaataaagactaattctaagatgattatttgttctgacagatatcat

SEQ ID NO: 40143 - DNA, 385 bp, Mus musculus
  source 1..385: mol_type = other DNA
tggatcttggtttgaagatcttgagccacagtggctatggattccagaagattgaatctccgagtttaaggaacacacctttaatctgggctacacatctgggattaaaggtgtggcggaacacacctttaatctgggctacaccttcttgctccttactgaacaattgttgggaattgtaagtcatcaataaattcctttactttctagagactatccataagttctgtgactctagagaaccagacctaggctgtttatactggttctgtgtttgacatgattttgagctaaattcagggaaatgcactccaataatgtgacatttctgagctgctttgcagaaaccacacccaaattgggagaagcttgtcgagtaaagact

SEQ ID NO: 40144 - DNA, 606 bp, Mus musculus
  source 1..606: mol_type = other DNA
cttttcatgaagatatgagaaaagtataagcaagacatcatcatgctaagactataacatagagagtctgcactgattttgttatcaatattatccctttatacataaaaaaaaacagtgaacaaggtcacataggtacttaaatcatttagttctatttttacaataactttgaatttttttagttttgcatgtattgaatttagtgttgaacataaagagtaaaatatttatcaaaaagaagttacttggagaagtaatgaatgtatccatttgtacttggtttacatgttgtggatgctttgtaaacattttcccatatgttttaattaatgcccttgtgtgtattaaaacaggaaacctgatttttgctctaaaaggaattactgccacattatattttatttattctttagattttagtcttgtaagttaaagtgcttcacatgatgttgttaaaaagaatgccactgcgtcattgttaacctgtcgcctggaataaagaatcgatttaaaaaaaaaaacagtgaattaatgaaacttgattgtaaagacttttgactcaatctagatatgttcagtatctgtccagaatgaggacatcac

SEQ ID NO: 40145 - DNA, 425 bp, Mus musculus
  source 1..425: mol_type = other DNA
tcttcatatcttatattgccactaatcttagggttataaggtgatcaattcacttgtgtgctacttcccataaatcatgtgactaaattaacacaagtatgaaagaaatgaatatatatttattttcctacctgaaggtttcttcaaaacatgaagaaaaatagttagaaaaacaatagaaaaatgattattttgtcttcttttcttatgtaaaacaaaacagaacaggcaaattttcttatgtataatgtgttttaattttttatttgtgtagtaaacaatattgaagagataatattgaacagacaatattgtattgaaaaatacagtatttaaagaagatgttatagaagcctgggccatagccaccctgtgtagatatggttctgcagggctggcattggccaatctgctcagagaggatg

SEQ ID NO: 40146 - DNA, 429 bp, Mus musculus
  source 1..429: mol_type = other DNA
agcatgtgctgaggacttggttcagtaaataaaggtcaaggctgcctgcctttaattcaaaagcatggaagacagatccaagcgatttgtgagctcagggtttacttaagagatcctgactcaacacacacatgtgttcagaaaacttgataaaacagtaaataaagtaagatgcattttcttatcaggaagtttagttgacaccagaaagaagtcatatttggaatcaagatggagtcatcatcatgtatgctaaagatgttttttccacattcttgagcaatgcaaagaaaagaaatcctcttctaagctttgcttctcaatttcttatttgcataatgagaaaaaaaggaaaattaattttaacaaccaattcagtagttgattgagcaaatgtgttgccaaaaaggatgctttattctctgcaca

SEQ ID NO: 40147 - DNA, 433 bp, Mus musculus
  source 1..433: mol_type = other DNA
ttactgcatggaaataccctgtctcttcacagttaggaaacctgaaagcttgatcatttagtgttctcagtatttaaccagtaatgatcatagagaaggcttgtcaacactgtgcattcaatgggtggaaaatgctgtcatgtacacagacttctctactttagtgtatgatggaatgtggagacatgttgtacttctacacagtaatacatatatatatatatatgtgtgtgtgtgtgtgtgtttgtgtgtgtgtgtgtgtgtatatatatatatttttacttagaaactgaaatgtattagatggttttgcacaccacatctttcttatacgtggcttgtgagtaagactcatatttctatcacttattaatccctctagcaggaggctctgtctctccgagactctcttgaccaatagcctcagagtcct

SEQ ID NO: 40148 - DNA, 460 bp, Mus musculus
  source 1..460: mol_type = other DNA
gtctagacctcagaggacaatttccctttattcaaacatattattttatttaattaatttaacttttggggcgcctggaattctaatggtcacttcgtcaacatcattagcaaaatgaataagtctttcctgtaatgcagactccattcttactctagagatggctcagcagttaagagcactgactgcacctcttagatctgacaccctcttctggagtgtctgaagacagttactgtgtacttagatgtaataataaatcttggggctggagcaagcagatgtcctgagttcaattcccactattattatttactgggaacttttatcttcattttaaaaaaatcttccctattttgttttattatgaagagaaacttcttttcatcatgatgtattgtgaggcttaagttgacatcacaatatttcttgtctgatcagatcatgcccttaggggtgg

SEQ ID NO: 40149 - DNA, 239 bp, Mus musculus
  source 1..239: mol_type = other DNA
atacaaatttagttataataaacactatccacaaatgtttctcaaggatattgatgaatcaactcactcattcctcagttgatatctactctctagaatcacaaaacaagaacttgttatatgcaatatatatctaggagatagagttataagaaacagatgtaatattggcatttctgtgtccacagcacaaattccttttttatcataaacacagtgtacaggaccacgggtcaggc

SEQ ID NO: 40150 - DNA, 522 bp, Mus musculus
  source 1..522: mol_type = other DNA
gaccaatgtataacatgcatgaaattgtcaaataggttaactgagttcgaggccagcctggtctacaaagtgagttccaggacagccagggctagactgaattataaaattccagatttttaaatgttgtaccaaaggcagtatttttatatctatccatttttatataataactaggcaaatttgtgtataaccagaacctttagtaaattttcatctattatatatattaattttaaccagtcaaatcaagtactcttaacactgatatatgctagacttgcaatatttaactattttgcctcgcttctatttgttagataaaaataaatatcttaaacacctgtaaatatacccatctaaattgcatctaatttcccttatgtaatttctttatatgaccattcctctacacaaaaaaattatagaattaataatagaagtgattaccaggaactctgatcacctcggagtctctagtatccatgtgtgatgtcagtgctgaggtcacagaggtgacct

SEQ ID NO: 40151 - DNA, 344 bp, Mus musculus
  source 1..344: mol_type = other DNA
tctcacacagtcttatagaagttaaatcacatttagatatagattcaaagagctgctgttatttcttttaactcagccaccagcttctgagttatagtctttttaaaattgttttttacatatatgtacttatttgtgtatgtctgatacatgtataggtggtgccttcagaaaccagccatggatccgtgctgggaactgaactcaggtcctctctgaaccatggaaacagattacctgggatctggaactgtgaactgattgcacattttaatcccaccttcattgtgttcaggtagaacacgtgtgaaatatgtttctagacactgacaatttggtgctta

SEQ ID NO: 40152 - DNA, 319 bp, Mus musculus
  source 1..319: mol_type = other DNA
gagagagagagagagggggccaaagtgaattttttttttaggaacaaactctccttgagaagccagagaagagtactcagcattgtcaacacagtgcagtgttgcttaagcaatccccccaggggcacactttggcccctatccaagggacagggttaaatggttaagtgctttggtccttaaagtgaacatccttctaggaccttccttccctgaaagttgaggaaaagaccataatcccctttgaaagggacctatcccaaggcccctgcagatggctccaacagtgttttcatagtggaaacccactgatgttgaa

SEQ ID NO: 40153 - DNA, 408 bp, Mus musculus
  source 1..408: mol_type = other DNA
caaaatcagtctcctaatgctgaattacaattgtgagtcagcctcagttgggttgtcagtctcccaaaccatgcccttttctgatgtgtctgaagacagcaacagtgtacttatatacataaaataaataaataaatcttaaaacagtttgcatatgtaaatgtataagtacttcagtataaaagtagggtaatttaaagttggcagatttttgtaatccatcaaatgcagtcaccttttaattgtatggctagaccttttattctttagacatttcaatatattgatagtgagaacaggtgtattaaacacttgcatacagtctctaatgatgatgttcttaaagactgttccatagacttgtctagggtttggtcccagccagcacaggggtcagccccgcctcct

SEQ ID NO: 40154 - DNA, 238 bp, Mus musculus
  source 1..238: mol_type = other DNA
gacctacctgactgttgctaggtaacttcataaccaaagggttattgttattcacaaattaagcaaaagaccgtgcttttttttttttttttaataagaaactgtatacatttgttttattacacgttaataaaagtgtctttaaccacctgatgtaagtgacagcccttagctatggccaccaaaaagctcttcctgattggtggcctagagttttgccaatacttaggactcaaaa

SEQ ID NO: 40155 - DNA, 524 bp, Mus musculus
  source 1..524: mol_type = other DNA
cagtttgcatatgtaaatgtataagtacttcagtataaaagtagggtaatttaaagttggcagatttttgtaatccatcaaatgcagtcaccttttaattgtatggctagaccttttattctttagacatttcaatatattgatagtgagaacaggtgtattaaacacttgcatacagtctctaatgatgatgttcttaaagactgttccatagacttgtctagggtttggtcccagccagcacaggggtcagccccgcctcctaggagccgtctccttgattggtgagcaaacccattttctgaccagtcgctaggaataggcagtattcctatagattcccgttcggagtcccgagtggaccaagcaggcccggcttcttccaggaagagttgggagatgagctactctacctgccccgacccggtctacaccggctgcaaccagtcggagctaggagccctagggcctctccagaggaagccgaggcaagctgggcggagttaggaacagaccccagccag

SEQ ID NO: 40156 - DNA, 242 bp, Mus musculus
  source 1..242: mol_type = other DNA
gacctacctgactgttgctaggtaacttcataaccaaagggttattgttattcacaaattaagcaaaagaccgtgcttttttttttttttttaataagaaactgtatacatttgttttattacacgttaataaaagtgtctttaaccacctgatgtaagtgacagcccttagctatggccaccaaaaagctcttcctgattggtggcctagagttttgccaatacttaggactcaaaaacca

SEQ ID NO: 40157 - DNA, 165 bp, Mus musculus
  source 1..165: mol_type = other DNA
tccactgtggtggctaacttgtcctagtcatccacagctggttttgtacacttagtgctgagtcactatataggtgttcaatacacctctataatctggaggagaccatggggcagctggtgagccctctacagctcattaattagccggaaataccttgaagtt

SEQ ID NO: 40158 - DNA, 427 bp, Mus musculus
  source 1..427: mol_type = other DNA
aaatcaaccttgacaggatgtcttctgggcacctagatcagcttgagcaactttttttttttaatttgacattttaaacatcaaacaaaaatttaattttcattctttaaaggtagaaagaaatcactgaactaagtcacagatgtcttttaaaaaaatattctatgaatgagtcttattgagttgatgatggccatcaatttataaatctcaagtaacaggctctcagtctttgttactaaactgagagaaactctggttctcttagaggagtattttgcaactttcctaatgctgcaactctttagaaaacttatgaccgcaaccataaaactgtggtctttgctcttaactatatttttctacagttttgaatcataatatgaatgtatgacatgcgagatatctaaagtgaaaacgggtctga

SEQ ID NO: 40159 - DNA, 178 bp, Mus musculus
  source 1..178: mol_type = other DNA
tttgacctcctgatcctcatgcagccagctgaaggcggttcggacactgttcaggtaagctttcaagattcaatagattccactgtggtggtcacttgtcccactatataggtgttcaatacacctcataatctggaggagaccatggggcagctggtgagccctctacagctcatta

SEQ ID NO: 40160 - DNA, 245 bp, Mus musculus
  source 1..245: mol_type = other DNA
gctcctgatctcatgcagccagctgcaaggcagtggcatcaatggccccagaggctaagattttttggaattgcaagctttcagaattcagtagactctggcctgttatcaggttctccactgtggtgcttgtcctagtcatggtatttatcagagaagtatggttatatacacatataggtgttcaatacaccttctgggagactattgggcagctggagagccctctgcagctcattactctc

SEQ ID NO: 40161 - DNA, 254 bp, Mus musculus
  source 1..254: mol_type = other DNA
catgcaccacacagtggtggtcatgaacagtcagtgctgagggtccaccactaggctccataatgatagtcgtagtactggtctttaatacaaatcctaaatctaggtctcttcagccacagaatacatagagagccctctacagctcactaacagaggaatttccagaggtgacataacaagttcctgtagctctgagaatgtctcaagttactgtaaaaccccagttaatgatggggtaccaccctgttgga

SEQ ID NO: 40162 - DNA, 313 bp, Mus musculus
  source 1..313: mol_type = other DNA
cacacctgattttgtacagtgctgagggtccaccatcagactctataatgataagagaagctatggtgtagcagtagtactggtctttaaacaaatcctaaatcaaatgggacctagggacaaagtctattcagttacagaatacatggagagccctctgcagctcactgctctctctgctctcttccggtaagagtccagctccaacctcagaggacaaggcaagaaggctttctttccacatttgacataacaagtttctgtagttctgaaaagtaaaacctcagatattgatggggtaccaccccactgg

SEQ ID NO: 40163 - DNA, 218 bp, Mus musculus
  source 1..218: mol_type = other DNA
cttgggaatggtgtagtctttaatacaaattctctgttcagccacataatacataatctgggggagaccatggggcagctggagagccctctgcagctcactactctctcccggtggggaatgagtccagctccgaccttagagagacactttcttatcatgagtctgaataagtgactaacaagcagttaatgatgaggtaccaccccattggttgg

SEQ ID NO: 40164 - DNA, 245 bp, Mus musculus
  source 1..245: mol_type = other DNA
tgtggtggttttgtacagtgctgaaggaacaccattggcctccataatgataggcaaagactactctcagagaagttagcagtagtactggtctttattacaaatcctaaaagtctattcagccacagaatacataatctggagctggagagcgctcgacacctcactactctctctgctgtgaggggagaaactttttttattgattgtatcagttaatgatgaggtaccaccccattggttgg

SEQ ID NO: 40165 - DNA, 267 bp, Mus musculus
  source 1..267: mol_type = other DNA
attgaatcacctacggcaatggcactataagaatattttgttacaaccagcaaattttttcttataattagagagttagttgtgggtaaaacaattacatcaaaatgctttgtatacttggatactgataatatattaaaaaagcagaaagcttgactggaaacatataagcctaggctgttatcttgtatggcatatgtagtcatcaattcctctatttgacatggttttgtaactttatttcaggtaaaacacacccaacttgga

SEQ ID NO: 40166 - DNA, 334 bp, Mus musculus
  source 1..334: mol_type = other DNA
actataaaaatgttttttgtttgcctgcaaaaattttgtacaagtaattagagagttagttgtgggtaaaacacatcaaaatgctttgcattcttgagtgctgataatacactaaagaagcagagtatagattcaaggtcattttttttttttttttttagagaatcaacagtctacaccaggcctaggctgtttatactagtcatctatttgacataattttgtaactttattccaaataaaacccaaaagctaaattcagggaaatgcactccaaagagatgacatttctgagctgctttgcagaaaccacacccaacttgtgagaggctct

SEQ ID NO: 40167 - DNA, 368 bp, Mus musculus
  source 1..368: mol_type = other DNA
accaggcctaggctgtttatactagtcatctatttgacataattttgtaactttattccaaataaaacccaaaagctaaattcagggaaatgcactccaaagagatgacatttctgagctgctttgcagaaaccacacccaacttgtgagaggctctgagcatttgtcctcacttgcagagattctctggagaggaaaaacttccttctgctcccttagaagactccagctagttatttgaagaggtcttcataatgatgatgtgctgggacagacttttgttgaaagatgcaatcactgagtgacctttttaccagctagctagggcactactctcaggctaagtgtttacagtcagcagcaaacag

SEQ ID NO: 40168 - DNA, 445 bp, Mus musculus
  source 1..445: mol_type = other DNA
atcatattatgtaatcacagaatgatcacaatcaggtaacactgatagaatcaactacagattttatcggaaacctctatgaacagggatcatgctaagtgctgcttctagacgcttttcctttcgcagccctaagactgagacaggttagaatccaaccggctaagtctggtggaaacaaactagcttggtagcaaacagcctgccacagactggcccttggcctatcctttaggaaaagccctgccagggcctacgccagaatcctcagaagggcggagtctgcggtggagccgctaccccgcccctgcgctcggccgttgccaggaaacgggcgtcgacgctctggctggggcctggccggaccaatgagctggcacgccgctgcccagccgtgcgtcactgggcggttgcgtgaggtgcgcgggggcgcgggctgcgtgtg

SEQ ID NO: 40169 - DNA, 446 bp, Mus musculus
  source 1..446: mol_type = other DNA
atcttcatgtttacctaacccactcattaataattggcttaaatcataatttgtaaaaataggaaccaggtatcagtaattttcaaatctccctggtaatttataggctgagaatccctgggatgatgatgatgttgctgctgctgctgctgctgctgctgctgctgctgctgctgttgatggtgattgatggtgatggtgatggtgatgatgatgatgatgaatttttcagtctaagtcttaatctatactctagatagcagttactctagtataaaaagaggagtggtcctaccctgtttccttatctttgtgctgttgaagtaaaaatttgtaaatattatgactgcaatgaggctagtagagttacagtgctctctgtatccaaggtctatcacctattagggcctctatgacctcatgctggagtaggtcacagcccaaag

SEQ ID NO: 40170 - DNA, 237 bp, Mus musculus
  source 1..237: mol_type = other DNA
atctaagatttctaggaaactctatggacaaaaacattttggaaacatttcctagggatatagatatttctttcaagaaattccaaaaatgtaaaaactcttttgttttgttatgaaaagttcacaagaaaacttgtccctagagacccgcttggcacataattgtcaaatcattaaaggtgtttagctgggcaggtgtaaaccagcctgggacagggcagggtgctggagctacag

SEQ ID NO: 40171 - DNA, 150 bp, Mus musculus
  source 1..150: mol_type = other DNA
gggatcccaaaagatatttgccagtcctgcctcaggaagcggaatccacttcatctagagactaggtagatgaccaagctgcctgctccctatccgagtcttagctgatactgtgttatcactgcggccactgcggcagaactcgggggg

SEQ ID NO: 40172 - DNA, 224 bp, Mus musculus
  source 1..224: mol_type = other DNA
ctagagactaggtagatgaccaagctgcctgctccctatccgagtcttagctgatactgtgttatcactgcggccactgcggcagaactcgggggggggcgagcctgcctggagtgcagtcacccaggagcgcgcgcacggaactctggagccaggaggcgcgccacctggtggagccgcccagagcttgggaccggctgggtagcagcgccgcgggagcaggt

SEQ ID NO: 40173 - DNA, 339 bp, Mus musculus
  source 1..339: mol_type = other DNA
gacagggaagttgcatgcagtgaaatcgccatgatccctggtccagggccaatagtgttgggacctgggtagaattcccagctccagcaggcaccacgataaataaataataatgcaaaattttaaattaaaagaaaggaggaccgtccatggcaggtctaatcttctcagtttaatgaccagctgagccgggcatctattctccagaaattatcggggccgccgcccgcagcctcgcgcagcaatggctcagggtggtgaagcccaaccccgcgggtcctaagaccgcccggggtgattgggcaggcggatcagggcgggttggcgagcccccttttg

SEQ ID NO: 40174 - DNA, 309 bp, Mus musculus
  source 1..309: mol_type = other DNA
ctgaacagtgagttcagggcctccctgaatgacatgatgctaatatcactatgtagttcatcatggtctccaattgctaactcatggctgagctatcctccaggaaagccctgccttgggcctaggcagtcttgggtctgaggcagaacaactagatagataaatgaaattttcagtggtttgccttttgctgtgaagacagggcaggactgtcttactcgcagatcccggggcggagccttcgaaagagccccctttggagccaactcccgcccggctgagtcacggcctgaactaggggaggaggcg

SEQ ID NO: 40175 - DNA, 388 bp, Mus musculus
  source 1..388: mol_type = other DNA
gcccaccgagcccacagctcagggctgcagtgaacaggaaaaaatatctcagttctggtttagtttaaccacttactctgttactgagggcaagtcgtgttacccttcagaatgtcagcacctgcatcccgagaacaacaattgtgggaattgcacaaatacagagagcagccggctgccagcctcttgaggcgaggcgcgtctcccggcgtcggtgcaggaccgacgcggaggtgagtaggcctgggacgcagggcttgcagggtgcggctggggcagctgcagccagtgcggctcgcactcgctcgcgcgccccgccccggccaagatggcgcccctccccctcccgtgcgcggctccgccgctcggggcgcggcctcgcggcctg

SEQ ID NO: 40176 - DNA, 272 bp, Mus musculus
  source 1..272: mol_type = other DNA
ggctacagtgtgcagcctgtagtggagacacctgcctaagccactaaggcattcatggatgaatgaagaaagccagatggtcaggggggtgaggagctgccccctccaggacagacgttttagcggcaaagtcctgagggaggtggggaaacaccttggcataggcagacctactcccccagcagcctggatcttgagactgcctgtccctcagtgctgcctcttggaccagtcaggattcctggtttccttggtaacgggaagcacgtcag

SEQ ID NO: 40177 - DNA, 324 bp, Mus musculus
  source 1..324: mol_type = other DNA
agacatagggagttttgttacactgctccacttttgcacataagtgcaaatgtctataacaaaaatttaaaacattcatatttacccagggataaatgaaagtatattcaaagtactttggagtacttgctttgaacaagaaattctttagaagatgaacagcccaccgagcccacagctcagggctgcagtgaacaggaaaaaatatctcagttctggtttagtttaaccacttactctgttactgagggcaagtcgtgttacccttcagaatgtcagcacctgcatcccgagaacaacaattgtgggaattgcacaaataca

SEQ ID NO: 40178 - DNA, 240 bp, Mus musculus
  source 1..240: mol_type = other DNA
gtagaaatcagttgtaaatgtttccatcctaagcatttctctcctaagttggaactaccaagagaccataaaggtttaggtatattctccagaaaaggcctccatggccaatgcttggaaaacttctccacttactgtagaggtgagtgacctcagaaggtcaccattgaaagtctcactggataccagctagtcatggctggatgtcatctgccaatattggcatagtcatggaagaca

SEQ ID NO: 40179 - DNA, 128 bp, Mus musculus
  source 1..128: mol_type = other DNA
tcattgtcttaaagattattgctttaaggacctattaatgacagtgattccaaatcaataactgggctgtaacactgtcaccaaaatagttggggcagtttcttgatgttaggataaagtaatattct

SEQ ID NO: 40180 - DNA, 396 bp, Mus musculus
  source 1..396: mol_type = other DNA
taataaaagcagctaccgattacggttatgcgtattaaatgagataatgtatgtaaagtgattagctctgtctgcgtaataaacactcagtccctgttaatgtacagtttttattaatgattgagttctgggttgaggtacaggtggtcagctggttctagctgcttttacttgaaggcatcaagtgccactatcaaccctcgcccttaggcctcgtgagccagaggcagcaggcgaggatcccggatctaggatctaggatccgggatccgcttgccagctccaaaccgcaccgtggttggggcgggccttcggctccggagtcgccccctcccccgaccggtccgcagccccgccccggcccctccctccggcctgtgcgacgggtccagcggc

SEQ ID NO: 40181 - DNA, 385 bp, Mus musculus
  source 1..385: mol_type = other DNA
tccaagcaccttctctccaggggccagggacggctacctggcgcggccgaggcagcctcgtagtccgcgatgcggcgctggaccagggcggcagcacagctgtgcaggcaggcctcctggaagtccttccttcccggtccccagcctaggagtgaggctcagcgtccagagctcggtggtgcaggctgggcacacagcgctggaaacacagttctgtcatccgattgtactccccgggatgcacagcccgtctccctcgggagagcaactgcgctctcactcacgtttctcagttgctgctgctgctgctccatcacgccaagggagccctagtcacttccgcccgtggcggggtggagctctcagagggcgtagctccaggctc

SEQ ID NO: 40182 - DNA, 299 bp, Mus musculus
  source 1..299: mol_type = other DNA
cttctgaggacattatctctacagatgcatgcttcaacaactatctagtgagtgatgctctctgggaacttaaccctgcagaggcaatgtttagctctctttccccccagatgtgaggggctccccccacccccatacacctgggcatcaggtgtgtcctcatccttgccaagggctcagggcattttgccctcagtagggccgggccgctcttcccctcagggcgcgaggcccggaccgcgcggggacctcgggttccagttctcgtcgagcctggagctacgccctctgagagctcc

SEQ ID NO: 40183 - DNA, 438 bp, Mus musculus
  source 1..438: mol_type = other DNA
gctctctttccccccagatgtgaggggctccccccacccccatacacctgggcatcaggtgtgtcctcatccttgccaagggctcagggcattttgccctcagtagggccgggccgctcttcccctcagggcgcgaggcccggaccgcgcggggacctcgggttccagttctcgtcgagcctggagctacgccctctgagagctccaccccgccacgggcggaagtgactagggctcccttggcgtgatggagcagcagcagcagcaactgagaaacgtgagtgagagcgcagttgctctcccgagggagacgggctgtgcatcccggggagtacaatcggatgacagaactgtgtttccagcgctgtgtgcccagcctgcaccaccgagctctggacgctgagcctcactcctaggctggggaccgggaaggaagga

SEQ ID NO: 40184 - DNA, 291 bp, Mus musculus
  source 1..291: mol_type = other DNA
cagggcctaggcagaggatcctgaaagcaaagactatttgcttagccttagagaaagtcaagcttgaatgtgactcaagtgattctagacttatgcctctcacctgtgagatctgtatctcagacttaaaacttgaaatatatgaaaaatttccactgattagaataaaatctataacagaggtaggttgctttcttcactactagatgtgtagcttgttgagagagatacaaggagtccctaggattacgtgtggcctgggtcccggtcccgcccccaggcccctcccac

SEQ ID NO: 40185 - DNA, 341 bp, Mus musculus
  source 1..341: mol_type = other DNA
ttttcctcagtatatagtctgatttctacccttagtgtacaaaaaacttaaacttttcaaccggatctgcccagtgcagggccgctcaccttgactggcggggcagtcgccggcctaacctgtgctgtcgcggcccctaggcccacgatggctggggccgcctccacccagcccgcagggccggaggagcctacgctctggcccacgtgcagcgcgcgtcagggaatccagggctggagtcggaccaaaccgggccggaagccaccgagggagggaccgcggcccgcgctggcccgagctggccggggcgggccggggcggggccgggcggcgggcgcggc

SEQ ID NO: 40186 - DNA, 354 bp, Mus musculus
  source 1..354: mol_type = other DNA
ttagtttgagaggacttgtagccgtctcactcggccacctggtcccggcacagagaccccgggactggggaacgaccccttggctcgagagccggctctgagccccggccctcgagcaaggcttgggggtgggggaagggacccactgcaaacacccgggggaggggacaggggtccttgcccggcggccccggctcagaactgcggggtagggcgcggagctacccacactcaccgggactcgggccgcaggcgccttctccgggggaactcccgtccggccgcgcccgccgcccggccccgccccggcccgccccggccagctcgggccagcgcgggccgcggtccctccct

SEQ ID NO: 40187 - DNA, 279 bp, Mus musculus
  source 1..279: mol_type = other DNA
gtctgattcaaagactctagcagcaaccacaagtggttccttatgtgctgttactgttctgcaatagcattcaaaagatcaaattcatcctaaatgtaagtgaaatgagactttttaaatgctcatccattttattaaaacatccaatacattatagagtcttcagataccatttaaatgctatttactgtagtgtcaccaaaactgtggccagtccataatggaacctctcagttttctggcactcaggtctgcctctgacatgagttcatttagttt

SEQ ID NO: 40188 - DNA, 447 bp, Mus musculus
  source 1..447: mol_type = other DNA
agagttccagacaagccaggcctacatagtcagaccatgatatgtgcacacacaacatgcacaaaatactgcattataggaagcacttggggagaggaaaggcttccgaagcccctctcattaaaagtcagagacattgaataaacattgctaatgtctcacacttggaattaagcaatgaatgttagtttcttcttctttgcactgcggaaacaatcatacagtattgaaattgtcagtttgtttaactagaatctgattgaaattaaataaatgactgtttaaaaaaaaagtctgttgtattgtaaatgtgtttcacacaagatgggtgaagtgtctcctggatgctctgcggccccacccgggccggggtggaaccgcagggtggcagccacacctaaggtcgcccgcggcagcttagagtggtgggagcgtgcgcctgggcga

SEQ ID NO: 40189 - DNA, 247 bp, Mus musculus
  source 1..247: mol_type = other DNA
caccagcgccctgcgatggagaactgcagtttgtccgacactgtggatacctggagagctcagaagcctagccttgggatctctgctcctgcagagactgactcctaagcctgagaatgtccacattcataagaaggcacatttcttttacgtaacagtcactgaattttaagtgaagaaacctaggctctgagaccctgggcttagatgctcacagcaacgtcactagttactaggcagggagatc

SEQ ID NO: 40190 - DNA, 200 bp, Mus musculus
  source 1..200: mol_type = other DNA
aagcttccaggttgcttactgtcatcctcattttacttatctagggaaatacctctcgatctctaaattcacatttgggatggacggcgcggcgctggggcgggatccggcgcccgggcctggggcctggggccgggaagtgcgcggggaccgcggcagcgcgggtgggggcgggggcgggggctggggagggggctcgg

SEQ ID NO: 40191 - DNA, 368 bp, Mus musculus
  source 1..368: mol_type = other DNA
tattgtatgagaaaagaataattttttttttttaaatgtcaggtatttgtccattactttagcttttagtgctaacttaggtttttatttatgtcaataaaagaacataatacctgcagctttcctggacataatttatctcactatcactaataaagactgggtttaacggcatgctccgcccggaaggcgcctcctccaagaacgccagaccttgaggcccgcccagctcgtcgctccagggccgcccagctaggcaggctctgatgcgcacgcgcaaacgcggtagccacgcgccgagttactgcgcatgcgtcctctgatccccgcgcgcgcacacacagctcggagtttccctttccgggccc

SEQ ID NO: 40192 - DNA, 585 bp, Mus musculus
  source 1..585: mol_type = other DNA
cagagaagtgccagggggactgttctcacgaaggatgacattgtactcctgctgagggaaagccctcgtcgttgacgtcaacaacactgacaggggagccatggtccaaggccaccactgtcagtagctcgctgttcacggtccaaaggagccggaagtggccgtcccctccagccgcaaggcgataggacacgcgggcagcctcccccaggtctggatcccgagctaccacgtgcagtgctgcgggcccagggggctgatcctctgggaggcgcacccgtgatggggcgttgtcattttcatctgtgacaaagacgcgcgctgaaacgcgcgctgccctgcggcggctggcattggctggccggtcggtggctccagaccacgaggagcgctgagcgccccggtgcgcgcgtccaagcgcagggcgggcaccgggggctcctgcctcagcaggcggtatcgcacctcacgtagcgccagtgccagggggtcgcgcgcaaaagttggcgcgtgctcgttctcgtcctgcacacgcacctgcaacagccgcgcgcctgcgcctcccggcccctcggcgcgcacggt

SEQ ID NO: 40193 - DNA, 381 bp, Mus musculus
  source 1..381: mol_type = other DNA
ccctctctcctcagagaaagggaggcctcccatggatgtcaaccacccttaacatacaggttgaggtaggactaggtgtaccctgaagaccaactttttattagtaaaaattttgagaaactggttctcagtttgtatgattattttaatcataatcaatgctgtagggagacaggtatgacttactctaacattatcttaatcatattaccagatatagtagtattttggtaaattatatatctttcacatacctgtttaacaatgttgtagattctataagattataactttgtactatatcaaactaatctgagtcatctctgatgaagagcaaaggcaatttatcagagtaaactcagggcatggcccaaaatgccc

SEQ ID NO: 40194 - DNA, 444 bp, Mus musculus
  source 1..444: mol_type = other DNA
tctttctggtcttaaactggtcaagataagaaacttaaggagaaatctgttttgttttgcaggtagaaaatagtttttacacataaatgacacaactgttagataaatttatcttcgagatatactatactgtgttagccatactaaattaattaccattttaaagaactgcatgaagtaagcttccctacattatgtattctggaaaagtaatataaagatattttgcaaatgtatatgtatgtatagttatcgcttcatgaaaatcttgcatttatcatatccatgtaaaggttttgtatattttctttatttacatttcaaatgggacacaagggcctctcctcccattgatgcctgaatcctaaggggttgcaaaccccttcagctcctgcccattggggagtgcagagcctcccagcagacagctatatcaggctcctg

SEQ ID NO: 40195 - DNA, 458 bp, Mus musculus
  source 1..458: mol_type = other DNA
tataatacttgagaaaaaagttataatagaagatatattaccaattactaagaaaatatattcagccaatttgcatgcattgcctgtgaagataacaaatggttcagtcatttcagaaaatgccatgtcagtatttgaaagtaaacatctatttactatgtcatcctgccactatattttagatatgatgagagatgaaaataaatgtctactaatcataattacacaaatatttgtagtaatattattgataagaatcccagagataaagaagctgctgtaccatagcaggttttaagaagcagctcactggctacagtctcttgctaggccactgagataacatttgaaatgtaaatacataaaataatcaatttaaagaaaactctgattctgaaagaattgctatcatccttgctactaagatctgagtgtgatttcagtctctgacctcatag

SEQ ID NO: 40196 - DNA, 435 bp, Mus musculus
  source 1..435: mol_type = other DNA
aagacatttgttttcctgtttgcaattgaaaaagctaaaactctgcctgttgctgtccatcagccaaattcaatccacatatatcaagaatataacaaactttgtaactatgaaattatagggttttcctatataacatctttttgcttataagaaacaattgtgtgggagagcaccctctcagacaggtgtaattaaataaaaattactttttaaaaaagaataataaacacttgtgaagttgctttaacacagaaattgcagctgataagagctgcagaaagttatggattgtttattcggtgacaaagcaaaaacgaaaaatatttcatagtaatatcattcaaactttgtacagtgctgagcacaggtattattacttcctgggtaggaactgcatctaacaagaattgctcccagagtgctggaccagtt

SEQ ID NO: 40197 - DNA, 387 bp, Mus musculus
  source 1..387: mol_type = other DNA
cactgttccatggttacatggatacacacacccgtgaaacttcttccacagctaaaccattttataagagaagttttaaaataatcatggttaggattaaaccttacaatgaaaaccattttcgtgtacacataaggtttaagtaaataataataataataataataataataataataataataataataagtaaatccatctactccgttctaaatcttttaaacgactttaagagcaatggcagccgcgcttctgggacggggcccacacgtgaagccagggcgccgaatcacaggcaggagtcgcccgtggctcaggggccgccgggccctgccttccgccctcccgcctacgcacagcgctccccgaccggtaggaggcggt

SEQ ID NO: 40198 - DNA, 467 bp, Mus musculus
  source 1..467: mol_type = other DNA
aatttcccctattttaaaaagtgattcattaacaatgcaaaatctcacagtgatgactcagtgtccaatcattcattctaaaaattttcttctgggccaggagagatggtgctctactggagttcagttcccaggaatcatatcagagagattgtaactctggaggccacgttctggccactgtgggccccatattttcatgcatacatgtgtacatgaattaaaaaataaatctaaagaaaaaggaaaaaaatttttttcttctaagttcaatcctgctgggtagccaggcctgtgactgtacccctctgcccacagagcaatgctgccctgtacacttttctgagatggcatagatcagcattcacatttccttgctatgccttcctaacagaacttcttggaaaaagatcctaggaatttctgccagaaactgaacgggggaggggagaggagaaaagacctcc

SEQ ID NO: 40199 - DNA, 392 bp, Mus musculus
  source 1..392: mol_type = other DNA
tcttataacatggtatgaggtatttatatatagctatataaataaatatataaacaaatatacatttatataaatattttttatttatatgcagagggataatgttattctcttcaagaaaaacagcttaggaattaaacaaatatattcagtaacattaaacacattaaaggtgtatcatgtgtcaagagcagccattgtctaggttttgtaattaagaaacttgaaactgtacctacctcccaaccctgtgaaaggtggaagagataaaaatgaattgtagactagcatgttacattgtctggggaccataagacagtgttagcaaattttggtagtatactttttaatattagcaacctaaaagggaagtattacacagatagatcttc

SEQ ID NO: 40200 - DNA, 512 bp, Mus musculus
  source 1..512: mol_type = other DNA
cacagtgatgactcagtgtccaatcattcattctaaaaattttcttctgggccaggagagatggtgctctactggagttcagttcccaggaatcatatcagagagattgtaactctggaggccacgttctggccactgtgggccccatattttcatgcatacatgtgtacatgaattaaaaaataaatctaaagaaaaaggaaaaaaatttttttcttctaagttcaatcctgctgggtagccaggcctgtgactgtacccctctgcccacagagcaatgctgccctgtacacttttctgagatggcatagatcagcattcacatttccttgctatgccttcctaacagaacttcttggaaaaagatcctaggaatttctgccagaaactgaacgggggaggggagaggagaaaagacctcccctccccttccccaggtctgtgcatggccaagctgagggccaacagctggacttgatcaccagctttgttctctctggctatgcaaagcg

SEQ ID NO: 40201 - DNA, 467 bp, Mus musculus
  source 1..467: mol_type = other DNA
tgttttagtggcagcgtggagatcacacacacacacactctctatctagagaactatacaaaaggctgtggcacagtgccttgggcacacaaacaagctaaataatttgtggttatttctgggctgagagggaaacttcgcatttccaatcagcttcttgaggtgaccccggtgacacccctgggcccgcggtttctgctcagaccgcgctttccaagtttaaagaaggtactgagatctctttggacccacgcgtggctccagagccctgagggatgcctagcacgcgcaccagctcgtacttcctgatcctgggcgcggccgctcacagcgcagggtccggagcggaatcaggcgcttctcctgcagtgggcgagcgcccccgtcccgggtccctacctggcgcgcctgctctgcggcggccgcggcaaacccccgcccgcggcgcgcacccctgacccggcccc

SEQ ID NO: 40202 - DNA, 321 bp, Mus musculus
  source 1..321: mol_type = other DNA
cgagtcgtgtctgttccaggtgtacaactggagtccagcttggcccttggaggcccgggtagggcaagcagctgtggtaaaacccagggccttatgctgtacccaaatcttagactacccttaatctcacgcctagggtcctttctgcggccgcacgggagctctgcctgggggcggggctgaccaggcaagtccctgtgtcctcgcgggccactgggttcctagggggaaggtcccagcagccagagagccacactccgggaccacctctctgggatccccgcctccgtcacgtgggtgccgaaccgggtcggtgctggc

SEQ ID NO: 40203 - DNA, 230 bp, Mus musculus
  source 1..230: mol_type = other DNA
agcccagtgctgcgtgggaaactctctccatccatcatggtagctgcggggtcccaccctgtacccagtgacagcattttccttagtgagcagacagccacctctgctgaattgactctgtggaatctataaagggcccgatctataagctatggctaaagtttagacattttgctccccagaaggggagagagtgttctttctctttgtgtacaaatttgatcatgttt

SEQ ID NO: 40204 - DNA, 436 bp, Mus musculus
  source 1..436: mol_type = other DNA
agctaatgatttgatgcaaataccttcatgaaataccattttacaatctggttctagccctggctgtcctggaactcactttgtagaccaggctggcctccaagtgctgggattaaaggcgtgcgccaccacgcccggtaagctagtcttactaagttgccaaagttgacctttaactgttttccttttgccacttgcaagcgtggaagaggaaaccaaaatgcattgtgaagaatcttcataatctgaacttctcatcctgcctcctgggaggctagggtagatatgcagtctgcaactcttcttcagtttgcattgtaaacaagtttatcatcttgccaggctcttaacaagctggggagggatccctgcatagggatcttgccagagtcatgtgacacagaagctcgaatccgtcgctatggggcaggagtca

SEQ ID NO: 40205 - DNA, 341 bp, Mus musculus
  source 1..341: mol_type = other DNA
aatgtgctactgctttgcaaacagctaagaatatctacccttgcaaagggacaatgttgatatttgttgtgtagcaaatccttaggaaataaaacattttatcatgaaagaacctccttttagaaactagtaagattcattaggtctctctctagcatatgtaagcagtaaagaacttcaatttgttcaactgtctacagactatattgtgccaataaaatacattggttcaccaagttggatattggacctatcagggataagtacacagttgtttgcatcttgctagaagtattacacacaaatatttaatcctcttaagtctcagttaataaataagc

SEQ ID NO: 40206 - DNA, 484 bp, Mus musculus
  source 1..484: mol_type = other DNA
catttaaccaccaaattctttctttaaatgtaatagcacagtcaaatagtaataataatttactgtgtatcgaattagttcacttatataccctagcatataagagagagtctggtgcatattaagcatttaaattgttgaatgaatatgcctccctaatgatgccttatgaagccatcacaaataaagcactattggtcaggcatgatgattcctgcctatgttccaggccaacctaacctatatggctaggcgtggaatgcaaagtagatcctgagtccaaattttaattcattgattaataagttaaatggatgtaacagtgaatcccctgtaagactgatatttaatatccatttaagtcttaaacaagtgccgccacctggtggcaactgtgtagatactgagtgcaccggaaatttcatgtccaatagtcatcaagatatgattcacgtggtataaatttagccaatcaaatttctaa

SEQ ID NO: 40207 - DNA, 89 bp, Mus musculus
  source 1..89: mol_type = other DNA
agctgctgggctgcaacatctatttgtcctgggaagtgtgtttcagcccatcttaaggactgaaaggaagctcctctctataaatactt

SEQ ID NO: 40208 - DNA, 282 bp, Mus musculus
  source 1..282: mol_type = other DNA
actgtttctcagcggaacatcacactctgtaatactaacttcaaagtttgataagtagattgaaaacgtttcttaaggatagttgttttattaaaagtccacttgaactggtagcgaatatgtcatccattttctaaagaacattggtaagagtagatcatgcatggtctgcgagctaggagatagaagcttgctgttggcttacaaccgcaggtagagtggagggcctcgcgcgccgccgtccgtgcagctcgccggtcgagtgtgagccggattgcgcgc

SEQ ID NO: 40209 - DNA, 315 bp, Mus musculus
  source 1..315: mol_type = other DNA
tatccggtgctgctgagcctaaggtacacttggttcaggctggccttccagcctcggaggttgctgccctccaaaagggctacttcattccctgggaaatagggataaaatatttgcttgtcaaagcgaggctccctgagttgagcggcagagagtgggcatcccgcgcggtctgcatccaccggccagggtggggtctccgtcgaggcggggccaggggcggggcggcggctgccacgcagggctcagcctggggcgcgagacccggcgcctgcggtgcggactgcctctcccgcctcaggcgcgctccagccc

SEQ ID NO: 40210 - DNA, 358 bp, Mus musculus
  source 1..358: mol_type = other DNA
agtaggctggctccagcttcacagtcacattctcaaagtcatactctgagaagtactgggtgaacatgcacacactcaggctgtgcttttgtgttttgtcaataagctaatgatctgagcataatgaattgatttaattaacaggggagtctgaggggccctgggaaatgcaagctgcactctggtgagagcgagcgcagcagactgcaagcgggaacccaagcgcgcggctgcggcggctgctccggcccgggctccggccctagctcgggttcaggctcccgcttggctcgggccgggtcccagttgctcagcccacgcggccgcggccccgcccggcgcccgcccctgagcgcgc

SEQ ID NO: 40211 - DNA, 607 bp, Mus musculus
  source 1..607: mol_type = other DNA
atggtttccaaaatgaagttaccaactacttgtgccaaatgtacacctgtaagcaataaaattaattgctttgctgtactgttactggctaacttaattttagaagacatctgccttgaataattatgctagtccaagtagagttgaatttcttcccgacagctgctggagagaggactacagctgtagccagcttttcacggctcggacaagtctagagatatgttatttgactcgtcacgggctgaggccccctggacgggcgagcctcgccgcacgagcaccggccgcctgggccgacagtgctgttgaaaagcgttttacttgacacggtgctcgaggcaggcttccccgctccgtgtctggggtgcggcccgcggagaccaggctcccgggcacgcgggcgccgttgtgcggcccccgctctcctcacaggcctcacttgcgcgcggaaggctgggaccccgtccacctcctgggtcggcatcccgggccttccaagtgcctctgtcaggggcagcccgccggccgttgtggtgagtggcctcgcaaccctcgccctaccctgaaaaggtgggcgggagggttaggcagccttcgagccccg

SEQ ID NO: 40212 - DNA, 555 bp, Mus musculus
  source 1..555: mol_type = other DNA
agacttaggctagacgatagttctgtaattttccagaacattgcttggccaagatcccaaagttctattaatatagtacatttgtggttgaaaaatggtttccaaaatgaagttaccaactacttgttgccaaatgtacacctgtaagcaataaaattaattgctttgctgtactgttactggctaacttaattttagaagacatctgccttgaataattatgctagtccaagtagagttgaatttcttcccgacagctgctggagagaggactacagctgtagccagcttttcacggctcggacaagtctagagatatgttatttgactcgtcacgggctgaggccccctggacgggcgagcctcgccgcacgagcaccggccgcctgggccgacagtgctgttgaaaagcgttttacttgacacggtgctcgaggcaggcttccccgctccgtgtctggggtgcggcccgcggagaccaggctcccgggcacgcgggcgccgttgtgcggcccccgctctcctcacaggcctcacttgcgcgcggaaggctgg

SEQ ID NO: 40213 - DNA, 453 bp, Mus musculus
  source 1..453: mol_type = other DNA
cttggcttcagagtaagaccctgtctcaaaacaaatacaagatctccactctgctttctgactagaatattctttagtttaacggatcaagtaagaaacaataaaacagattaaggggttagaatcttgtgcacaagtgtaccacttttgttagcaaatgtaacttggcaattagaagttacaagtgtgatagttcgaaaaattcaaatgtgatgtttatacaaaatagttacagaatctgtcagaggccctgcggaagtcttgccgatgctctgagccaccggccgcagcggcgctcgactagggaggagctaccggggcttccgggggcgggcgccaccggttcaccccgcccatccacacggaaaggaagaggcgggcgccgggagccgtgacgtcaggagcccttcccgaagccggcctcctggccggaaatgaagcattggtcccggc

SEQ ID NO: 40214 - DNA, 291 bp, Mus musculus
  source 1..291: mol_type = other DNA
aaaaggatttggaagtgatgctcttcatcttcccatcttaagatcaaggtctggaccttttacagtactgtgtctccccggggaacagagagagctgccaggggacacctgtgtgacgtcacccaccccctgcactctcctgcagtacagggggcttggagggatctctccggcccctgctgtttttgaaaagctgcagcagtgtgggctgagctccggctgtgcaggcaccgctgctgcgggagattttgatacccagattgcatcattcttcctacgtataaacagggg

SEQ ID NO: 40215 - DNA, 305 bp, Mus musculus
  source 1..305: mol_type = other DNA
ttatcatggatagcaatcttccttccctgcaagattgatttagagtagttgaacccagagctcttaggagcctcggataggtggttcctatgtttggggcaagtttatacatacacctgctgtagttctctgagaaacactatttaataagaggtttatgggtaaaggtctgcgcccttcccctaggacaggtgaaattcctggctgggctggcaggcgggctgagcatgagtgtgctctgtttattagccaagtttacacagggagattatcttcagcccaggagttgaatttcaagggcaaag

SEQ ID NO: 40216 - DNA, 363 bp, Mus musculus
  source 1..363: mol_type = other DNA
gatttcaggacgaattcctttgtgtcctgtgagggacccaccccgcactgagcaatgttccttaaagtgctgctcaccagggggtgtcactcccgctgagacccagggctttcaccatagccccatggtgttctgaaaggtatctgatccatttcttactttaaaaagtgatacgattgatgcttgaactggttggaatgacgggattccccacgttctggagtggcggcccgcttcgcgtctgaagctgattaaggctgggcccacgtgcccctcgacccggccccgcccacaccggctccgcccatcgccaggccccgcccacggcgcgcagcagttagcttggcaagaacacggaaggcg

SEQ ID NO: 40217 - DNA, 388 bp, Mus musculus
  source 1..388: mol_type = other DNA
ggagacccttgacttgtctctactctcagttcctaactagttaggtaagtgtggatcaagtatctgatctctctgggcctcagtgatcccatctataaaatggtagctctgaccagtgtgttaataaaagggccttctgtgtcccaggtacggccctggcacttgatcctttgcaggaagacaagagacgcactagtctaggccagctgcatcagggtccctcctcattccgctgctgctgcaggacccagaggaagtgctgttgcagcaagttcccaggaacagacctgggctcctggttgaagaccgcgctgtttcaaggccggctagtgtagaagcacgcgcacgcataaacgtgcgcgtgctagctcgctcctgggacaccggg

SEQ ID NO: 40218 - DNA, 300 bp, Mus musculus
  source 1..300: mol_type = other DNA
ccccatacatgtccctgtgcatttcagatcccccggaactggagttacagacagtgtgagctgtcacggctctggaagagcagccagtaatctggagctctcatcatcatcatcatcatcatcatcatcatcattattattattattataggattagtggtagaatctctcattgaacctagagctctcaatttttagttaactagtcagtcattaaaagcttcatgctttcacagcaagcggactcccctagagtccctggagctaaagggagtatacacaatttgccttggcaacttg

SEQ ID NO: 40219 - DNA, 710 bp, Mus musculus
  source 1..710: mol_type = other DNA
ttagattctagtctagtatcgacaagaatcacaaaatttctacctgtaaattaaataagtaaaaattgaaaatcataaaacttaatccccttttattgaaaggaagtgattttcccttatacattcagcaaatccctaagggctgtgatgagcacagtggaaaaaatattttagcagcttgttctctccagggtgctcctgaagtacatggagtagggtctgcgctcccagaactgactgcctggattctccacctccaggagtcctgggcgggggatgctccaggggcgtccgcatcttgaagcctggcccacttcccagtcctagactggaccaaggctgtcagcgctcacagttactgttgggagccgggcaggagtctgtgtcctggaggcgcacggaccgcaggttcgtactgaagccccggtgcggagcctcgagcctccatcgccgggtgggcttccgagacgctcgggctcttctggtcaggtctcctgaacagcaccctctcgcgcagttcccggggatggggttcacccggcctgcgggactagatccgcatggcctgctcccttggggtgcaggattcgccagctctggccggggaagacccccagcctttagtgcacccccggggccgcgaccgtggcgggccttgtgcacccggaaccgtttccggggcggaggctttctcgcagctgacccggcgc

SEQ ID NO: 40220 - DNA, 601 bp, Mus musculus
  source 1..601: mol_type = other DNA
tcccacatgtagaaatgtgacttgtactaagtcatatgttccttttagaatggctaaaaaatatgaatgagtctcaaagaaaaatgtttcaatctatattccagtgtaaaatctagtgttcacagtgaatgctttcttggtgttcccagaccagacctgcctccccaacctctggtgctgggctcagagagagaggaggatggggtccccggaaggccccgctccagcccatcctcctggccccctccgcagtcacgtggcccagtgggtggggaccgtggaggaatccggagctctcccaacttcagagcacagaggtacaactctgagaagccgagcatggctcagctgtcagtcatcccgggatcggccgcggcgtggacaaggggctaggctgccggagcacagggccccacagcccattctatgcaatgcgtgcagggcacagttgggcgaagcggttccgctagaccctcagcgccccggggtcagtctgtcggccgtaggctgaaggtgggtggttgacgctgatagaccccaccctcgttcctgaacctgcgccagaggggcgggacgctttgctggccacgccttctaggcg

SEQ ID NO: 40221 - DNA, 316 bp, Mus musculus
  source 1..316: mol_type = other DNA
gtgttccctgcaacccttatgagtttgtttgtttatttatttatttatttatttatttatttataaactatctccatctgctctgaggactcgagggattaactctcttccccattgacatgccacttcctaagagttgatgatgtcagtgtagtgaaacatagctatcgttattaataagtgctaagcctgttgccaggctttcaaatgaggtagctagggaagctctggccgtgcttgcctatcattgagaatgaccatttgtaaggacaaagaataagaaaggaatttccctttctgccttgttctgcactca

SEQ ID NO: 40222 - DNA, 471 bp, Mus musculus
  source 1..471: mol_type = other DNA
gtattaataataataatatcaaggagttagtggtgtgaatacacacacacacacatatatatgtgcagtatatgtagtaatgaagatgtatgtaaatattcatcagagaaatccaaattcatatctctgcgtatgcgtggggaataggtgctggccatggcctctatttgctatttataagttcctgtgggtcatagataccccaggatcgttctcaccttcagggtgactttggaactaaggctagggccaggctcaggcaggcctgggcaaggtcactcagatagccttgttcaccccaagaaaaactctccgagacactctcggggcgccctgtgagcgagcgcagggctctgctgacagcggctcgggccacggcggccgcgccccctccgccccgggccggggaggggccagacgggcggggcggcgccggggctccggggcgggcggggccgggggtgtcgcggg

SEQ ID NO: 40223 - DNA, 403 bp, Mus musculus
  source 1..403: mol_type = other DNA
ctagcttctgtagaaaatgaagtcagagggtctgttctttagacaagagacaaggaccaggaggtttcacctgttcccctttctcttctacaagcaaattctcactagaagggaagcaagcgtgcctcagtttccctatctgcaaattaaaggtaaatagaagatactctctccaaagaacagagtttcctcagatctattggggacagccctgcggccagcggaggtggctgcagtcgcgggatcccagcagctgaccgctggccactcgtggctgctctggaagcccaggcccccggggcccaaagagcatcacgtcatcctttgcgcccgacgaccgcccctccccgaccgcgcgtgcgcacgcggtggcggcgggtggggggccgcggtggggcgggcg

SEQ ID NO: 40224 - DNA, 311 bp, Mus musculus
  source 1..311: mol_type = other DNA
acctgcttttaaaaaagacccttccgaagtcttgaattcaaatccatgagatctgatgccctcttctggtctgtctgaagacagctacagtgtacttagatataataataaataaatcttaaaaatttgtctcatgttttaaattttacacgattttaagaacacttgtaacccatttgctgcggattccggttggcggaaagagtctgaagtactcgagcctcacttccgtgtgacgaaagctacgcggagatgcgccctacaccagcgaggtgggcggggccccggagggggcggggtcggccctgacg

SEQ ID NO: 40225 - DNA, 250 bp, Mus musculus
  source 1..250: mol_type = other DNA
atcaggttggcctcaaattcagggaaatctggctgcctcttaaaaacaacattgcttttatctttgacaaagtataaaattttatgtatggcaaattattgttgaaaaataaatttcttagccgaaggttgtacatgtctttaattaagactttatttttaaagtataaacacgctgaggttctttccaaggtgtgcagaatgtagagccacagcttgctccccagaaaactaagcatggtgatccatgc

SEQ ID NO: 40226 - DNA, 647 bp, Mus musculus
  source 1..647: mol_type = other DNA
tatatctgaactagactttccagttattttgccatcttaagttagcatcaggtttaataatctttgaacaaggtacaaggcttacacatgttatgactagagccatttttcttatgtaacatctctaccgaaatgtgctattattaatttctttgggatttgaattaaattgtattttaagcatcacccactgtgcgttttagatgctgatggtcaagcttaatttttactaaatccattttcctaattaaactgttgtttcagtctcaaatacatagaccagtttctttagaaacatgggatgtttgctttcttattagagaattctaaaatgtataattgcgtgtgattcatccttgcgaagcaggcagtaaaaccatcagttcagtctcagatcaaaatgcatgtgttggataacatgagatttaagggatgagtttcattttgtgctaacattgtcatgtgtattttaatattatgtttgaaaatgcatcaacttttttatattcacagaaaaagatctacaaagatcaaatggaatacatgttgcaaaatcatgtatttcctctctttaaagtattgaaatatttttatgtcttgtaagaaatgactgaaagttaaaacttggcttaaacatattaagactt

SEQ ID NO: 40227 - DNA, 344 bp, Mus musculus
  source 1..344: mol_type = other DNA
ttttcgctttgcctcccagcggaagctcggctccgccgggatctccgcagaaccatggcatggtcatgcccggagattgggggcaggcaggttccgaacccagtctccggcatcagcctcggccgactccgagagcccctagggagcgcgtgggaggttcgggccgccctcctgccttcgctccggcagggccaccgggagctccatgggttccacattagccctgtagggaaaatggcgcccatcaccctatttccctcccgggggccccgggcggagttccagtcaggcacagaagctttgattccgtacctggcgccagccactcattggaaaattttctc

SEQ ID NO: 40228 - DNA, 329 bp, Mus musculus
  source 1..329: mol_type = other DNA
ttttcgctttgcctcccagcggaagctcggctccgccgggatctccgcagaaccatggcatggtcatgcccggagattgggggcaggcaggttccgaacccagtctccggcatcagcctcggccgactccgagagcccctagggagcgcgtgggaggttcgggccgccctcctgccttcgctccggcagggccaccgggagctccatgggttccacattagccctgtagggaaaatggcgcccatcaccctatttccctcccgggggccccgggcggagttccagtcaggcacagaagctttgattccgtacctggcgccagccactca

SEQ ID NO: 40229 - DNA, 364 bp, Mus musculus
  source 1..364: mol_type = other DNA
caagtgtaagagatgccatctgggcacggtcaaccattctcattattaaaatagatggagtgatttgcatgatttccaataatgggaagctcttcctaggatgtgaactgatcctattaacttctattttactcatttatttatttatttatttatttattctcattccctgggtttaggagatttataagcctatcggccatacagagggccatcaatgcatatttgcaaagtgcatgaagcaactttcttagaattccaggctctgcggcctgagttggtgtggaaacccaccacaaggactttgcgtgttggagggcggggcctgcagcggtcaggtgaccgcgcggcgggccgagtcttc

SEQ ID NO: 40230 - DNA, 416 bp, Mus musculus
  source 1..416: mol_type = other DNA
ttattttttcctgaatcacaggtgtgtgcgccagcactcaccgcgctgggcaaggtccagagctcggtcactgtttccggctcggaccgcgactatagaacgtgaccgagaacgccccaggggtcgggcctcagaacctggggttggaccaggcttctaggcgtccccaaagctgcacggtgtccggatgcttctgaaccccgacccaaggccagcactgggcagtagccgccgtcctctcgcccctcctcgcagggcggctcccggcaggctccggtgtggggttctgtgcaatccaggcccactcattggcccgggatgccgcgacccgcccacgactggcggcgcgcctaggctgtggggcggagtcagcgagttcccgccaagccctccctgttttttcaaaccggggctgg

SEQ ID NO: 40231 - DNA, 494 bp, Mus musculus
  source 1..494: mol_type = other DNA
tgaacgatggcttcacgatcacttctaaaccataggttctgaaaacttcatagttcaaatacatacactactactaaaatttcatgatcattaagaagtaacaaagagaaaatcggtaggagatatttcttaacgggcggggctccccggggagagaccggcccattttaggaggatcccggggatgcccctgttcctagggggcccttggcggtgcaaattccaagcttccagccgagggcgggagaatttcatccgtgctgccggtggcagcaagcggctccccttttccccccgactgcaaaagggagatggcggaagggcgttgaggcagcagctgggcctctaagcgcccggcctcggtggcggcgcgaggccaggccgcgccgggccgcccacctcgcgagccgcgtgtccgagcggcctccgggcgccgcgtgggttcgcggacgccgggcactgggtcgtcgagccccgggggaggggcgggcgcg

SEQ ID NO: 40232 - DNA, 358 bp, Mus musculus
  source 1..358: mol_type = other DNA
aacagagccctggctgtcctggacttgctttgtagaccaggccggtctcacaccaagcctggcctagcaaactagtttattaaaagatgcagcatactattcattaaaaggaaaataattttctgggttgatggtatgtgcctttaatcccagcagtctgttttaaattattgcttcatttttatcacatctttaacattttaagtgtgctatgtaatgtatattagcagtcatgtgagtatcattgataaatatgtagtaaatgcgctctagagtactccaatgatccagggagctggcatcccgagactcctcggagcactgtggaagccagcggcggcagacacccagtgctaac

SEQ ID NO: 40233 - DNA, 252 bp, Mus musculus
  source 1..252: mol_type = other DNA
aagacttctctcaagtagtaagagaagacagtgtttcccttttggagtctacagactgcactttgtttagaccaaggtgatccaggatgcttgtctgtctgtctgtctgtctgtctgtctctggaagagcaagaatcactcttaaccgtaagcattttgaattatttaatgaataaacatttcctgctctaggctcacaggagttacagtgcaggggaatttcctagagccacacagtttgttgaagtcact

SEQ ID NO: 40234 - DNA, 380 bp, Mus musculus
  source 1..380: mol_type = other DNA
gactcttcggcacttcactttaattcaagagtgattaacatatgtgaggcgtcagtcaatcctcacgtttatgatggatgaagggataatagtatcacaaggaagaaaacaaaactatctctcttcctaattttggctattcctgtatttccaaataggaatgtgagttctgaattttcagataacttccgtactggctagtctatcgagaaacccctcagtcccagtcactggagactgagcctctcccttccaggtgtctgcgggcaccacagctccccaagtccggggcagcactgtccaggaagctctctaatctctcagagcggatctctgagatgtccaagctgcagggcaggtctggtgcccctgagcgctta

SEQ ID NO: 40235 - DNA, 297 bp, Mus musculus
  source 1..297: mol_type = other DNA
actgtctccacagttttgaaacattctgtatcacagactggccttcctgcctcagtcctgcatgctgggattataggaatgtagaagtcgtttgtaatcaatctgattatctctgattttctgaagtcttctaaaagtgctcagagatacaatctaatttgtgaaatcacaaaattcaattgctttttgtagtttaatggctttagtttatatgtacgaattagagcataaatatatataagctcagttgatagagtgtattgcatttgatccgcagaactcatgttttaaaaaaaa

SEQ ID NO: 40236 - DNA, 304 bp, Mus musculus
  source 1..304: mol_type = other DNA
ctggagagactgggtctaatattttaaagaaatggccacaatctcgttccacaatgattgtatcattttaacaatctgaacagatttgttcagcatctttgtcaatatttaatacagttcttttcatcacttctaaaaggctagtctagttttaaatattctaattagaagtcctttgttaaatatattttgcccttttttacaaaagtatttaattttattgatttctatgggggggtggagctccgtctccaggcaacgcgcgagggcgtggccttacgtcactgaggtgcgactggtttgc

SEQ ID NO: 40237 - DNA, 411 bp, Mus musculus
  source 1..411: mol_type = other DNA
atacagagtgcattctgatttaacacagtgtggctgtctgtcatatgtgtcacatgaactgtgggaactgtgacacaataatccctgtggtgatcactgttacacaaatcaaaactccttttgtaaggtgcaaagtgtctaatttttttaaaaaaataaatggtttgttacttatgttttataactgtgaattttaaaaatgatttattaatctgtatgcatacttgtataaatcccctggggttggaattccaggctgggatccaaactcaggccctctggaagggcagcccagataagacttttatgagtcttgtctctctgaaaaagcaatgcgtctcttagcgggccagtcacgggcgttcagcagctgaccagtgattttgacaaatcagaagcttgaaagcaggg

SEQ ID NO: 40238 - DNA, 207 bp, Mus musculus
  source 1..207: mol_type = other DNA
agactcatctgggcctccaagacaatgcagagtaatggttgaaatctaaattttatcaaatcacaagataaatttttactaaaattatgatgatgcaagttcatactatttgcatgcatgcatggatgacagaagagggcatcagatcccattgcagttgatgctgaaccaccattcgggctgactgtgacctggattcctgaataa

SEQ ID NO: 40239 - DNA, 492 bp, Mus musculus
  source 1..492: mol_type = other DNA
ggaaataatagcatttctttgagatttaaactgtgatcccaggcttggtccccaccggagttgaggtaactcagggttggaaactctggggctgacccctggggctgctgccaggcctggacttagagggtttaagatgggagcagcctccgcctccaaatccctgctggcggtgagccaggatcttatctaggctcacatgctgggtgggaggctggtctgcagatgtccccttccccaaggcactgccatcggctatgggggtgccccttgcaaaagcctgcaaccttccttgaaccctaggctggctggaaggcttctcctgctttcaacccagagccaggctgcagggggccctggtggaacactggttcccagtcccagcccctcatccagcccctctctgaggaggaggcaggcagctggggctctgcagccagagcttttcagcttggagctctggagccagatgtaacattgaccttaaatggt

SEQ ID NO: 40240 - DNA, 696 bp, Mus musculus
  source 1..696: mol_type = other DNA
tgggaatgaattccaagccatgactgttgaaaacacacgtgctttagtttagtaacccatcttattgaaaaaaaaaaatgcatgcttaacagagatgggacatttctcgtttacataccttcatttttggaaagctaaaatgttgcatactgtggcatacatacataacccatcttttaaaataccacctggaagtatagtttgaaatgcttcattttcctatatagcccttaaataaaatgaaagcactgcgctgcccgtctttaatgtttgttaaaaatgaaggaaaaactttaaaaaatgactttgcaatttccaaagtatactctcgtctctgcagatggaggaccaacaaacagaacgcattcctatcgatgggcacaccgaggccaggccgcaaggccacgccgagccctcaggacgccaggcccgggcgggtcagggccggcccaggaagaccaggcggcccggcggcgcacactcactgggctcccggcgctacgcaagagtcccgcagcgcgccggcccgccgcccttacgccactggcttggccccagagccttcgcgaatatggctttgcgcactgcggcgaggctgcgccgcaaccgagcttgcccgctggctcctccccgccgccctgcgcggattggtagcggacggaagcagccactcggggaggctgtgggtcggccgcc

SEQ ID NO: 40241 - DNA, 411 bp, Mus musculus
  source 1..411: mol_type = other DNA
gagcctcgatttccttttcaaaagaaagatgtaatgattctgtttgagaagacatgtgagatagacacttgcttccaggcaaagtatcaagtgcaccacgcaaagccttaggttcagttttagcctctgcagtttcatttaacttcaaatgagcaacatacaatcttgtggtacaattatgtattttccttatatggaaataatagcatttctttgagatttaaactgtgatcccaggcttggtccccaccggagttgaggtaactcagggttggaaactctggggctgacccctggggctgctgccaggcctggacttagagggtttaagatgggagcagcctccgcctccaaatccctgctggcggtgagccaggatcttatctaggctcacatgctgggtgggaggct

SEQ ID NO: 40242 - DNA, 539 bp, Mus musculus
  source 1..539: mol_type = other DNA
ttccaagcacaagaaactatttaatactcttctataatgaaatcatgagctaaaatgtttttgaattctataatttcattatttaggtttaatagaattcttttgattttatttaaatcaaacctagcagttccttttcattgtgctcctaaagaaatataagtacattaagaaatatatataatgccaataactgcagcagtcagaaggctgaatccatatacaaatatgtaacgcaacaaataaaaataataatccgtgcattattaccataacttcagaattcactgattatgtctatttaaactagtcacaacgacatcaccagtgtgacttggcccatagaggcgtggtttcgcctcaccaccaccactccccgctccggcgcgggtctgtgaggagctcagtttggacaccttagcggcagatgccgcgttcccgaaggcgctcggtcacccgccaggcgggcggagctcgcgtgggacacgccctactggtagtgcttccgggacagggggcggggcctccggaagtggccg

SEQ ID NO: 40243 - DNA, 435 bp, Mus musculus
  source 1..435: mol_type = other DNA
catttaatacttataagcaggaaggtatttgtaactaacacactctctctctctctctctgtgtgtgtgtgtgtgtgccagaaaggcgaattatacaagtcatggagaattgcatcctcttgtcccaatactgcgtataagcactatgcctctcctagagatttccggaaggcatttggtgacaccctccattatcaaaaaggagattttgagggtataggagcatcttggtccccaaagcttgccggcctgggcggggactggaggttcctgatctgcaggccctagggtggcccgagggcgcgggagactcagctgtgtccggaccggagcctgctgccagcaggtggggcgcggggcggggctccgccccctggcccctcctcgttggtggtggcggcgcttgtcgctcggagggggccgggccgctctgct

SEQ ID NO: 40244 - DNA, 469 bp, Mus musculus
  source 1..469: mol_type = other DNA
agcagaattctaataaatcttacataactgtaggactagtttgccaaaagtcttcatgaaagacgtctcactggggagatttgtttggtcaaacacatggtattttgtaggaacccaaggggagcacctctaagtgtagtgacccctctttaaggggctccaggggctagctgatgggcaccgaggtccctaaaaggcgatttctctacaaggcgcgttgttgggctgcagcggggtcgctggagacgacgcaggggcctcgtccctccctcggccgacagagggagccggaggatgggaggaccggcttcccggctctcaaccagcgtagcgcggcgtaccccggggctgagcaccgacggccgcctgcataccccaggcgccagacgccgggccgcgcgcccactgcgttgaattctcgcgagagcggcggccgccatttttccattgattgccgcgggccggggga

SEQ ID NO: 40245 - DNA, 307 bp, Mus musculus
  source 1..307: mol_type = other DNA
tgggattccatcccttaggactgcgtccaaggcagaggctgcagactggccctcccggcctggagagcgattggctgtgcgaccgcccctcccgccgggcggaggcgtggtggactgggacacagtgcctctccagctgctctgtggcagcccagctaccggtcgtgacgctcagctttgttcattcgaattacatgctgatctctgcttggggctaggagaggcttgagcctgtgtcagggtccagataatgtctcctgattcgggcaagtggtctgctattaagaggagtagtggtcaccactgt

SEQ ID NO: 40246 - DNA, 360 bp, Mus musculus
  source 1..360: mol_type = other DNA
agaggcagaaggatctctgtgagtctgagggaaaccaatgtagaaatataatatatatctaacatataatatatatttataaatatacatataactatatttttttcagaaaaataggatagtgtaatcgtgtgacacagttccctgggggagtcagttctctcctttgtgggcccctgagattgaactcaggtccctggacttggctgcacaggacagagagtgtcacctgtctacatcgagataggcacacgggcctgctggtcaggaataccatctccagctgtctgtcggagtgcggaggagcacagtgagcctccggagactggggtccacttcagtccctctctggatcctcag

SEQ ID NO: 40247 - DNA, 381 bp, Mus musculus
  source 1..381: mol_type = other DNA
atcacttcagaagcgtctgtgttgaattgaaggcataaagaagagagtgatcctggcttacttttagcccttatagagtcctgttccaggcccccaaagtccatgatcatgagaagggcgtggagatgtttcttctagtcactgtgcagagccagaacaaaacactgtctattaaacccagagctcacatcagcactccagagatgggctcaaatgcgtttaaaatacttaacctgcattttccacggaggcctgacagcaggcggcaagcagcggtggcggccagacctgagcctcctgggacatgtctcgacccaagcttcacagaacccagttattatattatgacctcactatggtgaaacgtggcctattaccacc

SEQ ID NO: 40248 - DNA, 215 bp, Mus musculus
  source 1..215: mol_type = other DNA
tcccttatagaaggatggagcagggacagtcactgaattttcaaatttgcagtagtgcagctgctttggggcggaaggagacatagatatttgtttatgccccatcacggaaagagctgtggaaacagttatgtaactcttctttaaaactgcctggtgtgactccagcgtcaggtcaagagagtctggaactaattcacagggctgattccctg

SEQ ID NO: 40249 - DNA, 271 bp, Mus musculus
  source 1..271: mol_type = other DNA
aaatttgcagtagtgcagctgctttggggcggaaggagacatagatatttgtttatgccccatcacggaaagagctgtggaaacagttatgtaactcttctttaaaactgcctggtgtgactccagcgtcaggtcaagagagtctggaactaattcacagggctgattccctgccccagcaagcggcaagccagggcatcctcgtagccagggcagccctgggcacgggggccccaggcgcagcagctcctcgcagggcggagggcggcgc

SEQ ID NO: 40250 - DNA, 519 bp, Mus musculus
  source 1..519: mol_type = other DNA
aggaattgctgcctgcacttgcctggccaaggggcatgctctccagagggtggtacccggggaattccagcagccggactctgcattgggccaagctgaatgggctcgggccccagggccgtatgaatttctcaggacttcgagcccgaaccattcattcagaattttcgctgaaactgtgagtgcgattggtctgtgtcacgaaggccaggcagtcctagaagtcctttgagaagggacagtgaggctgtctttccagctgcctaggcaaagcttcgggaggcccagctttcccctccctggacaccagaacaccaaggccgggtgttcgtctcatagcagcccagggctgggtcttcgaccggcttcagcccacgtgcgtgcaacccccagcctggtactaactgggagggcgctggggtccattggtcgcgcgtctcaagcgagcctcgccttcggaggcccggccgaacctcgatggaggcgtgtcccaatcggatcctccgcggctcacagaac

SEQ ID NO: 40251 - DNA, 504 bp, Mus musculus
  source 1..504: mol_type = other DNA
tcttcaattctcttgacgtataattttaaaaatgcattagagaaagatatttctgcctttaaaacgcaccaaacgcgctcagtgagtcccattggctttcctgagttatactccaggaatcctcggggaagggccggctcctttctttaccggagtaaaaagagttcaaaccttttatgattgattctcactttctccataaagggccaacccggagttcgcaaagcccagaatttgcgcgagcaccccgaactgtggcgggctggggaagccgcccactccggcctcagtcccttccagcctgggagcgtcgttgcctcggagggcgcacacccggcattcctgccctgagcccccgccatcgcgcgcggctcgctcccccgtgggcgccaagtcccgccccacgcgtcaccatgacgtcaccgcggcggcaggccccgccccatccaggacccggcggcatgacgtcaccgaggccccacccctccggagcgagttcggtcc

SEQ ID NO: 40252 - DNA, 479 bp, Mus musculus
  source 1..479: mol_type = other DNA
cagtctgtacagcctgaggactattccccttggctccgggtagatcgagtctccctaacgggaaggatctgtcgtaggaattgaaatattttccattcactattttgaaatatgatcgtatttacctcctttcaaatggcgctattttaaaaccccggcctttctacattgcatttctgtaaatcacagacagcttctaagaacttaacatgtttcataaatatttttatacgggtgacaccattcaacttaaaataaatctttaaaaagggagattaagaccgaggaaaattagtctggcttttattttcacgggaaggagccccacttcttaaaatgtagctttgattattttaaaaaatgcattaaaaaagaaaaaggaaactcctagaagttgaactttctttcagactttgaaaacaagtggtccccagtatttcctaccgaggggaagttttccagggagagtctaccctgaa

SEQ ID NO: 40253 - DNA, 248 bp, Mus musculus
  source 1..248: mol_type = other DNA
caggccaggagattgacaagcctttcactgagaggacagatctgacctcctggatcacaacgtctctagtagaagtgcaaagtgcattgtacagaaggcacccaagagctgatgcctagaggtgaaggctccaggccttgtacagacccgtccgcagggctgggaggggcgagtttgggcgccccgcctgcggtgctctcagcagcggctcagggcgctgggggccggaggcctcgggcaccgcgggc

SEQ ID NO: 40254 - DNA, 371 bp, Mus musculus
  source 1..371: mol_type = other DNA
ggtagtggcagtggcagtggcagcgcatgcctttaatcccagtgctagggatgcagaggtctctgagttccagccctgcctgctctacagagggagttctaggacattggtactatgtgacataaaatgaaacattgaaacaaatatggtcttaaatgacacacatctttcctaacagtgggggaaagttcatggagctattcctcaaatactagatttgaagaaaaaaatccaccacctggctctcccagacgcaggcttccgagaggccctaatgggcttgttgaaaggccccacttggtgctcagctctccggctaaccttgtcagaaggttacccatggccctccagggctcagctaattttaaacc

SEQ ID NO: 40255 - DNA, 283 bp, Mus musculus
  source 1..283: mol_type = other DNA
acaactttgcaactttttttgcaaagtacatttgctagggccatgtccataacatgtacgattatctctcttccgatcgggaaacggcgagctcgcagagtccgcaacgcagtggcctcatgccaattggtccactcctcggggcgtgttcctatcggtcactcgattggctagcctaacgcagagcagaacgcgaattggtttgggttgtccgccaagacaactccgtatccgggctgcgcggctcctccatgggcggggggccgggcctgggccggcgggg

SEQ ID NO: 40256 - DNA, 523 bp, Mus musculus
  source 1..523: mol_type = other DNA
gggggaacttctactgatctttaaaattggactcaaatgccacttagtggagggctgctttttgagatgagatctcaggattatccgttcgggagggcacacggtgggttcggtgacaccggagtgctactttggcgtttgcccgccagaaactcgcgtcccagaggtggcgccaccgcaggcgtgtcagctggtgcaccggtcaagcggcggccgcggggaagcggcgacctccggaccaccgcctgccaacgcctcgtgctgcccgtaccagctcgcggaccccgcggaggaaggcgacccgggcgttcgccctgctgtctcctagaagaagactcccaggcactgcttttactggcccggagacgccgtccggcttttgcctactgctcttggctcaccgcgcagagaagcgctcgcgggccgagaccgcggagacactactcaggctctcagtgccccggtgacacgcctactgtgggaggagctccgtcttcgcttcgcctcacctcttcctaatgcg

SEQ ID NO: 40257 - DNA, 549 bp, Mus musculus
  source 1..549: mol_type = other DNA
aatttaaaaataatttgtttggataatgtcaaaatcatgtgtcaaaccactctagaggccaacattgggtatcttcccctatttagctggctagtcagccctggggatttgccagattccatgtcctcatggcaagcactggcaagtgctcctcggagatgggttcaaggaactgaacccagaaagcatatataaaatctagttttgaaagctgatgaaaagcatgctacatgatttcttaagtacgcaagtgtatttataatgtggctatgacaaatagcaaatatacttcaggctttaatttcaaatagtagatagaatagctttgtcatatttggaatcaaaactttgtaaatggatcttaacccagagttacatagtgagactttgtctcaaagattttttttaaaatataaactcagtattatcgattatgtcaaaaatttctaggtggacacttagtatttgctactatctagttatctgaaactttagaggagtgggcaccaccccatgagggtatgtggctgttctgatcctgtgattgaa

SEQ ID NO: 40258 - DNA, 472 bp, Mus musculus
  source 1..472: mol_type = other DNA
gtgtttatattgtgtgaagacccaaagcataactaaataaaacttgttatactaactacgcgtatctcggggaggatggacgcgggctccagtcctcccgatgggcccttcagaaggtccatacggaggatcctcacactcagttaagaccgagggtagccggccccatctggggagcgccagggtgcacaagcacgccgcgatggctgcggggttgcgtgggctgggctcccgcgccagggtagtcgggcgtggcccagggcgcgaccctccgggaagcgggcggccgggggcggcgctgctgagcggggatgtgcggcgcgcgcccattggctgcgctttcccccccccattggccgtcctgcctggggggtacgccaaccagtcagaccccgaggcgcggtcgggacccgtgacgccatagcgctctcagccaatgggcgcaccgctgtcggtccgctcttcagcagcc

SEQ ID NO: 40259 - DNA, 386 bp, Mus musculus
  source 1..386: mol_type = other DNA
gcccgctcctgccccatgcttcctgggcagggaacacgcttggccggcttatggcctctcccaccttctttgaacatttcaaaatggccaggcagtttatgattgcttagatacactgctgaataaactaatatgtagcaaaaaatattttcttcaatagtaacttttcctcttgttttaaaagaaaaacattttaaaaaatcttcaaaattatggccaagcctggtaagaggcagcgggccagcacagcaaaggtggcctgcgtgccgccgcggggaaaccttgcagcagctcctcagagcactgtggtccacaggacccaaccgaggaagcagcctctatccccactgcgctgggggatccgggcgcaaatcaggcccctcagc

SEQ ID NO: 40260 - DNA, 403 bp, Mus musculus
  source 1..403: mol_type = other DNA
cactggggtggcctttgaggtttcaaaagcccataccaggcctccatgcctttgccatgacataaaagcggcataaattctggcttaggattttagtaacagctcttatgtaatttgatgaaaagtgtagataagtctagaaaagcagactttatagaaatgctactctataaagtagaggagaagatttttgtgaaatgacaagtaaattattcactataaaccatcatccaaaataatattataatatatgaaaagatagtgtcatggcaccatatatacatacatacacattcaggcatctaagaataagaagatatttgaaaaattaagatgaaataaagatattttatcatccacaatgaagaattctttagtattctttaggacagaagtagaatga

SEQ ID NO: 40261 - DNA, 172 bp, Mus musculus
  source 1..172: mol_type = other DNA
ctgtgaacacagttcccactaactgatataacttcaaacaaactacacttgtttcactggaaccgtgcctgatctgatctgattgcagtttcagtctgtacgttttatggttgtaatctttacacatacaaatacacaaatgctaaatgaacaagatagattcatgcctgtg

SEQ ID NO: 40262 - DNA, 257 bp, Mus musculus
  source 1..257: mol_type = other DNA
ccctggcctggcttccagaatactggaactaaaggcgtgggttaccacacacggaagtgcaccttggacctagtgctgagcataggaacaaagatgttacgcagatctgtccacgtaatactttttttttttttaaacaaatacagtcaccatctgcattccgaaaacaggagttagggcaggtctgcagggtctgctgcctagggcgctccagagtctccgcctgggcgggcgcggcctagccccgccccctcatg

SEQ ID NO: 40263 - DNA, 465 bp, Mus musculus
  source 1..465: mol_type = other DNA
tttgttttttaaacccaatgtttccagaaaagagaaacattccaggtaaatgagaaaacagtttgtattctgtatcctgcgttagcaggttttgtatacacagtatgtgtatccatgttgtctttcaagaccagtctggcaatcatacttaaattttttaatgtattggatgctttgaaagaatagcaagaggccattcttttttttgtagaccaggctggcctccatctcagttgaaatgatagttgtcagacaacttctgatactccaataactccagttaactgaataaagtcagattcaggtcaccaggccctcaagtgtattttcatataacctagtcatcttattaaggtctctgaaatcatctgcctaagaattttgtttccagtttataagtgaaaggaagaagaaagtctgcaggacttttctgtttctcttcctgggaagacaattcctaaggaa

SEQ ID NO: 40264 - DNA, 331 bp, Mus musculus
  source 1..331: mol_type = other DNA
tgtaagcacttacacccagctgctgtcagctcccagagaatgccttcaaggaggagcaaactacttcttgagcagttcccagctaagcagccggggctctttctggctcctgaactgactcagacagacattagtcttactgtttcagcgaactcaaaacaggaaaaaaaatagatgtggctttgattttattctgctcttaaattttttcaagttgttatcacctttgctttgcaagtagcacattggctttctctaagccaagcattcacatagcaaggcagactctgagaagacagcctgactctgtaggatctttggaagcaatgat

SEQ ID NO: 40265 - DNA, 396 bp, Mus musculus
  source 1..396: mol_type = other DNA
gttgtcttcagaaacaaaaaatgtacatatatatacagacatgaaaatatttagaatgtgatactaattactgtgaacatagacatttaaatgatgtgttactccgccatcaaagttcagatccttaaagatcttcatttggggattaaaccaaaacatactcttttaaccagatacggtatttggttgtagcaactaatgatcataagtatcacgatcatgcgagaccatggagcctcacacacacacacacacacacttgttttttttttttttttttaaacctctctgtgcactgtgacagatctatgagggaccgtgggcgtgacgtgaagccacgccccccctttcgcaggccccgcccacttaaggctggagggcggggcagcgttagac

SEQ ID NO: 40266 - DNA, 868 bp, Mus musculus
  source 1..868: mol_type = other DNA
acgccgtgccgcagcctcacgcggggcgcgagcgtcagcagccccacgcagctcagcaccaggcagagccggcccgccgccgccggctccccacgccactgccacgccgcgaagtcgcccaggtagcagcaggcgggcagcgccagcagccaccaggagccggcgccgcggcccgggccgcgctgcgcgcgcgtcaggaagcgggctgaggctgagcgagcaggcgctcagcagcgtccggagcccggctgccgcggccgcccagcgctcgggcctcgcgcccagcagcgcggccaggacaaaggcggccaggacgccgagcgagaggcgtgccccggcgcggagcgaggccgccggcggctccacgttgcagaaaagctgcgcggagggtcctgccgcagcgggctcacgcagctcgctctcggggggcgaggcggccgaggctggcggcggcggcggggacctcatggctggcgcgtcccgctcgcgctcgtctttcctcatggccccgggccgccggggggccgctggcgcttgccgaccccgcgccgccctccgcgttctgggcgccccgagcttcgcagagcggtcacggctgcgcccgccgccgccaccggccgggatccccggcgcgcgggctgaggggcggcggcgtccgcctcatgccggccactgagagcggcgagaagggcttcttggtgtcccgggaccgccgcggacgcctctcgcggctcgggacgggagacggcggcgtcgcctcccagctcccgcgcgctgcaacagttacctcacggccgcagcctggtccgttgggcgcgcgatcgggcgctcctcccccgcggctgcccctgccgggcgcgcgccccgc

SEQ ID NO: 40267 - DNA, 484 bp, Mus musculus
  source 1..484: mol_type = other DNA
tctttcaaggccacttcaagttgagagtgcactcgtcctcctcccttgagcccctgaagggattcaaggcctgctgctgggccccaaatctcccttgtggaagccagatgtgactgacagcacagtctgagggcacaccatgagctctcaccccttggggtccatgtctccccaagacctcgcagttcggggcgtctcaggactgtgattcgccgctctgtggcagtggagctctcggtggcccgcgcgcgctccccgaggggtccaagtctggcagcctgacgcgacggctgtctcactggagcgaccagccgggccgtgggcgcgcgctcccccgcggggtcccggatgcgcatcctgacgcgggccgcggccgccccagtggcgaccggccgagctacgggagcgcgcggggccgccggcggggcgcgcgcccggcaggggcagccgcgggggaggagcgcccgatcgcgcgcccaacgga

SEQ ID NO: 40268 - DNA, 336 bp, Mus musculus
  source 1..336: mol_type = other DNA
gttattcttttccagccaagtatcttcgatgtataagacacatgcactgtgcaggcattggaactggtgaacttttgtaaaatcagtgcctctgcctcagtaggacagtgctatccctgaaaagagaggcctctgagattgtgaagcaaaatacaataaggttatttccttttcctcttgtcggttaaagaatgcagttctaatctcttccctatccgtagactgaaaataaatccggaaaagggccctagggctccgtgcccgttatgcgggccgtcgaggcgccgggccaatgggagtgcggcagggctggtgggtgcgcccctgcctcctcgc

SEQ ID NO: 40269 - DNA, 282 bp, Mus musculus
  source 1..282: mol_type = other DNA
caatggagacttctcacacatgtgagtgtgttatcctcaagggtgatacccactgaaaagtttaaatgaggcagctgccacaagccagcatccctcaggtgcactaaactattctagatttactggactctactctccaagattctgagattggagtcaggaatataaatttatcttgatgtcaaaaggccctccaaattcccgctaatttgacctcaatttaaattcaaatggtgtcagggcatggggcccttccacctattggctgcctggagccccgag

SEQ ID NO: 40270 - DNA, 317 bp, Mus musculus
  source 1..317: mol_type = other DNA
cctgtgctgtggtatgcccaaggccaggcagtagcagtgccagccagagccacattgtaccacagaggtggtactgagcctcctccctgccagggccccgggctaccaaggtctttccagagctttggggcctggaccagacttctgtggacttagccatctgacacagagcccaggggtgaggttgaggtggcggggtttctcatcaacacccccttaactgagtttccaaaggacatgtgggcgccctcgcctggccggctctggagcctccgggtgatggcccagcccaggggtgagctgggtctctaattaga

SEQ ID NO: 40271 - DNA, 486 bp, Mus musculus
  source 1..486: mol_type = other DNA
atcctagcaggtggtcctggtccaggagatcctctacagctgctcttgaaacggggctgggtcatcagcaccgagcttcgaaggatcgggcagaagctggcccaggaccgctgggcccgtgtgcacagcatgagtgtgcgtctgacgtgccatgcacgctccatggtgtagcctcccttgtcttataacaaagtagagaaggctggaatgaatatatacatgtgcaaggcattgtagtgggcatttcctttttttaaataaatatctcataaacagagtacagacagcctggcttcaattgtccatctacactgtgacactttggcaagttacagcatttattcagggatgatgactgcaaaataaataacatgtaaaacatgccaagcagctgggctgagtgaaaggaaggttcggatccagctttcctgattccagaggcagtgagtgtctaatcattaaacacagcttaaatagctttcttcc

SEQ ID NO: 40272 - DNA, 241 bp, Mus musculus
  source 1..241: mol_type = other DNA
cagcaagagtaaataatttaattcttaatcctcagaatttgtattggagttttctaagcctttaacatcccatgagaactgcctggcagaccacatttggagaaaattgccctaaattatttagaatttgaaagtcagaccttcctgctaaaagaaacagcttttgtgaaaaactggaggcagatgcttcatgaactatctagaaagttgattattaatccagctggagaagaaatatcct

SEQ ID NO: 40273 - DNA, 569 bp, Mus musculus
  source 1..569: mol_type = other DNA
taggacttactactacatggtttgtttttagaaccaaagaagttaatgtatgcaaaataattagcataaaacttgtataatatgagttacaaatattagctattaagattctaatttgataaaaaaaggaaaagattctaatttaaactttaaaccatttttaaaaaactcaatgtttgtgaaaattatgaacagtctctaaaatgctgaagccttcattaatcaatatatttcatttttaatctaacaaataatgaacaccatttcttatttctgtttttcttttcttaaaatctactcttaagttgagagtgaccttactgtgaattttttgttttttcggtctatttcttggacctaaacacagaacaatctaaagctacaagattttgtttagagtgataatatcctacatgatgagcagctgacttaagtgttgaaccatcattccttgttcatctgctactctactattggaagaaagtggcaaatagtactgaactactccctcctctgtggtggaatgtgcaaaacaaagataaaagctatgttttcttcgtggatttcaa

SEQ ID NO: 40274 - DNA, 189 bp, Mus musculus
  source 1..189: mol_type = other DNA
cagtgacacggtgtgttaatgccaaaggtcacctgccagctgtcggatgcctcttaaccagcagctgagtgacctgctgacccctgggttgctcaggtggcctgtgcaggaccctggctcagctctcaagctctgcagagtggtcagggagtggactgctgcctccctctcggtcagagctctgattgg

SEQ ID NO: 40275 - DNA, 483 bp, Mus musculus
  source 1..483: mol_type = other DNA
gcacgcttgctgcgcaggctggcccgctgacggcgtgggcgagggacagccccgtaaggctcgcgcgggttcggctagccggcaccctcggctcagagcctgcccggcccgctactggctgcccgctgcgggccgatgttcggagcaccggctgggccctgggcgggaggcggtgttggcgaggctcgcctgccccgggggagctgctttcggctttctcccttaaagggcagtacgaaccgggctctgcggaggacagactggctatttaagcttgtctgactctgaccaagtttgaaaattcatttgcagcttgcctcctgtaagggccgcacttgaagtttcagtctcaagatagtccgaaactgtcccagcggcacaatagattgggctccggacctgtcctggacgctgggctccagggtgaactccagtggcttggcttttggccctgaacagacacagccccgcccagtctatttc

SEQ ID NO: 40276 - DNA, 330 bp, Mus musculus
  source 1..330: mol_type = other DNA
aggccaaggcatatccagaagtcagttccgtatagagaaagacagtttctttctcagattacagctgccctcctgtagagtcacagttgtgagctggacagactccaccagcacccactctctagacagtgtttcaaaagatgcgaatagctctaaaataagtttaattttttgtctgacttcccgttcaagatgtaaaaaggatcaaataaatgaaactttatttgactgtggagtttatccagagactcagactatgcacagtttgattgaattattcattttttttcaggaacaaaggtgaaggtgtacgcagacgggcactcccac

SEQ ID NO: 40277 - DNA, 249 bp, Mus musculus
  source 1..249: mol_type = other DNA
gtactgaacaggttaataagggacagtttattatttaaactgatgaggaaaatttgtccaaatgtaggactatgacatatacgcaaagacatctcgattaagggaaaggaagtcgggggaggctgaacgtttcaccccgtgcgggtgagactcccgggcagcactcatcgtagctgggatcctgacggggacactgctgcggccgcgtcttcagtgaaggccgagcgaagcatctcgcgcggcgtggcg

SEQ ID NO: 40278 - DNA, 352 bp, Mus musculus
  source 1..352: mol_type = other DNA
gaatgctggacctgcagaaatcctccagtagtgcaggctgagcttttacaacttgttttactcctttaaaactatttaaaaaaaaaaaaaaagacaaagcttttaagatggtaacagatacaaattttagaaaaattgtcactctaaacagactgagaacaaaatcccctttattttttctcagtaagccagcatgtggcaaactctagagggcagccttgtacttaggaagttctgaaagaaccttggaggctgactttagccccatgctctagagggagccagcctcacaggctccaagaacactttgggtccctttggccacagggggtggagcctcagagctgaagct

SEQ ID NO: 40279 - DNA, 347 bp, Mus musculus
  source 1..347: mol_type = other DNA
atttttttttttttaatttaaagatttatttaatgtatgtgagtcagacacaccaggagagggcatcggatcccattacagatggttgggaagagcagtcagtgctcttaactgctgagctctgcactgaaactggaaggggtgttccttgtctaagaaagagcagaggtgtgcaggtcgcctgtgttccttcgcccgcgagtctcggggacaaaggctgcggggccttgtgccttgctccggccggcctttggaagcaccggccgtgacctcgaactgcgagccaaggctgggagcccacgctgcacccaccacaggggaacccagtagggtcggtcatccccccc

SEQ ID NO: 40280 - DNA, 286 bp, Mus musculus
  source 1..286: mol_type = other DNA
agacagttgaaacaggttgagactgctactgtattggaaaaataataaagatacaggatttttttttggcagacagacttcagtcgatgaagtttcaaataatatctaccttaaaaaggatcagagagttgggtcactcttatctacttcacactgaactctattcaaaagcctcaaacattacacttaagtctatgtgtttaactatgaagcctccgagggctctcccgccacgccgcgcgagatgcttcgctcggccttcactgaagacgcggccgcagcagtg

SEQ ID NO: 40281 - DNA, 290 bp, Mus musculus
  source 1..290: mol_type = other DNA
gtcccaaccttgctggggctgccccacacccattctggacaaaccctagttaccaggggtgtggcttcctcagggaaggaagtcagttactgagtctgactagactcccggggctgtgagtgcaggcactttatcgtactgcaggcacattcgagccttatttttatttgaatatttagatgctaatgaatgaatagggtatgggggtcagctgggcagttccctagggactgttaaaagcgccagagcgccgcagtggtgaggccgcaggtcctgccctccccgcgcgc

SEQ ID NO: 40282 - DNA, 387 bp, Mus musculus
  source 1..387: mol_type = other DNA
gaaataaatacaaatttggttcaagttcccaatgttttggaaaacgtaattcaagatggctcaaacctttcatcatcatttgtgtttgaagcaagcctggtctacaagaaaactggatcagtatttcagtactgtttgttgcatttacaataaattgttatattcaccgaccaactcccggggtcgacgggggtgagcggttctgcgctccgacctgtcccacaccgcacgagttcggggctgcagagggagcaggtcccctcagatgcgacttccgaaggacttgctgctctggctaagagcaaggctgggacgcgtagtctcccgggctccggtggccacactatgtagccccgcccccgcgcgagagcaaacgtcggtgagtgg

SEQ ID NO: 40283 - DNA, 308 bp, Mus musculus
  source 1..308: mol_type = other DNA
tttatttaaaccaaaaatcagaggtctctcctcccttactaaaggaaaggggggtcgttgcaatctgtaaaacgggaataattctcccatgcgctgttattaccgggctaaccttgcccacctggccgcggcggggctgtcagcaaacgtccgcgagagctcgccgaagaggcgcgcggtgctgggacagggcccgggaacaaagggcgcttcggagctcgaggccggccaggaggagtcccggggtagcctccccgagaggcccccggccggccgcgcctaaggtaggccatccgcgtcggcgcaga

SEQ ID NO: 40284 - DNA, 326 bp, Mus musculus
  source 1..326: mol_type = other DNA
atggaaacaataaaacttgaacaattgtatttaagatatttgaaatcttttgttctgttttgacacactttttcattattgtgtttttcaaacagactttggtattttactgcaatttaattgaaagacactattggctatagaccaggctggcccagagatctgaagtgctgggattaaagacatgaactatcacagtccagctgtcttttaagcattcattcattcattcattcattcattctctgagtgtatatgggtcccagggaccaaactctgcctgtacatttgcatgcagtgcccacagattccctggagctggagct

SEQ ID NO: 40285 - DNA, 285 bp, Mus musculus
  source 1..285: mol_type = other DNA
ctgtactgaagcacacccacctttttctttgggttgaaaaacaaaacaaaacaaaacaagcgagtaactggcactcacgctcagctccaaggctctaaagcttttctacccacggttaaaatgttgttaatgttaaatgacctggcaaaccctaagattttgtgggggatccccgggcatcacgaagaggcgcggcttcctcacgcttcggagagcgccacgtccctccttccagaagcgccttcgcgtaggcgcgtccctggaccctccgcgatccggagctgg

SEQ ID NO: 40286 - DNA, 269 bp, Mus musculus
  source 1..269: mol_type = other DNA
aaacttctttagccaccaaagcattcacttgccaactggatttggcggaatcccagctgtgcagccaaagatgccgggacggaaaactgccccgccctctgctcagggcccgcgtccctagtccctaacgcccgccctagaaccctgggggttgggttggggaccctgacccagggaaaagggaatctcgaggggccagctcccttccgagccgtgtccccgcgcgcgcgcgccgcgccccctccgcggcctccccgcgcccgcctcct

SEQ ID NO: 40287 - DNA, 322 bp, Mus musculus
  source 1..322: mol_type = other DNA
cacatacacacatacacatatacatacatgcatatacacacatacacatacacacacaggttgcctccccagctttccaaatagacatccaggaagtacctgtgagagatcactgggaggtcactgtggaatgtttgacactgtaagcatacattcttctataggaagaaaagctggctccccaagatcctctagtgtgccacaccctctaggacacactagtgagctgtggtgagcctcacaactccaccctgaagctgagtcggtaatgactcgggagcctagtgatgtgtcccatcgggaggggcacacctggtcccag

SEQ ID NO: 40288 - DNA, 295 bp, Mus musculus
  source 1..295: mol_type = other DNA
tctgtaccttctagtactttccacaagttctatgatatttaggagcactatgtgatctctcacatttctctttaacctccaaggcctttaaagaacctgggaattaaggaacgaagtgtttttaaaaataatttaaaattagttgaaggtcgtatttcctccgcataggatgccattgcgcatcccctgcgcagctgagcggacaggcgcctgagcggaagtcatgcgctagctgccggttggcccgacttcccagaagccggagtcgggaaaggcagctagcctatataagcag

SEQ ID NO: 40289 - DNA, 298 bp, Mus musculus
  source 1..298: mol_type = other DNA
aagcttcccgaacctctgtaggcttgaagcttaatggtccaggctaggagtcaacagattcacttgaggtgtaaccccagttaccagcctggtctacagtgagttccaggacagccagggctatacagagcagcattgggccactactggtctcctgctgtgatgtttaacagcttggtcttcatagttccagcccagccgaagctacctagtgagtttcattgtggcaagcaggactgccgcgctcccagaggaggccccgccctcgcattggttgtcctataagaaatcacagggt

SEQ ID NO: 40290 - DNA, 488 bp, Mus musculus
  source 1..488: mol_type = other DNA
ggacgcacgtgagcgccaagggcacatctgtgtgcgcgcattagcgctcaagggcacgctcgagggcgtgtgtggacccggggtggagatcccctctcccgcagacagagctgctgctcaggaggcccagggaggtccgctcgggtccctgcgaacgcggacctcgccttgaagtctaggctctcagaactcaggcttggggcgcgccggcaccgcccctcctactccaggctcctagggcgccggcaccgcccctcgctcccagcatgccgtgcggcagcggcggcgcggcgggcggagccgggaggcggggaagccgtggccgtgtgagcgtgaggagccgccgccaccgcctcctcgctgtcctcgtcctcctgggccccagcgtcgcgggccgcgcgctgccctggaagagacgtcgcctcgcctgcctgctcctgcgttgcgggctccagcggaacccggaacggccgtccgcctcccccgcc

SEQ ID NO: 40291 - DNA, 419 bp, Mus musculus
  source 1..419: mol_type = other DNA
gagtatattgcgttcacataatgtgcccagtgctttattgggtaacaggcctcttactactagaaggattttcacttttggaaaatatgtaccaggactgcatgacatttcaggtaggggtggacgcacgtgagcgccaagggcacatctgtgtgcgcgcattagcgctcaagggcacgctcgagggcgtgtgtggacccggggtggagatcccctctcccgcagacagagctgctgctcaggaggcccagggaggtccgctcgggtccctgcgaacgcggacctcgccttgaagtctaggctctcagaactcaggcttggggcgcgccggcaccgcccctcctactccaggctcctagggcgccggcaccgcccctcgctcccagcatgccgtgcggcagcggcggcgcggcgggcgg

SEQ ID NO: 40292 - DNA, 723 bp, Mus musculus
  source 1..723: mol_type = other DNA
ttcctggacctcaaatctcaacttggagttagacggcagtggaacgtcctcctccacccaagctcagagccactgctccagccatccggctgaggcggccagccgggcacagaggcctccgctgcccgcagctttcctgccggaccaggcccggaggacacccaggaagccgcgcccggctccagggaccgcgggcctaggccgcgcctcccagtcccgcgggcctaggcctcggccagctccaggcgaggctcgacgcggtcacccacctgggttgccagccagctccgcgggtacttggtgccgccgccgccgctgctcagccgagaccccggggctctgcggctcgcgccgccgcccgaagaagcgcgagtcgccgcctgaaccggccgccgccgacactgcgatctggcccggggctgaggaggcgggggaggcggacggccgttccgggttccgctggagcccgcaacgcaggagcaggcaggcgaggcgacgtctcttccagggcagcgcgcggcccgcgacgctggggcccaggaggacgaggacagcgaggaggcggtggcggcggctcctcacgctcacacggccacggcttccccgcctcccggctccgcccgccgcgccgccgctgccgcacggcatgctgggagcgaggggcggtgccggcgccctaggagcctggagtaggaggggcggtgccggcgcgccccaagcctg

SEQ ID NO: 40293 - DNA, 394 bp, Mus musculus
  source 1..394: mol_type = other DNA
tctagtatcagaaaatctgagaagatactacttattggcaatagatattagcactaaggtcttatcagtatggattagacagagtaagtatgtaccatgtgactaaggcaaaccaaaaccaaaacacagttctttctttcttttctttccttgtgaggctgggcatctgaggatcatctcagaacatctgctggtgtctatgtagcccagactagtcttgaactcatgactccagcctcgggatcagaggcagtcttttaccagactgtgagcttgagtctagtgcttagtaggtactctacaggccacttccgcccgagcctgccacgccgccagcgggactcgttgggggtggggccgggggcggtggggctgcaagccttcctccagcaac

SEQ ID NO: 40294 - DNA, 486 bp, Mus musculus
  source 1..486: mol_type = other DNA
aaacagcacagctgctctaatgaatgctgtgctacaaatgtcgtcaaaagctagatgggcagagctgccgaccacggtccacttcatccagtgctggggctcagccccaagggccggcaggctctcggtgacaagtccaggacatgggtcccagccatcgggccgagtcacgcccccgggcgcagccaaacgctgggtggcgctgcgccgccgcccttcgccagacctgttcagggcttcattcagcccaaccggttagggtaaaggggcccacgcaaagcctagcgagggtgagcatccccctaccacagtactgccctggggtggggggactaccaggttccagggtggtgcccgcccttcagcgtctaggcgcatcgggtgcggctggtataaaactttcgccaagccgcttgcccgaaagccctgctgtcgatcaggcagtggataggtgcctgcccgcagcgctgacccgggcaccgcccc

SEQ ID NO: 40295 - DNA, 318 bp, Mus musculus
  source 1..318: mol_type = other DNA
acttccaaaaatttccaggacagatctagatttaattttaagttactgtagtatactaattgaacactataattatatagaatgggttagtagtttcatttattttacagtagctatgaatcagttagccacagtctctagtggtcctataataggcactgattatccttgcagaaaatttagctgtcatattaatggatatgcactttaaaatgtttaatgtatgttactaaatttatgtgcactaatgaataatcaactggcatgttttaccaggtaattgctgactttcaggtgtaaatcggctcttaatagaga

SEQ ID NO: 40296 - DNA, 312 bp, Mus musculus
  source 1..312: mol_type = other DNA
tgttggggattgaaccccaatcctctggaaaatcccactttcttctttaaaagaatattttccaaatttcatttattgaggctagaactcaggctgccaggcttggtggcaatacgttttagctgtacatgtatatatatgtatgtatatagcgtgtaaggtacacattgactgtcttagttatgcatgtgtcacacacatacacacataccaagtgacaatttacaatagtgggacttgtcctggaggtagccggtccccaccccgcgcccgtgggaacggccccgcccgcctctgtgcccgacaaggcag

SEQ ID NO: 40297 - DNA, 466 bp, Mus musculus
  source 1..466: mol_type = other DNA
taacagtaacggaaagcaaatggcttgcttcaggtgcagttcaacggagaagagccacggcgctatgtggcttgtctcctacaactcggagcattcaagctagacaggctgggtaagcatgcctatagtcctggcacacaggtgacggaaaacaagaatggacccctacatgttgttcttggatctccataaaatgtaattaaaaaaaaaacctctctgttttgttatgaaattacagtctggctgacgttttccttcctattgaaaggcaggatttcactaagtcaggatgacaggctgggtcaccaccctgaagtgtcgctctagtggtgagtgcagatccgaatctccatgtgattagattcccacagtgtggccggcaaagcttttggagctagtcgctccagccccaatgccttccggcatcccctggggactccatggccctggcttctgctgagcggag

SEQ ID NO: 40298 - DNA, 259 bp, Mus musculus
  source 1..259: mol_type = other DNA
cgcgagatggcccccagagagccctctgccgaagagacagggtcttagctaggagttcttagaggcctcactgagggaaggtagagttgactagaaaggacctgagtcacaaaagtcccgctgaggatttctcattttgaactctgcagaacacactgtcccagagctgggagcatctgtgagaccagggtctatcagtataaaacactgagctgaaaaggactttgctctctttgttgtcttgatgccaagaggacat

SEQ ID NO: 40299 - DNA, 307 bp, Mus musculus
  source 1..307: mol_type = other DNA
accttagtgataatttatttttctcaaggaacaggaagagttgagaaattaattcaataaaaaatctgtttctatgattctgaatgtctgcttgttttcaaaacaagagagccagccaaaccaactctttgatgttgttgttgttgttcgctgtcctggactcactttgtagaccaggctggcctcgaactcagaaatccgcctgcctctgcttccggagtgctggaattaaaggtaccaactctttttaaaacgccgaggtcatcaggagataatgataatgttaggaactcatgttgagatatag

SEQ ID NO: 40300 - DNA, 380 bp, Mus musculus
  source 1..380: mol_type = other DNA
cttgatgcttaaagtcaagaggctttaaccaatactacttcccgcaaggggaaggtactttcactgtctattccaaagagacatttgtaagtcacccttcttgatccagcctggaaaaaaatgtatcttttctgtaagttcaaagggttctgaaggtcccggacctttctgaacagactggcctggccattttgaataagcaggttaaacatcctgttccttttaaagtcaaagcctttagtttccggtcagatacaaggtcactaagaaactttgaccgtgtcaccggccttggaacccaggcctggggcaagggcctgctcctgttgccatgacagcggttccggccccccaacgccgaagctccgggactctgtgga

SEQ ID NO: 40301 - DNA, 367 bp, Mus musculus
  source 1..367: mol_type = other DNA
ttttgaggatctcattgaaactgggactggcaattataatttgttcaggctctgaactcaggtcctcattcattaaatcaaaaaagctcttagtgagtaatttaggtaagaactgataaaaaatattggtggattttttttttttgccacacatttttcatttatagggaaaacatgggtgaatgttgtacattttcctatctctatacagacagacagacggacggacggacggcccgacaacttcccaggaacacttttggggtttaagttctatggtaatttatagtcaaagcccttagtttgcagtgaagactactccggaagtaccggccctgaggggtggagttgagctggtggcggcggc

SEQ ID NO: 40302 - DNA, 288 bp, Mus musculus
  source 1..288: mol_type = other DNA
atgatgattctacaggattagggccagtgatcacacacaagctttcttcaaaagcgccttgtttttgagacaaagtttgactacgtcgctagggctgatctgcatcccgcgtgccggggttatagacgtgtgaccaataagcctcacaggcctcggagactgtgaggagcgtgtgctcgcaggctgctaccccatgcctacaaggcgggacggggggcccctggttcgctagcaggccaagcgtccccgcgtgagcagccgcgcagccgcgatccggaagtcagcttc

SEQ ID NO: 40303 - DNA, 423 bp, Mus musculus
  source 1..423: mol_type = other DNA
gatctgtgactacgtggttctacctcctaacaccacgacataggtaccattgcaaaatctatttgtccgcgtgtgggcctaaggctcggctcctccgcccgcgcgcgtcacccgcctggcgcacagaggcttggaacgcgcgtcccggcgggtcccgcccgcgtcccgcccggcccgaccagcggcggggcgcctaccctcgcagatctgatcccataggctcttccccggcggctcgacgacctgcgggggtgacacgagcacttcgggagacccgggcgacactgcgggcaccggcgtgcgcgtagtgatcggcgaatccgcggagccgctcgcctcctcacgcagcacgctgcggctggatacagtctcggcgccgccatggacgcggtttctacagcaacccagggcaccgggaggccg

SEQ ID NO: 40304 - DNA, 435 bp, Mus musculus
  source 1..435: mol_type = other DNA
tttgtgatttttaatcccattttaaattcaacttaaaaatgaaaaactaccattttacaaagtgaaatcattatcctaactcaggctaagcctagagtggcattagttcagattccattaaaggatgctgtcctacatggtcaacttgcacggacgtctctgacttgaacagccagacttcaaacaactctggtagagttttaagaattgcatgaaaaatgacatgatatgggatctaaggccacagagcaggtgtccttgacaagagcaggcggttgggcccagagcctggcccctcattcatgcagcaggtgccatgctcagctcctgattggaattaccccgagttctgtttgtcttggcacagaagctgaatgtccatggatagtgtcacaaatgtttattacagcattttgcatattctgattatgtgac

SEQ ID NO: 40305 - DNA, 392 bp, Mus musculus
  source 1..392: mol_type = other DNA
ttccccatcatctattttatacataagatgggatgcgaaggacaattggtctacagtccccaggcaagtggcatgcccatttacagtagatgccctgctctgttatagacgctcagtttcacagaggaagaaactgggactctgaaaatgtcagtcctagttaaagtcttttccagactgctctttccataaggaaatgcaaatagacagtctgctaatttcccagtcttattgagttagagtttgacactcaccagctttgagcatcagttttccaaaaacaagtgattaatgatagatactccagtgcagtcacccttggtcaagaacagccacaccaaacagaattcacttcataatcacttggtgcactcctttttgtcactagaggg

SEQ ID NO: 40306 - DNA, 339 bp, Mus musculus
  source 1..339: mol_type = other DNA
tgtggtctgggaggactgactgaacactgacaaattcactgtttccattcacgaaacatttactgacctggaactattccataaatattgctatttaaatttatcaaaattaagtaaaataagaaatttggttcttctagtattgaacgttctattagtgttgtattggacagccaatgccacaagaatgaaaatctttgatctgtgactacgtggttctacctcctaacaccacgacataggtaccattgcaaaatctatttgtccgcgtgtgggcctaaggctcggctcctccgcccgcgcgcgtcacccgcctggcgcacagaggcttggaacgcg

SEQ ID NO: 40307 - DNA, 371 bp, Mus musculus
  source 1..371: mol_type = other DNA
tgtgtgtgtgtgtgtgtgtgtgtattcacagagacgcatagccaagctagtctccctaagcctagcctagatgatgctgacctcagacagccaggtcactggaggtatctgtgccctgagcgtcagtgcagcgcacaggaggaggtcacctcggtgatgggtagaaccttgtccaagacctgctgccggtgtgtgaggggagtgcccctctaggatcctcgtaggaatattgcgtggctggatggctctggtcctggtggtgagcagagctgcagacccggcaggggcggggcttgctggggcggggcctaacggagaggcggggccgcggctgctgcagcgcgggccgggccagggggcgcctcgcgcgg

SEQ ID NO: 40308 - DNA, 278 bp, Mus musculus
  source 1..278: mol_type = other DNA
cagctgagaaaatgcctcttcacaactacaccatacttccaagaattgtcagaatctgagcaaacctttaaagctgttttcacagttctatactggccagcctaggctagtctacttgttttaaagacagaacagggagctctcgaaccccctggccccaggagtcaagcagaagctgatgcaattagaggagcaggaattgaattggatatctactgagcaaacaagctcatttggtttctgttcttacggagaaacatccgtgtgaatgaaaagcc

SEQ ID NO: 40309 - DNA, 202 bp, Mus musculus
  source 1..202: mol_type = other DNA
tctcagcacaggactccagtctgtctgacagagagcctttagaacaggagtgtgttccagtcttcaaagcaaacattccttttatcctaacacagtctgacttcagatggtctaccttgtccttgcccaggtccaagaaaaggcccagaaccttggcactgttttgccagttaacttgtatttccaggcacaggtgtgaccc

SEQ ID NO: 40310 - DNA, 113 bp, Mus musculus
  source 1..113: mol_type = other DNA
gtgggcatcaccttcttactcatttgaggaagaaggaagagcactgccgaagccctgggttttcttcccagtgcttccagagggaagggtttctgtacacagtgaatgtcacg

SEQ ID NO: 40311 - DNA, 222 bp, Mus musculus
  source 1..222: mol_type = other DNA
ttgaggactcattcggaagctggttatggcatcccaatggttttttgctgctgttctcaaagaagcagcctgcctgcctgccatgcaagggagcattagaaagctttctatttgatctcaacagctttatttagaggatctggtttattgtcctttctgttaacaggctgactccaccaaggtttatcttgcaggcactgtttgcctgggaaaccctggcag

SEQ ID NO: 40312 - DNA, 252 bp, Mus musculus
  source 1..252: mol_type = other DNA
ttatcacggcgatagtaatgctagagctagaatgcctagcactcctggtctacttagatatccaagtggagacatcatgtagggccattggcaagagacctggatccaaacagtgaccctggatgagtgtgagacactacataaagactctgaatctcattgatcccttgggctaaggagcagttcaactgacactcctccacagctgtggaggagtaatcgcctaaaattgtgcaccattaatgatgcttg

SEQ ID NO: 40313 - DNA, 267 bp, Mus musculus
  source 1..267: mol_type = other DNA
tactgttcaaagatttcatagaactaagcttacaacctaacatcatttattgatgagtaaacctttggaactacaactgcgtgttatgagcctcttaagaaacaaaatcctaagaatttgtcattttcattttacgagagatctctgtgtctctggcacaacttcagctgtcatatagatgttagctgctgagaatttatctcatcctgttccaccttgagtagcccatgaggatggggaaggttctacacagtcctcttccctaga

SEQ ID NO: 40314 - DNA, 372 bp, Mus musculus
  source 1..372: mol_type = other DNA
tgttcaaatgtccaactatgtttaagcccatgtatatgtgtgtatatgagcacacccagttgccaagttggcttcctacttctacaatccatcacacattgtgtgtgtgtgtggatgagataatctttttggaacaaaactgcttttgtctcaatcgttttgttcagaagcaagaaatgtaacgttcctgtcaaaaccagaatacagtagctctagtattaatatagacacattttacaacttagtgtttaaggacaataaatgtcatgttctgctgatatgaacgggtaaataaaccatttctttgtgagcaccggagccaccggaaggcggcgtgcaggaccgcttgggcaaactgtcgcgtacgtgtga

SEQ ID NO: 40315 - DNA, 487 bp, Mus musculus
  source 1..487: mol_type = other DNA
cattagtaactatagactaaaattatttatgatgagattttctttcacaatcccatgtgaaatagtctatctccaagggtatgagaagaagaaaaagattttttttagtggatctatttatctttaaaattcaatgtgatagagccatcctctattatcaagagtgaaaataaaatctccatcgtagagtagactgtatttttcacatgtgtgactattaactatgtatcatgcccactagaaataatttataattttatttttaaaaattagcagtttgtacttgtgaatgcatacaccagtcaataacattgtttaaagatgatttttaagtgtgacaatagttcttataatctatcagttgagagctctgataaaattcatattaaactggcagatctagctaagtcacttcaccaagtgaagtgccactctgagatgggcgttatagatctcaatatcagctctgggaatgagaataaccgct

SEQ ID NO: 40316 - DNA, 487 bp, Mus musculus
  source 1..487: mol_type = other DNA
tacatagtaaatttccagaaatcaaatttgtaaaagatcaatttttaaaaggggaccaattcatttgacaggctcttatctatgaaagccattgctagaactcactgtgtgattaaaagtgggccacgtgcccagcttattaattccagtatttaagttggaatttgagttaaatttgagttggatttttatcatatacaattggaagagccatctgttcacatatcacatgaaacatttactagatggctaacatttgttactagttaatatctacactgaggatccatcagtaaataaagcaaagttcttattttcaaagtcggtgttcagaaatgaaaaaaaaatttttttaaaaaagttaaaagcagggagctcaacacgcaagcagcggggctgctgtgactacagcagagggtcagagaagacaccatggcttgtgctgtgtgtacagataacattacctgttaagaaggttaagtaagac

SEQ ID NO: 40317 - DNA, 586 bp, Mus musculus
  source 1..586: mol_type = other DNA
ttaaatatgtaatgaaaattttatatttaaaattctcttttcgatgaaacatttaaaaatacaaatactagggcaaacattcttattactggtatccattcatttttacttcttcataaatattgtataaaaacaagagaatcatattcctgaaatattttgttatacggatcttaataaatgtttgttaaatgaatattctgtgtaccagacactaagtcagttttaggtgagcccttacccttcggcagggacccttcgggtgctggcgaaagtgactcccagccacaagtgacttcgggccagcctaggccgaggagttcggggcctccttcctgctccatcaggctgtaggggaaagatcagctggcccgcggcgaccaggaaaccgtgtcgcggcctctctccagcaaagcgctagacaggagtcttgaagcggctcaaaccactgaggcgcgtcgtgcgcagagcgaggggctcccggtcctcaagcctctgtccacggggtcgctggcgacggccgccgccgctctacaagcgcccgcttcccttgccgcgccggcgtttaaacagaccggaagtgggg

SEQ ID NO: 40318 - DNA, 537 bp, Mus musculus
  source 1..537: mol_type = other DNA
tggaatgaaaaactaacatttactagtcacttcttcagcaaatatttaattaggatcttcttttaaacaattctaggtggtagacatgtctgcaacctgtattttatgcaagagaaaagtaaatgatttgcctaaagatggccatagtatgttaacctttgacaattcattatcatcaccatgaggaccaggctggcctccaactttccatgctggtattgatactgtgtccacaatctcaacaaatgtgtatctgtatggcactgcctgagaacagtgtgcagagctgtcacgttccaggtcccaggggtctagaagggaggacccggggtttctcgggctcctccaacttgtcgcgaatggcgacgtggggcccgagaagaccagggcccttttcagaaaggggatccccggaccctgggtttcgcagagttcaacggccggaagtcggacgcccccacttccggtctgtttaaacgccggcgcggcaagggaagcgggcgcttgtagagcggcggcggccgtcgccagcgaccc

SEQ ID NO: 40319 - DNA, 443 bp, Mus musculus
  source 1..443: mol_type = other DNA
ctctgcattcatttacttattaatgaaaagttcagaaacaagacttccttcaaaactagccttcatcatcacctgaagtctgatctcccacgtgccagttcccttaggcaggtctcccgaggccagcagcgatgacaccagtcgccctcgcgaggctggggtccccagtcccccgcgactggagccggcgcccacccacaggagccggctgggaagaggcggtgccaggagctctgccgagccttggccacaccgggctgtatccagcaggtccagtaggccaggccgggccaaaccaccgggcggaccgaggtcgtctcaaacctcctgaaacttccagatcagaaaatggcctggcccagcggcttcggacgtcctcgcgtacgtcgtgacgtcatctccctcctcgagccagcggccggcggggttcggggcttcggggc

SEQ ID NO: 40320 - DNA, 326 bp, Mus musculus
  source 1..326: mol_type = other DNA
gggatggaaaaaacaatacatttgtcatcccgtcccactgaaaggccttcaggtctgagccccttaattccagagctgttacagggagggagctgcagattcacccaccacctcccctggactttcagctcagagtctgcagaccctccccggggatctacagccccaggtccccaggcccgggattgaggggtgctggtcggcccggcggggccgccgccgccttttctgccaccgcggccgccgcctcctcctcatctgcagcccaccggcggcggccgccccgaagccccgaaccccgccggccgctggctcgaggagggaga

SEQ ID NO: 40321 - DNA, 369 bp, Mus musculus
  source 1..369: mol_type = other DNA
gtcggcccggcggggccgccgccgccttttctgccaccgcggccgccgcctcctcctcatctgcagcccaccggcggcggccgccccgaagccccgaaccccgccggccgctggctcgaggagggagatgacgtcacgacgtacgcgaggacgtccgaagccgctgggccaggccattttctgatctggaagtttcaggaggtttgagacgacctcggtccgcccggtggtttggcccggcctggcctactggacctgctggatacagcccggtgtggccaaggctcggcagagctcctggcaccgcctcttcccagccggctcctgtgggtgggcgccggctccagtcgcgggggactggggacccca

SEQ ID NO: 40322 - DNA, 340 bp, Mus musculus
  source 1..340: mol_type = other DNA
tgcccttctccccatttaatgggtaaagaagacgtcagacttgggccctgagatggggcctccacagccccagcctgtagtctctaagctcaaagacagtgcatgccagtatttcacgttttgtcttcaaaactgtaaaacggagataatccatctctaagattctctaactgcccttccagtacaggaggtacctaactgcaaatccagaactagttctgtctctagttgccagttctcctaagatgtggcccgtggcagccgcgcggctagccatctagataccggatccttcccagtcgggctgggtaggcagggcggggacccaagcctggaccct

SEQ ID NO: 40323 - DNA, 404 bp, Mus musculus
  source 1..404: mol_type = other DNA
ccttagggtgtctcagctagttggtacaaagtggatgcctctttgggcaacacctgtacatttcatagtatacgaacattatcaatagcaagcttaaaagtaagtgtgtcctgcctcagttctaagtgctggaattacagaagtagcactcgtctgcactctttagtgtctacacttctcttttatgtgtggacacaaatccagactgctaacttccataactgccgggagaattgtagatatcttgcttaaaagatctgaattttccccaaatcactaatttactcacctgccaattaaaagctgctggcagaacctggagggtgtaagggagggcagatggcactttcttcccaaatctctccctctcagctgggctgggagagccaggtgataacagcgcg

SEQ ID NO: 40324 - DNA, 298 bp, Mus musculus
  source 1..298: mol_type = other DNA
atgtgcacacatctaggctgttcctgctatgaggcagaataaattactggtcaaggttaggcgtcacatgcctagagtcctgcttttaaaacaaatacacagactgcattttggctctttaccttcaaggtgaaggttgttttgtttaacctgggtcaactttacgtttaacgcaaccccccaggggatctggtgagttgactcaagaatcattgattccagccctggaatccgcggcaggggcgcggcccgaggggcggcaggggcggcgatgctccgccccaggaggcccgcccaa

SEQ ID NO: 40325 - DNA, 536 bp, Mus musculus
  source 1..536: mol_type = other DNA
gtacccatggctccagctgcatatgtagcagaggatggcctggcatcactgggaggggaggcccttaatatttgaattgtaaataaacaaaataaccagggtattgctacttgaatcatttaaaaatatctataaatattaatcatatacatatatatgtatatataatgacatatgtgtatttatgtataatagaaatatttataaaagatttttaaaaaagaaagtgctgtttcctttttgtgacactcgttatagcaaagatttcacaactgtaaatttactaagatcttttattttatacttcaaatggctaaattcaagttgtacaaattagacccaaacagttcagagttttttgagatctcatgacacacctgtcaggcctcagtggtcattgccatggtaaaggaaaggcccaagtccaggattgcaggtcttcctggctggctgccttccaaggagcaaggccggagtgaactttggcctggggtgatactcccctcactgattaaccagccctgttggaagactgt

SEQ ID NO: 40326 - DNA, 377 bp, Mus musculus
  source 1..377: mol_type = other DNA
tcagatctcctggaactggaggttacaggtgtaagccaccctgggtcctctagaagagctccaacagcagagtcggtctcacctaggccacccccggcgtagtcaaggcttggccttgacttcccaagctttaatttttattactattaaaacaatacaactattattaagtgtagtaatgactttcgagaaagactactattaataaactcagtagtaatgtaggggaagctgctgcgtctcttccccgccttccctatctctgcctggggaaattttctgctgccagcaatatcgagtcagcaaggcttacagaatagcggagctacgtacacaaaaagattggaaatgtacgaaagtttagggctccttccagc

SEQ ID NO: 40327 - DNA, 167 bp, Mus musculus
  source 1..167: mol_type = other DNA
cgggagagaagcttctatggttatcatgcacgtcaaggatagataacttagagcctgtacagcatagaggtggagtcagtcaggctctgtgctgggctctgtgccaggtctctctgactccaggttgagcttgctagctacttgggagaacaggagaaataatgcac

SEQ ID NO: 40328 - DNA, 342 bp, Mus musculus
  source 1..342: mol_type = other DNA
aaaagcctctaaaactttaagcctcgccttatctaataaaacttattggataacttatttactaaaactagaaatcaacaacagatcaaatagtggaaatttcgcaagtatttgaaagtaaaatactattaattatgagtcatcttcagaatagctataaatgaagtcttctaaaacagaaaatttagatatttgaaaacactgacaagtcttcatctatatttccaggacagcctggtctacaaagtgagttccaggacagccagggctatacagagaagtaggtaactccacgtaaaattaaggtagataaatttaaaataaaatagtttaagagctcct

SEQ ID NO: 40329 - DNA, 371 bp, Mus musculus
  source 1..371: mol_type = other DNA
ccagggagtactaggcccaaaaacatttttaagcagctatgcggcttcagtgtaacacacgaatgatttgtgccatatgtctgtatcaacagttaaacatttttaagtacaattacacacacgcgcaaatttgcgcgagaaaatttcacgagattgagtcatctccttgcggcaaggagacctacaagtgtgtcgatctgttcgacgagaccaagggagtgccgacgactcccggacttgcgaggactcacgggcaggcccaagacggctggggtgactgtgacggctgcagacgcagctgggattacaggctgcatgtcttttgcagaaaatccccaggagctgggctcgtcccgcctaccggagcagta

SEQ ID NO: 40330 - DNA, 605 bp, Mus musculus
  source 1..605: mol_type = other DNA
atgaacttgaagtcttttatacctagagcagcaatgaatttcaagtacagttgagggataaattaactttcacaatgttcaagttcttaacaacaacaaaaagtcatcagtactagacttaggtaagaaacagatgttgaataggctgctgagatagaagcaggtttttacccagggagaagcctcctggtaggttacctgtacttctgagcaacaactgaatgtacttatggtggctgtttcagaaaacagaaactaagctaaaactaaagaagtagtcattaatttcaaagaaggtataaaaattatgtaaatattataatattcatatatgaaattctcaagaaaattaaagatacattgatgttggaaatatcagacagtttaattgtggttagtagtctaagctctgtaaataaaaattaaagatacattgatgttggaaatatcagacagatagtttaattgtgattagtagtctaagctctgtaaatattgagttatccacaattcttgggggtgttatttagtgtatataccacccacatgtgccatggcatatatagaagtgtctctattgttatgcttggcaggcgtgacaagca

SEQ ID NO: 40331 - DNA, 234 bp, Mus musculus
  source 1..234: mol_type = other DNA
acttggcaggcagaggcagtagaggcctggtctacaaattcagtttccaggagggtaaagtttcctaatagtgactcatagaacacacatgagtaactgttgatgtaacaacaataccaccacccacaatgaatgaagaggagaaaaaaagttttccatataattttcatactcttggcaactacggggctgcccaaaatctgggaagcagccttgcagcgcccccctgagcgg

SEQ ID NO: 40332 - DNA, 478 bp, Mus musculus
  source 1..478: mol_type = other DNA
tacattttataagaaatcatttgaaggcttaattctgagcagttctcctgacagctaccctgccagcgcattccagcgccaacgttccagcaggcactgcctctggggctgccaatattaagatatctccagcgcgcgcgtgtgtgcgtgatccataaaatgaagtttattattagtattattatagctccccccaggggggagccacggcaaacagcctccgccggcccccccaccccggcgccgacctttaaccctcgggatcgccgacccgggggaccgccaccctcccggcccgcgcacgccgctcacccgccgagaccgcagggcaggccgcggcctcactcctcgcgccccatgggccgccgggccccggggtccccgcgccgccgccctcggccctcggcccgcgccgcgcgctcgcgccctccgcgccgggacccgcagccgccgcccgccccggaactgctcggcccgc

SEQ ID NO: 40333 - DNA, 158 bp, Mus musculus
  source 1..158: mol_type = other DNA
acatccctgttgtgctttgatactcaacaagagccacactctagagatctacaaaaacatcacaatttctgatttgcacagggcatttgcaacccacagagcctgacaattaccattttctatttgagtgccaagtcatcacaatgggtcctgctgca

SEQ ID NO: 40334 - DNA, 302 bp, Mus musculus
  source 1..302: mol_type = other DNA
atttgcacagggcatttgcaacccacagagcctgacaattaccattttctatttgagtgccaagtcatcacaatgggtcctgctgcactgcagcacaatcccgggctactctcctgaatgagaccagaccacacaggtgagtcctctttgacctgctgactccagctgggcgttggctcaggggaactgaagaggaaggctcttgggcttcccttgcattgttcctcggccacaagaaggcagcaggctgcctttatcatatccctggggtgagcaactgccccaagctgtgcagtctgtta

SEQ ID NO: 40335 - DNA, 313 bp, Mus musculus
  source 1..313: mol_type = other DNA
ctccatttgctctatggagtacaaatcctgttattataacaattcatattattgttaaactaacaaacacaaaacacctcatttttctctttcttgactaccataactaaaaacattgcatctggaacaaaatccaaatacacatttggtgaatttaacagcttccgcttagagctgggattcgtaggcgcgtgcggggtagcagccccgagcgccgggctgagccgacgccccctcgggaaggctctgcagggcagtcctgggcgccgccggccggcgcgcggtttcgcttccgggtgaggggcgggcgggc

SEQ ID NO: 40336 - DNA, 620 bp, Mus musculus
  source 1..620: mol_type = other DNA
ggcatattaacatgcaaagatacttaaaaataaagtctgccagccagctgtatatctctatgtgttactgtgttaatatttatataccaacccattcacaatatgaacaaaactattttctatggagataagaagaatcttattttgaatattacaaagaatatattttatctgcaaagttttaaaattgtttgtgtactaaaaatttaaacacgtaaattttcagataactgacagaaccagacatcgaattcgggtttttgagtgtctgattaacctgacaccttaaaaataaactatcctttgctttaaaacttatttggaacaagcttgcatctaaatacttttatttcaataagtggcatgatgataatattgtttatggcaatttctatcggcaggaaataaaataaataaacaataagtagcttcttactcttcgggggcgtgggttcgaatcccaccgctgccaaggcacttctgcgagcgcagcggcgacccctgctgtcgatgtgcgctctctgcaccacgagcagctcgccgaaggggcggtcccgcgcgcgccggggcggggcattgtgggtaagaggaagcgcgagggccggccccgctccccccac

SEQ ID NO: 40337 - DNA, 548 bp, Mus musculus
  source 1..548: mol_type = other DNA
atgtagcccaggctggccttgcgccaggccctaggctcagagttaggaatagtttttgttaagacaaagtttctctgtgtaacaccaggctggccttgaactcacaaagatccttctgcctgataaagttattaattaaaaattatagaaatagttggaattgtcaggtaggccgaactgtataaatttaaaccgaatatatgtttatatacaaatattaaatttaaacaaaaatatataggttatatattaaatatttacatatacgtgtataattttctatacttatatttataaatttatatgtaaatattaaatacatatgtgcttaccatgaatttggattaaagtgttaaatttcttcaaaattatgtcatgaaatccttaagatttccctttctcagtgcagccctggaactcactgtgtagacgaccaggctggccttgaactcagaaatccgcccgcagtctgtcttccaagtgcggtgatggccacccggggacggccacgtgagcccgggcgtgcgccccgtgcgtcagtcccgccc

SEQ ID NO: 40338 - DNA, 223 bp, Mus musculus
  source 1..223: mol_type = other DNA
aggttataacaagtttccctaagtgaggttaacaagctgacgccggcaagctggccaccaacaacttttctcaggggcggcttccactggccagcccgggactctggagagccaggcccctggaaggccagggctccaagtctccctccgagcatcacccacactccggaactggagtgcactccaaaagaggaggggctgccgaccgcaccctcttcgtctt

SEQ ID NO: 40339 - DNA, 542 bp, Mus musculus
  source 1..542: mol_type = other DNA
gcgcgggtaccgcacagcagcactgccctcccaccacctgcagcggctttgcagactctgcggaccagtggggcaggcagggcagcacgacccggacccaggccagcagctcgcctctagagcaggacaagctggtccactcctgcccacctcacatcagcctgtgtggcgcacccgcagggccgtgggccgcgcgcgcttgctctctgcggtggcaagaagcaccgggccgcggcgacctcgccctcaccttgctggaggtcccggtggtcgtgtcgccggggacgtccgggggcagcgggctctgccgccgccctgccgtttcggccgctgccccgggctctcccccggccccgccgccctcagccagagccaccctggggcgggacacgcaggtcccgcagcagctctcgccgctatcccgcgccgcccaaaggccggcgccctagcgagcgcgccccgggtggcgccgggagccggctcctcacgcctgctgcccggcccaaagacgaagagggtgcggtcggcagcccctcctcttt

SEQ ID NO: 40340 - DNA, 408 bp, Mus musculus
  source 1..408: mol_type = other DNA
aatgagagaagacaaagtattttgttatattctatgcacattaggtaacaaaatattcttattaacgaaagatggtaaatagatactttaacacctaaggagtttgtgataaggaatgccatttctcatccagtaaacggaaatctcttcagtgtagtgtgatgaaattaacgtaaagataaatttgttttataattaatttaaaattaatgtacagaatctgtatatgctgtagcttagtagcaacagttgagacacaactggctaaatcacattttaatgtctggtccaacttctatcagccatggcagctgcaaggaaacatggcagccaggactaacttgtggccttcgttggacagccgcttctcaggcttgggaacaccgagtggccctcggaggggccaga

SEQ ID NO: 40341 - DNA, 281 bp, Mus musculus
  source 1..281: mol_type = other DNA
ccggcggggaagctgcttttctgggcttccttgaagcagggtaccggtgccacaccttgcactcctcttgacctggagttcacatggttctccaggccttctgagactccaggagccacttcaatagggtgctgtgtgtgactcagacccaaagcaagcagccctgagaggccctctgcagtggagcacatcacacaatgcccatggcagtttctgaaacttattacaaaccattcttacacaatttctaaaagtctctttacttcttcctttctgaaagg

SEQ ID NO: 40342 - DNA, 384 bp, Mus musculus
  source 1..384: mol_type = other DNA
atatgctgtagcttagtagcaacagttgagacacaactggctaaatcacattttaatgtctggtccaacttctatcagccatggcagctgcaaggaaacatggcagccaggactaacttgtggccttcgttggacagccgcttctcaggcttgggaacaccgagtggccctcggaggggccagactctagtaggcgccacggaggacgtgcacgccctctctccccgggcctcccggtctccgctcattgggcagggaggacgcccctcctgcgtttgtacgtgcaccgggtggaaacacgacctggagtcgttggcgttccgggctgggaagggccgcgggggacgtgagaaggccgcgcgcctgccgctcctcccccgcccc

SEQ ID NO: 40343 - DNA, 411 bp, Mus musculus
  source 1..411: mol_type = other DNA
cccagagtctggcacgtgctaggctcagtctaccatggagctgcaccttcagccaaaggctcttctattgatggatggtcatctagccacaggcttgctgctgagcaagccacgaggaacaagccagtgaacagccaggttcctgacctaaaccttcagcagctgctgggccctggctggcccagaactttaggctagaatggcctggaactcacagagctctgtattccccacagctggctgtctttaaacagccagcaatgacagctgaacggtgtctttgaatctggttccaaataaactcattggctggagtcttcagtgaagctgaagctaaccgcctctgcctggctgctgtcccagagggagggtgagcagggagacccctcaagcactgctggccctggccct

SEQ ID NO: 40344 - DNA, 269 bp, Mus musculus
  source 1..269: mol_type = other DNA
tcactgggagctgttctgaagacaacctcttgaactgtgaggaaaccaccctggacagctccctggggagcaggccaccgctagggggcggccgccaagtgtgcgcccaggtcccatgcgtgtgcgcaccctgcacgatgccactccaccctctgtggggaacacccgacctccccaagctggtcaaggctccgtagggagcagtcctcatgggaggggcgggccaggtccccgggtgcggcgcgggctcgggggacccgcgcggctga

SEQ ID NO: 40345 - DNA, 340 bp, Mus musculus
  source 1..340: mol_type = other DNA
gaggtccagacgtctgagacccatgctatgatagtggggatctcacgtttatgtctaaaatgtttgaactaaacttatttttaatagtcaatttgtgtgagtccctatggaaagaatagctcctgtgggctgtgacccagcgggtgcaggttgcagagtggcctctgggaggcagcaagcttgcacggtgccaccacgagaagcagcgcagcccgggttgaggcgcggagctgactctggacagcgcgggtcgcggccttctccgggctaagacaagtcgggggtggcccggggaaagcggggtctgagcctgacccactggcgctcctggccgtgccac

SEQ ID NO: 40346 - DNA, 218 bp, Mus musculus
  source 1..218: mol_type = other DNA
gttctaggatagaagaacggaacccgtctctactttgctatactagacaagagcaaagtaatttttgaagattattgaagattactggcagctcttccagaggaggccagcctagtctacaggacagccagggctacacagagaattttacttagtttactgctcgacaaagctcgctgctctaacaggaacagttgctatggtaattccggaagaag

SEQ ID NO: 40347 - DNA, 449 bp, Mus musculus
  source 1..449: mol_type = other DNA
tgtccttagtctgttctctatcataaatgccacaatactggatatgttcaaaagaagtgtgttttctctggaccaaggtcactaggtcctgcacctggtaatgtcgaccattaatccattggccacatagatgagttaatctgttaactgagtagatgagtgaccctattcctgaggggtctcctaattaaagtgccaccttccttttaaaatgcaggctcaatttcagcttgggacttaaagttactgtaagttaggctcactgggaaggagcctccttcccagacttccactcatgatcagccatgagcaagaatgttactgctgtcacagtgtgtgtgatgctccacacacatgctgtgatactccccacaaccctgtatagagactgggactcagaggatactgacctggagcctgtcggcaggctcctcccgaagccctcccgg

SEQ ID NO: 40348 - DNA, 509 bp, Mus musculus
  source 1..509: mol_type = other DNA
tattaatacaacatctacttgattccttcatttaagttcaagagttaaataaaggaaaatatttcatgttagcaaaggatagcttttatcattcaaaggccatcttggactaatgagtatgagaaaccctttctcaccataacaacaaagctgtactggtagtacattcttgtaatcaagtttgtaccacagtactcaaaacagttagaaaaaggtatgtttatatataattaatgtgttcactttttgtagaccaggctggcctcaaactcagagatccgcctgacctgtttttttgagaaaagtatcttttcataaaaataactgttttatgaattatgatgcaatgtgtcatcaaaaaaaagtgaaaatgctgaaagaatgattctttatctgaaattcagatttagtttctgggaaccctgcttctgaagaagaggggacaatcaataccttggcttttgacctttcaagtggtcttgccagaaatgggcgtgtccaatagggcc

SEQ ID NO: 40349 - DNA, 637 bp, Mus musculus
  source 1..637: mol_type = other DNA
cgccgcccgcgtcctcgccgttgctgaccgaggcctgggccgcagggtccccagggggctgggccggggccggctgcaggttgcctcgcgcgtcgcaggagtcctccgccgctgcccctacggctgcttcggcctccacgcagttgaggggccgtgcgggcgcctcggtggccacagcctcggcctccgtgtccatgcctggctcctccatgcctgcggggtgggtgctcgccacgagcccggcctgcgacgagaacgggcccgggcaccgtcgttgccgcgccacgctcctccctccggggccaggcccggtcccacgaccccggcagcgtccgcaagcagccgccgatccggggctccggccgccgccatgatgattgtgtacaacacccacagcggcccctaatttcacaggtggaggtttctatggagacccgcctccccgggccggcccctgccacgctttagcattcccgcagccggagggggcgggtctgggagatcgcctgctcgcagcgctcggtccccgagcggcggcgcatcgccgccctagtccagaggggcgtgagcagcccagataggcggcttacgcctttaagtggcagggccgctcccccccgccgagcggaagtgacgc

SEQ ID NO: 40350 - DNA, 387 bp, Mus musculus
  source 1..387: mol_type = other DNA
agaaatacctagcaagatatacatgggcctctgttttcttctgacttgctaagctgccagcaaactgactctaggatttgtcggtttcttcaaagccagaacattatagcgcataggccttggcataaagtctatacgctctgcacacagcgtgcaaccccggaagggactgtttctggaactttcggggctgggagcgaagcgcactcgcaccggggccccgggatctgggcccagactggcctcgcgccgccccacgcggtgcccgagggccaccacgtgcggctcggccagcagaagcctcttgaggggcgccgccatcacacgtgggctccttcgcgcgtcacttccgctcggcgggggggagcggccctgccacttaaaggc

SEQ ID NO: 40351 - DNA, 488 bp, Mus musculus
  source 1..488: mol_type = other DNA
cgtgacagtcacacctacttattaaatcacacttataatgtgtactgagttttcactgaaacaacaataacaaaattatgggagaaacgtgacatattttatttttcagagatagggtttccagtgtagaccagggtgttcttcaactctcatttttctgaaaatgatgcagttttaatataccattctgaaaaggcaaaaaattactgtcgagttgattttgcccctagacattataaaattcacaattatcctttttatttaggaggaaaaaccttatttaatgaattaatttgaggctccgtctctgagatggtggggacccccctgggtacctcgctacttcaagtctcggcgaggctaggccagttgcaaccacagcagcaggaggtgggtgcagcgcggctgggagccgctagggtccgcccgcgcccgcgcagccctcaagcgccgctctgtacgtcgccggcgtacggcgctagctgcgg

SEQ ID NO: 40352 - DNA, 337 bp, Mus musculus
  source 1..337: mol_type = other DNA
ctcaagaaatgaattcggaaaattacttttccatgatagtgaaatattatttttaaaaagggcccggagtctgaaaatgtaatttatatacagaatgaataggctgtactgtgtattcctctggaagacattatttaacaggaaactcaggcgtgtgtatatgcacacacatagatatatatgcatagaaacagccgggacgggaggggcgaccgtccagtcctcgagggtcccgtgactgccagcggcggcagggtcgccacacgatgtactccgacttgttgtacagcagttcgcgatcgctcggcagtctccagctgcgcgtgcgcagagcggg

SEQ ID NO: 40353 - DNA, 434 bp, Mus musculus
  source 1..434: mol_type = other DNA
tcctggcaggagattccctccctttcctgacggaagttagaggtgcgtggcacaccaagcctgggaccagaaccccggcctcagcagttcggagtgccaagagttccaggtgtgggagccccagcactgcgactgagtcatggaagcctacgacgtgttggttaggctgcggtgaattgagatctccatagaacgatcttgcctactgccgccggctgcgtgggtccggggcggccactggggcaccgggaactgcatctcccggaaccccacctttcccgaggtcggctggtgctcgagccagctccgctgcattcatgatgccgaagttgctccacgaacctggctgagtcggtgcagagggtcctgctctgctccgctcgcggcgctgggaacgcggggatttaaaatacaaacccgcccagcgcgcggca

SEQ ID NO: 40354 - DNA, 423 bp, Mus musculus
  source 1..423: mol_type = other DNA
aattaatgtgaattctaattttgtaatatttaagtcttgcaggagaataatattctgagcctgaaatgtatgcacacacacaacacctgttcattatatgtaatatttatattcgtgggtcttaaacatggagaacacctaacagacaaacacgaaaatgtatatatataaggctgttgacgtgacgctctaggtttacctatatgtagttttacacctaatatttatggctgaggggcttcccggaaagctcttccatcgggttggaagccgaacgcaaggagcagccgtctccagcctcgggcctgtggtcacggggacccagccagggcttcctagggccaagaggaacccctgggaagaacggggacctagttcaccccccgctctgcgcacgcgcagctggagactgccgagcgatcg

SEQ ID NO: 40355 - DNA, 388 bp, Mus musculus
  source 1..388: mol_type = other DNA
gattctaatgcttgcatgacaaaatatataactgaagttttatatatatatatatatatatatatatatgtgtgtgtgtgtgtgtgtatacatacatacatatatacatacacatattatatgtgtatatacatacatacacatatgtgtgtatattatatacatacatacatatatatggttattatatctgtcccctgaaacatctccacatgtcatgtgattaaagtcccagctctgggcctgagtcttgccctgaggcaggggagatggcctgggttctagtcccaaataaggtagatagatcttttttaaaataaagatttaaaaaaaaaaaaaaggaactgtccacatttggtgccaaggactgctcggccagctggctcgg

SEQ ID NO: 40356 - DNA, 491 bp, Mus musculus
  source 1..491: mol_type = other DNA
tttgggcactgtggcaaataggaatttccccaatgtgagatatcaaaatgtctaggaatttccccagcccactgcaatgtgtcaaacccagggccttgggcttgtatggcaggtgatgccatcccactcagtcgcgccccagaatttctgatttctcagagaatccatgagtctggattttggataaatcttaacacatttgtttgttttgagaaacaaggaagcctaggttggcttagccggaggcttcgtgaatcttaagaattcgtggccttatgtagataaggataattgggattcccgtctatgctgtaccacttagtggagccagggagccgtcagaagaaaatcttcatcctgcccagtaggatttaaactgagttggctcacacaggcgtgaggaaggcggggccctggcatcgctgcccagcctctgggaaacccgctctccaggaccgtgaccttcggctctggggccactgggcagccgc

SEQ ID NO: 40357 - DNA, 296 bp, Mus musculus
  source 1..296: mol_type = other DNA
acatgcaatgttccgaacatttgaggacagggtatgacttttgttttcatttattaaatttttgtggtggatatatacatatatacatatgcatatatgtatagtcctcccaggccaaggtgaaactggctgcttccagccttgggtccttaggcgttcaccccagggcctaggacagggtgccaggggcgcggctcagatctgtccagcgcagactgcggtcctcgcgccgcagcgctgcggctagggaggcggggttacactggggctccgcctccctcccccgcagctggggc

SEQ ID NO: 40358 - DNA, 493 bp, Mus musculus
  source 1..493: mol_type = other DNA
cacatcctcttcagatgcttatgttctgataagaggttacacacctgttgtcacattgggagagtgaacatgggttgtttgggcactgtggcaaataggaatttccccaatgtgagatatcaaaatgtctaggaatttccccagcccactgcaatgtgtcaaacccagggccttgggcttgtatggcaggtgatgccatcccactcagtcgcgccccagaatttctgatttctcagagaatccatgagtctggattttggataaatcttaacacatttgtttgttttgagaaacaaggaagcctaggttggcttagccggaggcttcgtgaatcttaagaattcgtggccttatgtagataaggataattgggattcccgtctatgctgtaccacttagtggagccagggagccgtcagaagaaaatcttcatcctgcccagtaggatttaaactgagttggctcacacaggcgtgaggaaggcggggccctg

SEQ ID NO: 40359 - DNA, 441 bp, Mus musculus
  source 1..441: mol_type = other DNA
catttattaaatttttgtggtggatatatacatatatacatatgcatatatgtatagtcctcccaggccaaggtgaaactggctgcttccagccttgggtccttaggcgttcaccccagggcctaggacagggtgccaggggcgcggctcagatctgtccagcgcagactgcggtcctcgcgccgcagcgctgcggctagggaggcggggttacactggggctccgcctccctcccccgcagctggggccagcggtgccaagcacagctggaccagcggcagcagctgggcgagtgacagcccagctacgcgcgcgcggccgccgccagagccggcgcgaaggggcagcgcggccctgcggtccccgggcggcagcagcggccgcctagtcccgcgcctttccgggcttgcagccccgcggtcccgccgccccggggccgc

SEQ ID NO: 40360 - DNA, 373 bp, Mus musculus
  source 1..373: mol_type = other DNA
taaacctgcagattactagcattatatgcaccgaatatgtatgtacctatgtgcattataatatcttaatgcattatattgcagcatcttattgtatttacaatcaggtatgtgtctatattgtaatttaagaaaataattgtaataattgtatcttcatgtattatattactgtatcttattttatctacatgtagacttacatactttacctacagacatgtatcacatgtaagaattagtatggcatctgcgtttccacaggtattgcaagtagctgcgtttaatgccacctcatagcattagatgtcgtagtttgagttaatatcttgattgtgaagtacttaaaagtgatacccaaaatttgaggcac

SEQ ID NO: 40361 - DNA, 456 bp, Mus musculus
  source 1..456: mol_type = other DNA
ttttgagacagtcactgaaattgaagtgtacatgggctggtcagtgagcatgccatcctcctggccccaagcccctagtgctggggtggatccaaattgagggtagattcccctgacagacacattctcaggtgtctcctaaaaactgtttgcagccctgagcagctggaagcctcacagctcttcccctgcctgccctggagccctgagctgtgggagctcgtctggtctgagactaaacacagctgctgctgcactggggctgctgctcgtcttaaggctgcctgctcccagagtggagggcgaggcagcccaggacccaggctccagtctcccctgcctctccaggccatgggccccctgccaggtaagggcactggccaaggcccaatgagggcagggcaggcccctttcctcacggggcctcctttaaactgctgctgcagctgaggctag

SEQ ID NO: 40362 - DNA, 494 bp, Mus musculus
  source 1..494: mol_type = other DNA
cttattgtatttacaatcaggtatgtgtctatattgtaatttaagaaaataattgtaataattgtatcttcatgtattatattactgtatcttattttatctacatgtagacttacatactttacctacagacatgtatcacatgtaagaattagtatggcatctgcgtttccacaggtattgcaagtagctgcgtttaatgccacctcatagcattagatgtcgtagtttgagttaatatcttgattgtgaagtacttaaaagtgatacccaaaatttgaggcaccaagcccgagccagcctcggcgaaaaaggccgcgctccgctcttgccaggccccagagccgctcgtggggaacctcggagttccccgacagctccggcgaagtcctggacgcgtcagacagtggcaggcctagttgctaggacctccatcttggggctcccgggccacggcgcccccggaaggggttgcgagtggggcattcacttcc

SEQ ID NO: 40363 - DNA, 281 bp, Mus musculus
  source 1..281: mol_type = other DNA
ggggactcagaggcccatcagtgcaggggcctagggactcccttcagcttaacctccgggctggcctgactccgggtccgactggactccgccttgccggaccggacccagagcagagccaccggtttcggccggaccaagctcggctccacctatctagtttcgaccattggtccccgccctgaaccccaagggcggcgacgctggaagtgacgcggcgaggggcggggccgaattgtagcctccgtcaccgcctccggggccgggaagcgatgtaggta

SEQ ID NO: 40364 - DNA, 390 bp, Mus musculus
  source 1..390: mol_type = other DNA
tgtgtgtttctgagctcagatccaaaaacccagaatttttatgggtatgatttagacttcttaaagctagaaacaaaatagaaaataacccttcaattttatttagagttttatagtgatccattatggaatacctgtaaagtacactgcagcacaattatgaaacatatttactcatttgaggttgattctgaaacagagttcaagaaattttgtagccgagcgctctgacaggatgaatgatctaaatggagacagaaagttaatacattaaacttgcttcttggctctctagaaacttccgggttgtgcgggcggcctaaagaatcgactggacgaggaacttggtccgacaaacccctgggtgggcggtgcgggggcggcgtcact

SEQ ID NO: 40365 - DNA, 169 bp, Mus musculus
  source 1..169: mol_type = other DNA
caggggcagggcctggccactcgcctcattgaagccctgtaaggatgccatctcagtcgctgtcatttgccgatgaaacagtgaaagtgactcgagctcagtggcactcattgtccctactgccttaggcagccagcaggaccttcctcaggcctgagcactcatgcac

SEQ ID NO: 40366 - DNA, 408 bp, Mus musculus
  source 1..408: mol_type = other DNA
actcaataatactatctttaaatgcaattaaaacaggctgtgtatcatctctcccgtggcagatactaactagatgcacccgcgatgctagaattgagaaataagtcattggtctgttttctaatagacatttatgagccagcaggctctgagacagcccggtcctattaggtcccagatagcccgttgctcaggagtcctggctccacccagacaggccaagcctcccgcaacgtctgcctggcctgaggcaggacgctagctcgcgtcctgcttccaatctctggaggaatagcggcaagtcgcggtgctgcgcgctctcgcgagattcctccctccttgcccgcgaggaagcctcgcacggaccccggtcgcgagcggcgcatgcgtggccgcggctcccagcgc

SEQ ID NO: 40367 - DNA, 196 bp, Mus musculus
  source 1..196: mol_type = other DNA
tcccttgaattgacccccgtccccaggagagaggaggactgatgccggtaacaccttaatcacgtttgtttgtttgtttgttacaaaaaactaagggcctcttaggtgggtccccaatttggggaatcagctgtatgtgcctcgtgcctgtaacggcacacaggtctgtaactgccctaactgccggcagctggga

SEQ ID NO: 40368 - DNA, 376 bp, Mus musculus
  source 1..376: mol_type = other DNA
cgggtgtcagcctgtgcacagctgcatggggaccaacatgcaggcacctaatttggctgtcaagtagttcgattaatcacttattaaaccaagtgccttcaatcccagcactctggaggcagaggcagacggatcttcgaggccagcctggtctataaagtgagttccaagacagcctgggctatacagagaaaccctgcaagcatggaactttgggatatcctggagttctccgattcagtgttcctgagaaaacgaaggaatcgtttgctgctgctgctccaaagcagtacttgtcctactctgtaaaatagggagaactcattatctgagttgggaggagggcggggcctggcatcgattgctccgcgttcct

SEQ ID NO: 40369 - DNA, 242 bp, Mus musculus
  source 1..242: mol_type = other DNA
aaagactatatgtgtatatatgtgtgtgtatacatatatatgtatatagtgtgttgcaccttagagacagggtctctcactgaacctgacatagggtcatgtggatgtaaggctgggagaccctggctcagcaggaccttggcctggactgaattctaaggcttgaaaagtctgggtgcctgcacatgtggtctgtgagcatcggaactgtcactgaagtgactaactggtatcagggaggc

SEQ ID NO: 40370 - DNA, 680 bp, Mus musculus
  source 1..680: mol_type = other DNA
ctcagggaaccccaagctcccttagcccgcagtgcctcccacagggcacaggtgggtgcacctggccatctcccagcagaaagtacagtctctgagttttctcagagtcccatcggaggagacctgggtccagcgcaggacggtccaggccagctctgggttacaattccctccaagagtctggagcgaacgctggcgagcgcggacacctccgactcccgtgggagcgcagcgctagggcggggcgaggtcctccgcgcgcgcttggcggcggctggcgggggccgggatctccgctctcccgggcgccccagccttggcgcacgcctccgctctcgcgcaccccctccgcaggcacgcgcgaggcgcacccctccttccccgggcggcggcgggcgcgcgcccggccccctcgcctccgcccctcggcgccggtcctctctcccggcagaaagttagcagcagggaaggaactcggggctgcgggagcggtagccgcggcagcgcggggagagcggggcgctgcgcacggagcaggtgccgccgcgactaggcgcccccctcgggctcctggcctgaggttgaggggggcggcggggggcgaggggagggggccatgcgtccgggcttgtccccggcgcagcgggacggcagccagggccgggggcgcagcggcgtcg

SEQ ID NO: 40371 - DNA, 202 bp, Mus musculus
  source 1..202: mol_type = other DNA
ctcgggcagtttcaacggtctcagagacaacaattagttctttctgcataggaacaattagttctcttcgtctccagtctaaagcctgcagtagttttactacgacacaggccgtgggccgtggatcgtcccgccgtgggttctcctccagcgagcgagaggcgggggcggcggtaggagctccagtctggcgatctctccg

SEQ ID NO: 40372 - DNA, 324 bp, Mus musculus
  source 1..324: mol_type = other DNA
ctagttctgctgagcttctctgagcacctgagccaagcagggctggtcccaagcacccctgtttctgtcacatatcgatgtatctcacatagccctgggcaagggacagcaagatggtggcttgtatctgcaatcctacttgggaggctgagacaggattactgtgacttcaagttcagactgtgctacaatatgacagcggcaagcccatgggatggcttagctagcaaagggatccatctgaaaagggatagttgcgcatgactccctcttggtagtagcagcaaggttcctgcctgaacctagcaggagacgggacaccag

SEQ ID NO: 40373 - DNA, 412 bp, Mus musculus
  source 1..412: mol_type = other DNA
aaacctcactgtttagaattaatttgaactttcaataataaagccctttttataagaaagaaagaaagaaagaaagagtttattttctctatttgtttggtgccttgccctcctggctggacaaggggcacagcaaggctcctccgagcgcatgtcctccttcccacaatgctgaggctggggttaaggcagaaagtctgagtgtctgggtcattctgaatcaggaccccatgaggtaggcgtccaccttcagtctgtcccatctgtgctgaggggctcagggtaaataccttcaagaagtggcaagtcccacttcactgcctgcctctgggatgatgtcatctgtctgcaagatgtcagaccccaaatgggttgggcggggcactgtttaccacatcccctccccacaccg

SEQ ID NO: 40374 - DNA, 310 bp, Mus musculus
  source 1..310: mol_type = other DNA
ctcagccgccgaggctgatgttagctataatgaagtaactaaggccgttagttaacctcatgacaggagcacgctggcagaatgatatgcagtggaatgagcccttttcccattttagaaggcaagatgatcatggattgataataaaccaaatcacaggtgtccacagctgtggctgtgtgaactctgagctctatataacgactgtctgtgagccaggaaaatgccctctatgtgtggtcctgtcgtggcagaccctgccaggaaggcgctgtacaagatgaaggccggcagcggaccaccaagtaca

SEQ ID NO: 40375 - DNA, 428 bp, Mus musculus
  source 1..428: mol_type = other DNA
cgcggaactgagttctgtcgcttccagaactgggtcttggaacccacctatgggacctccagtgagctgccttagctttcggaacgaacgctccctaaaggtaggctagggcgcagagctcaggtttgctcgcctcgtggctgaccggtcttggagctgcaggtcaggattccaggcggctccacagcgcgggcaggcacaggccgtcgagcccctccagggccacctcgtccgagcgcgtccatggccgcttcagttagcagcgcccggggcgcctgcgcacctcgccgccgaggccagggcccaatgcgcctgcgtacagcgatccgaggcctagggaggactgatggggagtcccagcgctccgccgtgacgtcacgctacccgagggcgggctcgttcctcctccattggtccggaaccccgta

SEQ ID NO: 40376 - DNA, 339 bp, Mus musculus
  source 1..339: mol_type = other DNA
ctggtcggagcagagccaggcagtgcccagccagctgccggggattgggaataattcttaagagccagggatcagactcaggttgatagccttggcttccatagaatgtagaaatatcctaggagtgccaccaaagctctcccatgggaaatggtgtatgccagcaagcacctggttctgatgctctgtgtcctccagggcagccttggcacagcctgctccatgccatggccctgttccagcacatggctcagacactattctcaaatttgaaaaattccatagggtttgacaaaaggctctgcttgccaggcgcgccagcagaggaaagcctactgc

SEQ ID NO: 40377 - DNA, 475 bp, Mus musculus
  source 1..475: mol_type = other DNA
cttctgtacagattggcaactggtttgaaggcttctaaaatatttttttttttcagattttaaatgactttggccaggcaaagtggcctgccttgtctgaaacgtttgcacttgtcagtagcgaacagtactcagttcacgtgagttgagtccctaagtctgagagagggaccaggctggacaccatcctgggccggggtcccttcctccctgagacacctccgagggatgagggacggccgcccaacctcccggcggggcccacggacactaaccgtccatccctagaggcggcggttccggcctcccgaaccggaagcggccctacggggttccggaccaatggaggaggaacgagcccgccctcgggtagcgtgacgtcacggcggagcgctgggactccccatcagtcctccctaggcctcggatcgctgtacgcaggcgcattgggccctggcctcggcggcgaggtgcg

SEQ ID NO: 40378 - DNA, 382 bp, Mus musculus
  source 1..382: mol_type = other DNA
tcagcatttactgactttttatagatacagaactgactgcaaagtcaggatggttaaccaaccctgcccggccagtcttagacaccatctctgcccacaggggtgagcagggacaagcctttcaaacgctgaggctctgcatccccatcccttccgggtcttgcagcctttgcagaggcccctgacagtctaaagacccacagaagctgccttgtcacttatcgggagcgtcttgccgcgcggatctgtcccccgcccgcgcccagcgtggcgcgccccctctccgcgcgcgggcgggcgctgaacagtgtcgccggccgcctgcaggtgtctccccacggaggggcgcgcgtccctgcgccgtggccgctgccaggcgccc

SEQ ID NO: 40379 - DNA, 480 bp, Mus musculus
  source 1..480: mol_type = other DNA
ggctgtcctagaacactctgtagaccaggctggcctcgaattcagatccacttctgatgactaagctttagatatgggataggcattcttatttaaaccagtacaggttctgaggattcataaaaacttattttatttacatgcatgtttgtgtacctatatatgtgtatgtccagagtccagtttagatcgtgacactaagtgtttcaatttcatcctgtgacactttctggtcctaggacccagaactgtggactgaagccgaacttctagtccggtgtcagggtccggaagaaacgaaagggaaacctttcctttaccaaaatggccgcgtgtccctttaccaacgcggcggtccctggcctcttgggcggggacgtggtgggcggggccagtgaacagtcaggtgcggccccgccctcctctgccctcacttccggattggtccggttccagcgccgcagcaggccgcgggctgag

SEQ ID NO: 40380 - DNA, 567 bp, Mus musculus
  source 1..567: mol_type = other DNA
agaccccaggtctctgagtagcctagtagtcttagaccaggctccgccccacaagcacaggctggaatagtctgggacagtctagcccctcggggaccaagcagctggaccaggtgactgaccggcgggccttaggaccccgcgtggccggaaagcgggcggggcatcgtgcggctcccgcggcggtggggaggtccaggcccgtggcgcctggcgggagggcgcggcgggagtgcgcgtgcgcggagcgcgcacccggcgcggcggacaaaggcgcgtgcggcggcgcgcgaggcggagggcggagcggcgggcgggcaggtacgcgccggcgggaggcggagccgcgaggccgcgatggagcgcagcccgggcgggcaccggcgctggagcccgagtgccgggcggagcgggagcctcagccggagccgcagcctcagcccgcgccaggccggggcaggagcccgcagggccgggctgctcgcagcggcggcgcccgaaccccccagcggctgagcggtgacctccatcctcgcacgcggctgctgggacgcagcgaccgatcca

SEQ ID NO: 40381 - DNA, 389 bp, Mus musculus
  source 1..389: mol_type = other DNA
aaagttctaccagcagctggagtggttggaatgggtggctttgcacagctgctgcttcagcagaccccaggtctctgagtagcctagtagtcttagaccaggctccgccccacaagcacaggctggaatagtctgggacagtctagcccctcggggaccaagcagctggaccaggtgactgaccggcgggccttaggaccccgcgtggccggaaagcgggcggggcatcgtgcggctcccgcggcggtggggaggtccaggcccgtggcgcctggcgggagggcgcggcgggagtgcgcgtgcgcggagcgcgcacccggcgcggcggacaaaggcgcgtgcggcggcgcgcgaggcggagggcggagcggcgggcgggcaggtacgcg

SEQ ID NO: 40382 - DNA, 244 bp, Mus musculus
  source 1..244: mol_type = other DNA
tttcaagactaaagccctggtcacccgggaacttgctcagtaaaccaggctccacagagatcggtccgcctgtcctccaggagagacaccagagggcaaaccaggctgtccttgaaattgcaagcagctgctcgcctttcacatctgtagagatgtaatatttccaaataatccactatctcgtgaaatcggataaatgggtattccatctccccctggaggctattgcaccgggtgactttct

SEQ ID NO: 40383 - DNA, 469 bp, Mus musculus
  source 1..469: mol_type = other DNA
acctcagcgaggccgttctacccgagtgctcatctgaggagccggtgctccggccactgatgcatcgcagctgggccttgggcccacccaagacggaaggaagccctgggatatctcccagctcccagacactacattctctactaggacagcccaaggggtttggtgctatttgtaatggaataaaatttgtaatcagaccctcagggaatatccatagtcccaggacttagcatggttcagtatgactgtgactcaccgtggtcccctggaagtcgctctcccagctgggagctgggggcctgtggtgccctcagtgccctcggtccacacaggccttggcagagcctccttgcagttctcccacccgggcatggggagggtaccgcgggcctggtgcctcctcccccttcccacaactgggtgggggtgagtgggcagggggcaggctcagcctgctgagcagcct

SEQ ID NO: 40384 - DNA, 262 bp, Mus musculus
  source 1..262: mol_type = other DNA
tatgcacaaccatggtactgacagtacttacattagtgaatgccagccaaagacctctcagaattcagacctttctgagttttgaagttacgagctaagtgtgcatagcatgtccctggtgctctgtagtacattgtgcagataagcggcagcaaggccagcctcttttctttgcaacagggaagtaagtctcttattttaatttgtaattgtcttaaaaagaatcgaaaccttttttgattgtaccaaagagattggaatc

SEQ ID NO: 40385 - DNA, 370 bp, Mus musculus
  source 1..370: mol_type = other DNA
gctgtctgctcctgggaacagagggcagccacaataaatctctttcatgagatttttcaaggcaggatcatatcattatgcagaaggaagagttcaacattttgttctgaagacagaagactggctcccaggcagccgggggtgggggtcgggagggagtcttaaaacccacacccccaccacaggctgtctggggataatctgtagtgggctccctctaacactaaaagcccactggtataagtacactggtgtgcattccaaccttccaggttcaaagtcttttatagaaaaccggtttgtgcagaacgccaacccagccctggcccgcggggcggagatgctgggcgggccgggcacacttcgcagt

SEQ ID NO: 40386 - DNA, 537 bp, Mus musculus
  source 1..537: mol_type = other DNA
aagtcttttatagaaaaccggtttgtgcagaacgccaacccagccctggcccgcggggcggagatgctgggcgggccgggcacacttcgcagtaacgcggaggaggccgcgcgcagcgtcctctaggactaagaccaggcgttccaggaggtggcctcgagtggagcctcagcagatcctcagcaaccgcagacccgaagccctcggagcttccagggagcgcgggagcgcgggggcggtcccacgaggctgcggatccaggccgcgcgtccactcgagtgcagttgcagagccgatccggaaacagccgagcggatccggaaacagccggaatccgcgcagctgcgccagcaaccctaggtgagaatcgggggcaccggcggccaggaatcggtgcgggagttgcgccgctgcgcacgtggggagcagggggctgggggcggagccgaatgcgactgctggcggcagccggccagcgcggaggctcgggaagggggcggggcacagcgcccaccggggtgggcgtggcctacacgg

SEQ ID NO: 40387 - DNA, 282 bp, Mus musculus
  source 1..282: mol_type = other DNA
agggtgagagtttcagagaaccccacacttctgggggggtcaccatgaagccctagggttgaaggctagtgtagggtggggagatccttactccccctgcccagacagacagtcctggctttgcttaccagggcctggactgatggctgcagcaacccctccctagggtaaggttaccatctgcaggatgatagaaagtgactttactcccccctcctccaggctgcaagcccctgacctggaggaagggggagcctgccccccccactccctcataaggac

SEQ ID NO: 40388 - DNA, 313 bp, Mus musculus
  source 1..313: mol_type = other DNA
cactagcctaattctgaaaattttattgatgatcttagaaagagtgatactccttacactgagttgcttaactattaggatttaaatttgaatctagacataatcttttgggcccagtgacgctggatcaatgcgagcgttgctagagatccctgggggcggtgtccgtgtacccctcgatgcagggccaggcgctctaggctgcagccagctcttcaaagagctttatcctcagtggttccttttaggtacaactgccgaagccacgggagcttagtggtgaatacgaaggtgccctccttcttgcgtcggg

SEQ ID NO: 40389 - DNA, 246 bp, Mus musculus
  source 1..246: mol_type = other DNA
ggattgagacagattctcactatgtagccatggctcttaatagtctaagctagaatgaaatacttgaactatgtcctcaactttttaaaaaagtattttttaattttcagataaggtactttagagtggctttgaactcactctgcagtccaagcttggaattataagcctggatcagatgccagacattgtggcatatgcctttaacttcaccagcaaatatttaggtgtgacctcctgctcgcc

SEQ ID NO: 40390 - DNA, 392 bp, Mus musculus
  source 1..392: mol_type = other DNA
agaagcttctattatttgtgaggaatgtgacagttaaaagtcattactatacttacacttattggctctgtggtttagagcactgactgctcttgagatctgatgtcctcttctggtgtgtctgaagacagctacagtgtacttacatagaatttcattagggaacaaacatttgctgaaaaaacttcctttaatctctagagctggaagaccagcctggtctacataggccagccaaggagaccctctggaactcccgggactccatcccataagccttcgggggcgctcgtgcattatggggcgctccgcattttcctcctaaagcggccccctcaggctgaactgtggaaattcatatcagtggccgtggccatagccctcatttccgc

SEQ ID NO: 40391 - DNA, 600 bp, Mus musculus
  source 1..600: mol_type = other DNA
agcggacttcgccgcggagccgaaagcatcttagcggcgtcagcgccgccgcagcaacggggcttcctggctagggagagcccgggaggcagcgccccggcttggagctgttgagggggctcttgggggcccaggaccccgtgaaggagggggtggaccctccaggtcggagagaaagctctccgggaggtctccaggagcctgggggcagcgctcggctctctgggcctagtcacctcttgggggtctgggccctgaggggaggcggggcgcatcccgccagctccgtcggcaaaggttgggggggttgaggaggtgatggggtccctagctccattaccacctaaggggtccccgactgtagccaatggggggggggcgcgcggcccacagtttggccaatggactgggagcggattgttccctcctcttcccggtgtagccagtgagagggggagcggctacagactgcgggctgggaagctcctgcgcgcgcgctccccgggcgtacgtgcgcgcggatgctttctcggtgtgtcaatgcgatagaaagagtgtagtgcgcgtttttgcggctgcgcggtcccccagcccagccaa

SEQ ID NO: 40392 - DNA, 550 bp, Mus musculus
  source 1..550: mol_type = other DNA
cccagctgacctgatatttattatacaatgcaggatagcctcaaacctagtactggaattaaagttctgaagcaccatagctgccctaattttgaatgagggctgccttaataggcaagcactataccacggttagtcagtctggctttcagacagggggtcgctctccctgaaagaatcactgaatttcaatttagaattgggcacatttgtcatatgctcagaatagtcattctgacgctcattaatattttaaagcagttaagatggtccgcccaccggtcacccagtggcggaagaacaccaccgcggagcgctggcggcgtgggaggggcgggtccgccggcacttccccttcccggggtgcgctaagcgcctgcgcggctccttttccgccccaggggctaggccggtcggagccacggctcgagcctctcccgcctggcggcgctccccgcgcccctcccccgccggcgcttccgcccgcctccagcgacgcgcacgcgcgccaggccggctcgcgccctctcgctgtccaccggcccgcgag

SEQ ID NO: 40393 - DNA, 707 bp, Mus musculus
  source 1..707: mol_type = other DNA
ccgcggggctccccccgcccgccaacggcgggtcccctgcttcagcaggggcccggccccaggcccgttgaaccccacgcaacaggccgtggctcgccggtctcccggcgggaccagccctcccaacggcggcctcccgggaccgctgaccgccaccgcggctcccccggggcctcccgcagcggtctctccgtgcctggggcctgcagccgctgccggcagcggacttcgccgcggagccgaaagcatcttagcggcgtcagcgccgccgcagcaacggggcttcctggctagggagagcccgggaggcagcgccccggcttggagctgttgagggggctcttgggggcccaggaccccgtgaaggagggggtggaccctccaggtcggagagaaagctctccgggaggtctccaggagcctgggggcagcgctcggctctctgggcctagtcacctcttgggggtctgggccctgaggggaggcggggcgcatcccgccagctccgtcggcaaaggttgggggggttgaggaggtgatggggtccctagctccattaccacctaaggggtccccgactgtagccaatggggggggggcgcgcggcccacagtttggccaatggactgggagcggattgttccctcctcttcccggtgtagccagtgagagggggagcggctacagactgcgggctgggaagctcc

SEQ ID NO: 40394 - DNA, 425 bp, Mus musculus
  source 1..425: mol_type = other DNA
gcttatagactgtatgagacaactgtctaacagaaggagctggtacctacatttcccaaaataggagaggccactagttttggtgaattctaatttttttcaataatgggtgaaagcattcagatgggacaagtgatagtttttccactttggacagtcgcagtcacatggatatgtctggatattcatctacaattctctacaagtctcgggcggcgcacccagcaaggcaggcggatttctgagttcgaggccagcctggtctacaaagccaggacagccagggctacacaaaaacaatgttgttttgagaactgtttcaaagttcaaaaagttttaatttacagagtgtttagcatttggcacggagggtttccctccatgagtacaaatcataacgactaagcttagtgggaagagtttcc

SEQ ID NO: 40395 - DNA, 320 bp, Mus musculus
  source 1..320: mol_type = other DNA
tggctagctagtatatgctcattctgcacatcatatgttctcattttattttcctaatatcaaatgaacaagtgctattattcccctttgtttgtagcacagggagaatctatgaagtttgcttaaacctgagaaaccatgctctcttctgaagcatatatattaagatgtcacacaaatttgtaaagcgttccgtatttttaaaatccttttctaaaacaaaacaaaacaaatcttactctgaagttaagatcgctctggagaccaggctggcctcgaactcagatcccagcctagtctaagatttagaacctcggcta

SEQ ID NO: 40396 - DNA, 241 bp, Mus musculus
  source 1..241: mol_type = other DNA
ctgccctgccatcgagtggaaggtaagggaaaggttgctgagtctctgaagtcagctaaaagtctagcctcttgtaaaaccaggggtctaggatacccagatgcttattataggtctttacaataggtctgtaaggacaacagaagccttccactcttttattctccgaagtttgagaagtccaaaggcgacaagcacgtgatggaaggctcacgggtactgtcacgtgaccccgtacagg

SEQ ID NO: 40397 - DNA, 136 bp, Mus musculus
  source 1..136: mol_type = other DNA
tctgtgtgtcccctgctcatggatgacttcatgacaggcagggggtgtccaggtgactcagactcgggtgcacgcagcctgagtgactcagccacagccttcagtgagaggaccattaagattaggtcctcacagc

SEQ ID NO: 40398 - DNA, 308 bp, Mus musculus
  source 1..308: mol_type = other DNA
caggttttggctgagccttgacctgaccagtgtaagccttcaccttacctgaatcacagcttcagtcagagactgcacagctctgtccctgatgaacaggctagccgtggagtttaaccttaggacggagccattgtctgaatgaggctgatcatgaaaccaaatgagggtatggattggccatctgtcattcactggacaatggactgccatggcccttggatgctcgtgactgtctcagatgggctgaaaccccagctctgggaagggaaattacgtttccccattttagccagggaagacttagt

SEQ ID NO: 40399 - DNA, 199 bp, Mus musculus
  source 1..199: mol_type = other DNA
gctgccctgccatcgagtggaaggtaagggaaaggttgctgagtctctgaagtcagctaaaagtctagcctcttgtaaaaccaggggtctaggatacccagatgcttattataggtctttacaataggtctgtaaggacaacagaagccttccactcttttattctccgaagtttgagaagtccaaaggcgacaagcac

SEQ ID NO: 40400 - DNA, 162 bp, Mus musculus
  source 1..162: mol_type = other DNA
acctttcccttaccttccactcgatggcagggcagcgctgtgaggacctaatcttaatggtcctctcactgaaggctgtggctgagtcactcaggctgcgtgcacccgagtctgagtcacctggacaccccctgcctgtcatgaagtcatccatgagcaggg

SEQ ID NO: 40401 - DNA, 224 bp, Mus musculus
  source 1..224: mol_type = other DNA
tccaggcctcatgagtcctctgttaaagcttgtgatcccatgaggaagaagtccctggggactctgttgaaggggacttttcacaaaaagaagtgggtcagacctcctgaatctgaaccagactacaggtctgtctgtctgtctgtctgtctaactatgacccaggcccaggaggggcttgcctatctgaaggggagggtgctcctctctgcgcccagttctgg

SEQ ID NO: 40402 - DNA, 458 bp, Mus musculus
  source 1..458: mol_type = other DNA
actgagaccagctgggccaggtttaaattttaatgacaggcgcgggagctcttcggctaagcactcgttcaccagcctgggggctatgtgggaatgagttggtcccacccatggcgagcggatgcccgggctgccatccggagcctgaggcttggctgggtgagaggctggctcccggggctcaccggtgtcgtcgcgcaacgttcagagtcgtgtcctccacctccgggcagaagacccggacgatggaacacgcgcccaggagtcctctgcctccaggtcctgccgcagcttctcgcggaggtaatcggcgctgagttccataaccacagcccggcggggctacagcccagcgtgtccgcccttcctagggcggcttcgaaggcagcacttcccaatccgagccggactggagggcagccagtcctgcggttccgcttgcacaccctcctcctgcc

SEQ ID NO: 40403 - DNA, 395 bp, Mus musculus
  source 1..395: mol_type = other DNA
aaacacaatttcctctagagaaatgggaagtcttggctttgcacagctctcctctgagatgacgtgcacagctgtggtacaggagcctctgcagccccagtgcagcttgggtcaagggggcactcctcactcctggaggtgtgtctctcccagcctgatctccaccagtcacgtgaaggcaggggcaccttccagggcctgaagcccaaggtgtcctcaagactggcttggagccagcaggtgtccccatctggctactttcttcccagagtgggttaattagaaaagtcccattgttctaccttaagtttaggtaagttacactgtccatgctgtggcctgattggtgttttgttttgttttgaacaggctaaacccacagtccacagtatggt

SEQ ID NO: 40404 - DNA, 361 bp, Mus musculus
  source 1..361: mol_type = other DNA
ctttattttaaaaaatagtaaccctaagataaggacctaggttaattgcatagcatataaatccatttatgtgcatgaatgtttggtggcaggccagggactcacgcggaggacgagcaggattgacagtgaatccaacgtaaacgcggccccgatgccgaccgaagaagcgcccgggtcttgctgcatggtccatccggactttaaagggctgggtagccaggactaacccggcagagcgacttgctgcgccgcctgctggcaggaggagggtgtgcaagcggaaccgcaggactggctgccctccagtccggctcggattgggaagtgctgccttcgaagccgccctaggaagggcgga

SEQ ID NO: 40405 - DNA, 352 bp, Mus musculus
  source 1..352: mol_type = other DNA
acatgtggaccaggctggttaaattaacctgcccaaggtcactcaaatgagtgaccccagctgtgtgtgatatcagacttctgtgtgtactcagtcagacggactccgactccctcccgagagctctctagagggggaaggacaagaaatccatttggggtcaggagaggtccctcctgtagcagagaaggctctcaagctggttgaagccgttctaaagctttctccggtgccagggaaaggacctcgaggtgacagcatggggagcggtcccagtcttgcagccctggagcgaagggccgggcctccatgagctccgcccaaaggggcgctaccacccggaggaggccgg

SEQ ID NO: 40406 - DNA, 589 bp, Mus musculus
  source 1..589: mol_type = other DNA
atatatatatatatatatatatatacattaatttctttgctagtctaggggctaaaatagtttcagtgttaaaatgtaaggtttcctaatagaaaaatatctgatagcttgttgtatgccaggcacagtgctatgtactgggaatgtctaatgatcttgaccttatagcatttgtaattctatcagagaataacaatatgtaattataaactttaaaagattttcaaaaatatttttattctatgtccaggcgtatgtatatgtgtatgtgcacctgtgcagtgccctcagaggccaaaagagggcattagatcccttcaccaaaccatattgatttttctagggactgagcccgggaccatgctaagcaagtgtcctaccaaagatgtagctaaatgtttgcatgtccaaatcttttatttctgtaaaatacaagtactaaacctaaaactgcttatttggaatttaaaaatattttcagatacattttaaattcacggcaaatttcagcttaaagtacagtttcacatgcgaagcgaggcttcactgatctattaaatcatgattaagtaccatgcgcagaggagtc

SEQ ID NO: 40407 - DNA, 374 bp, Mus musculus
  source 1..374: mol_type = other DNA
gcaggcctgtgtcttcacactggagtcaggaccgacttcacagcttcacagtgctgagggtggcccactcctaccaagtctgacagcctgaattggacacctgggacccacatggtggaaggaatcagatgtcctctgaccctagtagcatcctgaggatgtgttcaaggccaacctccaccatcttagcattactgagggccactggcccctggggctgcagaactcgccgggtgcgcgcccaggagaccatgtgacgtctcgggcccgcgcaggctcgcccggcaggcgcgggggcgggacgcgcgggggcgggggcggagcctggcgcgcggccccgcggtgacagggcggtagggaggggcggggccgcg

SEQ ID NO: 40408 - DNA, 510 bp, Mus musculus
  source 1..510: mol_type = other DNA
cagcttggcctccactctaaagcatgctagcccaagcgtcctggacctagactctagagaagagacccaggcatatgcaagggacggaatttccatgttgggcaccttatgtgctgagctgtactgcagcactccaacattggagttcatttaataaatatgtcagtgatgctcagcagtggagtctaatagaaggacacctttattcccttctaacgcttgggaaaagtgtgaattccaactttgactcataatctctggagaggatctcttctccaagcctcaggagagcagcagaggtgcaatcacgcccgggttagcctctgggttaggctgcaagtcgtagccgcatttccgggcgagacggctagcggccggagcagggggaagggcagcccagcctgcgctggccgccgtatgacgcgccccctcatttgcatgaggcgctccgattggccacgaaggccgccgggacaggaggccggccccctccccctcccgccgcagccg

SEQ ID NO: 40409 - DNA, 466 bp, Mus musculus
  source 1..466: mol_type = other DNA
tggccccagagctgatctctgctccccggctctggtagaccgttctggaatggaggggcgggcactgagtagggctctgccctattcgtgggggtggggcccgtggagagccggtgcccctccccatctccccgtgcctgtatctaatatataaatatagagatgtgtatatggatgagagtgagttggggtgactcaggggtaccttacacacccccaaattcccgggaagtgcactagggggtggggctgcttaacccccccccccacatggtcaagaacaaaagggggtgctgggatgtctctggacatggaacccagggctgcctgcctcagttcctgtgcctggccccagctctgggccatactgcagtctggccacgttccagcagcacccagcaggctcagcaggtccatgggcgtggcgctgcccggtggaggagccagcctacactggctgagcagg

SEQ ID NO: 40410 - DNA, 422 bp, Mus musculus
  source 1..422: mol_type = other DNA
tccattcagagccctcagcaggggggagtaggaactaatcttagcgtcagagaagaccaccaattctctggctttcccagggatcccagcacaggttgcctgtggcccctcaacttttgagacttggaggcttttcagactataaaccagggaggactctaggctttagtcctctgcctgtgtctgctttagggtctaacccgggatcctaggctcggtgccaggatccagatcccacccctgccccctagccggtctgcccccaccgtgggaacggagaccagctggccggaagcctagggaagggtacccaggtatccggcctcctcttggaccccttctaggccccaggggtctccattccagcccacctccagggccccaaggaggggaggggctgcttagaccccgcacgagagttg

SEQ ID NO: 40411 - DNA, 452 bp, Mus musculus
  source 1..452: mol_type = other DNA
ctattttggaaaaagagtggacacttaaaaaattttttttcaattagatttcaagaatgtctggcccaggttcggagctcctccaagataggctctttcattgaacaattatttatgcatatctgcaatacttgggagatgagaagcctaccgcggctcgcctcaccaggcatacacaagtacaccaggcgcactgctgtatgcgtccggcgcgcgagagcactggtttccctttgcttccgcggcgaggccggaagtagaaggaagagactcagccggagtctccgcggcggtaattcgaggcccctctaggccaccgtccttagcgcgggcccgcggggttcgacggggccagggcagcgggacgcggagggtcctgggccgccgtgaggggaggggggggcggtcccagaatcgagtcccccctcccgcacggaccgggcaggagaccc

SEQ ID NO: 40412 - DNA, 303 bp, Mus musculus
  source 1..303: mol_type = other DNA
tagaccaggctggcctatggattcatatttgagctttgattgaaactccagacttaaaagtgaactattttggaaaagagagtggacacttaaaaaattttttttcaattagatttcaagaatgtctggcccaggttcggagctcctccaagataggctctttcattgaacaattatttatgcatatctgcaatacttgggagatgagaagcctaccgcggctcgcctcaccaggcatacacaagtacaccaggcgcactgctgtatgcgtccggcgcgcgagagcactggtttccctttgct

SEQ ID NO: 40413 - DNA, 416 bp, Mus musculus
  source 1..416: mol_type = other DNA
agctgccttaaaacccagccctggactgccgggctcacgcgccacggccgctatccggattgcacggttcgggaaagacctgtctggcttgggccagtccttgtcgggtggtgcctcccgccaatctgctaggcaacgccaggcctggaacgccactcagttccgatgtggccggcatgtcagctgcgccgtgctctggccagggagagatggaacgcgccctgcacgaagcaggcaggcagggaggctccgaagctctgctgcaactacacagccggaacggggtccgatgttcgcgcgcgcgccagcatcttggggcggtgctgcgcacagtgcccaccttcaattggacggttcccgtccctgcaagggaaaaaacctgcagagggcggagcggcgcctttaaatgtccgggg

SEQ ID NO: 40414 - DNA, 377 bp, Mus musculus
  source 1..377: mol_type = other DNA
cactgtgtgactgtgcctgtgcctgccagctcccagactgccagagagatcaagctcagatgctgttctttggggagtggccagtccccagggcccccacatcattactggagctactgcactggagctatggatggccccagcctatacctgggaaccttgagttctctgaaaggcaggattctgagagcccttggaccgctgaaaagggcctgatgctctggccagtgcccctcccttccctgataaactattgtatgtgagggtgagatctcctaggcaatatctagatgttttcccttcttgttcgaagaggttcctctaaagaccggtgagtgagcagtggcacctcctccccggcagctgccttaaaaccc

SEQ ID NO: 40415 - DNA, 351 bp, Mus musculus
  source 1..351: mol_type = other DNA
aggctggccttgagatctgcatgccgatgagactctcaaggccccatgggctttctgttactgaaaagaaagctagagagattgtcagggtctgtgcctgcttacaacagcttcaggaagtccctgaatctgaccagactgaccaactgagtcatttagaaagaacgctttccaactgactgagctgtgtgcaggctgtgcaatgcgcattcctagcaaaagttgtgccacacaacagcccctgggcagccttctcagggatgcctgagcacggagagcaagtgctcactcagctcctccccagggtcatgcaagccttggcaagggccccaggcacacccatggtctgca

SEQ ID NO: 40416 - DNA, 326 bp, Mus musculus
  source 1..326: mol_type = other DNA
actccaggaggccattggcctgagggaggggccccggcttccataactccacggaggagtgatcctcctgctcctggagtgccaccaggtggtgctagccatcaaagccatgctggagggctctgacagccagccataagagggctgtcacaatagtgagccacactcctgagggagtgactcgttgtttccactccctctgactggagaggcggaggctgctttcttcaggaaatcttcttggctggagtgagcacccctaagctgagatccctgcaggccactgaggctctttaagagaagagccatcctttccctaactctgt

SEQ ID NO: 40417 - DNA, 461 bp, Mus musculus
  source 1..461: mol_type = other DNA
agaaattatcttcatgaggattgaaacatgttttatagtatacctactatgtgcgcatacacacacgcgcgcgcgcgcgcacgcgcgcgcgcacacacacaggacccagtgggacagatactttatcactgctgctgttcgtcccactgggctggtgggtgggtgctcccactgtgtgactgtgcctgtgcctgccagctcccagactgccagagagatcaagctcagatgctgttctttggggagtggccagtccccagggcccccacatcattactggagctactgcactggagctatggatggccccagcctatacctgggaaccttgagttctctgaaaggcaggattctgagagcccttggaccgctgaaaagggcctgatgctctggccagtgcccctcccttccctgataaactattgtatgtgagggtgagatctcctaggcaatatctagat

SEQ ID NO: 40418 - DNA, 365 bp, Mus musculus
  source 1..365: mol_type = other DNA
gtggggcctccggagtgcaggtcgcaattaggaactgttgacaacacggtgacagccagtcccaagagaggagcctgcctgcctgcctgtaacctgtagaagagatggtggcaccgtcggaccaacactgctgccacctggtggaaatgtaacttgcttggcattttactaagcaatcagtaaatgccctcctcacctccccagtagagcggtacatgtctcctagacctagctaagttctggaacaccacagaactgactggttctgtaatagaactgaaggccttgtgcactctgagcaaaagctgcttctgcatcaggagctagaagcaccgctgtgacatcatagaatcctactcattcat

SEQ ID NO: 40419 - DNA, 385 bp, Mus musculus
  source 1..385: mol_type = other DNA
gcctgtgggtgcagcatgaggccctgtctctgctggcccagggtcaggttcaagatgatcccgacccacgtgaatcaaaaatttctgtcgcacgatggcgtgcgccagactctatgcacctgaggtccgggcactcgaaagaagctgcgagtgaattttcgcatctcatcagtagtttgcgcacgcgcagtgcggtgctaaaactacgtgttaaaatttaagggagacggtattctcgctaacatactgatattcttttggttccaaatctttataaacagtttacaatcaataattccgcgaagccactggaagcagcgttcctttcgggtcttcccccaggagggcgggcggtgtgattacgctccccgcgcgcggaggacgc

SEQ ID NO: 40420 - DNA, 257 bp, Mus musculus
  source 1..257: mol_type = other DNA
tttctgaggctagcctcaggctagcctggtcggaggggcctgcacccaggaacacgttcatgacttggagacccactggtgcatgcatttgggatcctgttccgggacggcgtaagaacggattccctgctttaatgggtaaactgagtaaatgaggaacttgagcttccgcttcagttcatgacccgccagggagaaacgccccggagtagagtcccgctacccagcgtcctccgcgcgcggggagcgtaatcaca

SEQ ID NO: 40421 - DNA, 314 bp, Mus musculus
  source 1..314: mol_type = other DNA
tgctttaatgggtaaactgagtaaatgaggaacttgagcttccgcttcagttcatgacccgccagggagaaacgccccggagtagagtcccgctacccagcgtcctccgcgcgcggggagcgtaatcacaccgcccgccctcctgggggaagacccgaaaggaacgctgcttccagtggcttcgcggaattattgattgtaaactgtttataaagatttggaaccaaaagaatatcagtatgttagcgagaataccgtctcccttaaattttaacacgtagttttagcaccgcactgcgcgtgcgcaaactact

SEQ ID NO: 40422 - DNA, 157 bp, Mus musculus
  source 1..157: mol_type = other DNA
ctctcttcctcaacccttgcatgggttcaggggatagaacacatagagcaactacctctcaagttgctgggatgaaaagcctgggccccctggcctggaactcaaatccattaggttacatacagtgcttcttccatgaacttaaattgatgttctt

SEQ ID NO: 40423 - DNA, 418 bp, Mus musculus
  source 1..418: mol_type = other DNA
tggcccattggggtcggccggaactagtcaccgcgcatgcgcgtctgaatggactggggcggggccggagcgtgcacgcgcgagcaaggccccgcctctccgccaagccacccatgacgtcacggggcgccggcctctgctgggctgcaagcggtgagagctagtggcgaacggatctgacgccgcttgatcgacgggaggtccagatgcaccagccgctactgcccccctcccccttgcagaaatgccgggacgtggagccacgccggggccgagcatatgtgacacctgtgtttcccagtgccttaagcgtctgttgaattcctgcatggccaagtactgagcaaacagctctaacctcacagacaaccaactggcttggttgcatgtgttccggtctggattgtgacttggctgc

SEQ ID NO: 40424 - DNA, 427 bp, Mus musculus
  source 1..427: mol_type = other DNA
aacagatatgaatgatacctcattttgctttacattttttgagaactgttatgaactaaaaccggaggtacaaatgtttttctttagagaaccattctgtgttcaaagacactttggtcaccaaaacaaatgttcttctgtaaaggggacagttttatccccaggacaacagggtgggatcccaggctggcttcgaactcctgatgctcaggcctccacctcctaactgctggggttacaggactgcatcaccagagtgaggatggatattccctctaaaaggctaacaccagaagcctgggtgaggttctgaccctcctgtgctctctcaggagggagaccctgagatgtctggcccattggggtcggccggaactagtcaccgcgcatgcgcgtctgaatggactggggcggggccggagcgtgc

SEQ ID NO: 40425 - DNA, 255 bp, Mus musculus
  source 1..255: mol_type = other DNA
ggtttgactttgcttaaacacaaaaccagacgttagggcaggctgttgaaggtctcatgacagcttaaaattagttatatgtaattcaggtcctgtccctttgtagaccaggctggcctcgaactcagaaatctgcctgcctctcggttcttctaacagtctgtcaagtgcactgacaagggggcaaaggatcccccgtgcgcacgccccggttcttggctccgcccccgagacgcggccctcggcctggccgcg

SEQ ID NO: 40426 - DNA, 432 bp, Mus musculus
  source 1..432: mol_type = other DNA
ctgtcaggtgggatgggctcgcccctccccaggctggctctgccactgaggcacctgggcgcgaggacagctcccggccccgcctgcacgggcggccttgaagccactgattggctgaagccgctttcgcgaacccgcgtcttgctctgtgctggctctggcgtagccaagccaggggaaagggcacaggccgacctctccagggacccgcaggcccacggccggactcgcagttccagagcaccggcctcacgagcgggtcagggctctcgccccgcccccgagtctgccctgcccttgcggggcggctagtgtccctgtaccccacgtggcgctcggtcagggctgggggagggggtctggagcggcaaatccagagagaagtctccccccaccccccttgcagggctgggctgcggctgcctctgggag

SEQ ID NO: 40427 - DNA, 432 bp, Mus musculus
  source 1..432: mol_type = other DNA
ctcccagaggcagccgcagcccagccctgcaaggggggtggggggagacttctctctggatttgccgctccagaccccctcccccagccctgaccgagcgccacgtggggtacagggacactagccgccccgcaagggcagggcagactcgggggcggggcgagagccctgacccgctcgtgaggccggtgctctggaactgcgagtccggccgtgggcctgcgggtccctggagaggtcggcctgtgccctttcccctggcttggctacgccagagccagcacagagcaagacgcgggttcgcgaaagcggcttcagccaatcagtggcttcaaggccgcccgtgcaggcggggccgggagctgtcctcgcgcccaggtgcctcagtggcagagccagcctggggaggggcgagcccatcccacctgacag

SEQ ID NO: 40428 - DNA, 378 bp, Mus musculus
  source 1..378: mol_type = other DNA
ccagcttagggtttctcgcgcccctccccacccccaccccgctggttttggggccgcagcttgtcgtctcggcccaggtctggaggggcaacgctccacctgagccctgggcccagttcccccgggcaatcccagctgttagagcccgcagggcgccggggtgcgggacacccctgggcacagctcacgcacacctggccttccgatgggcaggagctgacgtctccagcagcgggctccgcagctccgctgcgcctggcttccttctgtccgggacgttaagaacacttttaaatataaataaattaattaaataaataatggctccggggaggcaaccgtaaggcgtagagattactccgtcccgagtctgcgcct

SEQ ID NO: 40429 - DNA, 322 bp, Mus musculus
  source 1..322: mol_type = other DNA
tagtccataactatagctcaactgactcagttctgtccttgaaaagttgaagggaggggctctcagaacaactccctgccaaggcacttccttaggcaagttctagatgtcctagtgtcctcccaccaccagggcggcgctagaagcaagcggcaggcatgctcggagcctctctagccacctcttcccagcctgggtcccggagagcgacgaggatcgcaagcgtcgcggaggcgcagactcgggacggagtaatctctacgccttacggttgcctccccggagccattatttatttaattaatttatttatatttaaaag

SEQ ID NO: 40430 - DNA, 378 bp, Mus musculus
  source 1..378: mol_type = other DNA
ctctaagtgtgggcacttggagggctcacgtagccagaaacgggaggcgcgtctggataaagcgctctttcccagacagcggaagtactgactggtgctgctcctgcctacaggttttgtgctgggcatggccagcctttcccaacccaggctctgaggctcccagcgcagtgcctctcaggagagtgcctcagcagaggcaggcggatttctgagttcgaggccagcctggtttacagagtgagctccaggacagccagggcacttgggcagaggcagagctgtgttcctccacggtccagacccgccagttagcactgattcagaaactgcccccagctgtggtgacttcagtgcagcctggttgcagggcccttt

SEQ ID NO: 40431 - DNA, 427 bp, Mus musculus
  source 1..427: mol_type = other DNA
tgagtcctcacctgggggaccttctgagagtccttgcctgtctatttatgtgctttgtaaacagtagaattcaaaacaaaacaagccctctgaggaggcagagagccagctgcagttttttgtttgtttcctttcttttttaaaaaaaaaaaaaaaagttgggggaaaactaaaattccttttcaaaaaataaaactgagtctccctttttgtatgctgaatgctgcatgagtcttaaacactaataaacgtccctgtgcaggccctactgaacgggtcctaagggccaaattgcgcatgcgcggagcctccgcgcgccatttctctgcgcctgcgtactgagatgctgcgcagcctgggaggttccctttccagctccgagcgtgtttcctgcgggtccctgggaacggccttgcaggggtttgag

SEQ ID NO: 40432 - DNA, 410 bp, Mus musculus
  source 1..410: mol_type = other DNA
gctctgactgttctctactggggaccacccaggggttattgggtcccaaagctggcaagtgagtcctcacctgggggaccttctgagagtccttgcctgtctatttatgtgctttgtaaacagtagaattcaaaacaaaacaagccctctgaggaggcagagagccagctgcagttttttgtttgtttcctttcttttttaaaaaaaaaaaaaaaagttgggggaaaactaaaattccttttcaaaaaataaaactgagtctccctttttgtatgctgaatgctgcatgagtcttaaacactaataaacgtccctgtgcaggccctactgaacgggtcctaagggccaaattgcgcatgcgcggagcctccgcgcgccatttctctgcgcctgcgtactgagatgctgcg

SEQ ID NO: 40433 - DNA, 323 bp, Mus musculus
  source 1..323: mol_type = other DNA
gctcatgcctcacccctcccagggagagggaggggttaggtacaaccggtcttcagggaatacccaatctgaacaggcacagaatacccactggagattacaacccagcaccagcccagggtccatggttgacacagggttcagtaagctgcatccacctttgctcaaacctttacatgctttccaagagtaggaaggcttcgcagacctaggtctctgccaggatcccccggtgaccgttggcgggagggagtggtccccaggccggttacccaggtaacacggggcctggcacgaggttcaggagagaggaggggagaccc

SEQ ID NO: 40434 - DNA, 452 bp, Mus musculus
  source 1..452: mol_type = other DNA
cctgaaggtaaggccacctttccttaggctgctatgctaaaggcgaatctcttgagcttggccgccagccagccactaccttcttttaaaaatccttgtatagtgacgtgttgtgtaaatacagttttttaccctggggaggacacccatgtaggcgccatctttgggaaacccccaaactaggccaagagttaagcgggcacgcgctccaagctagccccgccccgctcagcaacgacgtccctgttatgtgcgcgtgcgcgcgaaataacggccgcttgggggaagagaagccgcctagtctcccgcgcgcctcgcgctcggggcgaccggggctgctgggtggctccccagtccctccgcctggccccgcgcgcactcgcgctcgcgcccgctccagcctctcgcgccccccgcccgccctccggcgcgcagtgtgcgccgctccccgc

SEQ ID NO: 40435 - DNA, 889 bp, Mus musculus
  source 1..889: mol_type = other DNA
cgccctcccccgccctccccgaggcgccggctgggcgcgcgcgcgcggcgggggccgaagctgctccctcgctccccccaccccgaccgccgccaccaccgccgccgccgccgcccgggccccccgcccccggccccggccctcggccccgcggggcctctcgcccccacccagggggcgtcgccgccgccgccgcgctccgcgccccacgccctccttccctccctcccgccggccggggtgcgcgggcggcggggcggccctcgggccatgcgttcggctcggcccaacccggccggccgggggcggcgccccgagcccgggccccgcgcggcccgtgcccccggctcccgctgagctccgggggcccccactgtggccgaggcggccccccccttccccgtgctgggcctggactcccggggggtgggcggcctcatgaactccttcccgccacctcagggtcacgcccagaaccccctgcaggtcggggctgagctccacagggctgcgcccagagtccattccaggtgagtaggggccgggccgggcgggcaggcgccgaccagcgaccgcggcccacacggcgccttgtctccgcaggccgcgccggcgcccccacccacgccccaggccccggcggccgagcccctccaagtggacttgctcccggttctcgccgccgcgcaggaatcagccgcggcggcggcggctgctgcggcggctgccgctgcagtggttactgcacccccggcccctgccgccgcctccacagtggacacagcggccctgaagcagcctccggcgcctcctccgccaccccctgccgtctccgcaccagccgccgaggccgcgccccccgccgcggccgccactatcgcagcagcgg

SEQ ID NO: 40436 - DNA, 181 bp, Mus musculus
  source 1..181: mol_type = other DNA
aatgtccaggcaagctgatcatgtttgctcagcaggtgaggttcacaacctggtataaaagctctggaaatttctagaagactagcatctgcaacttctagttgcctgggatctgtcttctttgccttgatttaagagtagaatgatgctagagacttactaggactctggttggatctgg

SEQ ID NO: 40437 - DNA, 416 bp, Mus musculus
  source 1..416: mol_type = other DNA
gtgacacacaacattcctgtctttagtcggaaggcaaagacagacaggtctctgtgagtttgagtccagtttagtctacaccattctgggaaaaagataatctgtgtttaaacccagcctggtctacatagtgagttacaatgttgctagttagagaaaattcctggaaagaaactcctcacaaagcagtctcaactgcattttacagaagcttttaaaggtagcatgcaattagctgggggcattttgtccttctttttgccttgaatataagccaattccaacctggcaattcaaaagcctgaaagtgcagggacctcagttactgaccatttagtgacagactccagggccctccctggggaattacggtaaattagaaccgaaacttccggcggcacgtagctgcgattggt

SEQ ID NO: 40438 - DNA, 121 bp, Mus musculus
  source 1..121: mol_type = other DNA
tgcatgcacgggcacagctgaaaccaacactcaaaaggcttacgggatcgcagcgctgtgaggtaaaggcgctcatccccaggttgccttggaaacactccagcaacaggtggtagcctcc

SEQ ID NO: 40439 - DNA, 317 bp, Mus musculus
  source 1..317: mol_type = other DNA
caggatgcaatatttctcagtctgctacaaagtcactgatcctcctccaaatttctataaatttgggggggtaagttccctcagaaaatttgagataaaaagagaagcttgtgcgcgctttaatcctagcacgggctggggacacaggaggtggatctatacagtgagagcctctctcctggccctcataggagagtgaggtccggcattcatggccctgcactccgagggagctccagcagggctaggagtcagaatttctaagtgctcacagctgagcacttcccactgattctggaaggactgacccagctcgg

SEQ ID NO: 40440 - DNA, 381 bp, Mus musculus
  source 1..381: mol_type = other DNA
aagttttcttttttaaataaatctattattattattattattattattattattattattatgaacaactctgtagaccaggctggcctcgaactcacagagatccataaggtgtgccgttaagtaaatcttaatttattttcatatttgtatatgagtacttcaagggctccaaacatagcatgtgcaatgttagtactaccacaggccctaaaaacctttcaggaccattcggcaggaagtgcacccacagtctcagggtctcaggttctggccaaagggagggaaaggaaacggttctcccctccataaggctccactgaacccttgggtccccacaagcaagtggagtgggtggagccaagacccacttcctttccc

SEQ ID NO: 40441 - DNA, 337 bp, Mus musculus
  source 1..337: mol_type = other DNA
tgttctgtacccaccatctggctgccctcttccaactctttccccagagctccagatctaaacctcactattggggaagatctcacctggccccagctttgcaggagctggatcccagccctttggcaggcctggttacaggccacggacggaagccagtggcagcttataaagactttctttaaaaatagacggtctcatgttgtatcccagactgtcgtcaatctcgcgacaatcaatcctgctctgagcaagtcccgtgaggcaaggacgtagttcacgcgagtctttgcaggtcttgcgtcacttcgtgatgaaggcgggtgccccggatgta

SEQ ID NO: 40442 - DNA, 218 bp, Mus musculus
  source 1..218: mol_type = other DNA
gcagtgaagattcctccaccagaatggaaggataatatgctcagatatctaaccatgatgtctaggggtaggggtagacctgttttactccgaatctgaatctgatcaggcattttaaagcctgaagaggtaggaatccaggagtccaggagttcaaggccgaatatctttattctcagtatagaataggccccagggctaaatcatgagaccacgcc

SEQ ID NO: 40443 - DNA, 201 bp, Mus musculus
  source 1..201: mol_type = other DNA
gggcaaaaaaaaaaaagcctaaacctctcttgcttcaatcctttcgcttgcttgctaaagtgaacccacaaaaccaagcatgggcttccctgagcccctctgcccttcctacctaggtcctgggctccagctgctgcaggcctccaagaaagggctaaggttaccacggtatgttaagggctgccgggaggatatataacc

SEQ ID NO: 40444 - DNA, 394 bp, Mus musculus
  source 1..394: mol_type = other DNA
taggagcgcaccctgctggcagcatccctggccctagaagcagagaatgttatctatttctactcttatgcaaagtggagaaggacagtcatttcaggaagtctaagaatctgctgatgctgtcatcacaggaatagacgtgaccgtcagtcaatttgactggctaacgggagggcctttcctcgcgcaggcgtagttcgccgggacagtggctgctcctccgcgtctgcgcaggcgcgacgtcggcagccggcccctcgctgggagggggcggcgcgagcgcgcgagtagggtgagaggccgggagaccccggcgcgagcgccgtcgacccttgccccgcctgcgcgcgccgcccgccgcctgccgccgggtcccgccccgcccccggcgcgc

SEQ ID NO: 40445 - DNA, 295 bp, Mus musculus
  source 1..295: mol_type = other DNA
tctcaagagttagttgtgaccaaataccaggtctgcacacacctgtaatcccagccctggacagccagaacaaagtgagtttgaagccagcctaggcttccaggagatccaatggaggtacacgtgggcctggagtcctagctttcagaaggcctagacctttgacagtccttccaacttctcaccatgatgatgagggccatggtaagtctcatcataaccactctttgtgactccaggtccaggggatccaatgccctgttctacttgtgtgcgcaaagaataaaatctttgg

SEQ ID NO: 40446 - DNA, 498 bp, Mus musculus
  source 1..498: mol_type = other DNA
ttccaggacagccagggcgtttaactttatctctaacttctgctttattgacaaatctaatataatacaaataacattatgtactgctaaattatgcttctagggcctggatcctttggaacgtgactccagcaagatggaggcagggttaggtcctgtccccgagcatcgtctctcgccgacagtgccccgactcgtgactctcaggctagaacttggcaggctccagctcgacctgcctgccccggcccagcccccactccgagctgggctttcgcctcggcgccccgccccgcccgggttgtcccgcgcgggcagtccggctccgccgtgccagctgtccatccgaggaggcacgccgctagcgccgcagggcacggctagaactggtccacgccgccgccgccgccgccgagcccgcggctcctccgggtcctagagcagctcgccgaggcccgtgcttccgcttcccgtcccgcccagcggcgcccgggacgt

SEQ ID NO: 40447 - DNA, 442 bp, Mus musculus
  source 1..442: mol_type = other DNA
gctcctttattatttttattagaaaaaaaaagtttcactatgcatgccctaccagtagtgagaaatgcttctttactgtataatttaggtaaatcagtcctctctgaactatctttaagtgctctaaactaaccaggtttaccgcatgcgggcaaacagtaagctgtctggcaggggcccgctctccaggcggggcgccagcgagaggcccagacccccgggagcgcacgtggcctacgcgggcacagcagcggcggagcccggctgatgcagggccttgaaggccggtttccgggccgcggacacctctgagtcccggctacccctcccggggcggttagggacagaagctcaggcctccagcctctcccctaggggcggggccagacgggcgaaccaatgaatgtccgcccctggggccccgccccgcccccgcctccgg

SEQ ID NO: 40448 - DNA, 289 bp, Mus musculus
  source 1..289: mol_type = other DNA
tgtctgaagacagctacagtgtacttacatataataaataaataaatctttaaaaaaaaaccagtaatcccagaggtaagcagatctcagatctctgagttcaagactagcctggtctacagagtaagttccagggtggccagggctacgcagagccacaatcttcctgtgtggttcaagcagggacggtttagggatgcttcctgagcaacccagataatataatagtaggcacaggaaatgtatctaacctgcttatacttcctctctgaacagagaggtttcgcct

SEQ ID NO: 40449 - DNA, 440 bp, Mus musculus
  source 1..440: mol_type = other DNA
taccacagttttccaagtactgggatcacacagtggaaaaacctattctggtgcaagctgtagaacaggctggcctggaactcactatgtagtactatgtagtacaggctggcctggaattaacagtctcagtctctcaaatggtggaattacaggcataaagccactactatgagtttagcatttataatttcagtagacattctcacatatattaacttcaagaaatatgcagaatttttaagtccatgtgaaacttcacaacatcaattgtgcaatttgcttatgcaatcatagtccctaggactgttctgaccttggggctagcccagtgccagagcttaagtaatttattctttggtaaaatgattccaaaaacgtggctcccacaaggggttcacgtgatgatctcgcggggacctcacgctgtatataaatag

SEQ ID NO: 40450 - DNA, 561 bp, Mus musculus
  source 1..561: mol_type = other DNA
ccgagctcgcgaggagacgcccggcgcctccctcattccgggcatcctgttagaacccggacccacggtgaccccgggaccacggtgaagcagagccggccccaacaaccaatcctgggaggagtgggcggtgcctcgcggcgcggaggcggagctgtttctctggcaacgagcccgcatcgcgggggctagcaggctctgggctccagagcctggttgtgcggtcaaacgggcgtccgtccgcgttcccggtgccagtccgagtgccccgaggctgaggcgaggagctagccgcctcccccgctggcgccgggaagcgtcgctccttctcccgccggctccggggcgtcgggtcgcccccaccccccgaggcccgggagatccctccagccgctcctagagaggccgcggcgcgagccagcggggggaactggccagggacggacacttcctgggggcgcagtagcccggccggggctaggggctgggggacggccggaggagtcgcctcgcccctcacctccgaggccacgacgcgcgggggccggtgagggccacgcg

SEQ ID NO: 40451 - DNA, 373 bp, Mus musculus
  source 1..373: mol_type = other DNA
taattttctttgtaattcttaaggttcttaaggagaaaaaaaaatcttttgttgctcttgcagagaaccacagttctaatctggctcctgggcacgggcatcttttattagccagtgtaaacgagcttggtcaaatgtcagtgtcacgtaaacgcgaagaggaggtatgccttcctctccctgtaggattgcttgcaatcattggaatccactggtgtagcaaagactgggtcctctcaaattgtgtgaaggccgtccacgtgaaatgaccacgcacatgctgggtccctcctccggctccgccccgggaacgcactgagaagccgtgattggtcagaactctggaggcggctccgagcgcggcgcggggtcc

SEQ ID NO: 40452 - DNA, 427 bp, Mus musculus
  source 1..427: mol_type = other DNA
gagcatgagctcacagaggtacccctctttgtctttttttataaagtacaaacagctctgaaataggataatatcccttttgtaagtaggtatttttatattaaaataacaatgagtcagacttaaaacctgactctgagttgctccctcctatgagtgagaaaagatgggcaggtgtacatctaaccttttagaagattagatggtctggaatgtcccaggtgtcctggctgatcaaagatcagctctgtgatctctgatctgtatcaggatcagtattcctcaactagtttgagatttgtagactataagagtctgaggaccttgagagggctgtgggtcttctgaaccctaaaaccctcaactcacaggcagggtgtctcacgtgggcctgtcagacgtggtgcaaccctgggcaggaccctga

SEQ ID NO: 40453 - DNA, 457 bp, Mus musculus
  source 1..457: mol_type = other DNA
gagcatgagctcacagaggtacccctctttgtctttttttataaagtacaaacagctctgaaataggataatatcccttttgtaagtaggtatttttatattaaaataacaatgagtcagacttaaatccttacctcctatgagtggggcaggtgtacatctaaccttttagaagattagatggtctggaatgtcccaggtgtcctggctgatcaaagatcagctctgtgatctctgatctgtatcaggagtattcctcaactagtttgagatttgtagaccaagctggtggaaccaccccgtactcgttgaaattaatttaaaaaaaaaaaaaaacaggccgcttccacctagctgactgtgagaggggtgtggttctcctgagaccataaaaccctccctgtttgtggtgctcacaggcagggtgtgtcatgttggcctgccagcctgggactcc

SEQ ID NO: 40454 - DNA, 230 bp, Mus musculus
  source 1..230: mol_type = other DNA
gagatgtgtagaccaagctggtggaaacaacctctgaggggttcaggatcccaggctggaactaacaactatcctgtgactttaagttaacttccttgcttaacccattgtgtgaaagactgactaacgcacagaaataaagctttcatttttaaacttctatctctgaaatgagttttctcaggagtggtgtgaacacacagtcctggagtccgggaccccagggatca

SEQ ID NO: 40455 - DNA, 331 bp, Mus musculus
  source 1..331: mol_type = other DNA
ctccaaggagcagagggcagctccacacattggaccctccagcttgtggttcctgagccccttctctgaagacacgaactgagtttctgaaatgcaatactcaggctttgccaggttctagaggctaaccatctatctcaggcaccagggatgcccaggtcctcagaacagtttcagatgtcccgcccatctctctttcctacacatagacctccatgttttctgaagacatccagctgtggagtaaacactatcgttcgttccgcacgcgttgctagcaactgtgaccaaggggcgtgccaagggcgtggtttcccgcggttgcggaggc

SEQ ID NO: 40456 - DNA, 400 bp, Mus musculus
  source 1..400: mol_type = other DNA
gggaagggaggactcaaatgagctctcagaggtctttttcttttttttttttataaagcacaaacagctctgaatgagacaaataggataatattcctttcataggtaggtattcttatattaaaataacaatgagtcagacttaaatcctttaactccctgctaagagtgatttaaccttttagaagattggatggtctggaatgtcccaggtgtcctggctgatcaaagatcagctctgtgatctctgatctgtatcaggattcctcaactagtttgagatttgaagaccaagctgatagagagggctgtgggtcttctgagaccataaaaccctccctgtatgtggtcctcacaggcaggcagtctcatgtgggcctgtctgcctgggatttcaacc

SEQ ID NO: 40457 - DNA, 347 bp, Mus musculus
  source 1..347: mol_type = other DNA
ggagagcaagcaggaggcagccttccttgtggctttctgcatggatgtttacatgaaaatatcaatgaaataaacttgttcatggtgtttatcacagcatagaaacctctgaccagacaactcccaaatatgcagctgttggtctatatttcctttttcttttttaaaagagagatgtctcagtggttaaggactctttctagtcttcccaggaccgatgggaattggagaagttcctggaaagcagtagttatctttttcaaagctcagtaattcacttatgtcaatgaagtaccgtttgtagtttcagacgaatgggccgggcctcaccgagcgcgcccaggagg

SEQ ID NO: 40458 - DNA, 279 bp, Mus musculus
  source 1..279: mol_type = other DNA
aaaaggtcctttggagcaggctccgactgcttctgcagaggacaggctcctcttccaagagttacttctgcagaaactgaattggaagctagaggccacatcaggcctcccgccgtcccgacttccggaactagaaaatgggaaattcccaaatccttaacattattacgttaggtggagaaactttagctttcctacacttgtccaaatataacaagaaacgtgatatattggtgacgctttatggcggtgcaggcacaattgagcttctgcccctac

SEQ ID NO: 40459 - DNA, 337 bp, Mus musculus
  source 1..337: mol_type = other DNA
cagaaactgaattggaagctagaggccacatcaggcctcccgccgtcccgacttccggaactagaaaatgggaaattcccaaatccttaacattattacgttaggtggagaaactttagctttcctacacttgtccaaatataacaagaaacgtgatatattggtgacgctttatggcggtgcaggcacaattgagcttctgcccctaccaggctttaaagaagccggggtccggggcgcccgagaacgcgggaacccagaatccggactgagttcagtgcttctgattggaagaaccgcgcagtaggattctttccacagagatccaatttaggcg

SEQ ID NO: 40460 - DNA, 290 bp, Mus musculus
  source 1..290: mol_type = other DNA
gtgcttggctggcagcgaaggcacagcttacctgataattattcagaaaggagcaataggtacccagtcctgggtatctattttaaaaatacttttatagaactttgggccccatgtgctaggcaaaaacagggtctatgttgatttccctgcttcattaattccactgtcaaagaaataagtctcacctctaaacaagcgaacttccttggtactcaggtaggccatactgaagacctgtagaaacgtcttctccaagttcaaatgggccgccttcattgatgaccaat

SEQ ID NO: 40461 - DNA, 276 bp, Mus musculus
  source 1..276: mol_type = other DNA
ttgtaattaagcatcaaaatgaatggcatctttgtcatctcatcccgagaccggattctctgcagggagtccctgggggccaagttctaccatctcccatgttggaccaaggccccggccccacctctgctgcaggtgccagggcaccctggggcctcagctgctaactgggggaaggccagtcaccttggcccaaagaggctgactcggtggcaggacctgatcggccaggacctgcctgaggtggtgggagcagggggctcggcccggcccctg

SEQ ID NO: 40462 - DNA, 270 bp, Mus musculus
  source 1..270: mol_type = other DNA
caatggctcaaaatcttccttggaaccgttgtagataataaatgcaaatcggaagggagtatcagattctctaagagattttttcccccctagacacaggaatttttctctgtagctttgtagagctagcttcatagaccaggatggctctgaagttctttagtgtggagatagaatgtcctctcaaagaatgttctcaacctctcaaaatagttcttaaatgtaaaagttagcttagccaatcagtaggtctaagctcttctgcgccaa

SEQ ID NO: 40463 - DNA, 433 bp, Mus musculus
  source 1..433: mol_type = other DNA
cctgtctggacaccaagcatggatgtggtgtatatacatgttgtggcaacaaagcacaaagtgttgttttaaaagctaaaagtacttaaagctctgacagaaacttctcatctagaagttaacaacctcttgtcttttcaatgaggagctatttgttaaagaaaacgcttttcgtttttggagacagggtttctctgtgtagcctggctgtcctggaactcactttgtagaccaggctgtcctcgtattcaagatccggaagcatttgcctagttaattccttattccaaggattggaggtaatcctgaggacggcggccccgccccctcgcggtcgcccaccccacccaacgtgctcgaccggctgggggaggcgccggcgcgtgcgcggcccggaggcggggtgagccggcggcgcgcacggccagattgg

SEQ ID NO: 40464 - DNA, 471 bp, Mus musculus
  source 1..471: mol_type = other DNA
tcttctgggtgtctgaagacagctacagtgtccttagatataataataaagaaatcttaaaaaatcttttggacctttataccattggttttttaaattactgtttctgtaattaaaaaaaaaatttatgctctcttatttgtaattataaacacaggtttatgtgtctgtgtatggatatgcatacatgatagcagatgccaacagaggctagagtctttagatcccctggacaataagctatcattctagcccttgatttaattatttttaaatttcattctatttatttatttatttatttatttatttatttatttattgtttctctgtatagccctggctgtcctggactcactttgtagaccaggctggcctcgaactcatgggattaaaggattaggataacctaaaaaaattattaaaattgtgtctgtgtgtgcatacatatggaagtcagagaacgtaacc

SEQ ID NO: 40465 - DNA, 336 bp, Mus musculus
  source 1..336: mol_type = other DNA
aagcaaaaacactaaattacttggtttccttatagaaaaagctgttagaaaatcaaatcccagcactcttggagttccaccccagcctgggatacacaacgaatccctgactaacaagggctacatagtgagacaccgtctaaaaaaacaaaaattatcatttctcttttgctgtacaaccttgtgtacttccccagatgatggacacgctgcatatgcattttgttttgttgtgtttctcaaaacagtttctctgtataaacagccctgtctggattagatgaccacacttgggctcttactataataagagacatcacatttccggattccaat

SEQ ID NO: 40466 - DNA, 237 bp, Mus musculus
  source 1..237: mol_type = other DNA
aaacaaaaattatcatttctcttacaaccttgtgtacttccccagatgatggacacgctgcatatgcattttgttttgttgtgtttctcaaaacagtttctctgtataaacagccctgtctggattagatgaccacacttgggctcttactataataagagacatcacatttccggattccaatcagctgagggtctttgcgcaggttacgcccctcccagtggacgccaagtgcgc

SEQ ID NO: 40467 - DNA, 228 bp, Mus musculus
  source 1..228: mol_type = other DNA
aggaaattccctaatgttggttggctttcattcccaggctctggctggaactgggggcctgggctctgggacagccagctctcccactgccgagttgcacgtgcctcttagaagttgcttctttttaaagatttaatttaaatctttaaaagattgtgtttgtgcgtgcgtgtgcgcacatatgtacagggatcctctgttgtgtactccggagcggctctgacgcct

SEQ ID NO: 40468 - DNA, 434 bp, Mus musculus
  source 1..434: mol_type = other DNA
ggtttgtgtatatacacacgagcacactttgggcgcaggccaaatgtgactttcgcaaaagggtcctgagcccccgtcgccggcggcgcgcttgttgctgggcggtggcgtcagggctctccggggctggcaggcgggtggaggcggcacttccgtcacctgcagaaaacagagagctgagctgtggatgcgtctggagctccgcagtcctgagcgtccccctggacatatctcccggaccccgcccccgccggacgggggtccgcacttaccgtagggtcagccaagcacagcgcaggcgtcagagccgctccggagtacacaacagaggatccctgtacatatgtgcgcacacgcacgcacaaacacaatcttttaaagatttaaattaaatctttaaaaagaagcaacttctaagaggcacgtgcaactcg

SEQ ID NO: 40469 - DNA, 415 bp, Mus musculus
  source 1..415: mol_type = other DNA
cttagagcaggccagacaaacttaatagggtaacaaaataagttatgaaataacaacaaaataattttatggttagggtcaccatatttcgttcagagtctaaggagtgctgagagagagtggcaccatctcttgccctccactgttccgttgtctctggatggacctcagagaaaggttctgagagaagtccccatcagtgcgctcagaggctgcaatcgatcaatcgatcgatctctgacttgagagagcttgttttcatggctctgcaaagactgcacactccaggcacgaggatcctgggacttttagcccattcagcttgagcttaacatgagggaaaactgttaggtggagctctgagtactcccaacccatccatttgaggactcacctctaaaggaatggggtccat

SEQ ID NO: 40470 - DNA, 294 bp, Mus musculus
  source 1..294: mol_type = other DNA
agggtagaatgttcaattgttcaactgaggttccttgtttagaaacagggtctcgctaggtagcaaggattgccctgcagtgagttgcataccttaccaccgagctgctgggaaggggtagagacctgaccaccggtgggccagtcctgggtgagtccaaacaaaggcgggtctcaggggacccgcggcggccgaatctgagatcagcttaactgagcgaagaccttcgccggcctctgagctcccccaaaagggctgtgggaggcaaaggctagaggggcccgggaagctggg

SEQ ID NO: 40471 - DNA, 289 bp, Mus musculus
  source 1..289: mol_type = other DNA
agtgcgctcgcgcccccccacactggagtctccaagccgactcctggggatccaccacaggcacccacccagcgcttctccctgtgggaggcccacgggtagggacagcttcgctaacactggcggagctgttgcctggggcactcagcagggcgccaccaaggcctggccagggactctggcaatgaagacccggggccaagcttgctaggcccccctggcccgggggcagcgcggcccggctccgggtctcggcccgcacggtccggccggccatgctggcggggct

SEQ ID NO: 40472 - DNA, 281 bp, Mus musculus
  source 1..281: mol_type = other DNA
tgggcaagatgggactcctccagtttgatttgcccagggaactgccactcctggttgccatggaacccactcaacttaggccaatctatccacatacctcagggcaccccggcgagggacaagtggggcacccagccgggctggacccctaaagaatctagccggggccgctgaatggacacctgtgaatgtccaggtacatacactaagtcccagcaaaagctgaggctgagcattcttgagatctctgcccgtgggcagactgcaggggttcgtctcac

SEQ ID NO: 40473 - DNA, 283 bp, Mus musculus
  source 1..283: mol_type = other DNA
ctaggcccctcccccggagtgctggagggccccataccctgtggatggagacccccccaggcttgctctggtttccaggggcaggagagccccagggtagaatcctagggagtctgggagattacccagattgcctgagggatcctatatatttggagcccccaaggaaacatctgaagccttttccaggaacctagaggaggggcctcagtgtccctccttccagcaggcgggaggtcttgagggagtggccctctgctcaggacacacactaaaaggctga

SEQ ID NO: 40474 - DNA, 306 bp, Mus musculus
  source 1..306: mol_type = other DNA
ttgctgagaaggtccacccttccactgcctctcatgggtggtgggcaagaggaaaagaaaaaaaatatatgcctatactccttctctgtgccagagccaaagactagtacacacacagatgtgtgcgtgcgagggtctaacggtaaggtgaggaacagtctcacttctgatcagtgtgacagccttaggtggaccctaatctaaacaaaaggaagtctacctcaggtctgagcctgagtctcctcacaagccggttactgagctctgggcggccgagccccctcccctcctcctcccccggagggg

SEQ ID NO: 40475 - DNA, 398 bp, Mus musculus
  source 1..398: mol_type = other DNA
gtacttggtcatacagacaccttgtcctagtgaggtttctagtgatgtaataaacaccatgacggaatactgcttgctgacttactgcactgccctcagtggtgtgggctctgccaatagggcatcttgattgaggccctttgacctagtttatgtcaggctgacaaaaaactagtttttcactggaagactatcagttttcccgctctccactcgcagcgtctgactgttcatgggactgttcaatgaatgaatgaacaaatcctgagcccacgtggccggaacgcaccgcctcgctcgggccgcgcgcgtccagccgcacagctgccccccagctctccctctccgtggctggcagagggcgctgtgcgtccgtgcgccccgaggggcgggcccgg

SEQ ID NO: 40476 - DNA, 492 bp, Mus musculus
  source 1..492: mol_type = other DNA
ttttctttgcgaagaagaagctgtaaaagctgccagcagctgtttcctgtggaaacctggggtaccagcctgtatagatgctggggtctctggggcagtggccatgttctccccctgggggggcctttggcccctagtcctgggaactgtgcctgggtcaccctcccaccctggtgtctcagggctctggctcagtgggccaggatgtgaaacccaacaccacatttttataattgtgattaaactttattgtacaaaaatgcttggttctgtgctagccagaattatgtctgctgggccttcagcctactgggagacccagcaggagggacacatatcagtgatgggggatcccttaaatgggcaggttctgtcctttgcctgccactaagagtggactggccaccagggggcactctggcaagaaaattccctccaaacccccttgcccgcccctaggggtggaggctaggctggtctccttcctggaat

SEQ ID NO: 40477 - DNA, 297 bp, Mus musculus
  source 1..297: mol_type = other DNA
gaccaggcgcgagcatcccgggcggggcgagccgtgagcggcctcgggcgggctgcgggcccagcaggtcctagaacccgcccggtgcccgccggtcagtgctttggatgcccaggctcagcggacgcgactgccggccctgctcggcgcggacccgggggtcctagagtccgccatgttcgtggcgagggcctcgtcgccgagtccttggcggctgcgccccccctcccagtccgaggttgtcctaaagaaccagccccgctctgcgggggctgcctgtctggctggaggatatgt

SEQ ID NO: 40478 - DNA, 347 bp, Mus musculus
  source 1..347: mol_type = other DNA
cttcctttaagtacatttaatcccattccatttcaggttgaaagtgccaagcactgctgttacacaagtgtattcccaaactgggactagaatcatacgtttttttacataaagcagctatggaccctactgagcctctggttcccgccgccggcgcgtccgttggaggtcgtgaacgggagcgcgcctgcgcactgggacccttaccctaactgcagccgcgagccataagtggtggctggtgcgagagttctcgagcccatacacacgcacactcagccagggtacccgggagtggtataccaggaaccaggaaaatgcttccccgcgaaacttccgcctgggaa

SEQ ID NO: 40479 - DNA, 294 bp, Mus musculus
  source 1..294: mol_type = other DNA
cagacggtaggccctgcctgccatgacaggtggaagcccacccaactgggagtccagagggtggcaggctctctggaccttctgcagcacccctcaccccaacccccggcttgggggatggaacccaagataaatatcatagtgaccactctgttcttgggggttgacaagctgagatccaccagtgccagggaaaagactcttccgcagagccgccttgggtgcccctccccggactacaacccccaggcgcccccagcccggggcgctgcgcatgccccctgctccccgccc

SEQ ID NO: 40480 - DNA, 410 bp, Mus musculus
  source 1..410: mol_type = other DNA
ccgttatatagcaagttcgatgtcatgctgtctgaaaaacacagcccgttacgccgggctccgcacgcctggccacgccagcttttcttgtctgaaaattttcaggaaacgccgagaataagtaggaagtcttgagtcgttctactgagcttggcgcgaatctgcactgcagcctcataggcgggaagaggagccgaggagcgcgcatcctgtccactcattcgccccgcccgcctcgcgaatctgcgtcgttggacgcgccactcaccggagcagctggatcagggtggtgcggtccactctccggggaatgcggcctcccgagcctcgcagggcgccggccgaggcaaggccgctaccctcggccccgtggatcgctccgcagtcctcagacgctgtgcccgctgggc

SEQ ID NO: 40481 - DNA, 379 bp, Mus musculus
  source 1..379: mol_type = other DNA
gctgctcagaaggtagcgagctcagcgggactgcaatggccgcccacctgtcagaggctcagcggggggagcgccaccttggctgaggtcacttcccactggagactcgggtcttattatttcctgatttccaaggcagtgtacccttccccacctcgaattggggcacagctcagacgctggggtgtcggggacgtcgcgagactgaagcccgagacgtcgctgacaggccggaacacatgactggcggtcgggcgtgcagcccgcggagctgggcccggcctgtcacgtgatgagggggctctcagactgcgtgcaaccgctctggactcaggcagcctcgcttccgtttagcgaggacgagccgagccctcgcgcg

SEQ ID NO: 40482 - DNA, 550 bp, Mus musculus
  source 1..550: mol_type = other DNA
cagacggcggaagtggaaggccgccttccttgctcgggagggctgattgacggcggacacccgccaagtcgccggaagctgtggtgcccgcgtccacgtcgagtccacatttgaggatccctccacgccagccctgggaagaagcttttatggaacctcgtgaaaagtgtcaccaaagcgccgtagccggggctgcagggtctttcctgtgaccgtactgccgacggaagtgtggcttaaatccatccgaacgccgcgccgacctgcgtgggcggagccagagctgcgcccgcagcggagcgtgggggctcacgctgcctgggagctccagcattctggggaggattgctccgagctcgaggccggcccgggctgcaccgtgcggaaacactgcccgcggttcccaggcggaagtttcgcggggaagcattttcctggttcctggtataccactcccgggtaccctggctgagtgtgcgtgtgtatgggctcgagaactctcgcaccagccaccacttatggctcgcggctgcagttagggtaagggtcc

SEQ ID NO: 40483 - DNA, 317 bp, Mus musculus
  source 1..317: mol_type = other DNA
aattacatgtatataccactgtatttagaaaattatttactatgtgtgaccgcaccacatatgtacaccctaagcatgtttttaaaaagtttcctggtgacatggctcaacaggtaaagacacctggccatgtgctttcaaagtagagggagaaactgctcacaggttgccccctgggccgaagacagtgtcagatcccctggaactggagttacagatcatggttaagtaattaagttctccaggtcacaaacaatttcattgttcaaaatcaccactggccccaagctaagcgctgttggctcccttccagggcc

SEQ ID NO: 40484 - DNA, 267 bp, Mus musculus
  source 1..267: mol_type = other DNA
aaatggtatctgaaataatttcggggaaaatgcttccagattctagacataccagatgcatacctggtggaaagatggtttagcagttaagagcactgactgaacttccagaggtccttgagttcaatctgttaatagtagctttacagggcaggcatgttagaggccaacctggtgttccaggacagccagggctgcacagagaaacgctgtcatgcctaagaataaccaattgaatggtaggaggggcgtggtgacagcaggccc

SEQ ID NO: 40485 - DNA, 280 bp, Mus musculus
  source 1..280: mol_type = other DNA
ggtcggaggagaaatcatattaatttgcgaataggtaaatttgcatagtctacggagttcgaagattaatacatcctcattttgccaataccataattagagcactgagaaacttaaaaagcaggcagggtctttttttgctggctggtagaccaggctggcctcgaactcagagttattttatttatttatttatttatttatttatttatttattatatataaatacactgtagctgtcttcagacacaggtgctagtcgatgaacacagcccgcgcg

SEQ ID NO: 40486 - DNA, 322 bp, Mus musculus
  source 1..322: mol_type = other DNA
ttgtttttcaaagatttatttatttattatatgtaaatacatgtacactgtagctgtttttagacactccagaagagggtgtcacatctggttgtgagccaccatagagcagtcagtgctcttaactgcaggcctttaattccagcacactcccaccctgagcgagagacgcataattcagtgatagagtacaactgtatctgagctttctcaacctcccagcattcgggaagtgcacgtctttaaataccaggactcaactcgaggccagtatggtactgtaattagaccctgtctcaagttgggccaatttttagcaaca

SEQ ID NO: 40487 - DNA, 434 bp, Mus musculus
  source 1..434: mol_type = other DNA
ggtgctagtcgatgaacacagcccgcgcgatgttacagccggggagggcgaaggcgggctcggctagccgagcgggtcgactgctcccgcggttccgctcgaacccgggcccagcgtctggcctcgcggggacgctgcagcagggccgaggctggcatctaccatatgggggggaccctgcccagactaagtgacccagcagagggagctccagtggggaactctgggaccgcagttttgctgcatgaatcttaaaagacttaagtcccctaacaccgagtagggggtcaaatccagcccctaaatgaagcctttaggttgttctacatagaagagtagaacacctggatccagatccactggtgtgcacgtggagaagtagtgcaaaccatctggattcggatccttaaaatcccaagctgctgtgcgggcgc

SEQ ID NO: 40488 - DNA, 270 bp, Mus musculus
  source 1..270: mol_type = other DNA
cttggctatcctagaatttgctatgtagaccagtctagcctcaaactcacagacatctgcctgcctgtgcgtgccaccacacctgctgtgcagttgattgggctcctaatttgaaatgattaatcaataattgccttttgttacttgattcgcacttcatcatcatcttaaggaggtcatagatctgcaggaaggcctggggcattcccccatgcagggctgagcagcggctgtggccctaccttaataaggtctagaccaggcccacag

SEQ ID NO: 40489 - DNA, 539 bp, Mus musculus
  source 1..539: mol_type = other DNA
cgggaaggctccgaggccggggacctggccctgggaggcccaagtgaccgtaccaggctccacaccctgctatggagctctggtgtctgacagattggcacccgccagctgctttctggagtggttccagtgtcggacacagtattccaaccccgagacgcagtctaagcctgggaagctagttttgcttgagacctggcgggtgctgctgccctcccgtccggaggaggagagggtggcgcgcctcgtggcgcacggacctggcgctgctgcagctgaggacgcgcgtgaacctgaccgcggccccgagtgccgtgtgcctgcccgggagccactgccgcctggctcgctggggacgcgggggtgcgcgtggccgcgcggggccaaggactgggtgggatgggcggagcggaacccacgcgggcggccgcattctcgccccgggctccagcgcgcagctggaggcgctacggccgccagggggagaccgtgccgcggccaggagacccgccgcacttctttgtcccgcctaccaggag

SEQ ID NO: 40490 - DNA, 388 bp, Mus musculus
  source 1..388: mol_type = other DNA
tccacctctgcctagctccgggactggagaggtaggcacgtcacaatctataaaccttgttaaggtctaagttgctaggccagggcaagcgaaagtatgctgcatcttccccagtgaaagtggggcccagccgctgggccggtcggaagccacacccggagactccaggccttgactacacagttccgctctcgggcgcagggccctggcaccgcccctagcgggaggccgggtcgtaccattctgcctctagtggcgagccccgggcgacggacgagagccaccgctccgtatccccggggaagggtggggacctgggcgtgcctccccctcgcgcttctccacgtacgtcccggtggcgcgtaggcggcaggcgtactaaggcggg

SEQ ID NO: 40491 - DNA, 308 bp, Mus musculus
  source 1..308: mol_type = other DNA
cgagcaggccaggagtaagggggtagctagctgtctactcaggtctctaaatatttaatagctggggcatttggtaaggtttcaagaagccttagcccttcccttctagcagatgtgaggtgaagacatagtcactctctttcaggaatcaaggggcttagtgttctagctgttaaaattctaatattcaatggcatgtaggatcctaagatctggggaaacaaaatttggggcgtctagatttccaagattctaaacctctaacagaaacaggttgcttttcagcaacagctggtttgcaagtaagc

SEQ ID NO: 40492 - DNA, 216 bp, Mus musculus
  source 1..216: mol_type = other DNA
cgtagtcgagtatcctagatttgggaaaaaccactgttttttaagaaaataacatcaagttctgttttcaaaatactttcatgaattatatagagcaccacaggtggtcagcgcttagtggcaaacacctttaccaactgagtcaagatgtgggtcccctgggagaccggttcgggccaggaaacggcatcagggactgttttctcccggaggaag

SEQ ID NO: 40493 - DNA, 225 bp, Mus musculus
  source 1..225: mol_type = other DNA
aaagggagagggcctgacagaggcagagggatgataatcctaatgaacatatccattgcttctgaaattcagaaagcagtctgaggttctgagtactatacctagcaaaaggctcagttgagcaaatgactaatccactgaatgaatgaatgagtgaatgaatgaatgaatgaatgaatgccagcctgtgctccctacatggaggccagaagtggagggctccgt

SEQ ID NO: 40494 - DNA, 456 bp, Mus musculus
  source 1..456: mol_type = other DNA
agtaaaatagaatttttttttttaaaaagaatcaagtaaacagacaagttagttctttgagaaaatcagtaagattgataaactcttagccaaattaactaggaaggcctgcgccggtgcgggcttgctcaccagccgtcctgcgggcgtacgccccgggacgtggggttcagaagatcctcttccggcagcagctgtacggcatcaaaacccgggatgcagtcctgcagctgagaggttccgacctgtcgcacctgctccacaagcacgtgagcagcgctcccgagtttgccacccgaagcgtggctgcgctgcttgcccggacaacggaagccattctcactccattcgaaagggttacatcatgataagtcaaacacttatcaggtcttcagggcgctcagatgccatgggattgcagagtattacagaggcatggtgcccatccttttctga

SEQ ID NO: 40495 - DNA, 277 bp, Mus musculus
  source 1..277: mol_type = other DNA
taaaaaatatttcatagttccaagctcagaagttacagagctggtgattgctttgaccagaaggagcctcacccctgcaagggcacagttaaataatcaacattctggcggttaaatatggatatcctctgacttccacagggatgctcaaatagataaaattaagttttaaaactcagactcacgagggcctggggtttttatactgcttatatctgctacaactggaagaggacagtttccaggagaaaattacccccaaggaggtttagcaccg

SEQ ID NO: 40496 - DNA, 384 bp, Mus musculus
  source 1..384: mol_type = other DNA
cactgtgaaaaaatggtgcatatttatttagatagacagtccagagttgcccaggatagctttagtacatatttatttagatagacagtccaagcactgactgtggctcacaaccaagatctgatgcctgtacttatgtataatgtatactcacatatataaaacaaataaatctttagatagacagtaggatagctttgaccttggtacgtagtccaagatggccttcttggtaggcagacactgcaggcagtctaccaactgaaaatttgttttaaagacaagatcttaggtagttcaagctgtgatcaaactcattaagttgataacttaaatctgaagaggatctcctgccagtggctctgagaggggaggagagcctct

SEQ ID NO: 40497 - DNA, 336 bp, Mus musculus
  source 1..336: mol_type = other DNA
cagtgaacatggtgatctcactaaagccgacagcgctggtgctgtaaaaggttagagctcaggctgaaactcttgccacagaggccacagcggtagggtttctcaccagtgtgagttcgctggtgctggatcaggttggagctaaccctgatgcactgcgaccaaaggcctctccgcactccatgcacttgtgcggccggagacctactcggtaatgcttaaccaacagctgtaagggcggtcacacccatggctgctttgcaacccacaatccctacacttgaaagctttggggactgcagagagcctgacctacataagtactgctggtccagc

SEQ ID NO: 40498 - DNA, 177 bp, Mus musculus
  source 1..177: mol_type = other DNA
gttggggccccacattctatggcttagatctgtcctccaggatgcctgcaagacagcagccatctgggtcagttcacagacagcttcatatcactaccttaggaaaggtctgtctttcagggaaagtcctgccttagagtcggctggcagtcaaatcgctgccgctgaggcaaaggc

SEQ ID NO: 40499 - DNA, 526 bp, Mus musculus
  source 1..526: mol_type = other DNA
tctgacttttaaactcactttctaacttttaaaactacagggacgggtactgttcaggagtcagtatctacttctggtctgggcacgtcacatagcatcacacctgaggagatgagtggcgctgcaccatctgtacagcagttggctagaatgctgacgcgcaggcgcaaccagctgacgcaaccccagaggctgcttgggacggggcggggcccgcagcagccgttcggcggagcagggcgagaagggggcggagcccgccgcgtgcccggaagcgctcaatccccttggcgcgtgcgaagagctaagagcgcgcggcccaggggtgtctcgttggtagcccacctggcccctccccggccgccgccgtgagctgcgcgaggcaaacgagagcgagtccgtaagggccggtctcgcagccgccatcttggcccgggcctcaggctccgccccgcgtctcgccggtactctgagagggggcgtggccaggctgctcctcggaatagcgccgccgcagttatcttgc

SEQ ID NO: 40500 - DNA, 319 bp, Mus musculus
  source 1..319: mol_type = other DNA
gaaactacttgcagttgacagctactggagagacactgggtgtatcaactgggccaacacaaaacacactccgtgtttggttttctgttaaagaatttgcccaaaatatattgcataaaaattttttaaaaataaatttaaaacaatttttaggatagcatggcatgcgtgacagtcaggctgaggaacatgtatgtcctgctgactgtcagtggaccttcctaatcaaagttcgccccaggacttgatagatcctgattcagctaaataaagctggagctcagtgctcctgaggtaaccttcccccaggggaatccag

SEQ ID NO: 40501 - DNA, 267 bp, Mus musculus
  source 1..267: mol_type = other DNA
tccgccagcgcaccgccatggaggacctgggtgagtgaggagatccccctagcctctcatccccacgggggcctggattcagagactctccccaggcatctcgtcccctctattcgcctaggctgagactagaagactctgctcttcgtggcagaatttctagatccaggggccacttaaaggacagggctagacttcagtgtggccaagtgtcaggaagttgggtgtcaaacataaaagatcattagttggtttgtacttgaggga

SEQ ID NO: 40502 - DNA, 357 bp, Mus musculus
  source 1..357: mol_type = other DNA
gaaatacctgtacatgtgtgtttactgctgcagaattcggaacagctaagaaatggagtcagtccggatctctcaggaggattttattcaaccataaagaaaagtgaaataataacatttggaaaatgagtttaaagactgttgcagaaacaccatatgcaagtcctagatttggaattcaaaatgccataatgaagctcattaagtcacaagctaacttaaaaaatttcaaaaactctattgctaaaagtttgagatctgagtggagtccctatattgctcctagggtccaaagaactcctggggtgtgccccaggtagtgtccttctgtggccaccgtagccaaacaggaaatgt

SEQ ID NO: 40503 - DNA, 136 bp, Mus musculus
  source 1..136: mol_type = other DNA
atcggaatatatatgcattcatgaaaactgcgtttccaggatttgggattagcccagggcctgtgttgggtaagtgctctaccactgagccttgcctagaaagtgggggagggaacacacaactgtctggcaaaag

SEQ ID NO: 40504 - DNA, 466 bp, Mus musculus
  source 1..466: mol_type = other DNA
aaatggggctaacgacacccccagcgcggcgctgagcaggtgactggcaccaggaggagcgttgagcccggcgctgggatctacaggattctgaaaccgcagaggctccagacagcgttctccgaggtttgtcccggggcttggaagccccggcacaggcgtggcgtgggccagagtgggcgcccactcgcggcggcttggctcgggactctggtgacgcctcccgggcattcgcggcgtgagcaggccgcgcgcccacggaatcgggtagacccgggggcgcgggcctggcagggacaccgaacgctgtatgtctccaggccgcgaggaccgggatgtgcgcgggagctgagggtcacccggggccaccgcgccctgccctgcgcgggtaactgagggctggacccagtgcccacgggcgcgggtgggcagcggcgggcggagcctggaggggcggcgtcgcgcg

SEQ ID NO: 40505 - DNA, 310 bp, Mus musculus
  source 1..310: mol_type = other DNA
cttgtaaagcaagttacaagcggtatagtctagatatctggttagaacaaccgcctgatctgcagttgaaagagcgatcctggggcgggccccggcgcgaggcactctgggattctccggcaggcgcagggtctgccttgaactacagttcccagaaggccactggagaagggcttcccccactttcccgggaccgcaattcccggagacttggtttcgcacctcgtgtccagcttttgccggacaggccgtcgcagctggcctgagcagtgacctggcgggccgcgcctgcgccctgccgcgtttcctg

SEQ ID NO: 40506 - DNA, 231 bp, Mus musculus
  source 1..231: mol_type = other DNA
agctggccttgtagcactaatattcttgtaaagcaagttacaagcggtatagtctagatatctggttagaacaaccgcctgatctgcagttgaaagagcgatcctggggcgggccccggcgcgaggcactctgggattctccggcaggcgcagggtctgccttgaactacagttcccagaaggccactggagaagggcttcccccactttcccgggaccgcaattcccgga

SEQ ID NO: 40507 - DNA, 485 bp, Mus musculus
  source 1..485: mol_type = other DNA
agacagacactgaccagtgagtgaatctaagtgtctagacctttcaatgtgactatcaaatgataataagtcaatattcccacatttgggcttatgctaactatgttaatacttatactgaggctttgagacttcaaagtcagtaagaaggtctttggaagtaaaaactggcagagtcctctagtatttgccacagagtaaaatcccaggacattctctgaatctgagtcaggaaattggttgcgaaagtgcctatatagaaggccaagagcacaaagttgtcactttagtccttgcttattccagaatttctcagaagtcataaggcccttgagaaaaaggtggggccccaggtgtcggcccttggactgctaaccccgggacacccccacgcggcacgaaagagtggtgggggtgcgtgtcaacctggcgcgaggcgcacagggaaggaggggcgggtgacaaatccccgcctccgatcctat

SEQ ID NO: 40508 - DNA, 420 bp, Mus musculus
  source 1..420: mol_type = other DNA
gaggctttgagacttcaaagtcagtaagaaggtctttggaagtaaaaactggcagagtcctctagtatttgccacagagtaaaatcccaggacattctctgaatctgagtcaggaaattggttgcgaaagtgcctatatagaaggccaagagcacaaagttgtcactttagtccttgcttattccagaatttctcagaagtcataaggcccttgagaaaaaggtggggccccaggtgtcggcccttggactgctaaccccgggacacccccacgcggcacgaaagagtggtgggggtgcgtgtcaacctggcgcgaggcgcacagggaaggaggggcgggtgacaaatccccgcctccgatcctatgactcagggcggagctccccacggcggccggaagtttctagccggcaaggtgcc

SEQ ID NO: 40509 - DNA, 475 bp, Mus musculus
  source 1..475: mol_type = other DNA
gcgccgtccgtcgtcgtccatacacgactgtgccgcgcatctttacataaacatttgatgttttgctattgtggtatttgtattattaaaaatactgcagtattgcactatcctaaggactatttcggcagtgcaacagatttagcttcattcactgcagtatcggtaaggtaatgtaacactgtcggaagcagtttaccacagccttgaactgtccagcgcggcaccgtgccgcggtagggacgcagtgcggcaacgcagcgttcagcgcgcttcacggtccatcccggcagacaccggatagaatttgccacagaccagctggactttagctaggttcgaaaggaactaggcgagctgcatcaggacccagagcacctgatcgcggcaaagataacagcttggcagccctgcttgcgcaggatacaatgcgcacgcgcagtggcagcctgccgcagcggaagtgggcgtgact

SEQ ID NO: 40510 - DNA, 358 bp, Mus musculus
  source 1..358: mol_type = other DNA
aaaggcagaagggcaggtttggttcccttttccttctgattgctagggcttgcatgacaggcaagtgaggtatatcccatttctagggaaaatgtcttctctatgaaaacttgacagttcctaaattctctaggcccttcagggtctggacttgtcatagctccctaccaggttggattctgagcacttgccagttccttggctccttgattaaatcgttcaggaagaactcactgagacaccaaatagaatttcaacctttaattttgcttagatttggtccaggtgcaaggactcaaactttgagcctcctctgccctggcgcgggactcccctccgggagtgcgcagcacgctcc

SEQ ID NO: 40511 - DNA, 323 bp, Mus musculus
  source 1..323: mol_type = other DNA
tttatgataaagagaattttcttgaccaacttctagtctagcatgaggtaaactcaacactgccagaatttaatgtttttattcaaattacagcagtaactctagaatgttgcaattattgccttaccaaaggcataataattcttacttccaattcttatgaccgcctgtcataaagatataagaagcgtccaggactcgaggctgacccagtctcgcgagaccgaggctgtcacgtgataggcttgggtctgaagccggggcggcgtcaaattccggaagaaaaccgatcccggagtcgctggcctgtggcacctgtgcgc

SEQ ID NO: 40512 - DNA, 319 bp, Mus musculus
  source 1..319: mol_type = other DNA
atcgcggcaaagataacagcttggcagccctgcttgcgcaggatacaatgcgcacgcgcagtggcagcctgccgcagcggaagtgggcgtgactggaggcgagtccgcagtgccattctctgcaggcgcgaggtgcggtgtagacagaggatgccgcgctcccatcggcagccgccacctgcgcctcgcgctccagctgccaacgctgcggaacctaagtccgatggcggacagcgctttcacactcgaccgcttgttttgtgccaaatgcttttagataaggacataatgtttttgactgatgtaaatactaactcta

SEQ ID NO: 40513 - DNA, 240 bp, Mus musculus
  source 1..240: mol_type = other DNA
tctcctaagtccagcaggcaaggtaattagcatccttttctgactggcagccaacctagggagagaatagggattcctagaggactaatttttttcaaggcctacttttaatgatggctcttaaatgggtctgcagtggccgctcgagccactcagcagtccagatcacaggagaagttctctgctgtgtgtctctgatcgtgtgagtatgggtttttcagaaccacaatgtccatttca

SEQ ID NO: 40514 - DNA, 466 bp, Mus musculus
  source 1..466: mol_type = other DNA
catacttttgtatattttaataaacattatatatgtatatatatatgaaaaggaacttcaatttataataaacgaagaatacttatgagctaaaatatcccaatagggtatttttaaaaataattacaaatggctaaattgaggccagatttccaaatctgagagaacctataccatggtgacgatgcacagcaagttcaccaatgggcccttcttcctaaagtagggaaaatcacgttttttaatacatggtccgttatcattagtgagtagacagtcactgtgtcttctcatgcaggacttctacaacaaacagtggctggcaatggtagtaaaggcagaaaagcaaactgggagttttattgttttgttttcacgatttccagcaatctttctcccaaaaggaagaaagcagatgcgactggtttcacttgagtttcggaaccctagaagtcctagttcctgg

SEQ ID NO: 40515 - DNA, 388 bp, Mus musculus
  source 1..388: mol_type = other DNA
gaagacactgaacaaacataaagttatttgtactgtggtaagcaccattactaataaaatcttgaattattcatcaagggttgtatctactgccttgtagtcagtggaagggaattcaggctttgaatcccccggttggattaaagaaaatgaattggacgtgccgctcagctcagctgaaatgcggttctcagagcagacccttcctccagtcagcgtcttaaaggccagctggaataagagacgttaatgaggctggccatgccaagcccagcgttttaaactcagtcaagttgcttcagcaaccttgcatttatcttgcgtctcttaaaagtaagcttaaaaaaaaaattttatcccatctgggtttaagcaagtaaactgaatc

SEQ ID NO: 40516 - DNA, 393 bp, Mus musculus
  source 1..393: mol_type = other DNA
ttttaaatatttatttctatttttaaactatatgttcctaaggagaccagaggctttggcttttggcctttaagaaggcaggaagcactctgctttatgttaacctacattgatactattaaagatgttttctgttggcagatgtgcggataagtacaattaccttcctgtcatttgtttcctaacttgacataaaacaacgtacgagaggtcatctgtgcacccctgcgggcagcgcggcggggcccctcgcctgcctggcgggtgttcgggggcagcgcggggctcgggactgccccagcgcgaggcgctgattggcagagcgggcgccgccgtccaggaaacggctcgggtttcagcggggggcgtgacccgcccgaggaggctgcggcg

SEQ ID NO: 40517 - DNA, 437 bp, Mus musculus
  source 1..437: mol_type = other DNA
gccaagaccaagccgccggtcccaggcttgtggttgtcaccctttgaatttctgacctatgagctgctgttcatatccacagcacagcagaccaagttcacattggccctcgcccatctccatgtccacgtgcgggtgaggctggagaggaggcgcgcagcggccgccggcggagcgtgctgctgggcgcggagcccaggggcggcccagtagccgggaagccgcgcagcgcgccgggagggaggcggcggcgacgacagcagggcatcccccaggcttcccctcctgggtcctgggcgccaggcgcaaacccaggccgcccctgatcggcgttatcaggtgtccgggagcccagagcgggaggctgggactgagccctccccgccgcccccaccccgcgcccgcctcccgcccccgcccgcggcctgcagcgcgcc

SEQ ID NO: 40518 - DNA, 632 bp, Mus musculus
  source 1..632: mol_type = other DNA
ctttgcattcagattatgtaaatgttcagcctgaagagttaaaaattctttttgagtgatatttaaaactccctttaaaagaggaaagtgtccttcgaggttaaccttcaacctcagtttccctatctgtaaagcgggctgagagatcgcgtcagtgacaaggactgctgttgactggacaagtaacctgctggccactaaacactgggttccgagacgcacccctgcaacccaggctggcggccagtggcctgaccggggatcggcggagagccgcgaacccggcaacccccgcgctctcggcccttccccgaggttccccgcgctgagaggcgtggccgctcctcaagcccacagcggcggccatggcctcggtggtggaatcaagacgtcgtgtggtgagtgtcccgccgtccaggtcgcctttaccggcttcagccaggctctcgctacgtcctggcaggcctgccgcgcgggttgaggccgttggtcaccccctccctagggggtagccgcccctcacagaggaggaacggtagcggacggctgcccgcagtcaacatggcgcgggcggcgtcagtgacgtagggcgtccggtccttccagcccgggagcactcgagtggcttcgcg

SEQ ID NO: 40519 - DNA, 465 bp, Mus musculus
  source 1..465: mol_type = other DNA
cagtctacaatgccttctggatgcctccagcattggatgaaggttgtacacaaagtttcctgattgcactttctagacactgcaaaaaggaattcaccatattgtcgactattaaacatctgtgtacgcaaaagctaaggaatattatcttctttgcattcagattatgtaaatgttcagcctgaagagttaaaaattctttttgagtgatatttaaaactccctttaaaagaggaaagtgtccttcgaggttaaccttcaacctcagtttccctatctgtaaagcgggctgagagatcgcgtcagtgacaaggactgctgttgactggacaagtaacctgctggccactaaacactgggttccgagacgcacccctgcaacccaggctggcggccagtggcctgaccggggatcggcggagagccgcgaacccggcaacccccgcgctctcggcccttccccga

SEQ ID NO: 40520 - DNA, 333 bp, Mus musculus
  source 1..333: mol_type = other DNA
tgaagaaaatgtttctttcttcaggaaggtgtggggattcaggggaccctcccctgtatttatttatctagcttgagacatggtttcaaggtagaccaagctgcctttgaactcacagagatctatattaaaggcatatgccaccagtgtttcagacttattgacaagtttcaaataacgcagagagtcagggaagaacaaggactcagacctatctgaggtttgacggggtgagagcccaccctgagggcctctcccggaccgggtacgggcagttcccgtcacttgacaggcagatgggcagcctcctggctggagcacagacgtgtgttc

SEQ ID NO: 40521 - DNA, 421 bp, Mus musculus
  source 1..421: mol_type = other DNA
aaacccttcttaactccggttccagaggaggtgtgcacgtctgcatacatttcgtccacagtgtgcacgcaaataaaggatgtatatacacacttgtacccgcagatgcacacttgtgcatgcgtatctatgtacagtgcacacacacacaattacatggaatgatatgtatacatgtatctttgaaaccacattgcatataattatctttactatggtacagtcaaggaaccctgttttgtttgttgtatcctccccaaggccagaggagccaattaggatcagagatctaaagtcctaagactcttgctaacgccgccgcgacctccgggccacaggtgtcgctgtgtgctcacgcgccagccggggagctgcgttgctcctggagccggcgctcgagcccagccgggggtaacttccg

SEQ ID NO: 40522 - DNA, 483 bp, Mus musculus
  source 1..483: mol_type = other DNA
gaaatgctttttttttttttttttttaaatacagaaaatttctgtggcagcatttctataaaatatagcaatgttttctttgacactccttttagaccctaaatgcttccgaggttgcaacagctaaagaagcagcagctgtgcaaagtttactgaaagtttctgtggctaagcgtctgtccggaagacaagcaggcaggcagaggattcaggtagtgtcttgtctccagctagcaggcaggagccaaccccgccccagctcagtaacaagttgttgtgactcaaaaactcctggaagaagtgctccccggcaccctagcctgagggtgcacttcggcgggggcccctgggtgcgtgtgggcgcgccgggcagcacattcctggccggggaggagagcgcggcgggcgcccctgcgagcagctggctgtgctggccctgagcgctcggagctgggggaggagcctggcccggtcgccggcgct

SEQ ID NO: 40523 - DNA, 295 bp, Mus musculus
  source 1..295: mol_type = other DNA
actgctgagactttccgagctgctccccagcaggggagaaaattcttctggtggccaaagaccagaatccagccccacctgaaggtggcatccttggaagcctggccttggtgggctgcaagcctaggaacagccttcctacagtctggggtctgtgtgtgtgtgtgtgtgagagagagagagagagactgagtagtatatatttactttgagtagaggggagggtcttcgctccccctcccagcagtttccggaggaaggccgcttggtggtggtgacatcatcaagtcccaac

SEQ ID NO: 40524 - DNA, 268 bp, Mus musculus
  source 1..268: mol_type = other DNA
agctcagctctggagcgatccatggcgcctccctgggacactttcccagtgtggccaatagcttgtatttcaaacaccttaattcaaatcctgtgttaagcctctcagaagtaacagggcagacctgtacttcagagctttcgcactatcacgccatcatcgtggcactgggagaaaaaaatattaatgtagaattaattaaggctaattttggacatggaattcaaattacttttgttgcgaaaatattttggcagccaactgtttt

SEQ ID NO: 40525 - DNA, 497 bp, Mus musculus
  source 1..497: mol_type = other DNA
gcagcactctgcccaccaccctggggtgtgtacagcacatactttaattctctcatcttccaatacaagatttatgtgttctgtgttggccaggcacagagatctcctcatgtgagagctcaaaataaaacatcttgttttgggacagcgctgggactgcaggcgcgggctgggcggggatggcatgcactcgagacgctgccttcccacggcggcgtcaagttcacagccacagtcccccaagctgggcaccggtccattgcagctgtggccggggtcgatgtgaccgccctccgcactgcctgggaactttccaggcgattgcgcagttaaggtcttcaatctctgaggaaaaacagccggagggtggagtcgcggcccgccccgcctcgtccccgcaggcagtccccgatcggcccccctcccgggagcggtgcccgtccccctggcgcttcgtcaccgccgctaggccaatgggcttaaccgtacggccgcgc

SEQ ID NO: 40526 - DNA, 409 bp, Mus musculus
  source 1..409: mol_type = other DNA
tgtcatgagaaaggttgataaaacactctcaagtgagagggcatgatccccagagagcctcagtgtgtgtcactcaccaggtttcagctgaaatatttccacttattaaaatgtataaggattgtattttgtaaagggctagctccccttatgaaacacataggctgaatattttaaaatatctccttgaaagagttttgagcaatccttttaattctggtgcacaaccagtgaagcaaattatctgcaaagagatgcagctctaggtgatgacatcagagaacctctagttccaagccccaggatgcagcgcggcatggggaacccagcgccccgcgcgcggccgcgagccaccaccctgtttgcccgccacgccgccgggcgtgcgcggagcctgtcggggtagagg

SEQ ID NO: 40527 - DNA, 281 bp, Mus musculus
  source 1..281: mol_type = other DNA
gtcaaaggctgcttttccatagcctctgagtgtgtgtgtgtgtgtgcgcgcgcgagtgtgcacagagaccatcatgagataggacctctcattgaacctagtctcctcagagctggatcagtccttacgacttttataagaactattaacccaaacagtttgggagtttacaaatgccctattttcatacatggtcctgtatagcattgcttgacagcaattgctccgttggaattttcgataatttccaaatttgaataacccacttgtgcaatgcgcaa

SEQ ID NO: 40528 - DNA, 179 bp, Mus musculus
  source 1..179: mol_type = other DNA
atactggcctgggctggacagtaggtccagggtcactgtcaaatacctgagactgtaaccagggacccaggaaaactgccttatttccctgtaagggccaacgccttgtaccagaggctgggggctgaaaggtgcttccggcttacagctccattcctcacactgtgggtgggaaagct

SEQ ID NO: 40529 - DNA, 86 bp, Mus musculus
  source 1..86: mol_type = other DNA
gccagaaaacagtcaattctgctgagctggctgctgtcccaaagagtttgggaacattttcataccgtgtgcttgccgaggactgt

SEQ ID NO: 40530 - DNA, 470 bp, Mus musculus
  source 1..470: mol_type = other DNA
gaaaatatctaataaaaatatatacttaaaagaagtagaatgataattattatcctagagctaactacatgcatatgaatgtatcattcctggtgacagtttctttcacagtgcaaggaaagctttatatcaataattagagtgtgcctgacataggaactgccattcactttaaggaagtcaggaggatccagttctacaggcattgcatgcatgtgacacccatacaaacatgcatatacacaaaatttaaaaattaataatagaaagatatgttaagaacagaagtagctcttctataataaagctctaaaatcattaaaaaaagaacagaagtaaatattcataatttatttaaccaaaaatatggaaagaaaatctatgtggtattgtgaaaataacaaggcagctgtacagggcagctccaagggtcatctaacccttaggtgcagactgtgcttttaactgtg

SEQ ID NO: 40531 - DNA, 249 bp, Mus musculus
  source 1..249: mol_type = other DNA
gagacatatctggccagcagtcatgcctggcacatagttgcactcttgtgattgggtaagaagactccaggggaattattgtccagatttgtagaatgccgtccatatcctagaaggagctctaaaaagagcctttctagtctcttctcatggtgccatggatacatgctccggcaataggttaggacagtttaatgggagctcaagacacagttaaaagcacagtctgcacctaagggttagatgacc

SEQ ID NO: 40532 - DNA, 225 bp, Mus musculus
  source 1..225: mol_type = other DNA
cttcccttgataaagcttataaacccgtggtggctagtgtttgtcgacttgacacaagctacagtcacctgggaactgtatccatctgattggcctgtaaagaaagtagagttagtacacattattcctttatcttcatggaagttcaattacataagtgtctggtagcttctcttcgaagatggcctagaaggttctccaaggcaaacgcattggctgtgccct

SEQ ID NO: 40533 - DNA, 401 bp, Mus musculus
  source 1..401: mol_type = other DNA
tacttttatcttaaacaaaattcctcaagtaagatacagtatgaactgtgattaattcattaggagagtgagcaatgaaaacttgctcagtgaatgaataaataagtgaatgaatgaatgaatgagtgaatggacagtccctttcacacttctatctctgaggtacaagctcagtgcctgagggaaggaatccttgcagggttgcagggactgtaggcatctgagggcccagctgggtccaagagttgagaaactgctacgtagctgctgagccctgtgcagaagactgagcccagtgccaggaactgctggccaggttgcagctcctcagctgtggagttctcaccagcaccacccctgggccaggaagcttacaaaactcggagaattataagaagcct

SEQ ID NO: 40534 - DNA, 521 bp, Mus musculus
  source 1..521: mol_type = other DNA
gaaaagttttgaactctcatatcagatatggttttagattattttaggttatatgcataactttaaaattatacacagagaagagagagaattctcttaaccacatatatcttttcgtgacaagtgtaacatcagactcaaaacttggccctctgaaaaaggaactttctcatcagagaaataatctgttcctgagaagaaatctgcatctgaacaaagcctcagggtcaccttcgattaaaattagtaagtcaatacaaatttgcctaaaataggtttcctgttcaaccatgaagggtgagcctcagtcaacagcttcatgttgtttcactgttcagttgaaacactgccaatcacgaatggctttaaatgtaaggatgtttaaaaaccttgatccgccactgcctttttaaataatcgaaaggcaactagcttttgattagcagaagactttaaatgatcccaaatagtatttatagttcttggaacaagaaatgtgcttagacggggctgtgacattc

SEQ ID NO: 40535 - DNA, 537 bp, Mus musculus
  source 1..537: mol_type = other DNA
agatgtttaaattatctacacaacccacttcaggaagataatgggggtgggtatggggaacgacagccgatacctagctttctttccaatgagtataaagtttcaagtcccacttgtcaccacagaaagtttgaagaacacgctccaccgggttcctgaggctcggaagccgggtcttaggccactcagcattattctgcaatgctaagcgccgcgctccactctacagcccacggaggtgacctgagcagtgaaacaacgcgatcagccgtggtcgcactgcttcaaaagcatggcgcaggaagggtccccggagtcctcttccgaggacctcggattgctttaccaccctcagggtgccgacaccgcgttcccgcgcgcagagcactgcgcatgcgcgcggcacctgccccaggagcggaggaattccgcgcacgagccaacccctggctcttttccgcggaacacgcatgcgcacgtgtaaccggaagttgtgctgaaccttcacctcccctgggcactgaaggaaacgcaagc

SEQ ID NO: 40536 - DNA, 464 bp, Mus musculus
  source 1..464: mol_type = other DNA
gctatgtgaacatatatacttgaagttaaacacacagatctaaatattttaagctaggatatgcagtttatcttcctgcctaggttatatcaccagagttgagtgctattgcgcatggctctgcaaaggctgacatagtcactgcttggctcccttaggtttctcccagagcagcaaggaataacctgttgcattggccttttatcttttcatcttaaccataaagtatgatatgatgccaattcttacatgaccccatatttgtgtagctaaaatacagagtctagccagtcttctattaatggctttttagagaaatgaacgttctaagacatttttaaaactccaattttactttcgattaacagtcaaattctaaatttctccagaggctaaaagggagaattaggaattgcacttgttaattcagaactctgtgaaagaacgctgagatctagagttga

SEQ ID NO: 40537 - DNA, 327 bp, Mus musculus
  source 1..327: mol_type = other DNA
gtagttcacttcagcacgcactgattttgttcttgagtgatgactacagtttgaacacatcttttatgaataaaaagtaccataaaagcttatttttcttataccagagtttgacacagtctcctgtagcacaggcttgcctcagggatcataccataatccgagttttcctggcagtcaaagccttcctttaaaggtttggacacctggcctagggtactagggtcagggacagctgacacatgttattcacaaggtccagagggccacctgagtagcagcctggccagagggcgcggcgtggtgctggggcactgcgcctgcgca

SEQ ID NO: 40538 - DNA, 326 bp, Mus musculus
  source 1..326: mol_type = other DNA
agacaagaggctggcctcagaccactcagaatctaagagattttagtcattaaaaatcagaggcaggcagatttctgagttcgaggccagcctgagggtctgtggagacccagccccaggctcagcccacaggcctcctgagacggtcgcttcgaccgaccccccacagctggagcgcagagaccgccatcctcgcttcgggcagggtggccctggcaaggctttccacttgcgcccctcggcctggcaagctcgggccctgcccagagacatatctctccttgctccctgcagcacgctcacgcgagacttgggcaaggcgtggg

SEQ ID NO: 40539 - DNA, 446 bp, Mus musculus
  source 1..446: mol_type = other DNA
tctgtccggttctgaccagcacacaaaggagtcattaaagaggccatgtggttactggcagctaccactgactatacttaggatctacagttacgacagtcgatcgatgatgaatcgatccaccctatccaggatacaccggggttgctggggtcgactttggcctgcgatcgccacctgtcaaagccggagacagctccccaccctgagctccgagctgcggcccgacggcgccgactcgctcgcgagcctccgggcggcgcacccagtcacttccacgctggcagcccacggggcacgcaggaccctccgctgtggccaaggcgaaagcggtgttagccggctatgccgtcgccgccaccgccaccgcctcagcgtcgcagctgcccacgccttgcccaagtctcgcgtgagcgtgctgcagggagcaaggagagatatgtctc

SEQ ID NO: 40540 - DNA, 364 bp, Mus musculus
  source 1..364: mol_type = other DNA
agtacaggaccagagagctggttgtcttctcctgtgtagtctttgaaaagattcccaggagtttccagaccaagaagacttgtagggagagtgacaagtcctcctgaaatccctgtggacgttccttaggagagttccaccttcaggttgtggaacctggaaacagtttgtggtttttttgctcagagcacacgttcacagtcctgtgtgccaagactataaggagtccccacagagttccaagcacctctgagtgccttcaggccctgggagagctcagagccagcctgtgaactgtttctgttgcaacacagatgtatttcttttatttggtagtaaatagagtagatgtgtgtacatcaaa

SEQ ID NO: 40541 - DNA, 376 bp, Mus musculus
  source 1..376: mol_type = other DNA
ttctctcacagaaccaaaacaaccttttgattctcatattttttagaggattctagaaacagaaagtcaaactgagcctgcaacttccatgataatgcagaggcctatgatgaacattcctaagagattctggctgatcgttaaagattggttctagttctaaaagcaaatagtacctttgactagaaattattcttcagtatgactagtctggattaaggctagaaagaaaatattaatttatatctatagtagttatcaaccaaaatgaaattctgtgtctgagagaagctagataaaatctcttttctgccttcttcaggcaagcagctccagggaggaacgccttcatgctccgcagctccagagattccct

SEQ ID NO: 40542 - DNA, 244 bp, Mus musculus
  source 1..244: mol_type = other DNA
tacctgaggggaggctgaggtccaccaggactacttctgatgaccatggacacgaagctctggagactcagtgtccagactgcctgcagatagatgaggggagatctcaggagatctctggccataatgcgacagaactcctagatgctgggccactgggagccagccattctgcaagggagccggtagggctcctttgtgtgtgtgtgtgtgtgagagagagagagagagacttctcagaatt

SEQ ID NO: 40543 - DNA, 425 bp, Mus musculus
  source 1..425: mol_type = other DNA
tatattctccgctagatttgacctgtgaattctgactctgagatgcagggcacccgaggcagtcactgccaggacctgactttagcgattcattgagtggctatgcatttaacctgtgagtcagcgagtctcttgttttaaaccggccactggcagggttctccagagaagcctggattcctggaagagacaaatgccctctcctagcaggggttcccaggcccttaggccctgctcccagggaacttcctccagggaatccgggattcctccacggtctggaccgctttaccttagccagtcttaatcagatttgttctgcaaaaggaaggctggtgagtcttctagtggccttcaacacctgggagggtgggtcggccggcgcctagcctctcctgggcgcgcccctgcccgccccactccgg

SEQ ID NO: 40544 - DNA, 386 bp, Mus musculus
  source 1..386: mol_type = other DNA
agtctaccgactgggagggcagtctcactgtttatataagaaccctctgattgtgacctctgactcagttgggcagacccaagactgtggcttctatcctattccccagagtctggggtttggtgctccaaaggctgtcccgaacaagtcttaagagtttaaggtgtcatattttatgttaacgaagcagtcccagtaggccactgcggcagtggtactctaggcagcctttgtagaatgcagaggtcagtggcctgactaactgtttctggtagccgggtcactgccacacacaccaggtttcggttttgtcttgtcggagtcaccgcaatacacaaactagggggcggggaccaaacccaccgctcagcagggcgcgcacgcct

SEQ ID NO: 40545 - DNA, 318 bp, Mus musculus
  source 1..318: mol_type = other DNA
gggttctagaaaccccacatctagcgtggactgacagtggctctcaaactggagtgtgaggtagtgaatcacattctcttcatattttctgatttataacgagcgttatagacaaaaatgatacctaagcaccttctgattgtgttaagtctatactgcgtagctgtcattagttaataacatgcgttttacagctgcagagatgatactagaagcatcagtaatagatatgatgttgctcccaacaggctctttcaggaaaggttttggaaggtccctccgcggcgggggcgggacagacacgtcgtcttaaacgac

SEQ ID NO: 40546 - DNA, 372 bp, Mus musculus
  source 1..372: mol_type = other DNA
ttcacgctgggaaaggaacccagagagtcaatttctgatgttaatgatagaatctgtgactgagaagccctaagcagctctctgggcaggcgaaagccccagggctttataaactgtaaatgcacagaggctttaaaatttttacgtaaatgtgcccgaagccaccgtgcatcatggcgaaggtctggcctctgtggcatcacttcagtaatcctcctggaaagattttccagcatgccacggtgacccggcgaaccgggagcgcgcattggcgcgcgagggtccctctagtcagcgctccctcctccggctgcccaggatagtctcgtggaggctgcaagcgctgcacgtggaaggggtctggccagctca

SEQ ID NO: 40547 - DNA, 305 bp, Mus musculus
  source 1..305: mol_type = other DNA
tgtgtttttcatataatgttagaacagaaggtagttagcgggagtctctctctctctctgacctcaaactctgagagcttcaggatggtgccatctaacacagaacctcactactgaggctaggatgtctccaacacttaaaatttcatttatttaattagtatacgtgtgtgtgcatgcactgggaatagaattaaagttaagttttgtgccaaacactggggattacaggcggcccgcccgccgcggattacatttcccaggcaaccccgcgcgggaggcgtggctgcgggataaaagcagcg

SEQ ID NO: 40548 - DNA, 358 bp, Mus musculus
  source 1..358: mol_type = other DNA
tttcagagccatgtggagttccaggcaagtctgccggacagccttaggccagacgtgaaagccaggcatttgcctttctctcctggaaccatgactattgcataatagttgttcagttagaggccgagggatcacacatatgcgtcatgcttgggcagaggggctgcccagagtccccgggggctctgcttgcgcctctgtgggactgggccggggctggccacagagctggtttccagtaccagggcccaaggtcatggaaggagcccttcctgagccctgccttgatgaacatggccttgtgccttccctaggggaggagccttgccttcctagaacagaagggcgggacttttca

SEQ ID NO: 40549 - DNA, 670 bp, Mus musculus
  source 1..670: mol_type = other DNA
gcccacgaggcctggtgcgggttcactggacacccggccacactgacggaggcgcgccgtggacccccccccctctccccgcccaccggcggctgcgcgcactgcacctcgtagcggcacgccgggcgccccggccgcgacgccgcccgcacagcgccaccgagttcacgcagccgcggtcgagctgcccggcggcagcagtgggcattggcggcctggcctccccgggagtcgctcggtacaaagcgctcggcgccggccggagagcgtgcgcacggcggacgcgggcgtgcagcccggacgacttggcgagcgcttgcagtgacggcccgcgtccggcgcgcacagtaagcgacccggccgggcaaccgcgccagggggctggtccggagtggggtcggtgcgagctccccggcggcggcggcggcgggggaagttgggctcgcgtgcgctgcgctcgcggcgccgactcttgctcgccctggtgcaggcgtgagacttgtcagcgcgctggcgggggacgagcaaacctagcgctgccgaaaagtctgcgctccgccgacccagcggacggccgcggagacggctgcgtcccgagcagcctcctcctttgaggctcaacttgagccctggcttgtggcagcagcgaaggcgctgagccccgaagttc

SEQ ID NO: 40550 - DNA, 393 bp, Mus musculus
  source 1..393: mol_type = other DNA
tgtttgatactaggattgcaacattggattaaaaccaattaaatgttcctcgaagcaacagaaaaagtttctagagtcttaaaaaaaactcttaaaaatctttttggataaggttaataacattcatttatgtattttggatgtggcatctgaagtacaaattcctcaaattgcccacgaggcctggtgcgggttcactggacacccggccacactgacggaggcgcgccgtggacccccccccctctccccgcccaccggcggctgcgcgcactgcacctcgtagcggcacgccgggcgccccggccgcgacgccgcccgcacagcgccaccgagttcacgcagccgcggtcgagctgcccggcggcagcagtgggcattggcggcctggcc

SEQ ID NO: 40551 - DNA, 429 bp, Mus musculus
  source 1..429: mol_type = other DNA
ttagcttatgcctttctgaaaagaataggtccagtgtggtcacaaactgaaatatttcagcaatagccatgaaatctaatcacaaactcaaaaagttaattgttcatttatgtttgatactaggattgcaacattggattaaaaccaattaaatgttcctcgaagcaacagaaaaagtttctagagtcttaaaaaaaactcttaaaaatctttttggataaggttaataacattcatttatgtattttggatgtggcatctgaagtacaaattcctcaaattgcccacgaggcctggtgcgggttcactggacacccggccacactgacggaggcgcgccgtggacccccccccctctccccgcccaccggcggctgcgcgcactgcacctcgtagcggcacgccgggcgccccggccgcgacgccgcc

SEQ ID NO: 40552 - DNA, 481 bp, Mus musculus
  source 1..481: mol_type = other DNA
ttctgtcttcgaagtcaacagaaacgtagtcctggaaacaagttcttgttggaaggcagcttgctaggggcctctgagatccttgccttagacattgaaccatgtttatctgagtatttcatggctcagacaagatctgacacctaagatcttttgcattgtattgcagaactactggctgtagtcagaccattaggcataagatatctcaggttcaatcagacttgaagaacaagtatctttttattttgagcaaactagagtgaacaaacaacctctgaggccccctagtatttgtactagttcattttattctagccacaaatgaaattagtcttttggtagcaatgcaatgaggccggccgccctatccactttccagatccaaagtgcagtattttgaacgatgacttagaaggctatcttggcttctctagccagcattgcacacttactagagaggccaggtccgcgcctcccc

SEQ ID NO: 40553 - DNA, 285 bp, Mus musculus
  source 1..285: mol_type = other DNA
ttaagatttatttatttattatatgcaagtacactgtgcagtcagtgctcttaacctcagctaggaatactgaagtcttagcaagctgcagaagaaatagttcccttttttttttttatttgaattgtttttgagtccagaatccaccaggtggggatgtctgttcaagttgaaattacatcatgctgttccctccttcaactgtacagacaggccggtgtctgaaccaaaactgacccaggatgctcagcggcggggcgtccggaaggctgtgcaccctccgcg

SEQ ID NO: 40554 - DNA, 485 bp, Mus musculus
  source 1..485: mol_type = other DNA
agctggagttactgctgggagcagaactttgcttctccgatactatctttttaaaaattacatttatttattttgtgtgtagctgtcaggcttggcaactgctaacacattacttttaaagcagtttacattttgaaaaagtttgaagtcactccggaaggccagcctgagccccagaatgacagcctgggtcaaattattgaaattttaaaaactgttttaaaccgccacagatgcgtgactcacgcttgattcaaagcgctggcgactctgcagcaacggccggcggccaggggaagaaggctcccacctcccaagtgcatcctgcacccgggaggacgcgtcgcgggaccgcgcgcgccgtagcctcacaatcaggacgcacgctgctgacgtcacggccgcggcccgctcctgcgccgggaaagaggcggtcgcctattggctgcgcctcctgaggcctcgggaccaatcacaggacggtg

SEQ ID NO: 40555 - DNA, 515 bp, Mus musculus
  source 1..515: mol_type = other DNA
ttctaagcaaggtggtttcaaaaccagccagctcttttgtctgtgcaatgaccagccaaatcgggagcggagttccagctgcccatggccacctttgctttaggcaaccggaggccagtttatggcctactaagaggtgggaatacccacacacagcgccagccgctgacgaaggcggccgggcggccacctcatcctccgggttgtccccgcgctgggaagcccaagatggacgcgcggccgcggacaaccccgggcctgcgatgcgctatcccgcaacgctgccgcccggaggctcggcagcctgctccccgcgacgccccgtcaggccgcggtcgacccgcgaggggcctgcggcgcggcgcccccaacccaggcccggttacctggcggccgcggatcctcctcctccccgtctgacgcgcggcgcccggcggccgcggcggcggcggcgactcccgcacggccagcggcgacgagccgagcccggcccctctccgcctccctcggcgccg

SEQ ID NO: 40556 - DNA, 548 bp, Mus musculus
  source 1..548: mol_type = other DNA
gcctgggacggcacccgtggcctgcgcggggccctggaggaagtatcgagccggggctaccccggggaccgtgccgaggcccgctagagctcgcgtctccccacgtggcgtgccccacgtggaaggggaggagaagggagggtgaagtcaccccaccggctgcgggacccctgcgcgtccccagagtctcaagggaggcgcggggctgggccggggagtgtctgccttgcccggccccctcggctgcccgcagcgcagctgcttcattggtttgcaaagagagaccccgccgcgaggggaccctcacctcgcctcccgcctcgctcctgcgcagccggagggcaccggagcagcggcccgcgccgcttccgtccttgcgctttcctcctccttcccgggaggagaaaacaaataaaaatagccgggaggcgctcggcttccaggaccttccctccccggatccaagttcggggggtgagagaggcgcgggccagggacccccaacgcagcccccgccaggccgcggggctggcaagaaggcgcgcggc

SEQ ID NO: 40557 - DNA, 400 bp, Mus musculus
  source 1..400: mol_type = other DNA
catagatatgcccaaatgttttctcctgtgttctatgcaggcaggtgagtgtctatgcaggcaggtgatgtctatgcaggcaggtgagtgtctatgcaggcaggtgagtgtctatgcaggcaggtgagtgtctatgcaggcaggtgagtgtctatgcaggcaggtgagtgtctgtctatgcaggcaggtgagtgtctatgcaggcaggtgagtgtctatgcaggcaggtgagtgtctatgcaggcaggtgagtgtctatgcaggcaggtgagtgtctatgcaggcaggtgagtcagcagcattgctgatagcagtactcaggttagttttctgaaaactaagagtttgaaagaattctgcacgtgctttggggcttagaatgctctggccattgtgacat

SEQ ID NO: 40558 - DNA, 429 bp, Mus musculus
  source 1..429: mol_type = other DNA
gagcactttctgctcttaggagactggtttctgcgggcactgcatgcacacacgcagaaaacaaaaccttttacctcaaatatatatgttttatgaggaaagccctgggttccatcctcgggcagaaagaaaccccagccctcgggagctggaggcagagtgtcaagttcatcaccgagttcgaaaccagccagggctgcatgagcgctgcctagaaaccgattaaacagactgagatctgagggtgctgagacccacggaggtccccgcgcgtgtgcaactcggagaagccccaagagagcggccgcctgcgagggccttgatgccaggcgtgcggcagctcctgcccggaccgcgaaggaggagccagagccggaggacgggctggacctttgggtgaatctcgcgagatttcatcgcgctacctcg

SEQ ID NO: 40559 - DNA, 493 bp, Mus musculus
  source 1..493: mol_type = other DNA
ccatactaatacctactcagaaataagtactatcaatgtcttggtgtgtattttctcatatatttaaacataaagccaaactacttatgtaagtgttcatgcatgttttacttaacatgtttgattagataaccatgtaattcggttatttgtcaagatgttaatggtttttaaaaacctacatcatagtttacttaaccagcctctcactggatacttatgttgtttccagttattggaaattatagacatgaccaagaaagtctttgtctgtgttgagacagggtttcactattccaggtggcctgagttcacctgcctgtacctcccaagtgctgggattaaaaaggtgtatggaatgaaatttttatagctatttcttattcattttgaaaaggaaataattatttatttgcttccttactcatttaccagaacacaccatgtgtctctggctagccactgtctggcatagactcagtgacagagggct

SEQ ID NO: 40560 - DNA, 200 bp, Mus musculus
  source 1..200: mol_type = other DNA
ggcgacacagagaaacttcccagattggcagtaaatacggtctatccgggaaggcccgctggcccggggctcccagcggccgctgaagacactgcgcctgcgcgagtcccgcccccgtccttccggactctctctaagccgactcgggggagacagtaagcacaaggtctccgcggatccggcgcgaccgcgttccttcc

SEQ ID NO: 40561 - DNA, 571 bp, Mus musculus
  source 1..571: mol_type = other DNA
atttttgagaaaaaggagaaccaaggagtttattgtcagaaagttaatatttcccctacttaatgatttcattgtcaataatatttacaataaacctgaggggtagacctgatttatctgatacaggttttaacctttagggcatttccaaaaattcggcttcttttgaaacagatctgaaacgttggacaagttcttttcaaaaaattctttttaacgacgccgtggacctgaagcggatcggcggatcttccggcgtgcgcggactccaccagtgagcccgaggttggcagctgcaccgggatcccgccccgcggtgtcagggatcgccgtgtctcaagtcctggcccggacacctacctcgcgggctaagaggcaggacaagataaccgagagcggcctctcacccggctagcgcagacccgaggatccgaggccactgacccacatctggctgtgctcgcacaggggcgtccaggcgccggcggaaggaacgcggtcgcgccggatccgcggagaccttgtgcttactgtctcccccgagtcggcttagagagagtccggaaggacg

SEQ ID NO: 40562 - DNA, 328 bp, Mus musculus
  source 1..328: mol_type = other DNA
cctccttattaataagggtcactgagcagtggaaggctggccctgtaggcttccggtggcacagttttctctgtatagccctggctgtcctggaactcactttgtagaccaggctggccttttcccctgttaatctctagtaattagagatagaagaggaagacatataaagaatatgtccttggcgtagatcttacctttccctaggcaagctatctttgtctagattaaaagttatcttttacacctaggaatctcaaagtagaaatgggcctttacactcataaatgctctttgtcatgggattaggtgaccacgtgactgatta

SEQ ID NO: 40563 - DNA, 480 bp, Mus musculus
  source 1..480: mol_type = other DNA
gagctggagacaggatcacctctggggttctgctagccggtttgcctagcctagttcactagagctctaggtcagtgggacaccctgtcttgaaaaccagcctgcttttattatatgtagaggcactgtcccctctgggttccacacaaatgtggcacacttgcatgtgcacctgtgtgacacctgcacacgtgtgcacaaacatgagaaacttttgttatgtatcttatgctgggcggaagcacatgaattatatattcgagggttcgagacctggcccggctagctcggtctctgctcgcaccccaggccctagcccgccgcttactgtggggctccatggtcagctgctcccgggggccctcgggcccagccctggcggcgccgccctcctaacgcctgtcttcgtctggcgtcgctcgggttgccctgacaaccggggatgggcaggcgagcgggcgggcggggcccggcggacgg

SEQ ID NO: 40564 - DNA, 634 bp, Mus musculus
  source 1..634: mol_type = other DNA
ccgtagtctcagtagacccttggccacgagtcctccaggaggagctgagagcacccatactcggagtcttagggtcatcctagccttgacctgggacaacatcccggtatagggtaagtccggaccatgacttggggcaacatcctgaagcaatagcccttcactctggcctccagcaggaacagggtctatctcacccgggcatctccgggttcatccggaccctgacctggacggacgccagatgcaggggtaaccctgactctagcttggggttacagaccgagtcatccggctgatctcaggccggagctccggttctccttccggagctgggggcgccctcgccctcagctgtgcctggtcgggcggggccgcaacaggtgcgcggcctccctgcttccccgccgcctgccctgccgttacctgcagcggcggccgccgaggcctcccagagcctgggcgggagcttcccgagcccggccgacgttcgcgtggtccctgacagagcgttcccgagctcggggcgcggctctgctgaagccgccgcgctcccgggtcgcgacccccctgcgccactcccgcccgtccgccgggccccgcccgcccgctcgcctgcccatccccggttgtc

SEQ ID NO: 40565 - DNA, 435 bp, Mus musculus
  source 1..435: mol_type = other DNA
ggttgaaccagacagggtgtagccccttgttggcctcaatactccggctgcaatttgcaggtctagataactgaaattggaacgtccagccacaggctgcctggctgtgcacccgtcccgccggttcccagctagccagcagctagcagcccagctggctggaccccggcgccgcgtgtgctcttggctgccggcgccccgggccccgcggccacatcatcctgaggctgggaagtgtgcgttctcgcgcctttgcgccacacagctggtctacgcggcggctcgcacaaggggtctgagggtatcctgcatccagccacccccgggagtggataggacccaggctgtcggggaccccggagcggtctctaggacccgcgggacgccgcaggaaggcgggtgagaacggcgactgctggccgcggatccattgcc

SEQ ID NO: 40566 - DNA, 536 bp, Mus musculus
  source 1..536: mol_type = other DNA
aataccttggtattactgagtcttaggatttcatctgtaacattggaacataaggtttataaataacatatgtgaagccgtgataaatactcattaagtagtaattgccattatcatggcagggaaatggatgtctggccatttgctgcccagagcataaatctcccttgtaaaacagatatgtaattttcagtccacgggctgagcatgggataacagtttggacaggcagcctctggctaaagcgtccctaacagagggccctttgcaacggaatctgggaagccgcaggagctgcctggcttctgtttgcaaaggagtcttctaccaacagagaaaataaacagctaataagtctcgtctctctctctctctgcaagcacacacagacacactcatgtacacaaatatgtgtgcacaattttgaaaggaccattgataattttgaggtattcctgacaaagtttttggttttttctgggataaaacccaaatgcaagagagttttgtgtcactctcaaaaaacagtatatata

SEQ ID NO: 40567 - DNA, 228 bp, Mus musculus
  source 1..228: mol_type = other DNA
gaggtggtcaggaacacagcaatctctgtggttggcccgaccccccccttacaagttctaagaagttcccatgttagggaccacagtggctgtctgtctgtctgtctgtctgtctggttgaaccagacagggtgtagccccttgttggcctcaatactccggctgcaatttgcaggtctagataactgaaattggaacgtccagccacaggctgcctggctgtgcacc

SEQ ID NO: 40568 - DNA, 271 bp, Mus musculus
  source 1..271: mol_type = other DNA
attgatgttcatttatacattgatgttcatatatacaagctacttctataatagtgacagagctgacaaagtgtgccacccatgctcaaggctgtcattgtagctgtcagaaaaattatcagttggcaacaaaggccagttaccattgtcactaatgattggggcacctgggactcaagtgtataggttacagtcttttaaagtgacctctccacttctgatgagccaacaaagcaactgatgtgacatcagggtcactcaaggaccctgt

SEQ ID NO: 40569 - DNA, 428 bp, Mus musculus
  source 1..428: mol_type = other DNA
gatttttaaattacacttataggtttcccagtataggaaaagcataatatccatctgcaattctaggcctctagttgagtcttgaactaacactgtcacatataagtcgcaagataatgttcttcatattttagggtcaaagatagtttatttgattgtataaaagtcaaccataatagctattacaggagaaggaatgtcatattgctgaagttgagctagactagttttgaaaattagcaatatatatttagccctaagacatttaaaaatattttttaattttttctaaaattatgtgtatggtgtccacagacttcagaagaggatggtgaataccctggatctaaggttatcgatgttccctacaggaagcctttaaacaattctcttgaaactcatcgtacttgtcaaatgaatcacaacct

SEQ ID NO: 40570 - DNA, 376 bp, Mus musculus
  source 1..376: mol_type = other DNA
taggagctgcttgttctaagctggaagcctcaaagttgctgcaaactaggagcctcattgtgcttgttagaaacacctcaatgcgctcagaccctggcaaaatgggtgcccactttggtcagaactggggtttccgcacttcacaccagtgagtaccgcgtgcacgcctgtatggtacagagtgcagacagtgcagggtgaggaccatacaacggttcctgcagcatgcagggcgtccatgggctccgggaagcagcctgggtccctcgagggacccggcgggccgagccccagggcacgcgcgcctgggcgggctacagccggccgccgtcccgcctctcgccggcgctccccggcccgcgacgctccgcccgcc

SEQ ID NO: 40571 - DNA, 244 bp, Mus musculus
  source 1..244: mol_type = other DNA
gatccacagcttatgattcagcatctcgggggatatacactgtggttcggcacccaaggtagcccctgtaataagaacaatttctatttttgaacagagattgatctgcatctgagcccttggccactggagctgatcaattgatttggaaatcccaaaaaacactgtcgtgactctgcattcagagctgttttacaaacttctgctcagaaggtggtcccccccgggcaggttcaagctgtgt

SEQ ID NO: 40572 - DNA, 367 bp, Mus musculus
  source 1..367: mol_type = other DNA
ctagttcaccagtgcctgagtcacaggtgtgtaccacgtcctcatgcttgcatggcaagcaacaaaacaatggttttcaatagcaatgaaaagcattgactctagacatcatggcacagtgctaggtccagaaacattccttgactgactcagggaccaggagactgagtgtagaggcctgatcaggctgcatcattgaattagtctctgacattcaaagaataccgtcatcctttctaagtgtttaaactcccagctaagaacaatacttgtcacagggaagctggcctttgaagggcactgtccttttcttacttaacaagaacaaaaatgacatttttacttctgaacttttctaatataaaag

SEQ ID NO: 40573 - DNA, 397 bp, Mus musculus
  source 1..397: mol_type = other DNA
gggtggggtttgctggccaccagcccagcctaactccaccaagtagaataacagtgtccttccatttgtatacatgtccctgcccccccatatatatatatatatatatatatatatatatatatatatatatatacacacacacacacaagtgtatgcacatatactacgcatatgcatctaattcacctgcatggtcatactgtatatgcagcctccaggctgtgggcatgcgcactcacccagcccaggagtgagcgaacaggtgctcatcgggcatgcgcacccacccagcccaggagtgagagaacaggtactcatggggcatgcgcacccacccagccgggagagtgagagaacaggtactcatggggcatgcgcacccacccagcccaag

SEQ ID NO: 40574 - DNA, 380 bp, Mus musculus
  source 1..380: mol_type = other DNA
actaactgctaggccaagcttcaaaggcctatgctgggcccagccctgggttttcactttgcctcctgcctgcaggtcaggatataagcaatgatgaacatgagcttctgaaactgaaaccaaaacaagcttccagttaaatgcttctgtttagaaccacttttaacaaagtactaaaaactgataaagattatcatttaaatcagattcaaatagaatgccatttggaagagagcctttctctttcacaaagccttgaggtttgctttggggatccctatgctatccctcatgatttgagaattcaagttacactgtagattaacctggaggaagacctgaaaggattgcctagcccttcttcatggttggctgcaacc

SEQ ID NO: 40575 - DNA, 268 bp, Mus musculus
  source 1..268: mol_type = other DNA
atgctttgcagccaggatcctgagttgctgagatgacagctgtgagccaccacagttggctcttaatttaaagactgtcttctttattcttctctatagacctgtccatctttaaaattatggatcagcctggtggcctccttctgtctgttacaagctgtgggaagtatttagacaggagaccaaggccgtgctttatgactggagagacttctgaaagagtatagtcatctctctagcctccctaggaggtggagtcctcttcaga

SEQ ID NO: 40576 - DNA, 242 bp, Mus musculus
  source 1..242: mol_type = other DNA
aggacacagctggaatctaagttaggtctcaagagcgatgagctctggcagagcagtgccctttccctatcacggggtgatttcaaatcttacagagtcacccccaagccctgagtgtgcccaccaggtgagccgggaaaagttctttctgctgctcatggctgagctgtgtggcagctcaggcctggccagccgctgtctgagctgtttgggatttcctcataggagctggtgagagcacg

SEQ ID NO: 40577 - DNA, 194 bp, Mus musculus
  source 1..194: mol_type = other DNA
atgacaaagaattcaaggctctgaaaagccaggccattgtgtgcctgtaccttcctccacctcctcattgaagagagaggcccagcacttgggagtgtcctcaagtcccaccatttcctctgtcccctggaaagatagcatgggggaagtccttacccctacccacgtgctctcaccagctcctatgaggaaat

SEQ ID NO: 40578 - DNA, 335 bp, Mus musculus
  source 1..335: mol_type = other DNA
ctgcagccagatgagctggtagaagcctttgccttctgcagcagacctgtctatgcggatgtgcaggtcccccgcaatgccgctcagctgagcccttgagttctgacggcatgcacgttacctcaaggcaggccactgctgtgagccagcgttttgtgttttaaatcgtcactaaaaaccaggattgggcaggtgctacgccactgagctgtatccccaggtcccttggccatttgaagatggaaggacacagctggaatctaagttaggtctcaagagcgatgagctctggcagagcagtgccctttccctatcacggggtgatttcaaatctt

SEQ ID NO: 40579 - DNA, 321 bp, Mus musculus
  source 1..321: mol_type = other DNA
acaacaccctactggaagaacactgatccaggaagaaaacataggtactctatattcatctaaccccaactggtgccccaggagccctattttttaaccgtgccgcagcaataactcttaagttatggtttcgaaaaaccgtgccactgcctcagtgttcattaagcagggagactgtagaatgaattataagggtataaattttaaaaatagaaagcttctagcgttgagcctacaggtagcttcctacaggtcctggcccggccccgcctaccggcctggccggcggccgcctggcccaatcggcgggcgagccttggc

SEQ ID NO: 40580 - DNA, 228 bp, Mus musculus
  source 1..228: mol_type = other DNA
ttccctaaggattttatgtcaatgcagtaatatcagattaggactctcctaactagtccaaataaggccattatgaacaagggagaaccaacaaggctttcttggtggacaacatttaaatcctgagccctggcccagctgggcagtgactggcagctcagctcctgctctggggagcacagagcggcacccttgcgtcacacactgggcgccaggccctgccccgtg

SEQ ID NO: 40581 - DNA, 542 bp, Mus musculus
  source 1..542: mol_type = other DNA
aaactcctgtggccaccggagggagagggggcatctggaggaacctgtctccgacgtggaccccggtgggacacccagcggggctcagatgtgggcacacagcagccttaggtctgcctagaaatcagactgagctgcgcctcttgccctggtggccggcaggtataacgggccaagcatcggccgcggctgggcttgtggagccgtggcgcgtggccgggggcgctcggtggcgctcggaggcggcggggctcgctgggctcgcggggctcgggccggctcgcggcgccgtcaggcagtcagtcggcgagcgcggcggcggcggcggcgaggggcgcggcgaggggcggccgctcccatatatggcgcaggcgccgccccccgacgtcaccctctgacagcgccgctcccgggggcttcgagttttggctcccgggaaagggtccattcctcggggagatgtgcgcctccgtccgctgcgcgcgccgctccaggccccgccgcgccccgcctgcgcccgggactgcgccgcggcactcact

SEQ ID NO: 40582 - DNA, 554 bp, Mus musculus
  source 1..554: mol_type = other DNA
gcagggtccctggcgcccggtggggagatctggccaccgcacggaccatgctggacaccagctccgggtcgccggagaggctgagcgctctttccgtcggcccagagagggcccagccttctttgtcaaaactcctgtggccaccggagggagagggggcatctggaggaacctgtctccgacgtggaccccggtgggacacccagcggggctcagatgtgggcacacagcagccttaggtctgcctagaaatcagactgagctgcgcctcttgccctggtggccggcaggtataacgggccaagcatcggccgcggctgggcttgtggagccgtggcgcgtggccgggggcgctcggtggcgctcggaggcggcggggctcgctgggctcgcggggctcgggccggctcgcggcgccgtcaggcagtcagtcggcgagcgcggcggcggcggcggcgaggggcgcggcgaggggcggccgctcccatatatggcgcaggcgccgccccccgacgtcaccctctgacagcgccgctcccgggggcttcgagttt

SEQ ID NO: 40583 - DNA, 342 bp, Mus musculus
  source 1..342: mol_type = other DNA
tagctgtcctcgtgatgtgaaggctgccatcgtcccaggaaagctgcagcaggaaccctggcatagcttctgagaagtcaagtgtgtagttttccctgccccaggcgagttctcttgtaccatagagcaaaactgatagctgtctcaggcgtgccgattggtccgtggatctacttatcaggacctcccggggttgccgaagggtggcaaatcctaaacaaacgccctttgggactgacttcgacaagccactcacggcttgggcttgcgaggcatgggccgtaggatactcctgcctgcagcccctctgcgagggcagtcagtggagtctaggctacgccc

SEQ ID NO: 40584 - DNA, 353 bp, Mus musculus
  source 1..353: mol_type = other DNA
ggtgtttctcaagatgtgtgtgacacagcttcataggagcagggctgccaataggatacaggagtggccaccgcaagcaactctcctgtgttctttaaaatggctcataattcccaatcgatcgaaaatatttcaatctgtaatcggcctggaactcactgtagagcccaggctggactcaaacttaaggaacttctgcccgtacagggaacttgtgtcaaggctgcaacggtctacactattgttttttagtcttaagacgttctgcgtgaccttggggtgggcccccgatctcagcgggcgtggcttccccgtgcgcagcctcctcgcgtggtccggccctatcgagcctc

SEQ ID NO: 40585 - DNA, 468 bp, Mus musculus
  source 1..468: mol_type = other DNA
cattggaccagtctacccagtgttctgcgcaagctaggtcagcacagagagcgaagcctggctccgccggcgagcaagagattctttgacccagacacttcttgcggcaagttagagacttgggaaaatattttgcatatttatccaagagagaaatcggactcagctggcgccctctgggccctgggccctagactcatcacgccggggccgccagctccgcgagtggcgggacctgcccggttccagcgcagccacctcggcttcagcttgccattaggatcgcaagcggggtctggagcccctggaccctccgtgagccggctgggttgggagcaccccatcgtgccgcgctgtgtccccgcctcgggggtccggatctgtgggcggggactggggccccgccaggcccggggctggcgcgggcaggaggaggggctccagagcgggccaggggcggagcgagcg

SEQ ID NO: 40586 - DNA, 657 bp, Mus musculus
  source 1..657: mol_type = other DNA
cctcgaggccggcgtccacggtcgtctccccatagcctcccgaggctggcctccatggccatctgtgcccaccgacccctgaggccggcgtcatggccatcgaagcgggactcagccgcagtctctccccagccccgcgtccgcagccgtctccctacggacagccgctggccggccgagggtctcccgggacaacgccggtcaggcgggcaaaggcggccgcgtccggaccggcggctggggtggggtgtcggtcgggcctcaccttccgccacgtcctgcgagaagcaccactggaagtcgttgccgcccgccgggcagccgccgcctccagctcctgcaacagagcgcgccgtcaggccggccccgccccgccccaccaccgtccagtccgcccgcccgccccgctcgctcgctcgcgcacggccctcacctgccatggcgcgggcgggacgcgcccagccgagcgcggccgaccgaggcgctccgagcgctcagccccggccgccaccgccgccgccgctgccgccaccgtcgccgccgccggggagggaattttttccccttttcaaaatggcgccccgccggatgacgtcatccccctccgcctcctccgacggtcagtgccgcgggggctgccgggggcgcaccgtgcgc

SEQ ID NO: 40587 - DNA, 363 bp, Mus musculus
  source 1..363: mol_type = other DNA
tgtctcttctccgctgaagagtaaactccacgcacttgctaaaaggcaaaacatttttgaagtggagaatgctctctgagagctcaaagaatccctgtctgatgagatcagtgctcagaagcggtgctgggttccaggtgctccggggatcagaggccccgcctgcccacggccgagcgctgggaaaggcgccggccgcaaagtctgaggcctgggcgtcgcgtcctagccttgacacgactcgagaaggccgcctcttggaccgcagcggctacgtaggtcgcgcagacgcagtcggcgcacggtgcgcccccggcagcccccgcggcactgaccgtcggaggaggcggagggggatgacgt

SEQ ID NO: 40588 - DNA, 564 bp, Mus musculus
  source 1..564: mol_type = other DNA
ctgagagctcaaagaatccctgtctgatgagatcagtgctcagaagcggtgctgggttccaggtgctccggggatcagaggccccgcctgcccacggccgagcgctgggaaaggcgccggccgcaaagtctgaggcctgggcgtcgcgtcctagccttgacacgactcgagaaggccgcctcttggaccgcagcggctacgtaggtcgcgcagacgcagtcggcgcacggtgcgcccccggcagcccccgcggcactgaccgtcggaggaggcggagggggatgacgtcatccggcggggcgccattttgaaaaggggaaaaaattccctccccggcggcggcgacggtggcggcagcggcggcggcggtggcggccggggctgagcgctcggagcgcctcggtcggccgcgctcggctgggcgcgtcccgcccgcgccatggcaggtgagggccgtgcgcgagcgagcgagcggggcgggcgggcggactggacggtggtggggcggggcggggccggcctgacggcgcgctctgttgcaggagctggaggcggcggctgccc

SEQ ID NO: 40589 - DNA, 364 bp, Mus musculus
  source 1..364: mol_type = other DNA
gctgggtaggttggatgcagaatcctaccacagcaattgatgctgcagtagaatactgggtgctttgttgtaaacagctcatacagtgcagcccagcctggccagggctgactgcatttttcttaaagatgcaacctaaaaaactatctgtaagcgtgcatagagacagcgagaccatgtgtgctcccattggcctggcttcaatcttggcctctgcaatgcgcgcacctcggagtcccaaggctcagacctcgagccccggcctcaggccccgcccatgccggcgcacgcgccgcacgtgccacacgctccaggccccgccccccagccaatgggctccgccgccgcgtgcgtcccgccccgc

SEQ ID NO: 40590 - DNA, 348 bp, Mus musculus
  source 1..348: mol_type = other DNA
aggtggtagatctcctgtgaactcctcagtgcgcagatagtttctgcttgagcaccccattgctactgtcaagatgtcagatccttgaaataatgttccctctgcttagaatcctgataaattcagatattaaaacggtgaaacagacactaagaaaatgtttagcttgttttcagtttgcttaccttttattttaaaaaaatcaaaatttaacagtttaaaaaagtaatcagtgtacatcattagaatgtttttgtaataagcaactgtctacatttgtcatttcattaggcaagcattctactgctgagcgtatagaccaggctgctctcaagtcagcctcgtgag

SEQ ID NO: 40591 - DNA, 320 bp, Mus musculus
  source 1..320: mol_type = other DNA
accacccgacagcctgaagaagtcctcaggttggtgagctacaccccctggggcctgcccaatgtggcccaaagcttggctagctatcggtcctagtttggcctaggcatcaccactccctagtcccgacaccaggctaggggattgcaacccggaaccattccttgaatatgtatggattctgctagagatcctggagcctaggatgcctcgggccaccacagaacaaggctaggtgcggccaggctggccagcgcacaggtggaccggggtgcagtggtcccagcctgtggcctccaggagcaaataagctaatcgga

SEQ ID NO: 40592 - DNA, 389 bp, Mus musculus
  source 1..389: mol_type = other DNA
aaaacccagccccatgtgggtggtaccattctctaggcagagggacacccccaaccgcttcagatatatgtaactagttgtttgaagttcctgccacaatgatagactataacctggaattgcatgctggaattttaatacagcagtagtgggataacatttgtttgctgaagcctgaaaaaaacgtttctctccctcacgtgcaactcgcgggcgcagtccctcgtaggcgcgtggccctgggcgacccgcaggcacttcttactttaacggacccaggacttatttcttaaaggaatgccaaggggcgggcgacgctgggccggcgccggctggagcgcctgcaggggcgggccggggttcggggcgctgcccgtggtgacgcgcgg

SEQ ID NO: 40593 - DNA, 336 bp, Mus musculus
  source 1..336: mol_type = other DNA
gcagtggagaccctagtgaggacacaaggccctagcttgtgtggcggggcttgcatgccagactccgccctcctcaggcgtccagatcccctgccgcctgtggcctcagagcgggataacaccctgcgacagagtggtagaaatctgcaatcgactttttctacgaagggcccccaaaggtctccgccgccctgtgaaggaaagagtcctcatttctggcctctagataggagggaggcgactagcatcctctttccgcgggtagcccactctgtgtgctgcgcacggaatctctccggccccgccccgctgctcgcaatccgcgggcgggtcggc

SEQ ID NO: 40594 - DNA, 278 bp, Mus musculus
  source 1..278: mol_type = other DNA
gggggattccagctgccagccgccatctctgcagtgttgagaatcaggagacatttgatcagaggcactttcagtcctaaagaatatattagtaaatgaattgaaaattctattctattatttaaatttattattgcattcatataggggataccagtggaattgtcaaaaatgtttagcaagattatatcactgatgctctgtgtgtgacacattactcactaaatcaggatctctgcaaagccgagagcgcagcactgcggcagctgcttctgcgc

SEQ ID NO: 40595 - DNA, 259 bp, Mus musculus
  source 1..259: mol_type = other DNA
tattatttaaatttattattgcattcatataggggatacgtggaattgtcaaaaatgtttagcaagattatatcactgatgctctgtgtgtgacacattactcactaaatcaggatctctgcaaagccgagagcgcagcactgcggcagctgcttctgcgcaggcgcggagggcagcggtcagttccagaggcctgaggcccgagggtccatggccctggaaggcggtaagcgcccttccggcctccgtaccgcagcag

SEQ ID NO: 40596 - DNA, 348 bp, Mus musculus
  source 1..348: mol_type = other DNA
ttttccttacaatgtaatttgatggaggcagaatctttcctcctaattccgtagactatgcaaaggcttcccagcttgggggggggggtggcatatctcctgccaacgctcacccgctccttaaaggtttggcagatcggatggttttgcaagtaataccctggctaagcaacctgacttcagagtcttggatacaagagggtggaaataggaaactgtcttatctctttttgcaaacttgaaaagtcccttcttcaaactttgtggtacagcgtgaggagcaaagaatataaccagtacctccttatgtcccattacaagtttaaagctaaattcatagtactgttg

SEQ ID NO: 40597 - DNA, 698 bp, Mus musculus
  source 1..698: mol_type = other DNA
cagttatggattccgaatccggattcagagtgcaagtgcttgcggaaaccggaggaggtctagggtggcggtcagccgtccgccgggcgccgccacctcccactcatggccaggctgccctcgcgggcccggttgcacacgcccggggagcctggctctgctctgaataatcctgccaacactagtgctggccagccccgcgccctgcgaggttctggcactatagtctcctaggaggcgccgagcacacctgggtagcccagtgccaggtagccctgtagtgagggtgacactaggcctcttgtaagggccccattggtgtccacaggagtcgtgcgtagaagacgctgccggggtcctctagcacaaactggtagacaggggacccccagactacatgggggaagggccccaggctgcgccgggctcagggagtggccccgggacgggggaagggcctggacccggggagtgtccccgctacccctcggttcctggcaaggcctcctagggggcattccaagcctccccgcccggtggggcccccgcaatgcgttgcaagcccagctttgagagccggctgtgggcgcacgctgcgggcggaccgccccacgccctccggctcctgggagcgcagcccgcggccgcgcgccccagcctagctccgcggtggcggccggcacacagagctttgtgac

SEQ ID NO: 40598 - DNA, 336 bp, Mus musculus
  source 1..336: mol_type = other DNA
tcccccaccttgggaactgtccttgggtgtgtcgaactcatagcaatcctggttaggaaattgcaaaatcccatacacttgatctgcagacccactctttgcagacccagagctgggactggaggaggctcctccttaacccgtaccggcgagggcctggacccaggctgaagaccggttccacatcgggctcctttaagaagcgcttggggcctgactgacaggaatgcccccagactcaggctcgagaacccgccgtggacccggagccaggcaggccccgccccatagggaggccccacccccggcgcgaccgacagccccgccttctagggt

SEQ ID NO: 40599 - DNA, 373 bp, Mus musculus
  source 1..373: mol_type = other DNA
tagtgggctctacaggccgggtctatagctcctggttcttgaattccaaaaccgctgcattctggcccgaggtccagcttccagagaattctggtccagtttggcagatctgaagccaaatcccccagtacagggcttgggccctgatccaagatggagttacagataaaatatgtctcccatccaacgggatttatttcatctctagggagataaatctcccggaggcacctgcctcgctaatgggcccttcatggagtgcatggccggcgggggcgcgcgcagacgggccggacgctggccaatggcctggtcgccagtgccttcagccaatcagcgcgcgcgccgcgcccaggccccgcggttatcagtg

SEQ ID NO: 40600 - DNA, 278 bp, Mus musculus
  source 1..278: mol_type = other DNA
cctgccattgagcatatgcagctaccgccggctgcagttgggtaccatgctgtaccagtctcctgatcgtcctgaagacaaggccacggctcagccagccaaggtcctgtatggcatccagggagcctgaaccatagacccctcgagagtctcggctgtcccaggggagaggggcctcactgtctgaggtaagtgctgccctcgagctcacggcctattagtagtattatagcagaatactacacccaggactatctcttgaaaagaaggatttattc

SEQ ID NO: 40601 - DNA, 286 bp, Mus musculus
  source 1..286: mol_type = other DNA
tcagctgatgaagcgcagctcctcctgcagctccgggctctgccccagcttggacctccaagactatgtcttaatgaaagtcatctctacccgccacaggtggcccttgcagatagaaaggggcacgctttctgaggctggcaacttccctgtccgactggtacccagcatccgtccagcccgcgcttaccggagcagggagtcccttgtctttctgtgccgcaacagagcaggacacagccctgggtgccaattcaacactcaagaggagctcccgcgtccttgg

SEQ ID NO: 40602 - DNA, 439 bp, Mus musculus
  source 1..439: mol_type = other DNA
tcagtgttcccactgaggactgggacaggagagttccagagtagcaagaacctaggggcctcctagagtaaactttgtgaaaaagcttgacgcagatgagctggactctgactctttggcccaggcttggagaagggttcaactgccccgccaggccatgtccacagacaggagcagccctgctgtcagtttcggaaaatttggatttgaacagtattttaatacatggattgtgaagattcttccaaaatgagacagggatctctttttaaaatgaaataacatcatccttggaagcaagcagcaaaccctggtcggttgtctctttaaatcgactctgcagtgtgacgggcagccggccgccgggctgggaagaaccattcccgctctgccgcagggagccagggcacggcgctgccgcggtccgcgcctcccccag

SEQ ID NO: 40603 - DNA, 234 bp, Mus musculus
  source 1..234: mol_type = other DNA
cagtgccactgtcggctgtctccacatctgaaaatgatgctaagaattgattaaatcaataaatatataataagatatgacacaattatcacggtgtgtgagggtcacacggctgacagtggagcactttcagatgcacaggagcatctgtgtgtcaggagccagcaaatggcctggccctgcctccccttgcaggcaggtgagaatttacaagcagctcagagcttctgctct

SEQ ID NO: 40604 - DNA, 410 bp, Mus musculus
  source 1..410: mol_type = other DNA
gcccaaagcagcggactgaggcacagggctcagccatctatctagagcccggagacaggttgcaggcccccttctgacccaaaacagtgttggaggagtgagcagacctgtgagatgtcttgaatagctaataattggaagccctaagggcaggctgttgagaattagcatcgagcgcatagcagagtgtctactattatgtctgatcagtctaggctctagggataaacaaaaacactagcctgtggaaggggttctatgtctgtcctttgccaagtttgggacccagtacctgccccagtccgtggctgccactggaggtgactgcagcaaccccgcccctgggttgggtggggcgggtaccctcagtctaggtaggtgcagacccctaggatggccgctgcgcggag

SEQ ID NO: 40605 - DNA, 523 bp, Mus musculus
  source 1..523: mol_type = other DNA
gcggactgaggcacagggctcagccatctatctagagcccggagacaggttgcaggcccccttctgacccaaaacagtgttggaggagtgagcagacctgtgagatgtcttgaatagctaataattggaagccctaagggcaggctgttgagaattagcatcgagcgcatagcagagtgtctactattatgtctgatcagtctaggctctagggataaacaaaaacactagcctgtggaaggggttctatgtctgtcctttgccaagtttgggacccagtacctgccccagtccgtggctgccactggaggtgactgcagcaaccccgcccctgggttgggtggggcgggtaccctcagtctaggtaggtgcagacccctaggatggccgctgcgcggagtggctccgccccgaactgtcacagacagcgcaggcaggcgcagggtgcactcggccccggcccgccagtgaccacggccctcagggagccacccccggccccgccccaggcgtccccgcgcca

SEQ ID NO: 40606 - DNA, 344 bp, Mus musculus
  source 1..344: mol_type = other DNA
cctccctagctagatgagtcaactagatacaacatgtatccatccatatggatgtttgcatacattctggtgcactacattgtaccttgattaaatgctttttaaaaatgatttatttcgctacagtgtacttaggtataataacaaataagccttattttaaaaagatgtatgtatgtatgtatgtatgtacttaatatgagtacatttgtgaaacaaagagcagtcagtgctcttaaccactgagggttttttgggtttttttttttagtaaaaaaatttttacacgttctttgtagcagggcaaaaaaactccgttctcaggtcctgggtcccgcaacgac

SEQ ID NO: 40607 - DNA, 467 bp, Mus musculus
  source 1..467: mol_type = other DNA
tttttatttcctttaattcaagataaattctattcctatctgtgattcatgcttagatttaaatttgttccagtacaaagctcaccgctggtttcgagcctggggttgggagcatccgatgagccaaggggcccctctggctgttctataagctcatcttctgagcatgcccttctgaaagtcatgaaggtcccctgcagggcgataattgttaaagctttccaaacactagcagtgttggtgacccggcctggcttttgaccagcacagtgcgcagctgcaggggcctcccctcacatcccggaactttggagtgtggatgggggacgtttttcaaacttggccccacgagccctcgagagttctggtgaaccatagctagcaccctcgagggatttagaggccgggcctccggagaatctagaaacttctacttacaggggatctctctggcctagttaggacgt

SEQ ID NO: 40608 - DNA, 457 bp, Mus musculus
  source 1..457: mol_type = other DNA
gtaaagggacaaggcctatgcctgggctcctggtcagcacccatctggaccctctgtacagaagccaccagaggtctgtccagttggggcttcctgggagcttcccaggggcaagagaggacagttatgagacactgtcttataggcctcaagcctggcctctagcaaagtccagcctcggggctgcagaaccacccagagcaggaggaggagtgcccttctccccggatgatcagtgctcctctgctgaggcagctggccagggctggccctatcccagttcctgggccagcagccccctaccctgggggcccgcaaaggaggtcttgtgccccagcctcgcacgtgcggggggtgagacggggtccttggcacggagcagctctctgaccacaactgcgctggccctctgacactgcttccaagctggtaaggctggtttgcctccggggacacg

SEQ ID NO: 40609 - DNA, 439 bp, Mus musculus
  source 1..439: mol_type = other DNA
gctgagctgcccagcctctgggtctgcagaacagtaaagggacaaggcctatgcctgggctcctggtcagcacccatctggaccctctgtacagaagccaccagaggtctgtccagttggggcttcctgggagcttcccaggggcaagagaggacagttatgagacactgtcttataggcctcaagcctggcctctagcaaagtccagcctcggggctgcagaaccacccagagcaggaggaggagtgcccttctccccggatgatcagtgctcctctgctgaggcagctggccagggctggccctatcccagttcctgggccagcagccccctaccctgggggcccgcaaaggaggtcttgtgccccagcctcgcacgtgcggggggtgagacggggtccttggcacggagcagctctctgaccacaactgcgctggc

SEQ ID NO: 40610 - DNA, 314 bp, Mus musculus
  source 1..314: mol_type = other DNA
attttcagctggaaggaggtgaccagctagggcaccccagggccatcgcgctgttcctacctcaggaataatctttcggcggccagtctctgggtggacagaatgccaggagtcccctcccagccgtcatctccggattgaaacagattagttgttgaaattatgactaaacactattcactaataaagattctattttatcaatagattatagatcacattctattgtttttattaaggaggaccaatccttcctgggatcgagggagggaccagcgcggttagggccccgccccttccggctgtgccgcgtc

SEQ ID NO: 40611 - DNA, 459 bp, Mus musculus
  source 1..459: mol_type = other DNA
ggcaaacacttggcaacagccagccacctgacagcaggaattccggcggaacttcttacccatattccagctgagaagagcacacttgcgtgagcatgtcctgcaagtacaggtgccgctgcacatccccatgggtggactccggcatcgaagccacgccctacagctcggagccacgccccccatagagctgtgtccagccccttgatccggtccacaggtccggcccctccctgtggggctcaggacatcttccgcccgggttgtcacgcacctcgaagaattcgtgatcccgcgggaagcgcacggcacgcggcgcgaatcggaagggtgcctccccagccgcagggttcctctccacgggcagcggttcggctgcccccggctccccggccaggcgggaaacatcaccacggccgccgcggcccttcggccaccgtcggaggggtggtgacggac

SEQ ID NO: 40612 - DNA, 483 bp, Mus musculus
  source 1..483: mol_type = other DNA
tccaccatggcccatgagctgggccacaacctgggcatgagccatgatgaggacattccaggatgctactgtcctgaactcatgaccgaaagtggcacgtggctcttcctaacgattcgtgacaaaaccccagacaggctgcctgaccaatgttccagatgtcaaccggtagtgtgactgtggcacacctcaggtctgtctgcaggggccatatggcccttgaggtcataccttgaagccccgaataacctataagggatttggaggtaaattagctttcgcgctagagccaggtctggctagggtgtaccaccacttgccagctggtcaagggggcagagtgtgccagtggtacctgttgtcatgaatgcaaggtaagttggatttgtttcactacagtaagcctctctggacaaatgtgacctggaggagttctgtgatggccggaagccaacatgtcccgaagatgccttccaacagaat

SEQ ID NO: 40613 - DNA, 459 bp, Mus musculus
  source 1..459: mol_type = other DNA
gtgctgagagctctggctctgagtcagctctaccctgaccccctaacaggttaggtaggggggctggcgagatggctcagtggttaagcacgccgactgctggctcacaacctgatgctgagtgtctgaagacagcacagtgtacttacatataataaataaataaatcttaaaccctgcatatgcctctccagtgaggcctcagaagcctcgtggagccgggccagctcccacaagttggtcctgggatctttcaagtgcccagaaagtcaaagggtccccttctgaaatttcaggccaggactgggagcttgtagaactgcagagttatgaattttgtccaaaatcatgggagatcaataggagctacctagaagttacttcggaggggcctctgtaactccagactgcccgctccgccccgcggtccagtgattggccagttccgatcagtgggaa

SEQ ID NO: 40614 - DNA, 335 bp, Mus musculus
  source 1..335: mol_type = other DNA
actgcttgcctggtcaaggaaagacatcggccgccaggcttgttgcctgttgggacccaggacgcgtctttctagcccattcctggcccaaactgggacgcaagttcagccctcgaagttgctagtggcccagaaaatgtttggagactccaagagcttaggcacgagcccatagctgcgctctgcctaagcgcggaggctcactgtggcgctcgcttttcccgctggaggagcttcataagcgttcctacagacggcagtaagtcccgaaatcctgacgtgggcacgacagctaccccaggtctcggggaaagcggtgctacctttttataggg

SEQ ID NO: 40615 - DNA, 296 bp, Mus musculus
  source 1..296: mol_type = other DNA
tcaaaaacattttatcatttgcaaaatgtcaagaatccaaatactttagctgtctaattacagaaaggctttcctttctccttagggggaaggtttctcaaagtgtccgcggggctccaattggactcctggagagcccgggctggcggacggaaccgccggcggcagaggcccaagagaatcaggctcttccccgctgcaggccagcctggctccggtacccgatcccgcgcccggctccagccctcacctccgcgcgtcgcgtcccgccccgcagggtcgccacaggaagttag

SEQ ID NO: 40616 - DNA, 191 bp, Mus musculus
  source 1..191: mol_type = other DNA
gatctcaggggaaggaacaggctctcccttaacccctggaatcccagctggaggagcagccagggctcctctggtctcctggttgcccccctgcagtgaagtgacatgtgtgaggccacctgagccacagtggtccctcctccagcccctagcccgccccgcctggtggtgaagcgcctggaactgcatcc

SEQ ID NO: 40617 - DNA, 206 bp, Mus musculus
  source 1..206: mol_type = other DNA
cctctaggtcagaggcgtgtcctggagatctcaggggaaggaacaggctctcccttaacccctggaatcccagctggaggagcagccagggctcctctggtctcctggttgcccccctgcagtgaagtgacatgtgtgaggccacctgagccacagtggtccctcctccagcccctagcccgccccgcctggtggtgaagcgcctg

SEQ ID NO: 40618 - DNA, 316 bp, Mus musculus
  source 1..316: mol_type = other DNA
tcggaccttcggaagagcagttttaaaatatgctttttcatctgtgcctggtgcctcagaggccagaaacaagctatggatcccttggaactggagttacagatggctgtgaaccaccattctgtgtgttcactgagcacatacctcagtcatttgattctgaaaaggggtctagcatagctctcccaggccgttgtgttaggtctgctctagcagaataggaacccacccagagccatcagcttctagctgacttgaaggcatggacagcagtggccagccataccagagccatctgggctaaggctgtgcctga

SEQ ID NO: 40619 - DNA, 235 bp, Mus musculus
  source 1..235: mol_type = other DNA
ctgagccatctcaccaggccctgcatggacatttgaaacctgataatcaacagtctggggcataccccaggccaggggcttccttgttcttgggactccctgaagctctggctatctgcagtcactgcctgtccccaccaggaggacatccatgcaaggtacagctgcttcttggagtaacaaggtcttagaactggcaggtgggagatcatcagtgattgctggcccctgacct

SEQ ID NO: 40620 - DNA, 149 bp, Mus musculus
  source 1..149: mol_type = other DNA
ccaaagtgtggacactttgccccttcttagaattgaaaggacccagatatggctgtctcttgtatcacagggcccggcccattggacttgcaaactttatatgccccagacaaccaacatgcatgttcccagctgacactcataaaagt

SEQ ID NO: 40621 - DNA, 350 bp, Mus musculus
  source 1..350: mol_type = other DNA
cttgttagaagttttaaaactgtgtagatagtgagtattaaagactggcatttttaatgaaccgggagggcagcttcaactcccaactcccaaggttaaacactctaacttagaaagtgaacaaaggggagggcatgtgcctcctgcccttaccataacaagtcgttggtcaaggacatttttgcccctcagcctgctgagtggttggccaaaacagtgttctggggttctaggctcacactgcctagtagtagctacagccacacccttcttaagtagactatactcaagcttggagcttgagcgcttctgggagcgcctacgtggaccacacagtgaaggccaaggga

SEQ ID NO: 40622 - DNA, 319 bp, Mus musculus
  source 1..319: mol_type = other DNA
agttggaggagaggggcctgagcctgtaatacccaatactattacatcgaaaaggctccttggtggacttttggggttcacagctgctctatcctagggtttgcaggaccagggcaagaatacaaatgaaggcctgataatacttgctaaatatttttaagttataattcaagataatttacgtgaacaaaacattggctttcttttaaatttatgtgaaatcttctcatcttgtaaaatcacagctattcatgcctttaatccaagcacctggtcaagaacgaaatcccgcctgggatctggggcggagcaggcgggg

SEQ ID NO: 40623 - DNA, 377 bp, Mus musculus
  source 1..377: mol_type = other DNA
tgggcatgctaggccaggcgctatatatcctcaaacctgaaagatttggaatatagtgaaaaatctccagattgttccaggtccagaggatccactggcttctgggcaaactttatatgccccagaaaaatgagaaaaaatataaataaatgaaattgagtctttttgttgttgtttttgaatccaccaggctggtctcaagcacactgagagccacttactggcctctacaacataagagcaaatataatattttatatatatatatcgtctttccaaaagaaaaaagcccgtgcccctgcttatcccagagtgctcgagtcaggcgcatgcgcagtcgcgcacggaacccaggcgcgccggaaccctgtgagcag

SEQ ID NO: 40624 - DNA, 281 bp, Mus musculus
  source 1..281: mol_type = other DNA
tgctcttcacattttaacatgaagcagggaagtgaaggagcacctgggagctctccctgcctaaactaaatgggggcatccaccagcctttggctggggagggtgctttcaacttcacgataaatccataccaggcctgtctggagctaggttaaacttaccctaccaaccagtctttagtgctattgggatcctcatggctgtacatcaaacttccaggagagccatctggcaggatcccggggctgagcctccgcggctgcccgcccctaatcttcagg

SEQ ID NO: 40625 - DNA, 364 bp, Mus musculus
  source 1..364: mol_type = other DNA
gagctcagttcctggaactctgctgcatctgtggtctctagatgcccctccttgctcaggcactgagcagcgtgctaggccacctgcccaggagctcatcttgcattcttactccaggggccactatgggatggacaacagagtagccaggctccgtcctgaggcttagcttgggccctagtctggggatcttcccaggacacctgatgtttattaacagcactctgacacgtctggaggttgatcctccacctcagcaaactagctaataggtttatttatgtgtgagtgcagactcatacatgccacggacaggctcacatgtcagtctcctttgtcaggcctgagtctcggggactccccc

SEQ ID NO: 40626 - DNA, 175 bp, Mus musculus
  source 1..175: mol_type = other DNA
tgagaaccattggcaacaactctttatgtgttttaaacattagaacttgaggattctgtttattaaatctgtaagcctgtgttcacatataagtcctgagaaaccatttgtttcgaaagaattggcaattgcagaagcattttcatagccctccttagtggttatcagtatggga

SEQ ID NO: 40627 - DNA, 596 bp, Mus musculus
  source 1..596: mol_type = other DNA
tgtgacaaaaaaagattcattcatttttaaaacacacaataagtctcacatgtattggcatcttacaatgcagaggagtggggaccagccctgcgccatggaacaaatccaatttttaaaaaatttcttctttttttcttctgtatttgacaaagtgttttgaaaaacattttccacctacatttttacaaataagtggggccctttcaggtgctcttgcctagcatgtgcaaggccctgggtttggtccttggcactgcaaagacactatattgaaatgggatccagaagtgagatttcctgttctgccctcaataaatggttggaaaaaaaacctttcccagcaaacaaaacatgcaaacatgatctgaatgcatgccttctgtgctgaccagtgccatggggaagacattcccccacccccaggactgacctatgaattggtgaggtattcctacaccagcaccctgacaggtgccagcaaccagaggattggcagggcccagcctcatccttgtcagatcagtagatgcaacttctaagaggcaatggctccaagggtcagcctttgaaatgatgagatgagtggttattgg

SEQ ID NO: 40628 - DNA, 527 bp, Mus musculus
  source 1..527: mol_type = other DNA
aaaattatatatataaacaatcaccttcacatatatatgtatgtatatgattgtgctctgttaatcctgtcaatatatcaaataatcaaatcacaaggagtgatttcattccttctgaatttgtaaatccagggtatagtctattttagaaaagttcatatatacatacatatatataattttattcttggtcttcaatgaagcagaatgcagaattctttatatatatatatatatatatatatatatatatatacatacatatatataattttaatatttattacacatagtattttagtcttgatcctcaagaaaacaatgcataattcttaatatatcatactatttatttccctaaacagaaatgctcagacctggactgttttggcaagacggcttgcatctcgctcaggatcaccgttctgtctgagggcagaaaatttttgtagagggtgaggcgactatcacgtttaaatcggacttgtatacccttgcgcatgcgcagcagctagccacgcccccgc

SEQ ID NO: 40629 - DNA, 287 bp, Mus musculus
  source 1..287: mol_type = other DNA
ccttgccccttcttagaattgggaaatagctgtctcttgtgagagctaaatgaggaaaatacctaattaaaaaaattactagctctgactattgacaacaaagatcttggaagaattctgttctttagccagattttctgtttgaggcagaaggcctttaatgtcttttctgacattcccatctaggcctttctgggaggagtgctctccacacagctggtactgctttgggcagcagctgcaggaagcttcactgtgctggcactgggctctggctccagaatatt

SEQ ID NO: 40630 - DNA, 406 bp, Mus musculus
  source 1..406: mol_type = other DNA
gattggtctgctaagaccaccatacttgactactagggatgattaattatacacaccggaatatgtgcacttaagtgcagtgcactagttcttaacctcagaaagttgtgtactagaacactgttttaaagatagcgatcattatattcttctgtgtgaatatttacagatcatttacatatcaataagttgatatgactatttaaagttaaattaaaatgccatttgatgggcttaaaggtaactatcattatattcctctgtatgaatatttacagatcagttacatatcaataaattgataatgactatgtaaagttaaattaaaatgtcttttgagtccaattaggaaccagagggcaggctctcaaaacctcgcgtgctttcgctggagctggccatcttt

SEQ ID NO: 40631 - DNA, 223 bp, Mus musculus
  source 1..223: mol_type = other DNA
tgttgggagaggtggctcatcctggagctgcccaccaccaccatactttatggctaatatccacttgtaagtgagtacatacatctcgagaaatattgtataaatgtaccactcaaaatgactctgagcatcctcagtgttttaacggcaggctggcagggcgactgcctgtggaagttgcacagaccagagcttcagggcagggcatgagttccaggaccgc

SEQ ID NO: 40632 - DNA, 191 bp, Mus musculus
  source 1..191: mol_type = other DNA
attgtataaatgtaccactcaaaatgactctgagcatcctcagtgttttaacggcaggctggcagggcgactgcctgtggaagttgcacagaccagagcttcagggcagggcatgagttccaggaccgccccgcggctgtcttgccgctcagcagttcagcctgcctcggggcagtgcggccgatcgaaga

SEQ ID NO: 40633 - DNA, 164 bp, Mus musculus
  source 1..164: mol_type = other DNA
ctgggagctttgctatcagtggcttgtactgggctgctccttgggactccctgaaaaggtaatgtctgaagagaggccttgggccagaggtcattgtctccatcacacacactatgatctagaacttcttgtggggcagggacccctccccagttctcaaaact

SEQ ID NO: 40634 - DNA, 254 bp, Mus musculus
  source 1..254: mol_type = other DNA
gaaggcaccatcatgccctgctcagacatgggataatgagacccactctgacagggggtagaggattctgctttgcaaaattctcagcccacctgcagcagtagggtggcctcagcctgaggactaggacgaagctgtcagagcaccggggaggtcacacatgacctttgaatggagcacagtgacatgcctggcccagttgtcctgccaggtcctgagaggtatgccccgcccccgggcaaggtgccaccttc

SEQ ID NO: 40635 - DNA, 276 bp, Mus musculus
  source 1..276: mol_type = other DNA
ctagcctctctagcccgagttcctggcaggcggggggtttcattctctcccgcgagaggagcaacggaggggcggccagccgcctgtgtagcggggagccaggtccgcacgccacttagctgagtcggtgccccacagtgacacactcagtggcaggccccggccgggcatccgactgtggttcctagcctctgctccaaatttgggtctgaacacctgctccgcttcagaaccttctcccggaagttattagcccggaggcggaaccggaagacc

SEQ ID NO: 40636 - DNA, 315 bp, Mus musculus
  source 1..315: mol_type = other DNA
gagcaggtgttcagacccaaatttggagcagaggctaggaaccacagtcggatgcccggccggggcctgccactgagtgtgtcactgtggggcaccgactcagctaagtggcgtgcggacctggctccccgctacacaggcggctggccgcccctccgttgctcctctcgcgggagagaatgaaaccccccgcctgccaggaactcgggctagagaggcctggctggttagctagcatcgccgctccaagactagccgctcagcgaccacatcccagcatccctcacgcgtggacgccgggcttccggacctggg

SEQ ID NO: 40637 - DNA, 309 bp, Mus musculus
  source 1..309: mol_type = other DNA
ataggcaaattcttatatcaaagtcgcagactgatcagagggcagcctggcccggcccggagtgtaagaaggccggcacatccttcatgattgggatggcgcacggaagtgctcgctcacttccggcaccgcgggcgcgcggggcatgctgggagcgtcccactagcctcacgggttgctggggacagctagccactgactggtcacgtagcctcaagcctgcagacttgggtcctctcccggtttggcttcccaacggggctgggctgggctcggccgagggaaggcgccggagggcggcactgaccc

SEQ ID NO: 40638 - DNA, 418 bp, Mus musculus
  source 1..418: mol_type = other DNA
gatgccttcagccttgaaggcattggttgtgactttagaattctacagctatattttgaactaatacctcacagaatagaaaactgatattcaatcttatctgtcaataggaaggaataccaagactaaaggataatatttaataatagagataaaagtgttttgaaaaacacaaaatgttaacatctgaaaaatttctcttgaaatcactaagagttttaactgctggacattgtcatgataggcaaattcttatatcaaagtcgcagactgatcagagggcagcctggcccggcccggagtgtaagaaggccggcacatccttcatgattgggatggcgcacggaagtgctcgctcacttccggcaccgcgggcgcgcggggcatgctgggagcgtcccactagcctcacgggttg

SEQ ID NO: 40639 - DNA, 212 bp, Mus musculus
  source 1..212: mol_type = other DNA
gtctgcttagaggcctgggtgctggggctcacccagcctggtgccttgactggggacaagggtctgaccccagacagcaaccggtcgcaggacttcaagttaaggtttatttttttaaagtataccacatgaagtctctctctgcaaagaagtaaatcttgtatggaagggccctacatgccaagtcttgtgacaggagacagctgcagctc

SEQ ID NO: 40640 - DNA, 417 bp, Mus musculus
  source 1..417: mol_type = other DNA
tatgtagacgtatgtgttttacacacacacacacacacacacacagctacttcatgtgggatcaggaaaccagagtcagtctctttgtgagagacagataaccctaagtgttatctatctctcagagttagaactcgagttgtctaccttcaataatgatgacaaggagacaaagaagacttgttttccagaatttataaaaataaataaacacatccatgcctctgtgaactgtgtcttcatggactttatttagtctacgacaaacagtcacttaaacatgtggaggtgtgcacacgtgcctttacacacgtccgttccctgcagtcacttgcagggcctaggccgatctctgccctagagaacatttctgaagacctggttgtgagtcagctatttaatctgaaccacctcaca

SEQ ID NO: 40641 - DNA, 415 bp, Mus musculus
  source 1..415: mol_type = other DNA
caaatggggtgcaaacacgtttatttatcacgttatttgtaataattcaagattagaaagtattcaataaggaaatgatataaattataagacatccatacaacgaacttctataaaatatttcaaagactgtgctgcaatagggccggtcagcaaaaccttgtagaagggcgcgcctgccgggtccagcgccatgatgctctgcaggacgacggcgcctagagggtcagtgccgccctccggcgccttccctcggccgagcccagcccagccccgttgggaagccaaaccgggagaggacccaagtctgcaggcttgaggctacgtgaccagtcagtggctagctgtccccagcaacccgtgaggctagtgggacgctcccagcatgccccgcgcgcccgcggtgccggaagtg

SEQ ID NO: 40642 - DNA, 378 bp, Mus musculus
  source 1..378: mol_type = other DNA
gagcactggctgttcttctgaagtgagttcaaatcccaaaccacatgatgccctcttctaacatggaagtggagttccaggacagccagggctacacagagaaaccctgtctggaacccccccccccaaaaaaagaggtcctgtgaatgtgggtgggaatggtgtaattatattttaattaaatcaaaataaataaatactgctcagtgtagtgtgcacgtctttaaccctaacttcggctgtggaacttttacacatcctgttccttaaatagccagggtcctttctagtcactaaacgtcactgtagagtgaggtctgtcccagccttgcatacatctttcagacccgcccacctgccacgcggcagggccgcttc

SEQ ID NO: 40643 - DNA, 275 bp, Mus musculus
  source 1..275: mol_type = other DNA
cacatgcaagtatctgagaattttagacctgcccaggagcaggagaggaggagcctcctacagtgtgcagtgggaaggaggcagtctccttcattaacatttatgcatgtctgcagggtcatggtcaaagcctggagtctagtaggctaaattgcaatttcctacaggagtggactgcccactgagctcacagtgatgaatggctgctggacagccacacctgagagctctgggcctgaaagcagtctacagccactgcccatgtggcgcagggg

SEQ ID NO: 40644 - DNA, 269 bp, Mus musculus
  source 1..269: mol_type = other DNA
agtccttcaccaccagggaacttcccttgtggaaagactcggagttccctgtgctgtttcgcaactggtaggaaaacagcagccaagtgactggaattttccttccctagctagccaggagcatccaggccctgtgctggaaggctcctccttagcccccacctgcaacagattagtttaggggtgagtatgcctactgttagccctgggacaagtctagggtacctcaacagtcaactagtcctgaagtaatttgatactcaaggcct

SEQ ID NO: 40645 - DNA, 268 bp, Mus musculus
  source 1..268: mol_type = other DNA
caagacaactcctggagaacttcccagaaggtgatattaaattttactctggtcatctctgcctctgaaatgccaactcaaagcaaattccctgacaaggttttggaaagatttacttattatatgtaagtacactgtagctgtcttcagacacaccagaagagggcatcagatctcattacagatgtttgtgcttagcaacttgacttcatctaaaatccagaaaagccaccctaaatgtgggccacaccttctggtggcaccccac

SEQ ID NO: 40646 - DNA, 327 bp, Mus musculus
  source 1..327: mol_type = other DNA
cagaaaagccaccctaaatgtgggccacaccttctggtggcaccccaccttcctcagggtcccaacggacctctgtagaatctccctgggactcaacgcctggatcctaggcctttccatttctagaatgagtctctctcggccctgtctgtacagaggggtgctcctgttctcagtcacaacgcactggggaacactgcagtcacctctccttcccagtggagggggtgagctgcctcacagcttcaaaccccagccggggtgggagtggctctccctgcccacaccctatggcccactgcgcagcaggctccggactgcccagtt

SEQ ID NO: 40647 - DNA, 315 bp, Mus musculus
  source 1..315: mol_type = other DNA
ttgtcacacttagggcactagggctcccacagttatctggcaacagctgggtgtgcctgactcacactaaaaggggctgctcagagaataaactctgttctatgcgataccaccgtgtggctggtccctcaaagggaagggacgcttcagcgtgggcctgcagaggccccccctagatattccttctctctcctctttaaaatctatgaagccaggagaactggcgttcatagtgagaggctctctgggcactctttattgctgaataaagaatagggtttgggccttgggacaagtcctgacttgggctcctgg

SEQ ID NO: 40648 - DNA, 238 bp, Mus musculus
  source 1..238: mol_type = other DNA
ggtgtgagtgtgtacagtttcacactagcctgagtataggagacttgctttgtattgcccacccaaggtagggtgtgttcagcagtctctctaacacgcctcatatgcgtctgcagatggggagacccagcctggatacagggtccagtcactttgtgcatccagtcagtggctacataactgtctgggcagatcgcagcccgaggggcggggcccaaggcgggaagaggtaagctct

SEQ ID NO: 40649 - DNA, 136 bp, Mus musculus
  source 1..136: mol_type = other DNA
gaagagcacattcataacttgcttcaaactccaagtcttttagtaaaaggatattaggcctgtgagcagagccctggcctgaaagtctgcagagaaggctcctatcttgaggtccatgtaacccctccccataaag

SEQ ID NO: 40650 - DNA, 283 bp, Mus musculus
  source 1..283: mol_type = other DNA
attgacactcctctctgggaggtgacagtcactaggagggtgagagagtggatgacagcccatagaggttcaaacattcttgaggctgttcacagctgtgaccacagccctctgaacgcggtcaggtaagcctggctgctgtagggctctgggtgggcatgcagggcgggactcttcagaccaggcgtgtgcctccaggccgcacggcgccgcacaaacctcccagggaagcaaccggtctgatgagatgggtgtgcaacgttcccaccccaccctcgggtgc

SEQ ID NO: 40651 - DNA, 445 bp, Mus musculus
  source 1..445: mol_type = other DNA
actgaggcaacttgttcccatagcctacctgacaggggtgcttgctggccccccagcctggcaggtgctgacatgagcctaggcccctctgagtcaaccccctggggcagccccgcctgccagccatgactcagatgttgggaacggggcctcccaccccaggcctggggggcagaagctggggaccaagcagcccttctgaagcctctgtacagggtttagggccatcatggtactgctcttgaccctaaaactctagactgtgtctggatgccaaccctgctgggacctcaacaagcctgggtccagctgtcttggaagctgcttggtctttggtactctagagctcccaaccccccaggtgaccccacgttcctgtggccctgggacaggaggaaagggaaacctggcccaggtgtccccgcccccagccaagctctgggct

SEQ ID NO: 40652 - DNA, 252 bp, Mus musculus
  source 1..252: mol_type = other DNA
aaaggtcaccctgaggacctctccagagaaactctggacccaagttctgttcccaggactctgtactcatgtgcttatgatatacccatgcatggaaaaaatctttgtaaaaagatggcagctcacagatctggtgctgagccccctgtcaggggcaggtgggcctcccctcatccagcagaatgccaggacctgtctatgactcattgaatcacttcctaaactttgaggaagcatctggtacggtccagg

SEQ ID NO: 40653 - DNA, 268 bp, Mus musculus
  source 1..268: mol_type = other DNA
tagcctaaatgcatgtagatccagtttctagatggctgtcctggaattcactttgtagaccaggctggcctcgaactcagaaatccgcctgcctagaagacagtcagcagggtggccctttgcgggttgcgctggttgggctcctttggtcaaaccaaaccctgcaagtttgaagatcccgggacggactcaggcttaaagcgggacactaggtccgccctagccctgcctgcggggcggggctgcacctgccgctgggtctgtcgcc

SEQ ID NO: 40654 - DNA, 335 bp, Mus musculus
  source 1..335: mol_type = other DNA
gccttctagggccctgaagctgaaggagaggcctgccatttatctgagatatacagtgttacagagtgacacagtgttgagcaggtcctggctgccaggggcccctatgtgcccttcctgaggaagaccatcctgcccctgctagcctcagcatcctcaggctgctctccggcagcagctgtcagtgcagctgcacagcaggggatccccggcttcaggacatcacaggagcccaggaatgagatgtggagtcgacagtacatttggaaggtctctaccttgcagccagggcatccctgcaggggctggctcctccccagcatacttgggcaagc

SEQ ID NO: 40655 - DNA, 275 bp, Mus musculus
  source 1..275: mol_type = other DNA
tttataaataaataattaaggctttgctatctcatgccagccctaagctaacatctgagagatagcataattctttctctctactcatgagaatataataaatgagagccaggctgggtactctgaggtccaggccagcctggtctacatagagaatctaggaggcacgcctcctgcccagtccttgccaagggcggcccccagaggaaggggccttcttattccgccaacagcccgcccccgccaggggaaggggtgggtacctcccaagcttg

SEQ ID NO: 40656 - DNA, 519 bp, Mus musculus
  source 1..519: mol_type = other DNA
ctaatttagtcattaatttttatttacgttaaagtttgagacagagtctagccttggctgatctagagctcacagtgtgtagacttggatggcttcaaacacatatagatcttctgatacctgagtgctaggattaaaggacataatttatctaatttatctatctatctacatctatttattagtgtataagtgttttggttgagtgtatgcatctatacaccaactgtatacagtgccctagatactagaagagggcattggagccactgaaggtcaggcagtgtcttaagaccaggctggccttgaactcagagacccgcctgcctctgtaaaggcatgggccaccagtgcccggcgcctccttttttttttaattcaaggtttgaataactcaggcagtgccagccggcttgtacagtctctgtcaggcggagcacgcggccggtctcctagcaaccggaccgcggctttccagcgcccagcatgccctgcggcccggcgcgcactacgcgtccc

SEQ ID NO: 40657 - DNA, 254 bp, Mus musculus
  source 1..254: mol_type = other DNA
gacaagtgtttaacaaacacgacaaactctcaatgctgactttttccacagtgctagaatccaacttgggagtatgttacaaagtttaaacatcacctgaatggtggccacctgggcacgatgcacagatatatatgcagatgaagcattcatatataaacgatatttaagacaaatatcagaaatatgcatcgctatccccagggagaaaggctgttcataatgaagggtgtgttcataccagaagctctcat

SEQ ID NO: 40658 - DNA, 373 bp, Mus musculus
  source 1..373: mol_type = other DNA
gacatcacatctgtaggcactttttcaatttgcctagtaaacaaaatcagtttccaagatgaggatataaactctcagctacatcttgaggcaggcaggcctggctggctccctgtttaccttctgcaacacacaagtttaaaatctgtcctttataagttattgcacctggatgtctgcctcctgagaccagatgtggtggccacatagtttgttcatatttgttcaaatagaaataatcaagaaaacttgacttcaatgccagtctaggctatccaacactttttggcagagttccggaaacacacagccgggtggactccagggtagtgctactccggctggacttccgggtagtgaccaggcgggtacc

SEQ ID NO: 40659 - DNA, 668 bp, Mus musculus
  source 1..668: mol_type = other DNA
ctgacagctgagagcttctccggaggcgcctgagggctgaggccacccccaggtcctgccacggcggcctcggcgtgcccaggcaggccaatgccagcctacaaccggctctggcccgccggcatgtgggactgcatgccaggcgcggtcccggcagcggggggagggtggctggagaaggaccctgccccctggttggggcccaacgcgggtgtccttgtggccccgaggcccgagcgtgatggccgcggggcgcagagtctccggaggcccgggcggcgcctcgctgggaggacggccacaggcagagcgagtccggccgcagaggcgggcagccggacgctaggcacgctgccgggccgagaggagcgcactcaccgcttgctggcgcgactgcccccggggccggggccggggccggggcagggcgggggcgcggacgggcgccggctgggcccgcgcatgagctccgtccgcggcgggtgcggctcgggctgcgggcgccgggagcggacggcggggacttggccgggcccgcgctcgccccgccccgctccgccccacgcccgtccgtcaactcgaggcggcccgtgattggtcgaactcctccgcaccgcgacctgttgtggttggctgagcggggcttcctggagccgcggggaaggcag

SEQ ID NO: 40660 - DNA, 550 bp, Mus musculus
  source 1..550: mol_type = other DNA
tgaaggcactcacggtggttcagagagccgtccgtgagaggcttctggccagcgttatctgcctgctagaacaagccgagcttgcaccccgggcggcgaccggggtgagcgtgcaaccccaggcctgcacgacctgagtaaaagcctgacgtttctttgaaatttcaaaaagtgttgaaaacatgtcatttgcgtctgacacagatgtaccctatgatgggccgacgctgccccaggatggagcctttgctccacctcgaccgagaacaggcagctaggggttccggcgactgcagggtggaggctctgtagtaggtcctcaacgcaacccgagcgtgcaccagtttctctccggagaaatcccgggctcgctgttgagtgcaggacccaagttccggcactgccttccccgcggctccaggaagccccgctcagccaaccacaacaggtcgcggtgcggaggagttcgaccaatcacgggccgcctcgagttgacggacgggcgtggggcggagcggggcggggcgagcgcgggcccggccaagtcccc

SEQ ID NO: 40661 - DNA, 525 bp, Mus musculus
  source 1..525: mol_type = other DNA
agtgccggaacttgggtcctgcactcaacagcgagcccgggatttctccggagagaaactggtgcacgctcgggttgcgttgaggacctactacagagcctccaccctgcagtcgccggaacccctagctgcctgttctcggtcgaggtggagcaaaggctccatcctggggcagcgtcggcccatcatagggtacatctgtgtcagacgcaaatgacatgttttcaacactttttgaaatttcaaagaaacgtcaggcttttactcaggtcgtgcaggcctggggttgcacgctcaccccggtcgccgcccggggtgcaagctcggcttgttctagcaggcagataacgctggccagaagcctctcacggacggctctctgaaccaccgtgagtgccttcatcccggcaaccgttgctagggggcggggctcatcttaccgaagccccggatgcccgcggctcacgaatatttgggtatgagccccgcccccgttgccatggcgccaggcctgcaaccccatcg

SEQ ID NO: 40662 - DNA, 318 bp, Mus musculus
  source 1..318: mol_type = other DNA
tctgggcctctcttcttctgaggcagaagcaaggtccttcatcactagtggaactaccaaaggctctctctctctctctctctcacacacacacacacacaaccagcctatcaccactggctagggacaggtagttccctgggcctggtttacagatccagaccatatacggtatagaatgcttccttccctaggccttctgtctagcctatgtatatactggccaagatgaggacacttgtgttcagaaagaactggcaagtgctaactgggcctctgtggcacacagagagagtcctgtgaggttcccacacctgg

SEQ ID NO: 40663 - DNA, 291 bp, Mus musculus
  source 1..291: mol_type = other DNA
agcctttggtagttccactagtgatgaaggaccttgcttctgcctcagaagaagagaggcccagatcccacagcattgcgatggggcccccccgcccccctcccgcttcagggagaggaggactgctgccagggtctttgtcccagtcagcctcgtcccccaccagggtgcaggctccctcgggtagcagcccggaatggaacgagcgagcagacgcgcttccgcaactcagggccccgcccacacctggttgcctccggggcgggaccgagtacgggagacacacgcctc

SEQ ID NO: 40664 - DNA, 477 bp, Mus musculus
  source 1..477: mol_type = other DNA
aactcagggccccgcccacacctggttgcctccggggcgggaccgagtacgggagacacacgcctcgggcgcgccgcggcgctgggacagcaggttgaggcggcaccgaagcaggtgagctgtgccgggttctcgagactcctgagcactgggcgcgtgtccgctgcagagtgggacgtctggatcccgcgctgccggggatctgccgtgaggcgggctgtgcccaccccccccagtggggcgggaccaccagaacccagagctctggctgggactggcgtgggcagagggcgctcctcagtgacctccctgggcctggggacggtcgcccgcgtgaaaagggtagtggcctttgagcctggtgaccgggggacaggaaaacctggacctggttaatgattcaccccgttcctggagccccagccactccaggaatgtgtggcctgcgggtggggctgggcacaggagggcagggct

SEQ ID NO: 40665 - DNA, 270 bp, Mus musculus
  source 1..270: mol_type = other DNA
tttctctgtgtagccctggctgtcctggaattcactttgtagaccaggctggcctcgaactcagaaatctgcgatttatttatttattatatgtaagtacactgtagttcagacacaccagaagaaggagtcagatggaccttcagaagagatttttttcagccagctaaacaaaacaaataaacaattcctgaagaggtcctggggaaagacctttcccacacttccaccagggtcattgaatctacaaagagcctggaagactgaatc

SEQ ID NO: 40666 - DNA, 431 bp, Mus musculus
  source 1..431: mol_type = other DNA
ggtttctctgtatagccctggctgtcctggaactcactctgaagaccaggctggccttgaactcagaaacccgcctgcccacagtggtccctggaccacaaaatccagtaagaacatacaattaagttcttctcctcgccgggctgaaggggacggaggagctcgtatatacaggatccatcatgattaagacccaggggacatcctgaagcttttctctagcgctcctccagccgcgggctgcagttaagtccagccaccaggaggaggcgctcacgggagggcggcggagacgtggtcccggggccgctcccattcatcgcggcggatggggagtcggactgcatggaggtgagacccagctcagcaaaacactgctctcctctgacagtagaggaaggggacgcgctaacgtctcgtcatcctccgaa

SEQ ID NO: 40667 - DNA, 247 bp, Mus musculus
  source 1..247: mol_type = other DNA
cttcctatctctgagagcttacaggcaaaagccaaggctctgccaggccctaccctgggggaactgctgtgtttctcatacagcaggagccagccatttcccttgggagtggtagctctccatagccctgccccagctctccataggtttagatctatggccccagagccttgcacaccttatgtgtagtgttgagtctccagctaacttcctggaagtccaggccccttgatagaccaaggcagga

SEQ ID NO: 40668 - DNA, 311 bp, Mus musculus
  source 1..311: mol_type = other DNA
ttttttttttttaaatatttatttatttattatatgtaagtacactgtagctgtcttcagacacaccagaagaagcagtcagtgctcttaacctctgagccatctctggtcttggtctaggctaggacagtgcggttcgctctgcccgtcctgaactgccccccccccaaggcagttgaggggcgccaacacgacgacagctgggtgggcggccctgaccttcctgcaatcaatgaggcggggccggccgcgcggagccggggcggtgctggagcccaccgccgccggcggtcccggcagctataaagcgg

SEQ ID NO: 40669 - DNA, 399 bp, Mus musculus
  source 1..399: mol_type = other DNA
ccccatgtgagagttctctcagctcagagagtcggatggttaaggcttaaggctgaaccagacatggtggtccacactctcaacaacaataataaaattaataataatatattagataaaaagttaagactgggccttggaggtgccaattatcaatttcaccatggtccgcttaagcacaaggcctggatccgattgctgcacgtgtgctgctcagtacctgttcctgtccacgtgtccaaggtatcttggagagctggctctgacgaatctggtccagacaacctgctttgaggggacacatcagccgctgcttagttcagaaattcaagccggggcggggcggggctggacgcgctgggggcgggattccgggtagcccctgcctgcaaatcccca

SEQ ID NO: 40670 - DNA, 586 bp, Mus musculus
  source 1..586: mol_type = other DNA
ggtatgccatgcaccaccatagtgtactctgggtaatccacaggtggtatacaggggcgtatcccagtgtgtgcctcaggtatatcactggaatacagagcgccgggatacccggcgcagaaatccgggctagtgggcttaagccacccagcctctcatcgtgacagcatgagaccacactgtccctgcgatcgcgtagccccgcccgcctcacctggccgcacggccgccattttgccgctgggtccgccacaatcccagcagcctcttcgctcctcccgccgcgcggtgcagcgagcgtccgacagcggccgaggcccgattctcccgtccggcaatactcgggagctccggagaactcggctcggaggtattcggcggagttcggcgaggcctcgtgtgggttcggctttcgccgccccgagagggggttggagaaatcccgtggcgccagggtctgtctgcgaacccagacttcgttgggccagctctatcggtcggtgaccacagtcagatccgcttcttagacgaaacgctcgtaagctttcgggaagcttcgggaccattcgtattatctagattcgag

SEQ ID NO: 40671 - DNA, 710 bp, Mus musculus
  source 1..710: mol_type = other DNA
ggtgaggcgcgaggccggcgggcgcacttgcctgcgaaggcggcggcggcggcggcggcctcatcggggctgggcagagcctcgggcgccacagcggtgacccgccgcgtctcgcgctccgcctcggagtctgcgtcctcctccgagtcctcctccgcctcgctttccgctgcggccgcggcggccgccgccaccgcggcagcggccgccacagctgccgcctcggccaggcccagctgtgccgccgagtccgagtcctccatacggactccaccgagtccgcccgaaggcgctgtccgggaccgcccgaagcgccaggcaccgagcccgaagcggggcccgaagaggccgcccgagttgggccgaggccgcccgaagccaccgcccgagctcgaatctagataatacgaatggtcccgaagcttcccgaaagcttacgagcgtttcgtctaagaagcggatctgactgtggtcaccgaccgatagagctggcccaacgaagtctgggttcgcagacagaccctggcgccacgggatttctccaaccccctctcggggcggcgaaagccgaacccacacgaggcctcgccgaactccgccgaatacctccgagccgagttctccggagctcccgagtattgccggacgggagaatcgggcctcggccgctgtcggacgctcgctgcaccgcgcggcgggaggagcgaaga

SEQ ID NO: 40672 - DNA, 637 bp, Mus musculus
  source 1..637: mol_type = other DNA
gcgtatcccagtgtgtgcctcaggtatatcactggaatacagagcgccgggatacccggcgcagaaatccgggctagtgggcttaagccacccagcctctcatcgtgacagcatgagaccacactgtccctgcgatcgcgtagccccgcccgcctcacctggccgcacggccgccattttgccgctgggtccgccacaatcccagcagcctcttcgctcctcccgccgcgcggtgcagcgagcgtccgacagcggccgaggcccgattctcccgtccggcaatactcgggagctccggagaactcggctcggaggtattcggcggagttcggcgaggcctcgtgtgggttcggctttcgccgccccgagagggggttggagaaatcccgtggcgccagggtctgtctgcgaacccagacttcgttgggccagctctatcggtcggtgaccacagtcagatccgcttcttagacgaaacgctcgtaagctttcgggaagcttcgggaccattcgtattatctagattcgagctcgggcggtggcttcgggcggcctcggcccaactcgggcggcctcttcgggccccgcttcgggctcggtgcctggcgcttcgggcggtcccggacagcgccttcgg

SEQ ID NO: 40673 - DNA, 499 bp, Mus musculus
  source 1..499: mol_type = other DNA
tgctgttggccctcagtaccccaggaagtgctaactgtccagggcccaggagaaatgtgccagggccctgcccttctgaggctgtagcctgggaccctgactgggaacaatagccggggccttagggtccctgttctagccagctaattggctgatatagctcatccctcaggagatgctctagtggatgggggggaggggcccccaccggcactaaagagctctgtcccgggcttgattgagacttccccaaggctgcagcactcatactgcccctgcaggcaggccgtccccatctgctactgcagcttggccagttagagcagctggggccgcaccctgttctccggggccagctgcaaaggggccccaggtgctttggggaccgcggtgtggtgggggggaatggtgcccgggcccgcccccttccttcaggctcccgggtgactcggtaacctggccccgccccggcctatccggcccagcagaggtcccgcct

SEQ ID NO: 40674 - DNA, 241 bp, Mus musculus
  source 1..241: mol_type = other DNA
tgaggtgtgcacttaagaccactcagtgttcaacaaaagaagttttggttgttctttggctagcactataagcctgctctgccatgcctggcaagcgactcttaggcgacagttttgcctgtcatgttgcattcaatactcccaggggaacagagccactttggctaagcccttgagaagtcaactattttatatctttttctaagaaagacgggtattggctaagtagcttagaaaccaa

SEQ ID NO: 40675 - DNA, 343 bp, Mus musculus
  source 1..343: mol_type = other DNA
gcacagtctcttcacctcagtctccagcagatggcaccaaaggcttgcatcaaaggaaagtctctggccagtcaggcagatacctgggtctctctaggagtccctcccagaaatgtccttagggccattttggggtgtcccctggcatggccaaagagaccagcttctaccccaagaaacagatatctaagttgctaggagacatctggtttagacatagctgtggagtccccactctcatctctgggtctggggctccatccagagctggctgttatcacatttgaagtcagaacctatgtctggttcattcttaggtctcaaagaagaaagaatacagcat

SEQ ID NO: 40676 - DNA, 352 bp, Mus musculus
  source 1..352: mol_type = other DNA
gatagattgttacttggagtaaggtacaatcaacctcgcctagttgctttgggtggtggtgtttatcaatatccggcatacacatatatgtgtaatagcttgagccataaaagaaactgcccttactatttttattcatgactgaagattggcgcagctcccagtccctaaactgggagtaggggagtcccacaagggtgcacttctgaagcccctgtaggtgtggagcgagagcgctgccacccatccatccggcttactggttcattctacgcatccgagctctagaggggtacaaagactccgaccgtgacacggggcgtggtcgcgcggggcattgtgggttagcacg

SEQ ID NO: 40677 - DNA, 178 bp, Mus musculus
  source 1..178: mol_type = other DNA
ttatatctaatacctgggcgttgaattcaatataaatactgaccccttcaatttcagggtttcatgtcaatatggctagtcaagcttgtggcttgtgaatcttcaaaagtcgccactgaggcgtccacagctcaggaagtgttctggatcgactcgctcggaaacatctcacgcatgc

SEQ ID NO: 40678 - DNA, 293 bp, Mus musculus
  source 1..293: mol_type = other DNA
cccccagcagtcagctggccaggctgcttagggatggggacccataagggtacagctgccttttccggcatgaaggccaacctggggctccagttgggctgctgctgctacagaattatatttttttcttttgaagagttttaagaagttgtaactttttgtgtcttgtcatgtaaaaaataaataaatattctaaatagatgcttgctttaagggctttctgtgcagaccgaattcacagtctggattggatacaggctccgggttcccagggtgtagcaggcgtggccctg

SEQ ID NO: 40679 - DNA, 296 bp, Mus musculus
  source 1..296: mol_type = other DNA
ccaggctgggtccagcctccgcactctggggtgcactcagggtgagcggaactgtgatccccatgtggcagcactgaggatacatagcctgtgtgtgcagctgacctctttcaggaggccagcatcccgaaggggctccgtgacccagtgagctgttagggaactgggcctgctccgcccaggagctcccagatgctagctagctgcctttgatcaagggtgggaactggtgatcacagctcaagtccagggtccaagtaccactgcattaaaaggcatctggccctttaaaaact

SEQ ID NO: 40680 - DNA, 200 bp, Mus musculus
  source 1..200: mol_type = other DNA
agggctgactaagccctggggatctcttcagactgtctgtctgacttccaggaagagggcacgtaccgcctccatgctctctggtcccaaaaggtgagcagggcctgccttgtcctttccagaggactcattccctggggctccagggctgtagacactggagtccctatgggtaggaaccttccaggctgggtccagcc

SEQ ID NO: 40681 - DNA, 402 bp, Mus musculus
  source 1..402: mol_type = other DNA
ctggtttttataaagcaccatctggcaccttcagtcctgattaatcaactaaaggacttaggcaagttcttttcaggctggttctatctagaggcaactcactgcctaggtagggagttggcccacagtagaagtcctggagactctgagtctcaaccttcatgatgtggtgaccccaaccatgaactgtaattttgctagttatgaatcacagtgtaaatacactttcctagagcggttccccccaggaagccagcattcaaggttctagcttctagcaaggagtgtgacaatacacttgagacccagactatgcagtgccaccacaggtctggggttgcagagatctttcctactggctagcccggaggggcggagcccgacgggtggcccgcccggaag

SEQ ID NO: 40682 - DNA, 415 bp, Mus musculus
  source 1..415: mol_type = other DNA
tcctagagcggttccccccaggaagccagcattcaaggttctagcttctagcaaggagtgtgacaatacacttgagacccagactatgcagtgccaccacaggtctggggttgcagagatctttcctactggctagcccggaggggcggagcccgacgggtggcccgcccggaagcgcgccggcgggaaggcagcacagagctatgggaccctagccgggcacagtgaacgtctgcagatttgggtgtgaagatagaaagtgtgtccttatttccagagccctgtagggatcagggatcgtcgccctgcctggtgcccctcccaggcagaagactcactaccccttgtgcccagggttcttgggctggtggtctcaagagctggagggggagctggtcccctacagcctactcct

SEQ ID NO: 40683 - DNA, 441 bp, Mus musculus
  source 1..441: mol_type = other DNA
tctcttgggctgagcgccagactggacagcctggagctacaggcggagcttggccgccacgacgcacagggctggcccctgaggattctactctgcctctccagagtctgcggcctaggcttattaagatagcttcacagtgagtacatctcaggttgcccatacttgctaccatgccaggcccttctgctaagatgggagcatagctgctccttcagggaacctagtttgtaaggacacatgtgtgcagacaagtatgcaggcaaaacatccatacaaataaaataaaagctatttattgtgtgtgtgagacaatgtgaatgaactcggggtcacttcagtgagccatctctaggcactgatgagtaatattccccaggggtggggaggattctacatagtaaccctgcaggtcatctgtgacagaatctctcctaaagc

SEQ ID NO: 40684 - DNA, 283 bp, Mus musculus
  source 1..283: mol_type = other DNA
ggcaaaggtttactttttttcttttaaatatttacctatttgtttttgttctgtcttgatacacaccagaagagggaatcaaatcccatcacagatggttaaagcttttgatccgtgagttcttggccaacctggtctacatagaggtccaggatacactaggacaacttaagaccaggggactctcgtccatgttgcagaggcccctggcacttgaaaaatgggaggcgtccccgtgcgccgccgtacgcgtcccgggggcttctgggtagcggttcccccg

SEQ ID NO: 40685 - DNA, 472 bp, Mus musculus
  source 1..472: mol_type = other DNA
gatgatcggctcaacaaggtagcatgctgcttgcttggacccgctggatgattttacttttaagaaaaattgtagatagaaaaggatggatggaggaggcctacacccatcttttatagaagtttaatacaactcatgttgtgtgatcttattttttgagacaaggcctcaccgtgtagctctggctaacctggaactcactgtgtaaaccagttttctaacttttttttttttaaactagctttgcagtaaaggatgttgtgtagatgccaacagaggcatctgtgtctccttggacctatagtgctgggactctaggatatgttagagtccaagagctatctcatcatagaacctaaacttcacagaacggtagaattttagtatctaaaacttcctttgccaaaatcattgttgagaaggcactatctcataggtagttcctgggagttgagagcaggtccagtatctc

SEQ ID NO: 40686 - DNA, 346 bp, Mus musculus
  source 1..346: mol_type = other DNA
ttgacaatacagttgtacttcagtgagaatttctgggcaaaaagacactgtcacccataaacccaaccttgtttggggtggggtaaaacgagggctaggttttagcctgtccctcattggaccaagtacacacctagtggcccaggtttgcagaagaggagacacctgttccctggtacccagatctgtacaaaagtgctcggctctccctgagtccaggggctgcccaagctgtgggcctgggaatcccctctccaggcacgaaggggcggggcctcgggggcgcggccgttccctgcttgatccagtggatcgcgcgcccaggtcctgccccctgccgaccagg

SEQ ID NO: 40687 - DNA, 346 bp, Mus musculus
  source 1..346: mol_type = other DNA
ggggaccgtctcctaaggtcagtccattgctcagccgttgaacagctgtctaatatgcaccgtgtcacccacacatccgctcctcatgtgacacagcgagtgagggcgcccagaggtgcatataggcaaagtagagttcaccatggtttcctgaagtatctggaggacttagcttagtcctccgagctcagcagtgggcttagctgtctatttgtagaacttagcttagtcctccgagcggttgcagcccctagccaacaataacggttgttctggttatgagcaggactgggcgagccggccaggcaggtccctggcctaggtgccaggggccgccccttgtctc

SEQ ID NO: 40688 - DNA, 547 bp, Mus musculus
  source 1..547: mol_type = other DNA
cagcgctctggtggaggatccacccggacgtgctatcccggggtctccgggcctgtaaggccgcaaggtcgctctgggtacgcgcccctcgcgggctatcggggtccaggcaggggcggggcgcgccgcgcgcgtttccgggaggagcggcccgcctgcggcaggtgcggcggcgcggctcgcagtcgcaggtcccgcgactggggtcccagcgccgcgccctctgggctccctagctccagtggtcgcaccttccgagcgctgtgtagagcagccatcgcacgcatctctctggaacggctgtgttcctcgggtgaaggcagctccgctgcctttcgtctggactccctggagcctggcggcagcgcggcttccggccaggatggacctccggtcccgaggaacaagggtagccatcaggggtgccaatgattacttcctcctcccaccccccgaatatgggtagggggaagagcccaagcctgggaccttgcacctgcacccttaaggcctgcctgagtggcaggtgggaggggcttgccagctg

SEQ ID NO: 40689 - DNA, 315 bp, Mus musculus
  source 1..315: mol_type = other DNA
tagaccaggctgtcctcgaactcaggagtgctgggattaaaggcgcgtgtgccaccacgcccggctaccaataaaggccattgtatacacatggaggggtttacaggtgcacattaaccccttcgttcctgcttctggatattcaccaacaggtgtccgctcccacgctagtccacacgtggaagagccgctagaacctgcagctttagactagagaaactggtctcaggtctcccaaaccagttaggacttgcctgcccaggccggccgtgggcggggctgcgcccggggcggggtcgcgcgcagggcgtgtcc

SEQ ID NO: 40690 - DNA, 336 bp, Mus musculus
  source 1..336: mol_type = other DNA
ctagacacactattgtctgactgaggacagtgtacagaccggggccttgaggctctgcccaggtacaggtcagatctgcaaggaagcataacaggcaggcctgctgttttctactggacggcggcaggccaaagaacatggctgacctaggatgcatcgactgtccattttggcggggccaggctctaaaagcccagaatctatgggcttttagacaatcagcagactggatgtaaattcagaccgacccgattaaacactgaagtgggctgggcgaggaactgccgccctcccccgccccgtgccagtgggcggacctgcggtctcaggggaggg

SEQ ID NO: 40691 - DNA, 344 bp, Mus musculus
  source 1..344: mol_type = other DNA
tcctcgcccagcccacttcagtgtttaatcgggtcggtctgaatttacatccagtctgctgattgtctaaaagcccatagattctgggcttttagagcctggccccgccaaaatggacagtcgatgcatcctaggtcagccatgttctttggcctgccgccgtccagtagaaaacagcaggcctgcctgttatgcttccttgcagatctgacctgtacctgggcagagcctcaaggccccggtctgtacactgtcctcagtcagacaatagtgtgtctagctggaggagtggcacattcacatatgtggaactgggacctccccctacagtcgggaggagagct

SEQ ID NO: 40692 - DNA, 620 bp, Mus musculus
  source 1..620: mol_type = other DNA
cgtctgagccaaatatcccgggaaaaagaggtctccccaggaaaagacccttctcagaggagaggactgtactgagcgcgggaggccgccgtcggggctcgggacaccgtaccgccgacggttctgcagcggccgaagagaaggacgccccaaactccaaggcccggactctgcctgggcacctcgggtaagggctccagaccgagaccccttggagtccgggccaggaggcgggaagaccgccttggccgtggacagtcggcagcccgctctccggctgcgcagtcggcttgcgatccggccagcgggaccccagcccgctagaaccgccgtacctgtgcgcgccgccgcacggcggagcagctgtcagaaacgcgaaccgccggccgcggacctttcggccttgctcggacgccgtagcgccgggatctaccaccacagcgggaggggggggaccgggatgctgccgcgggctcggaggctctcggagccccgggtgggccggggcagggctgcggcgggattcagggagatggcggggctctggatcttacggggcggagctagggcgtaatgagccccgcgctatgggcgcgcctggggcgggccttgaaaagcta

SEQ ID NO: 40693 - DNA, 253 bp, Mus musculus
  source 1..253: mol_type = other DNA
ctactcatcagagctgatctaatagctgctcattaagcccatagtagtgagcacaagacgttatgagaagggctggaggacatccagtcggcctgcagcagacgccgggatgatcatggcggcgtctggcgtgcaggctgccggcagtagcttttcaaggcccgccccaggcgcgcccatagcgcggggctcattacgccctagctccgccccgtaagatccagagccccgccatctccctgaatcccgccgc

SEQ ID NO: 40694 - DNA, 426 bp, Mus musculus
  source 1..426: mol_type = other DNA
gttatgagaagggctggaggacatccagtcggcctgcagcagacgccgggatgatcatggcggcgtctggcgtgcaggctgccggcagtagcttttcaaggcccgccccaggcgcgcccatagcgcggggctcattacgccctagctccgccccgtaagatccagagccccgccatctccctgaatcccgccgcagccctgccccggcccacccggggctccgagagcctccgagcccgcggcagcatcccggtcccccccctcccgctgtggtggtagatcccggcgctacggcgtccgagcaaggccgaaaggtccgcggccggcggttcgcgtttctgacagctgctccgccgtgcggcggcgcgcacaggtacggcggttctagcgggctggggtcccgctggccggatcgcaagccgactg

SEQ ID NO: 40695 - DNA, 474 bp, Mus musculus
  source 1..474: mol_type = other DNA
ctctaataaccaccttaggtgtgaagcttcctcttcacagaagagagctagaccatgatctccacttcctggagtggtgggccaatcccgctcttctgcaaaatgggtccataggaaggatccaatggggccacctgagtggtcagtctagcttcaagcctcagtttcggaagtaggaacctggagtatagaggcttgtaaacgccggttccacgccggtggcctggggtaggtcagtccaactgccagggctctggggcaggcaagactgctgtaggtgctagtgcagccctgtgacactgggtttaggtaaagccgggctcacccgtgagagcgagatcggggctactcaccaggaggtgtagcgcctgcgcgctccgcacagctccggttctccaagccgcgagaatgcgcacgctctcttgcaccgcccgtcgccgggcgcgaggctcagcgtgcgcgccagcgcgtgcg

SEQ ID NO: 40696 - DNA, 307 bp, Mus musculus
  source 1..307: mol_type = other DNA
tgtggtttctgcaggaagggttctagctcctacaatttgcaagaccaaaaacagcagtgtctctactggagacagtgtcacagtctgtcctgactatgcgcatagtgacccacgtcccccatacttgacagggatgggttcccaagaccctaaaggccttggtggggatgttcaacatcaccaccaacttctctgggaggatttcgggatgctgtacgacaggcccttgatcaatagagggactggctgcaggagcggaaacagcacctacgtgccgtgcgcaaggcatctaggaagctggcgtggc

SEQ ID NO: 40697 - DNA, 512 bp, Mus musculus
  source 1..512: mol_type = other DNA
ctgacagctgctccgccgtgcggcggcgcgcacaggtacggcggttctagcgggctggggtcccgctggccggatcgcaagccgactgcgcagccggagagcgggctgccgactgtccacggccaaggcggtcttcccgcctcctggcccggactccaaggggtctcggtctggagcccttacccgaggtgcccaggcagagtccgggccttggagtttggggcgtccttctcttcggccgctgcagaaccgtcggcggtacggtgtcccgagccccgacggcggcctcccgcgctcagtacagtcctctcctctgagaagggtcttttcctggggagacctctttttcccgggatatttggctcagacgtagacattttccaggtgccctggtcggagccactggccagcttggtggttgtgcccccgctggcagcttttgccatcccccatggagacggagccacgagctagggtcccctccccccaacatcctgccctggccagagggg

SEQ ID NO: 40698 - DNA, 364 bp, Mus musculus
  source 1..364: mol_type = other DNA
cagcttaaacattaacctctaatatggttcaaaatataagactatcttggagaatgaatattagctcatcgtctggcacagactgcactgccagatgtcttatctactgtctcacagacactcgtgcctcactgcacgtctctttccgtctgagaaaaaagacagagaaccacaggttggtggatagtagctaaccactgctatagtgcaccccacagcaccggccccatcgggcagagtgctgccccactcagcgtgaccagttctagctctctgaggaccacactctggcccagtgagcaggtcactgaggcttctccattgtgtggctgggagctggttccaaggttcttgagcccctctc

SEQ ID NO: 40699 - DNA, 374 bp, Mus musculus
  source 1..374: mol_type = other DNA
ccctcaccccaggctcccagtgggactgggtgctctcaggggcttgagagacagtctcaagaaagagcctggctaggggcacccacagctcactcagcccacagtctttttcttggaaggaaaactcacaataaaggatcctggttggagcctctctgacatctctctgacagccccatcccaggctgacagtggacagactgtggcaggacccaccctggcccccagcacagtgggcgtgtcagtcccccactgggagtgggaagaatggggccacaaccattgcagaattttccaacgtctgacactgataaagcagaacccaatatcctgtttggccactgctgtgccaggcaggcgggacacaccacccc

SEQ ID NO: 40700 - DNA, 369 bp, Mus musculus
  source 1..369: mol_type = other DNA
ttagaatcatgtccttcgtgtaacagctgtgcctgctggggttggggctaacccctctgctcagactcctcttgtacccaagggacacgagtccaatgattacatgtaattccagagactggcagagcctgggacttagctgggctcagtagagtatagcaggctccacggagacaggtggccccccgcgtccccactgctggagcttccctggatgacgtgaagtgaggggcagaccttgtgggatgtaattccagcaggcacctcctgcctatgacatcctgaggaaggccaagttaagataaactcagataacctgaatcaatatttcctctctgggacccatggagccccctaagcatataagtc

SEQ ID NO: 40701 - DNA, 260 bp, Mus musculus
  source 1..260: mol_type = other DNA
aaagttcaaatgtagctctttctttaacctttgacctctctccagcagggagagggccagagtctctggctaccaatcaggagagtgagcatccatcccagcagacatgaaacgtatgagcctctgctgcagctgctggttaatagttttgagcctcctctccaggactgtccaggacagtgagacctgggggagcctcagggaaaccaggctccacctgctccacccacccacgtgaagtcactggggctggagccagc

SEQ ID NO: 40702 - DNA, 419 bp, Mus musculus
  source 1..419: mol_type = other DNA
acttagacgtgtgcaccctgctctgagctgagcccccgggactcccatttcaggatggacagtgggtcaggagactcccggggtccagggcccttgagacccttggtcatttcctttgtcaaggcccagggttaataagctgctcatggcctgccttggccaaaaccagtactgggccttctcagattctgtgagggttccccttctccacagaccctcagagaacctagcacctggggtcagcttccccggcaaacacaagccaaggttgttgtgtagtgtctagtctcctagaggagctgacacagggcccagggcttaagccacaaggggtgggagcactctggtggcacagtgattggctgtgcaggatggccagggaactgggctctgggccaaagcctttggctacataagtc

SEQ ID NO: 40703 - DNA, 393 bp, Mus musculus
  source 1..393: mol_type = other DNA
ggatatagatcagtgtccaggaacagagcccagatgcagtcccatgttatgccaaggtagagactgtcactagagacctacagactggtgaccaccatagggtaaactccttataggaaagtattcttctgaagagagtgctctgtttcttcttttaaaatttaaatataaatgttctccgaattttgagcggtggtatcacagctatctccagttaggtgagcaggcttctgcccgcaggagagtgttcaggttttgcgcaaacagtctgaactgcgcaggcgtgtacgggagacccatttccccctgaggtcggaacacgcgtgcgcggattagccggaaggggcggggccagctattgccaagctctgtgcgactgtcagctgactgaag

SEQ ID NO: 40704 - DNA, 227 bp, Mus musculus
  source 1..227: mol_type = other DNA
cttctctggatctaggtactagggggtctgctgcagagagcctctgctacttcccacgggaacagaaagatgcaaacccaggggttcagggagaaacccctggcagctaaagcactctccggaggctccttcctggcccagcgcgctcttagagactggcggggcggtccaggacagctgcaagcaccagttgtcacggtagctgcagccggtggcgctcgctcggg

SEQ ID NO: 40705 - DNA, 398 bp, Mus musculus
  source 1..398: mol_type = other DNA
atgctggacactggaacctcctccagctttaggcaccagcctcaagctagattcctccatgtggacccgtagaggtctacagctgaagggttgacccagagcatgttgcctcttcaagacctcaggtgaatggcatcttccatgagccattccaatcagtgagcaaggtggtcaatggccaggttctgaacagcttgggaattgtcattgctgtgaagagacaccatgatcatggcaactcttataacattatcatcatggtggaaagcatggcagcatgcaagcagactctgtgctggccaagagttctacatcttccaggcagccaggagaagtctgtctcctgcaggaagccagagggaggctctcttcatgcctattctataggggtcagacct

SEQ ID NO: 40706 - DNA, 474 bp, Mus musculus
  source 1..474: mol_type = other DNA
caagcatctctccagtgtagagaatagagctgtattcaatgagttcctagtactggtcctggatggaactccgatgttccagcctggggggtctggatactcccaggtctgggatactggggtcagggatactcaggtcccaggaacttcagactcccacgggtctgtgcattccactggggtcaaggcactctatagtgtcctaacactagaggtgtgcaacaccggggtcactctagagacaccgggggtgtgatactccaggatccagggcactgcgcaatgacaggcagtttgcgagtccgaggcactctggagttccgggcgtctgggtttctggggcccctctggtgatccagaaactctggatggtcttcagatacaggatgctcctgggtctcgaagccccgacatcgccgcaggggccgctgggactacgcgtcccagcaagccgtgcgcgcgtcacgtccggca

SEQ ID NO: 40707 - DNA, 402 bp, Mus musculus
  source 1..402: mol_type = other DNA
tctgccaacctgtttgcaggtggaccactttgacagtccccagcgggtccaagcggcttttgggggcagcgccgccctggggagcacaccggtgggtctggagccccgccccctgatttcccgggatgagtaggactcaaagtgtagagctggacttccacctccaggggtcgtggatgcaggtaaggccctttgcggccgcagctccccttttccctgggccgcactggggcaggggaggcgcactctgggagggcgtcctctcaggagccctgagctgggaaggcttcctggcgggggacggagggcggtggcagagagacccacggccgccgccagggctccgcacccagcgcccgctccgctgacgtcacctgcccccgagcggctcaggcagccccg

SEQ ID NO: 40708 - DNA, 378 bp, Mus musculus
  source 1..378: mol_type = other DNA
cactgaaatctctctagtataagtaattcaggggttacacttctggactccaggattggggaagaatataatttggtcatttgtttacacaaatccccaagaccatgggcctctacctgaacaggtctcagaagtagaacaggcctgtacctctacacatgcctcctcgttccgctcctccagctgggaagaagaccagatcttgtccatgtctgccagcatgccccagcaggggtggatactgggagctcacagcctgggcgctgtctgtacaacatggcacctggggtgcctggggtgcttttgccaaaggaagtctgagaaaacctaaccacatgcagcctcctgcttgacctgggcaggggtataaaagcccca

SEQ ID NO: 40709 - DNA, 265 bp, Mus musculus
  source 1..265: mol_type = other DNA
cacatacaggcagataagagtccattttttatgtgtgagtggcacagcagataccctgtaaccggagttacgtgcaccagggccctctttgagagcaggcagtgctcttctttcatacaaaaagagctttggagctcatgtaagtaatttctctcacatgccatgcaagcgatatacaaatatatgtgcatgaaagctaagtggacagaaagctctatctccacaaatgtggcttctgttttgcagtagacaacaaatgggaatt

SEQ ID NO: 40710 - DNA, 509 bp, Mus musculus
  source 1..509: mol_type = other DNA
taactccaggtaagccagcctgcatggcctgtggacatctttatttaaccaatagttttaaattaaggagcaaagtcctattgtacatgagtattctctctttcctacaaccttgtctaagggggtggggtctcctggacaccttgaaccaagagaagaatactacacctggcagtgggctttttatttgttaggggataactattttgtacaaagcttataagctcgtagtgtctaggatatatgatagtgtattaattaacagattggtggatacttaccatcttaaaaaagggtgctattgaacagtgtcaatttcatgactgattatttggaacttcccacaggagaactttgaatgatatcattccacctgtgtagattcttcccagcggctgcaaactgcagaaaattaatttctgccagaacctcaaattgggtaattgaaggataacaatgtttgtgttactttaaatcacaggcaatgtccctgtggatagtataaaaat

SEQ ID NO: 40711 - DNA, 275 bp, Mus musculus
  source 1..275: mol_type = other DNA
tgaggctcactggtcaggatgtggtcctgctgccaggtggtctgacaagttctcagaactcagggaagtctctaggagatggaaaatttaaggtctttgaagaccttaatagtctgataattgaagatttctctcagaatatctttattcctgccaccattgctgtgtccaagggaagctaaggctggatccctcttcaagctctattctgtagaagcaaattccataggaaattacgtacttcacacctgacctgggcagggatataaaggccc

SEQ ID NO: 40712 - DNA, 324 bp, Mus musculus
  source 1..324: mol_type = other DNA
agctacttctcctcaaacaagacaggttgtgaaggttgcaattgagggacagtgggcttctcacactgccatggtgcatagagcatcttcaccctgctcctttacacaaaattgaagtctactactgtgtactgaaaaccgtagaaggctgctgtaagtcccagttcagtccgaactacatcgtgagatacttatatagctctacctacatagaaaaacagaatttttaaaaagcgggacaactgagtccttcattcctgtttcaggaatcaggaagtgactcatgacacctgacctgggcagggatataaagacccaggctca

SEQ ID NO: 40713 - DNA, 305 bp, Mus musculus
  source 1..305: mol_type = other DNA
tccctgaggacaggcaagcctgttacaggtcagattgtccctgttatgatgaacatattagaacatatgtcagacttgcttcaaaaaggaggcccagggcagggttctgaagacagctcagacagggcttgcccagcccatcagactccccggggtcctggcttccgggctagcgggccccctccctccctagggaggaggcggaggtgtctgcgacgccgccgtgagtcaggctctggctgcagccgcggccggcctggcgctgcggagcgcgcgcgggcagcgggggaggcagcggcgccagc

SEQ ID NO: 40714 - DNA, 212 bp, Mus musculus
  source 1..212: mol_type = other DNA
tggaatcttaggaatgatgacagtgtagcccaggctgctagcttagaactagaactcagagagatctgtctgcctctggctcccagctgcgatacttttgaagaaaagatatccatattgaagatgggacagttccctcaagaccttgaccaggtgacctgtgagtcacaggggtcacacttgttaatgtttacaagttaatgggatggacc

SEQ ID NO: 40715 - DNA, 433 bp, Mus musculus
  source 1..433: mol_type = other DNA
tagaggcatccacctcctcaatacaggtagatgtcgcgctcccgggatcagaccctggcaaggaccacctctcagagaggacattccccttaaatgcctttctgggctcagctctccatgatggagagctggactctgcctctcatcaatagatgcatagtccaggactaggcctgcaatcaacattgctacattatggaatgctgagggcaggatccgcccctctggatgcttccttctccggtcccaggaaagtgggcgggcgcgttcccgagagccgtgcgtaggcctggagtagggcacgcctgcgcccgggcagtgttggaggcgggttcgggtcgccccgcccctcgcccgcgtctcacgtgacccgttggccaagcgggtcagctgactccgcgggactgcggcgtcatcctgcctataagccggc

SEQ ID NO: 40716 - DNA, 360 bp, Mus musculus
  source 1..360: mol_type = other DNA
cccctacacagccagggctgggtcccatgatatctctacatctaagtctctgttacagaacctgaatcataccagaggatagatccatctcacgtctctgcccacgtgcccagagacacttatgaaaagcatggatgcccatgtccgcattctacagcagaacattccaatgtctgactgtcaggcacagataagggctgaagagtggtcagaccggaccaactggtccaggccctcatggcccttacagggtgcacagaggtcagcccagcgggcttggcttggagtaacctccagccttgaggaacctcagagaggggagaccttcgctctcaaggtcattaggtggggctccccaaa

SEQ ID NO: 40717 - DNA, 375 bp, Mus musculus
  source 1..375: mol_type = other DNA
cactcattgcccagtgctgggaaatagggcactggctcctttctttctatctcttgggtcagcaagcttcaaagagagagtctctaccatgttgtggctgcctcaacttggcccagtgacactttagcccaagtcccgggactttgggatctggctaggggagcaccacatgtgggaccctggacatggctgaggccatgaccttgaagcatcaagaactagttccaccatgttcattgagttccatgcgctactctcaggtctatggaccagagttgcaaggagaggctatagctttgttttaactcttcttctgttgcagcaacataggaaaaaaaaaaaagggtggggggctgaggctctaggccaccgccc

SEQ ID NO: 40718 - DNA, 355 bp, Mus musculus
  source 1..355: mol_type = other DNA
ccacaaaggttaccccttcttggacaggccagcgcctgggctgaccggccaggcggctgggcaggtggagaggctctcctcctctctgtgccagactccatgccctttctgagcaggggcccggcccagggaaagcaatttatacccctccccctgggctcccagcactgctgcacagcatctaggtgaggcccagcccatcttcctgctgccgacagctctctctgaggtctcccacagatctagggttgagagcaacatctcggataacaggccctgtctctccctggcagccacctgtgctggccagccccctccctcggggacagctgcagctcctcaggccccgcccggg

SEQ ID NO: 40719 - DNA, 266 bp, Mus musculus
  source 1..266: mol_type = other DNA
ccacagctatgagtgtgtccagtgagtcacagtgactaagcccaaccagcaaaacaatgggctgggctgctttgtccctggttccgagcgagggcaccgggtaccctcagcctcccaacgacctgggaagattcctggggtgcccagcctcccctggaggtggcagctgaggcccagacctgggggggggcagaccaccatgctgcccacaagcgggcgtggaggtccagccaggcccccacactgcggggctgggagggtttctc

SEQ ID NO: 40720 - DNA, 458 bp, Mus musculus
  source 1..458: mol_type = other DNA
ggtatccccctgaagagacaaggctgagcctcagctgagaaccatcatgcttgttccagggaatgggcccaggggaccagctcaggtcccactggcctcagctgatgtgacatccatagggatgtgtgagtctatcacagcccatgggacctttcctgcttcatgcagtaactgggttcaacctctttctcccttcgcaccccaggaatgaacagtccctgaggggtttagtagcactcagggcacagatgtggccacagggccaggcagggtgtcccttgatccgggaacagatgcgtgttgaaaacaaccagtaggtgcccagctacttgtctggctcctcagagaggcaggaacctgccacacatctgtccaggtgggcagccaaggagaggcagtctcaagccagtgccagccaccgtcgcgtgtcagggagtaagggctgtctgctgctgtga

SEQ ID NO: 40721 - DNA, 217 bp, Mus musculus
  source 1..217: mol_type = other DNA
ccttccaagacatatttttggagggtggtgaggtcttccctgcagtcaggtgtcagggccagaccaggcctgaggcccctgaagggagaccgctgctctgacaggccctggggatacgtcacgttgagctgagttcacctcccctgagccctaccagtaggtgtgaggccttctcaaagacagggtgggagataaggcttatcctttcttctatccc

SEQ ID NO: 40722 - DNA, 372 bp, Mus musculus
  source 1..372: mol_type = other DNA
tcccagaccccatggcttgtcgtgtggccctaggggacacagacagggctctggtctctccaccaaatcttaagagtttctggaaggtttggattgacccaccatccacctcctatgtgatcagaaggagagtggagccagtcttctagcctgctggctcatagaacagagcccccttagaggcccctggagttgttggacctccatctataccattagatagatagggttcagtgagctctaaatattgtggatgcccagctcaatctggccttgagggtcatgtagagtttacactagtgccaaagaatagggtccttagaggtctatagatgagcaggggagggtggctacccacttcagaagcctttg

SEQ ID NO: 40723 - DNA, 387 bp, Mus musculus
  source 1..387: mol_type = other DNA
acgacaagccatggggtctgggaccaaggccaggcacatggcgaggtctgctcatggccaggtctgctcagcagggcccacatccctggacagagatatgacctccaggtccactacttagtatggagcccccagaccaataacaggcccaagcattgctcagccctccccagttactgaggaataggtgatcatttctcctattaggtgatcatttcatgagacgtgttccagtgatgtccacttgaaaataggcctgaagaacagccttggtctagacccaatcccatcaagcatgtgcccattgctgagggggagaggggcctgcttgggcacaccctcccccttcccatgccgccacccatctgctggccaatgggctgccag

SEQ ID NO: 40724 - DNA, 158 bp, Mus musculus
  source 1..158: mol_type = other DNA
ggctgggcagctgaagaaaacaacccagtcaggctgtggaacgtgccgggggcggtgcgcaagcagcttacggtgcacggccgaaagtgcggggccctgcggtgcaggagggtagcgcggcctccggaagcgagggggcgctgtgccagcgcgggcgc

SEQ ID NO: 40725 - DNA, 174 bp, Mus musculus
  source 1..174: mol_type = other DNA
ctggcagcagtgggcaggtgaggaccgccgtctgctgggcagccactgaccttctaaacgaaggtttagagaggccgctgcctccagatgggtcccgctctggcaaagtcccaagtttgcccaaggaggctgcagtgggtccagcctgcagacacaccattcccatgaggcact

SEQ ID NO: 40726 - DNA, 339 bp, Mus musculus
  source 1..339: mol_type = other DNA
tcactttccaaaggtgatctggtgaacaaggtcaccgtcatcaccctgttactgacaaggggggctctaaccaatgatagagtttcaagaccagttctcagagctccctgagattatagatgtgcacaggagcgaggaccaggctctccgtccccttctgtgcagccacaggaatctgcaaggtggctgcctgaggtcatgctttcacccactgggtgaatatacactaaagagtcaattggtttccccagcctggacagactgtccgaggggaaggctgcccaagggcacccgggcatccgtccggggacattcaggcagtgcaatcccaggctgcca

SEQ ID NO: 40727 - DNA, 124 bp, Mus musculus
  source 1..124: mol_type = other DNA
tggaggtgggccctgcgggggccccggcggggccatgtctggcagcagtgggcaggtgaggaccgccgtctgctgggcagccactgaccttctaaacgaaggtttagagaggccgctgcctcca

SEQ ID NO: 40728 - DNA, 255 bp, Mus musculus
  source 1..255: mol_type = other DNA
tcagctgacatgcagccactaggctgaggatctgccaaggtgctattgcacctcacataggtgagaaccactgctgagtggtcatgactggtcagcccctcctgtccccattctatcactgatagtagtacttcagtaggaattagctactacctttagtatgagacccatgccctcaaattcccattgtggtcattatacaaactgagttgcaccatggaggtgggccctgcgggggccccggcggggccatgt

SEQ ID NO: 40729 - DNA, 398 bp, Mus musculus
  source 1..398: mol_type = other DNA
gcgctggcagaggagtgcccggcagaagggccttcgcccgctgttcggttcccgcagcagggagatgggcggcagcgtcgccggcttccaggtaagggctctcaggggccctgggagtggggggtgcgcagagcccggctcccttgcgccatggagtggttgaactcacaggagacttcctcataaaatgtacgattcgtgctgtgcaggccctgtacacccccccccaagggtgctgagtgatgaggaggggggcagagtctccgccacccctttgtgccaacattcccaacctggaatgttgggggccataggaggatgtgggaaggagccccctccctccccccattggtctgtgcagaaagggctgggggcgcacgatgaggcccccctcccac

SEQ ID NO: 40730 - DNA, 514 bp, Mus musculus
  source 1..514: mol_type = other DNA
ggggcgcacccaggcgtcaccccggccacgggcacccagctcggttagggtcgacggagccctcagccgtcgtaagcccgtgggggggacaggcgtggcggcgcctcagctgctcgggcagccgggctgcgcacccaacgccggcgacctgcaagccggactgcctgcggtggggaccgcctcctctgtggggagatccgcaggcccgacggagcgcggccccgccgacggcgccctgcacaggcagcgaggtggcggacggcgtcgacgcggggccgccagcccggatggaggcgctggcgggccgagcgcgggcgggcgtgggccaggaggcgggggcggccggaagggggggccgggggccggcctggcctcacgcagctccgccggagagcaggcgaactccgggcgccaacgcccggttcttatagccgcgccaccccgcggctcggcgcccgctcgggccccgctggccttacgcccgcgccaatgggcgtccgcagggccctcgccc

SEQ ID NO: 40731 - DNA, 520 bp, Mus musculus
  source 1..520: mol_type = other DNA
tatctgaaaccacccggggagagttcgcattggcccctggggccgaacctgcaactaagcaaattcaaagtgctgaggacagggaactgttatgggtcccaaaggcgcgccgcttagaagcacttcatccacgcggggcccagatttggcgtggccaagccagccttcccttcatggtgcacctggtggccccccaaaggctgctaggagatcctcacagcccgccctgcctgctcaggcaggtggaggctgcgcgctcccccccccccccccagcccccctgcttagcaagtagggggtgccacgcacgttggttcgcaccacgcgcccatggtgggcctgttggggcgcacagcccccccccacccagggcccccgacccgcattccccgcgtggctcgagttgcgggggcggtcccggggcggggcgagggccctgcggacgcccattggcgcgggcgtaaggccagcggggcccgagcgggcgccgagccgcggggtggcgcggctataagaaccg

SEQ ID NO: 40732 - DNA, 150 bp, Mus musculus
  source 1..150: mol_type = other DNA
tacagtaggtccactggagaggtacccaccttgcggatttgctggttgcctaggaaactctgagagagagctgggggctgaggaacaatgtcccctgctgtgaactggttcagcccaggactaagtagcgctttctgcaggaaactgcag

SEQ ID NO: 40733 - DNA, 389 bp, Mus musculus
  source 1..389: mol_type = other DNA
aactttaatgaactttgttgaatttatggataatgttttatggtccccaaagcacacttaaatgtgtcttacaaatttcctagctactaatttttattgatccacaaaacagggagtatgtttctccaagaacaaacattgttcaacaaaaagatcaataggaatctgtttaggaaattaaaatattaaaagacattgattttttctggctttctgacttctctgaaagggtgaacgttttcatttttaagcaattaaaattaagctcccctaaatttcatgttgggaattttcttaaacaacaacacctaacttctacaaattagtctaggattttgtgggttccccaagctttctaaccaagatattgggttcacagggtctgactt

SEQ ID NO: 40734 - DNA, 398 bp, Mus musculus
  source 1..398: mol_type = other DNA
agaaaggtcccctctctggtctcaatcaaaaggccccttggtgttagaccttggggtgcctcactgagtgcgcccttacatgggggccagctgacctcgtccccccagggaggggaggtggcaccttgcacactatagaggaataatcttctgaaacattctgtgtctcataggaggacccagccccagtgccagcacatacactggggcagtagagggctcctagatttatttgtctccaagggctatatatagcgattagagagctctagatgtctcctgtcccaacaagccagcccctggatgcaattagatctaatgggacggaggcctcacccccgcctccctcaggcacagcaggcgtggagaggattgacgtcagcctggcctttaagagg

SEQ ID NO: 40735 - DNA, 443 bp, Mus musculus
  source 1..443: mol_type = other DNA
aaaggctggattaggatgatacagccttgacgaatcctggagagtcatggaacctgcaggcagttttggtagccctcctataggtcttgcttggctcccaagcacctacctagtcctttgagggaaaaactgagactttgacaaggtcagtgcatttcccttccccttcaaccttccctccaccggcctcaggggaaggatgggacaggggcacaggtgtgctcctgcaatgcgtggacaccgggtcctggtggaggagcaggggagtgggcgtggagccttgtgcgagacactcccccatctctggagccacgcgccaggcgtacgcttccttctggccccggcataggaccgcgccaattgtcattggccaaacgggcgatcccagattggctgagaccccggctcccgcctcctccgccagggggagggacgtgggtgcg

SEQ ID NO: 40736 - DNA, 248 bp, Mus musculus
  source 1..248: mol_type = other DNA
aacctcaggtgtcactggctggctggccagtgagtccgggcagcatcgtcctgcctcagcccttcctgcctcagcctcccaggtgctggctgtgggaagcatttcaatcaatcatgagacacatttgccacttgcagaagtcctgtttggggagtcctgctgcagtgtagcccagcgaggccaaggacacaatgatacctactgtgtctgctgtggtctgaggtccccacccactggggaaccacaga

SEQ ID NO: 40737 - DNA, 226 bp, Mus musculus
  source 1..226: mol_type = other DNA
tgctgcagtgtagcccagcgaggccaaggacacaatgatacctactgtgtctgctgtggtctgaggtccccacccactggggaaccacagaggcactaccaacttcctagtcttggtaacaagttcaccatgcccgggcttccagcactgtgctcgactgcagacgagtctctgcagacgggaggacacagcgtctgaggtccccactcactggtgaaccacagaa

SEQ ID NO: 40738 - DNA, 341 bp, Mus musculus
  source 1..341: mol_type = other DNA
ttaactgctcaaagatttaagaacaagccccattgcccttcaggaaggggatgacagcagccattcctcacccgggaaggaaggcctaaagactggctaaagacattgggtacactattgaccttcccaaatgaacatgttaacttttaagactctttactgtcgagacacctcgggtaccctccgggagtcgcgacccagaagcccccgcacagtgcaccgaagaaccgttactgaggtggcagcacccacccaagtacccctggtccgggcaccccgcgggcggaaggcggggccaggggtggagcgtcctctgggcggggcctcggaggggcgggacc

SEQ ID NO: 40739 - DNA, 274 bp, Mus musculus
  source 1..274: mol_type = other DNA
taggactcctatgttatgaggtccatgggcctgttggaggcctgctgcacggcgcatgcagcagccccatggtgtctcagactctgatcccttcctgcgtcaggaagcacccaggaccttccgcccagggccggatgtgtcggacccggccgggacggcttccgacaggcgaagctgcaggcctcaaccctttgcgatagtcccggctgacgggaattgtagtttctcgggcgctgaagccacgaaaatctgatcgcccgagactcggtttccc

SEQ ID NO: 40740 - DNA, 412 bp, Mus musculus
  source 1..412: mol_type = other DNA
tcaagttgacaacttgtcctgggatgcaggtgcccttccatccccacatccttctgtgtcactctggagaggtacaaacttaaagggagtgtaaacatgtaaacgctcaggcagccccgcgggcggtgtctacctctggacacccaagggtgctcagtgtccgctgggtccatgccgctccctctctagggtaggttcagatagcgagggaccctagagccaagcagcgggcggtcctcggggtgcggggaagcacgtgcgcccagcaggtgcgcccagcccggaacgcggagatagcctgacttggcttggcggacccgctggctgagcaaggccgcaggtaggcgcgcggtggcgcccaggggcggggcgtcctgggggcgggacatgccatccccggggaccaaccccg

SEQ ID NO: 40741 - DNA, 484 bp, Mus musculus
  source 1..484: mol_type = other DNA
ctgtatttccagttcacggaacacatggaatgacttaagtggaaagaaaaaaaaagtattttccactacttgattcccatcctgaccagtgccctccacgtgggcctggcccgccatgttggacaagctccgtcaacttctagatggtgtccaccaaaagagatgtgggttccatgggcccaaaacttcccaccaggtggcagcatctctcaggaataagagtggcaacgctctaggcccagcctggctggacggctgtcctcaaagaaagccctggccaggtggctttggctctctggtattcatacacaccccccccaccctgtggtctgtgtaagaggaggccccactgaggtgaagtctggaccccagcccagaagagtctggaaggtggagcttgcaaagccctggccccagctgtttccatggccagggaggccccctggcccagcggtccagcctccctctgcctgaggggtgggaa

SEQ ID NO: 40742 - DNA, 357 bp, Mus musculus
  source 1..357: mol_type = other DNA
tcaattctgggtaaggcttgcttatgaatcctgggcaagtgaaacgatcctgaacactccagtgaataacatgggcagacccagggccccctccttttcataagtaagaccaagactttccttacttggtgattaaaaaaaaaaaaacaagcagggtggcctccttgtgtgctttagatgaccacaccccagcaggctaggtcgtacaatcctgtgctgtttcctcttggccaataaaaatagtcagcacagagctatctgtattcatgaggaagagctccctagtcattattcagcatctgtccaatcaacagtgtcgtggctgccacgtcaccaaggtcttggtaggtggcctag

SEQ ID NO: 40743 - DNA, 596 bp, Mus musculus
  source 1..596: mol_type = other DNA
ctacttccagccaactaaggtaggcagaactctgacccaaacctaaggtcctaggcatcaggtacaggctaggatgggcccaacttgtgtctcatctcccgggtaggtgggcctattatagaccaggctacagatcttttagatctctacagtattgttcctcaggaaaagctctaactccgtgatagagggagggtggatccagccacggtactgccaggaccaggacccagctggtgggctagcgcgggctgcggggaccgagggaccttcaccgacgtcggcatcgccgaggggctgtgcccagctccatggtccgagggggcgcgcgcgtcgcggctgcgcgagcccccgcctgcagacaaaggagcccgcggggggcggggggggggcgtcgcggtgtcacgttaccgcccgcacccgcgcagcccgctcgccgtgcggccgccaatcagcgcccgcccgtcacccgccccgcccggccccgggggtgtgtgcgcgcagccaatgagcgtggcgcgggggcagggcctctgtgggcggggcgggctgcaccctccaatcgggaggcccgcgcgcgcgggggtggggccagc

SEQ ID NO: 40744 - DNA, 224 bp, Mus musculus
  source 1..224: mol_type = other DNA
tcataactcagtgctgaatgagtgacgtgcatacaaacaagatacattgtatacatgtatgaaattggcaaaaataaacatcaatggttatggatgaaggaggttcctgcttcatagacacttggggatcaggtgttctcagttgcctgagcttaggaccccactgggaagctgcctcccaacctggctccagatctagagaaagctacttcctcttcaggagg

SEQ ID NO: 40745 - DNA, 229 bp, Mus musculus
  source 1..229: mol_type = other DNA
caaccctccgggagctgggatgggttcctacaacctctgtggaatctaccccaagcatacggcacataccttgcccagtttgagacatgttctcactgggtctgctgagctgggcatgcagcaaaggagatctctgtggtgcttgagtgcttggaaccagagtccagggcagggctgaggactgggaacctcgcaagccccgtggggggggggggggagcctcaggctc

SEQ ID NO: 40746 - DNA, 399 bp, Mus musculus
  source 1..399: mol_type = other DNA
ctactactattaaacctttaaaggcagagggtaaatagccgcccccgccgcccccgccgcccccgccgcccccgccgtcgaggttgtacagtccgcctggctgagcactgcagggtgctaaaggtcattgtcccattttacagaagggaaaagatacttcccaagaaagtgtccacgacccgcgtgttcggtctccccgtgagtgggattttcccaggtcttcccggcccgtgagtcacgaggggcagggaccgctgaggtgcattcctctgcaggcagggccggagcctgggcgggactccacctggcagctgggacgttggggctggagggaaggctcggggctcccgtcagagaggcgccaatcctgggctgcggggcggagtccttataaagacc

SEQ ID NO: 40747 - DNA, 550 bp, Mus musculus
  source 1..550: mol_type = other DNA
ccggagaaagcaggaatacacccactctctcccggagaaagcaggtacccgaacccaagatgcctacctgggtgcagctcggggcccttgctctctctctctctctctctctatatatatatatatatatatatatatattagatttatttattgtatgtgagtacacagtagctgtcttcagacactccagaagagagagtgtgtcagcagtcactgctcttaaccgctgagtcatctgagctgctctgcaagaatgaggtctgaagaactgagctcccactgcagctccagactccagagctggaggcaggcatttcctctagaaataaggcatggggtgtccccgaggaagacaccagggctggtcccctttcaggtggaggtgcacccctgcagggtcggatgcccgctggtggggagggcagctgacccactcttgaaggtcgaggtagctggagaagcccgtgagctccacagtcacagcacccggccagaatcaacaggacttttgccccttgcccgcggcaaggcttgccctgctctggttc

SEQ ID NO: 40748 - DNA, 310 bp, Mus musculus
  source 1..310: mol_type = other DNA
tatctcttatctcagaagtactgggattgaaggcatgcatgttgcaccatacccagctttgtttccaactgccctgttcgtagaatttgttaggaaaacacacattatctgcaagcaagttatttattcttatcagatgttgtctattgcttcaatgaaaacagcccaggggtggtactacccacaatgggctgggcattttctcaccagccagtacagatgtgctgaacttttctatcacttttcccaggccggggtaaagaagcacgaactgcgcgtgcgcgttgataaacccggcgatacggccaat

SEQ ID NO: 40749 - DNA, 253 bp, Mus musculus
  source 1..253: mol_type = other DNA
ctcagcaccaggctggtctggacctcagctgagggggatgcatgccaggtagtaggcctgagactctagggttctcagaagtagatgcataagctctgtagggacgcctatctagttcattggtcaatgcatgcacgcatcgcttaagctgcctcagctttcagactccctgagagattttgaagaacttctctgtaaactttcaaaacactaacagctcaattgagcaaaaggcagcatctggactgcagca

SEQ ID NO: 40750 - DNA, 332 bp, Mus musculus
  source 1..332: mol_type = other DNA
aaacaatacatattaccaagtatcaattattttttaattaattatttatttatgttgagacagagtctcttatggagccatggctgacttggaactcactggttgccagaatatatatataccagaatatataattgtatttatttatttccctggatcccatggaactgaagttacaaccggttgtgagcagttgtgagcggtgtcctccagaagagcagccgtgctcttgtctcgctatatacctggctatgtttctaaaataatacaatggtgtgtcaattggagagtgtctcagaaaaaggcgtcttcccgactggtggggcgggact

SEQ ID NO: 40751 - DNA, 326 bp, Mus musculus
  source 1..326: mol_type = other DNA
aggactctgagtcctccctcattttaaagaggaagtggccctggatattttgaggtcctcagagtcagcgagtcccacacagcccctcagaccctgacagtgaagccttcagctgctgcacagggatagagttacttcaaaaggtccaggaaaatttttaattaacttataataaagagcagtataccgaattcgactttaacttgctgtttataacaaatatgattctgttaataacgtcataggcatttaaaattacgttatttatagaaaactagatattagctgaggagaggcgtggccaccacagcagctcctcccagctg

SEQ ID NO: 40752 - DNA, 314 bp, Mus musculus
  source 1..314: mol_type = other DNA
gtaccaggtgcctggagccaggctcctcttcttctgagtcctccctcattttaaagaggaagtgggagaaataagctctggatattttgaggtcctcagagtcagcgagtcccacacagcccctcagactctgacagtgaagccttcagctgctgttacttcaaacttccccatgttgataagacaggaaaatttttaattaacttataataaagagcagtatactgtaatggaagcttgctgcttataacaaatatgattctgttaataacgtcacaggcatttaaaattactgtatttatagaaaactagac

SEQ ID NO: 40753 - DNA, 408 bp, Mus musculus
  source 1..408: mol_type = other DNA
ctgattccagcggctggaggaggcaggctaaacttcctgcttgggtggacctcatgctgagggtctcagctggaattagaaaagtgtcttctaaatacaagaggattgaggagtctagaatatcaggataattagtttaaaaagtattattatttctattttcagatcacctggaactggagttacatcttctggaagatcagcatatgctcttgtcagagtctggatggtgaccaaggggtccccttgagcccctgtgtaggacgtggggcggtgtccccagccctggcgcgcaggtgccaccgatatgccccccagcctgcaccggggaggaggctcaggctccgggcaaggactgggtccccagcgtgcctccccagcagccgatccgcccttggtccacccggg

SEQ ID NO: 40754 - DNA, 461 bp, Mus musculus
  source 1..461: mol_type = other DNA
ggaacggagcctgtgactgtcacagacttcttaagggacactgtcactgtcagaaacttttttctcctccaacactacggtgagactggagatcctgagctaaagcacgtgcatgctctttctcactgaacaccagctatgaccagtgacccatggttttaagatgatcggagagccctgaattcttagggagcctctacacgctgctcattagagacagagggtctctgaggcctgcatgatggcccctctatgtcatcagtagacaaaagtggtctctaaagggcccctacaggagagcccgcgaggtcattgctgggcgtgctgagctatcctgtttctccaagtaccaggcttgccaggaagactgcaggaaggagctggctacctcctgctatccacaaagctgaacccagcttgcaaacaaggtccctagagaggctatttggagccagccggct

SEQ ID NO: 40755 - DNA, 407 bp, Mus musculus
  source 1..407: mol_type = other DNA
ttatgtgcacatgtgtgtaggtgcatgcacatctgtgcaggtgtatgtgcctgagtgtgtgctaattaccctacacattaaaaaacattttaaagtccatgctgttgttgttttgagacaacatctcacaataccatccttgcagacttgcagaaattgggccacaacctctggcatgtgtgtgcacaaatgtgccaccacatgtgtccagatcagagggaaacttttaggaatcaattttcttcttttatgcaataccttattttttaaagataagactttgatgcccaacttttattaaaggtgccatctttacagatgtcatctcttcctttggtcccgagcacctaaggccagggaccattccagaatgggcggcgtgcaaggcaggagcctctgtttgaggg

SEQ ID NO: 40756 - DNA, 295 bp, Mus musculus
  source 1..295: mol_type = other DNA
ccatgaggaatgtcctcaggagccctagaacacggatctttgaaattccaagaatgcgcagccctgagggcagtgtctgcctggctggcagggcactcctctcctgggcaaagctggcctggactgcctgccctcaaagtccagggcccactgattgagtgcacaggtggccacggtcactttccggcccatgctggttacaggttccaggctgggacggtggactgtccgggcctccagaactgcgccggcgcagaccgtgtcttagcgcaccctttaaagtagggccctaagg

SEQ ID NO: 40757 - DNA, 204 bp, Mus musculus
  source 1..204: mol_type = other DNA
aatgtaaatgagctaaatacctaataaaaaatggaaaaaaaaagttgtatctactttgattggtgttacccactctgtgagctctctgtgagctcctactgacaacagcgacagaaagcaaacctgacattacttttggtgccttagggccctactttaaagggtgcgctaagacacggtctgcgccggcgcagttctggaggc

SEQ ID NO: 40758 - DNA, 411 bp, Mus musculus
  source 1..411: mol_type = other DNA
gtgaccatgtatgtatgtatgtacatatgcatgtatgcatgtcaaaagcgctatctgaagagaagccactactcttacttccgttacccagaagagactctcgccaggagaggtgaaacttcacagctgctcccttaggggcacggaggtatgactgagtcctgcccaccaagggacccgtttggctgtcctgtatgttgttccgtgcacaagatgctctccttcaggtaggggcaggctcagagcctgcgccgcagaatccggagtcagaccgccgaccccaggggcgtgggcggggcgtgggtggggcggggcccgtcctgctgtcaatctcaagactgccgccgccgactggcgggcctggtgggctctgagtcagctcactgccttcaccaatcacaggacgcagct

SEQ ID NO: 40759 - DNA, 234 bp, Mus musculus
  source 1..234: mol_type = other DNA
gcctgggatcccaggaaggtgccctcaggcatgccagtttgttgacataaactgtgtcccctccccgggtttgggaagctggcaaccacagaagcaaagcgacagaatgagtcagaattcctgaatcctggcatgcctaccggggtgtcgacttggcttcttcttttaaaaaaaaatgtaaaaaaaaaaaaaaaaaatagaaaaagcacagtactttatattcgggtttccttg

SEQ ID NO: 40760 - DNA, 408 bp, Mus musculus
  source 1..408: mol_type = other DNA
tgaactttgtaattgagaatgtcaacataatgtcacagtgacaaaaggttggccaggcctgctagaactgactggcaccactctgggactcagagccgtcactgggactctacagaagaactgaatctgggatacagacagcactgtctcctggtggcgcgcacctctaggtggacagtcatgtttcctttaaaaatggaaatgctctgccctcgctgtcctcagcaaggcatcttcctcaggagggagccgctgccctcctggcctgagcccctcactccctcacccctcagcgttggcctccatggcggggagagacacagagctggcggctccccctcccgccggccaccagcccagcctgcggctcctctgctctgcgcgggatgacgcccaggcagccgcgcc

SEQ ID NO: 40761 - DNA, 261 bp, Mus musculus
  source 1..261: mol_type = other DNA
acaagtacacatttgagatttttttaaaaaaaaatgtgattctaggctgtttcaagttgacagttaatgtcatttgtcaacttgacactagaccatcagactggcctgtaggctagtcttcagaagggcccaacccaccgttgtgggttgccacccttatgcagcactccttcatccttccctcagtgatggactataatttatgagtccgcagctgactggcggccgagctgcctcgggatcttgcgtggccccggatgc

SEQ ID NO: 40762 - DNA, 325 bp, Mus musculus
  source 1..325: mol_type = other DNA
cagcagcaggcggtttctgagttcgaggccagcctggtctacaataaaggaaccattgattggtatccttatagactcttgggacctaagttagcagcctcagctaagctgagctacatgagacctttctcaaatggagtaaggcagcctgagctttttgccctagtgctcatggtgaaaataaaatcaccccatgtgcacgccagcccaggtctgctgatgttttgaccatgattccagccgtccaggctgtcactgcctgggagagcagacaggaggcagccctctggtatagctcagatgacaatgtgacattttggctttt

SEQ ID NO: 40763 - DNA, 437 bp, Mus musculus
  source 1..437: mol_type = other DNA
ggactattttattggcgttaattaaaaaaaaaagttttaaaacaaggaggctagcttgaacccagagatctgcctgggtgctggggtgtgcgcgtgtgaatgtgagcacatgtatgcacccacacgatacgaggatctactgcaggtcttctgcagacttctgaaggcaggtggtccggcgggactccccagaggacgtcggcgtttgggtgacgtcaacacacacacactggcgtgagagcacggaagcaggactgcgagctgcgcacacctgccagagatcctgtctccgcagggggttggcctgccgggggcggggctaaagcgaggagcccgatagatctagcgcatgcgcacggccccgcggccaacctctcccgcggggggcggtgctgacgctcgcgccgacgcgccggacgtcgggcacgttgacgccg

SEQ ID NO: 40764 - DNA, 448 bp, Mus musculus
  source 1..448: mol_type = other DNA
caatttatgatagttatttagaaatgtcacacaaaaggcacctcctctgagcagtggggtactcagagtgcccatcccacagagcctcccagagagcagggtctctgtatccctgcccagacagagcctgcccagcagcagggagctagcagccagaggctcaaagctcttggctaaatcctctcaactatccagagtcttaagctttatgtaaaataaaaatcaaatagtgagtgtgcccagggtcctgcgggttagaggcggggctggcccaccctgtgagcctcccctgtccaaggctgctccctggggccaagctagatggggcggggcgagggcgcggctgcaggtgaccccgtgacccccggggcggagaactgggggaccccaggactagagcgccgggggcggagcagcgcggtgcaggcagctgggctcaaccttcctc

SEQ ID NO: 40765 - DNA, 384 bp, Mus musculus
  source 1..384: mol_type = other DNA
ctcattttaatatacatattagaactctagtcctaggctgtcctccgtgggcacttgaagacctgtaggagcactaaaccacctacaaatgctcatacatataccaaggaatatttaatggtttttatatgtacgagtaagctggcagccgtaggcatctgcagctgcacacagtagggctgcgcagctcctcagagccccaagaggatccacgttacacttctggtgaacaagatctgttctgcctcggggtgagaaacgcgcgcgtaagctgaagtcaacgcagctcagctgtcaaagctactacaacagcggatgccagcccgggcggaagcggttacagccacatccgaagcgcatgcgtctgatttggacatcccgcga

SEQ ID NO: 40766 - DNA, 222 bp, Mus musculus
  source 1..222: mol_type = other DNA
ggaccaccgctgggatagttcgagcttagagtccctgggccgttgggccacaagactggacgcctgaggaccgcgcaagttgttgcgcagacatcagtccatcccattgtgtcagggcgcacggcggaggagcggcggcccgacggctctggcccgggagctgtgcgcaggcgacgcccggcctgagtcccgcgcccccgccagggaccacggccgaattcg

SEQ ID NO: 40767 - DNA, 288 bp, Mus musculus
  source 1..288: mol_type = other DNA
gaatgattggtgcgcgggggtgcagcaggctcttcggctcctccatcagtggccaggtcacctgctggctccagttctgcccagttcacccccatcaggccagaatggccacagttgggtgtgggggtgctaagggacccttccagatccttagagtttgacatgctcctgggttgggagaaaatctcggggcttggcgcagcagaaaggttctggcggctctccaggtgacagtagccaccgccaggcccgcgcctcctcccccggcggtgattggcaggcggcctg

SEQ ID NO: 40768 - DNA, 387 bp, Mus musculus
  source 1..387: mol_type = other DNA
cctcctggggccccacatacaggagttgggggccccctgcgaggaccctttctttcaggcaggggaattgcggctctaggagacggccgccagcagcgtccaccgttgctcctagctggcccgcggcctgccgtgcttctgcacgctggtcagtccaaccagtgacattccacttgtggagtccacgcgcgtgccgtgcgacacgttctcacgaggtctccacctacggaggcagagctctgcgtgccttctagtattaatagtaaaattaaaatagcctattcaataagaaaggccagggtcgcaaagggggggctcctcctctgccagatctggccggcctgggcggggtacctacccgcggggcccgcgggacgaaacgtaggc

SEQ ID NO: 40769 - DNA, 267 bp, Mus musculus
  source 1..267: mol_type = other DNA
caattgttgcctaaggaacttactgtactgtggaatactctttaaaactatactttggaaggtcctgccggctgaaatacttcagtatactctcagtggtagagcgcttgcctagcaagcgcaaggccctggacaaggtaactggcacacacaaccttttttgggggagaggatgccggatacttgtttggattttgaaaaaggaggagcaaggcttccctcgggctagccccgcccatgtagcatctacccatgcgcagtgtgctc

SEQ ID NO: 40770 - DNA, 213 bp, Mus musculus
  source 1..213: mol_type = other DNA
tgcagcgatttacttttcttaattaaaaaataaattaggaaggagcctttaccaggatggagccatgggtccgcctgtgggtgcctcgtggcgtactcggaaacgcacctttaagaacagggtgtccttgcacccccagtttggagagaagcagtcggctgagggggaagggtttgggcttgccccccccccgccgcccccccctgttgaagt

SEQ ID NO: 40771 - DNA, 257 bp, Mus musculus
  source 1..257: mol_type = other DNA
ggtcttagccttaggcagagacagtgatcccttgaggtggggacagtgctctctgcctctgccttactcctagaaacccttatatatggggtctttcagcaccacctctctggggacagagaaagggcccttaccctcactgacaaggagatcctgagccttcaaaggcgcctcttctggaggcactgaaagctttcctgtctgccgaggaaagctggactgggttcaaatgagtcccaggcctggaccactagcac

SEQ ID NO: 40772 - DNA, 443 bp, Mus musculus
  source 1..443: mol_type = other DNA
gccttctgaggcctcaagagatagtcctatctttggacttctgatctccaggcaactagtagtaggcctgtagtactgggattccatgtccaacatatcaagctttagtttgtttaatttctggagaaattcaagagacctctgtggtcactcccttgttcacatgagcctggcgtcttataaggctctactcagtcagtcagttacacattcagtcagtcactcagacagtcactaagtcagtcagtcagtcagtaagtccctcaatcaatcagtcagttattcattcattcactcagtcagttattcactcactcactcactcactcactcactcactcactcactcactcactcactcactcccttctgccactaggtgctgcagagaagcggagcgccacccattgggggaggggcttgtccggaacgcctggctctcg

SEQ ID NO: 40773 - DNA, 372 bp, Mus musculus
  source 1..372: mol_type = other DNA
gaaagtgtggcattccctcaggcttcttgggtcatgagaaagttggcaggcttgggctccatgcggggagggtgactcatcttcactgaggagcacacgcaccaggcatggttgctcgccaacttccctgctcagcccaagtgagcaagggttccacaggccccaggggtcccccaggaaggttctggggccctctactggggcagccctctggagctgcaggatactagatactaacatctggagtgacgtcaggaaaaggctcctgaactgggcattccttccccgaattgggtttggggcgggttctgtttccaaagccatctccaacaggcaaggcgggtgagggctcgtcctccctccaccctgagc

SEQ ID NO: 40774 - DNA, 293 bp, Mus musculus
  source 1..293: mol_type = other DNA
atgtgcacatgcctgcatacagataaacacacatacattcatgtgtgcacacccaaatacagatggctcagtcagcaaagtttctgttatcttaaagatttatttatttatttatttatttatttatttatttatttattctggatctcgagttgctgagcactgagctcaggtcctccaaaaggatctctggtgtgtgctggatgcaggtatcccaagaacttctggaggctcagtgaggttgctgatcactccactcccaagtgcagttttagcaagctgagatgggtaag

SEQ ID NO: 40775 - DNA, 233 bp, Mus musculus
  source 1..233: mol_type = other DNA
ctgcctgcattgtgtggcctggaagctggtgcctccaagctgctgggcgggagctcactgttgttgggcgcctactagctcttgcttgactttaaaaagatctcccctaggtttaaaagaacgcttacaagcttttaaatcgtaatctttctaagccaggaggcgaggaggcgtggcgttgccagctctggccacgcctccccgtcccttggcccgcgcgggcccagctgacg

SEQ ID NO: 40776 - DNA, 438 bp, Mus musculus
  source 1..438: mol_type = other DNA
ctacatctaataccaggtctcctcttacaggtgcagcaaccctgaatagatacattttttcttagacttcctctgaagactgggctggcctcagattcagaggtgcgcctgtctctagacaatgtctctcactgaacctggaacactggatcagactgccctgactttatttagtcaggtgggggtggggaactaaaatcaattccacttgcttgcacttcttagaatgatcaagctctaaccttaacagctctggtaacagcagtatttacactttccatgggtccacacacccacatatgtgtctgtccccatgtgttctgtctagagacatgtgacttgcatgtcccattgttagggtgaggccctcacaccccgttccgcgccacaggaagctgccgggtgggggttcagtgctgctgcctcccctcccctccc

SEQ ID NO: 40777 - DNA, 299 bp, Mus musculus
  source 1..299: mol_type = other DNA
tttgttttatattgctttttaaaaagtaaagccttgatatatcacaaaggctgtttagaagttatcttgggcaagagaaagctaagtggcttgctgctcttgtttcccagcacccacgagtggttcatacacattctctccttacaagatgtgggttcctgttatcagctgagggagaggtttcaatacgcgccagtatgtgtgcgggcacacgtgtgtatgagtgtgtatacctatgtgcatatgcatgtgggctctgcccccttccgggccccgcccctctggggacggcctaccac

SEQ ID NO: 40778 - DNA, 366 bp, Mus musculus
  source 1..366: mol_type = other DNA
gtaagtgtaattttgctgttataaattataatgtaaatatccaatattcaggatatctgatatgagtcactacctacaggttgagaaccactgctttaaaaagacagctacagtgtactcatatgaataaaataaataaaactttaaaataaaaactgtttccaggtgaacctgtctacctctcccatttaaaaaaagggggggaatgccctggaaagaaatattggtatctaggcctgtttgactccatcagtgcctgagactgaggctctgaaaactcaaattccatgtttgagtctctgacagaattcaatggtagtcacacctatgtgacaggtcacaatgacctgggccagaccatcttgg

SEQ ID NO: 40779 - DNA, 304 bp, Mus musculus
  source 1..304: mol_type = other DNA
ccttcctggaaggaagagtggaagagtgtagttgtttttacacacacgcgcatgtgcaccacaccattcttactttcaactatgccagtcccaaggatggaactcatgtcttcaggcttctccctatgtagatctggctagcctggcacggagaacctctgccccctgaatgctgggattaaccaggtaactaatgatatctaatataacatatctaatgatgtcttgagttcaaagatagcgtaatttttcgggctagcggcaggcagttgcgcctgcgcggaccttcggacctttccaaagg

SEQ ID NO: 40780 - DNA, 207 bp, Mus musculus
  source 1..207: mol_type = other DNA
aggcttctggcccgcagcagcagttggccggacctaaagagcactagaggtcaggaccgtgccagagagactgggtgcctctttaagaacaggccttgtgatttgtaacaggtgaggcagccctttcataaatcgtcagctcctttaagaggccgccacactaggcatggctggcgcagtgcgaccttccaagcatggcgggaggcg

SEQ ID NO: 40781 - DNA, 200 bp, Mus musculus
  source 1..200: mol_type = other DNA
tgcttatataatttgagtatcatgatagctggtgtttgaaacaaggaatccattttttaaagaagataataagactggacgcgcgccagctcgggtggccctggtcgggacaaaggcttggcccgggggcggcgcgggggcagcgatggcgccggccgcggagggctcgagcgaagcagctcccgcagcggccctcggcc

SEQ ID NO: 40782 - DNA, 358 bp, Mus musculus
  source 1..358: mol_type = other DNA
aaagaacaagaaaatttcaattgattattattaataataaaagggccaggcagtggtagtgcgtgcctttaatcccactgagttcgaggccagcctggtctacagtcataaataaatagaaattagctcacaatttatgatctggtcgttgcaaagccttgggaagtcaccaggaggttctagaaggtccttaacaggtgaagctctggagccagatcggatccagtcaagcggccagcgaggggcgcatgcgcactgctgggaggctctgccccgccccttagaaagggtcgcgcttgtcacgtgttcagttcaggcgccccgctcacgtgaccgcggcgcatgtcagctgatgcgg

SEQ ID NO: 40783 - DNA, 464 bp, Mus musculus
  source 1..464: mol_type = other DNA
attagattagaaaggctggcttcctgagctttttaaccactgggcaatcttgccagccaggagcccaactctgttaagtcatggttgagtttgaggcccagccctgaccaggataattcaggttctctgaacttctgtttctttttttatttaagaaaaagaaaaaagaaaaaggtgtttgtccacttacatatctgtgcctgaaatcacatagaagttttcaactccattactgggccctgggggtcaatctcagattgttagacttgctggcaagcctagcctgaaacccccagtacttttggtgtggcacaagacacagcttggtcagctgccacagaagggaagcccctggaggggaccttcatgccatgcagcattactcagtggctgcagctggctcaggatcagattcagctctcagctacctgtgtctccctcccagacaaggaggtgggggccat

SEQ ID NO: 40784 - DNA, 391 bp, Mus musculus
  source 1..391: mol_type = other DNA
gctctgggtgtgtttgaggccagcctggcttacatgtcccccaaccccccaaataggactgggggtatgggtgcaagtggtctttaaggttgttacacatagaaaccctgtcttgaaaaaacaaaataaataagtaactctttctttgacttaaaacttttaatcctagtgaaagattatccattagactgactcccagcaaagatagcaagctccgaggatggtagcttcttcctcgcagacaaaagcctggaggcttaaaacaaatgccttacatgcttttgtctcctgccagcaggactctgctgctggtctgggtcaggtgtccgaggtctgctcaggacggtcacacaacagttctgagcgtagggaagaaaactcagactttaaa

SEQ ID NO: 40785 - DNA, 432 bp, Mus musculus
  source 1..432: mol_type = other DNA
aaaattacacccttatatgatagatgtgtttagactcatcttagaacacagaaggttgtacaacacaattctttgattttacccaagtgccatgattctaggcatgtacctaccaccatccctagcttatggaaaccattgtaccacaacaggtttgaaacaagatacctatagacatgtatacaaacacattcattttctttttaaactattactgtatagtaatagccacaaactccatatgcatatgtgaactccaccgggtccgggagtgagcaggaacacacgcgcgcgcgcgcacacacacacacgacccatgtggacccaggagccagagagaactgagtccaatctgggggcggggcgcacctgggttccgccttggggcggggtcgacgccgcgtcgccagcgcgctcgaccgcacctggttc

SEQ ID NO: 40786 - DNA, 222 bp, Mus musculus
  source 1..222: mol_type = other DNA
tccggagctcagcctcaggggctccccgggaaccccagaacaccttaaagcctggttttcatgatcaagccaaacacatatccttgagatgtcttctgctggggtgccagtacaagtctcagacactttattggtgctgccagggccaatacggaagcggagtggtcaggaacccgggtctgtgacgtcacgaagagggcgggccttctgtgcgtgacgcca

SEQ ID NO: 40787 - DNA, 231 bp, Mus musculus
  source 1..231: mol_type = other DNA
tcttggatggatggatggatggatggatggatggatggatggatgggcatctgcgactgctcttctttgcctgcctggagagtgcccctaggctgggagtacttctaagaaaggatagcctgcagtgcagcttggcacacttcatttgtgcattgtgtacacagctcccagggctgctcataaagtagtcactaactaagtactccgaggaacatcctccaggacgaacaa

SEQ ID NO: 40788 - DNA, 237 bp, Mus musculus
  source 1..237: mol_type = other DNA
ggcctgtataataacattttaaagttttgttttctcaaagttttaaagtttttaacttattatgataccggtgatctccatgagtgcagttatcatgagggtacgaaggtatccagctttggatcgaacgagagtgcgctctagtggcgtcacgcacagaaggcccgccctcttcgtgacgtcacagacccgggttcctgaccactccgcttccgtattggccctggcagcaccaat

SEQ ID NO: 40789 - DNA, 358 bp, Mus musculus
  source 1..358: mol_type = other DNA
ttaagggaagaggcctggaccccaacttcttccttgtgtcacctgccttgcagtggacgacatcctgcaggttccaccctcatgttgtgatcatggctgggtctagtgaggttcaaacctgcactgccctgggaatgggggaagatatctgctccccctccccctacttttaaaaggccttgacaaggtaagagggctctggctgactccaccaattaattcatttaccagttactataacttagtactgtcccccaagagatagtaggtactaggatttaggggcacttctgagccccatttccccccaagcctggtctcaatctaggacagtggtagaatgctgtccctaagtcag

SEQ ID NO: 40790 - DNA, 360 bp, Mus musculus
  source 1..360: mol_type = other DNA
tcccagaaaaaaagaagcttaactggtttcctgaaaggtatcgactctcagagcatggtcagctcatcaatgaaatggtcagggacttcctgtcctgctccatgcataaatgaaagacgattaagggaagaggcctggaccccaacttcttccttgtgtcacctgccttgcagtggacgacatcctgcaggttccaccctcatgttgtgatcatggctgggtctagtgaggttcaaacctgcactgccctgggaatgggggaagatatctgctccccctccccctacttttaaaaggccttgacaaggtaagagggctctggctgactccaccaattaattcatttaccagttactataa

SEQ ID NO: 40791 - DNA, 364 bp, Mus musculus
  source 1..364: mol_type = other DNA
ccaagtgaaagaaaattaactttttaactttatttatctaaacactttaaaagatttgttttatgttcccagaaaaaaagaagcttaactggtttcctgaaaggtatcgactctcagagcatggtcagctcatcaatgaaatggtcagggacttcctgtcctgctccatgcataaatgaaagacgattaagggaagaggcctggaccccaacttcttccttgtgtcacctgccttgcagtggacgacatcctgcaggttccaccctcatgttgtgatcatggctgggtctagtgaggttcaaacctgcactgccctgggaatgggggaagatatctgctccccctccccctacttttaaaaggc

SEQ ID NO: 40792 - DNA, 387 bp, Mus musculus
  source 1..387: mol_type = other DNA
ttatgtacaacaggagattatatgtataattattaaatgtatagattatatgtgtaaattattatttgcaagtgatcaacatacattatatgcatgtatgaaatgtcatagtaactataacacagatatgtggtcatagtcttcgatcccatgtactccctcggaagtctaccgagcgttgcccaagcttgtactactagtctttggatcccggagcgagatgagtatttttaccgcgctgtcatcgcgctaagcgagggcgcacgcacaaactggcgatcgtccgttcgagtccctggacccggaccaggtgcgcagagggcgtggaccgaacccacggggtggggcccacgtggatgacgcgtagagccacgcccccaccttggg

SEQ ID NO: 40793 - DNA, 487 bp, Mus musculus
  source 1..487: mol_type = other DNA
ctccgtatgcacatcacactgtggcgtgcacgcaaaataatgttttttgagtcattcacacacataaatattctgtatgtgggccccaagatttattattttaattacttgttgagaaagagggatttccaaagggacaggccccttgctccttgcaccagaaagcagaaagagctcttgcctagactcctccagtgagatagagcttagccccacccccaccccgcccccagagaggggctgggtctctagctctgtggtagaccatctgtatagagcataccactgagaggcagctgtggtcacacagggaccgtgtctcagtttgccctacaggtgaagtcttggctcctagccttgcctcccaccatggtccctggtgttatctccagacaacgtcctgagaagacaatccttctaattaggaagggctgagcaggagggaaatccctcctctgggacctctagagttcacctctcttggggt

SEQ ID NO: 40794 - DNA, 439 bp, Mus musculus
  source 1..439: mol_type = other DNA
tccccctctcctttttttgtagagatagaaaacagaagaaaagtgctggccagccagtctagctacctgggagtgacagctgaggccatcctctgcctcccaccccatatataaaagggagatgaatcaagcacattccaactgtctgtttcgtctgtgtgtctttcacccagacagtctagctaaatgtgggaatgcatgataacatttcaaatgtaaattaaaaatatctactaaaaaataaaaataaatgaacacagtgtatataaaatatatcatcgtccaagctacaagaaatattgtggaaaggtatttttaaaactgtgaatgttgttttgtgttcttgaaacatgaatcaaagactttttcgtatacaaaaaaatctcttctgtcaaagactcttttgatatgccctgaaagcaggaagcaaaccctgctt

SEQ ID NO: 40795 - DNA, 110 bp, Mus musculus
  source 1..110: mol_type = other DNA
tccaaagcctggatccaaagaactcataggtgaaaactggaattttcggggcaatttattcgagtttaaaatggaaagtgcctacaccagaggccatctctcctaacccc

SEQ ID NO: 40796 - DNA, 391 bp, Mus musculus
  source 1..391: mol_type = other DNA
tcttaaaaagactaaacgcacatatatcaccttaattttgttgtcatcttggtctacatgatctgagtttgatctggtcacacctgtaaccccagaactgccagccagtgaggtgtttgtcctgtcttagagatagactcagtgtcaacctctggtctcttacagttcacgtacttacatacttaagaagatacgtgcccgagggcatgcacgtgctcctgggatagaatactttactacactcttgctcaaaagccagcttttataggtgcccaccagcgttctgcgccgcggggcttggacacgggcgcccccttgcggcccctctcggtcaccgcgccctccgtgcgcaaacgagctagcccgcgcacgcctgcgcactcacaggcct

SEQ ID NO: 40797 - DNA, 26 bp, Mus musculus
  source 1..26: mol_type = other DNA
aggccttgtgtgtgctgtggccaccc

SEQ ID NO: 40798 - DNA, 332 bp, Mus musculus
  source 1..332: mol_type = other DNA
tggcctagtcggccatcattgacaggcccttggtctttcgaaaattatatgccccagtacatttgaaatgtaaatgaagaaaatatccaataaaaaatgtaacttcaaatatatcacattgctttaggtagtaattacataatttaacaaagggaaccttacaataaacttttaaaagctttaaaaaagagagaggcttgctgccaagtttggcaatttggctttgatcccagaatccacaaaataaatgcaatatttaaaagataaatgaacacatatcttcttggcactgtgtgtatacattatgtatgtggagacttaaatttatatct

SEQ ID NO: 40799 - DNA, 304 bp, Mus musculus
  source 1..304: mol_type = other DNA
gtgtccctagttaggcaggcttcctgtgaccctggtatgctagacctcctgagagtcaggctgtctctgggtggagcaccaagtctgccctctttgtggaccagaaggaagatgtgtctcccatagggtggatatgtcctgcatccttgagagtcaataatttaatgaatgcatggagttagccccagctcatgtcaagtttgaggctagcctgacaagatatggtgttgctagcccacacaccataagtcacttgattttacaagttactggcttttataggagaagtacttcctaagtaaga

SEQ ID NO: 40800 - DNA, 295 bp, Mus musculus
  source 1..295: mol_type = other DNA
cagaagccatcctgaagcaagctccccagaactggtgtggaggcatttgcctacgggtgtctttgctacccatgaagagtaacaacaaaaacatgcatccttttttcattcaatatttgattctccttagtttacaatgaggaccatagagtcagattagctgtgttcagacgtcagctcaccatgaaatatgctagcgggttatggctctccaatctagacgtactctataggctgtaggcttaaggtgtcccataaatttggtcacaagatgaatagaccacatcttgcctgg

SEQ ID NO: 40801 - DNA, 439 bp, Mus musculus
  source 1..439: mol_type = other DNA
gaaagggtctctcaatgaacctggatcgatttgactaggttagtagatcaatgaaccaacactggagttacaggtgagaccaccttgccaacttggcttgttttcccaaaattctacaattctgatctgattatctttggtttacaacatagacgcagaattctcagcttcactgtgaaccagctgtctgaatattattagacagttgcctaatctgactttgcagtttcccagctaccacagtgcaatgaggtttgaggaatgtttccacccatcagtcagaaatcctgaccttcagcataggtctcctacattcagcatggcataacaaagtagatttattgtattggctttgaaatggcacccataatttggtcacactatgaacataagtcttgatatatctggcaaaagatagtccggagaggggataaaagct

SEQ ID NO: 40802 - DNA, 261 bp, Mus musculus
  source 1..261: mol_type = other DNA
tagatctgcccaatctatgtgcacagcatgtattcatatcgcaacaagtttttttcccatgggctcctgggatcaaactcaagttaagcttggagctatctctctagttcaaatctcacgtgataacatcactagactacatgatattttacttaagtactggtctaatctcacactttatgagatgagagttacacagtgctggatttaacctcagcagctgagaggacattgtcataatataatggggttatataaatc

SEQ ID NO: 40803 - DNA, 230 bp, Mus musculus
  source 1..230: mol_type = other DNA
aacatcccaagttccctggctgtcctggaactcactttgtggaccagactggcctccaactcatcccaagtcttaagaagcttccctcaaagatggaattttcatttcaacaaagaccatgtagcacagtgtctgaggctccgttgcagcaagagagataaaaactcttaatcccctgtaggagctctggcatgcatcagattgcttgctctcatggggttatataaatc

SEQ ID NO: 40804 - DNA, 314 bp, Mus musculus
  source 1..314: mol_type = other DNA
aagcagctctcacgtgtgcggctctggatgcaatcggcgttttgatgccagattcacccagcaagggaggatgaccagatgctggctctgaagagaggccttctgcatacgagcccggcccttgtctggtcggcctttcccatctcaacagttaccagggacgagttcagctaagggttgctcaaggcctcagccactattagtagtttaggtgtcgatcaatattattacttattttgataggtaaaattagatgtccatcacagattctctcatctcctcagagaaccgtagccagggtccgcctcacgggg

SEQ ID NO: 40805 - DNA, 173 bp, Mus musculus
  source 1..173: mol_type = other DNA
ctcagagtgctctcagtgagcctgtgggccctctgccccacagaaggcagagttgtaggagtacctgaggcccagcctatcccttgtctaggagagtgtctgtctctgtgagggtcttcaaggattcccccactgaacccgcacctccctcggaggcgctctcggctctggac

SEQ ID NO: 40806 - DNA, 289 bp, Mus musculus
  source 1..289: mol_type = other DNA
aaatttgcctgcctttcagaagcttaggcttcagaaattcaaggtcatccttgtctacctggagaatttgaaggggaagtaagaagtagttccaggctccccgaacagtccaggttgaggaaaagagtgcttcctgtggctgggcacagctcctgatggcaggccagctctggaagagggatagtcctctgggggttgaaggaaattctccccagaaccacttctgacacctgtccaggtggagcatctggccgaacaatcccgggggcggggcggggcggctcctggc

SEQ ID NO: 40807 - DNA, 257 bp, Mus musculus
  source 1..257: mol_type = other DNA
ggcatctaaccccgatggttacggtgaggtgaaagaccgtcctagacgaggaaggttgttccgtgagggcgaccagagccttggccggtctcccgcttctgcacgcaggcgtgcggttgacgcactgcggaaggcagcgataggccatgacaatgcatgaggcccgcctcgggctctaggtggcatcagcttcctactggaacccagtgcgcacgcgcggcgttatgcacgcgaggcagggcgggcacgcgctgcag

SEQ ID NO: 40808 - DNA, 322 bp, Mus musculus
  source 1..322: mol_type = other DNA
cggcttgcagggagagggtcacggtgacctggaagtcgggtgggcagtctccagggcgactctctccgcccacgtaccgcggtcccgaagttcacaccgttggtacctgagagccttgtcacctgcaccttgcaggctttcagactcgaagctacgactctgcaaacagttatatctcttctgattcagtggtccactcctgccgagtcagtgactgtcaaggccatgtaggtcagatggctccttctaagcttggaaggaccttctactactacagacacctgtaaccagtgaatctttggagtatacatactatagttgt

SEQ ID NO: 40809 - DNA, 340 bp, Mus musculus
  source 1..340: mol_type = other DNA
cttcctccagcccggccccacccttaccattctgaggctggccgcagcatggctagcctttgtgacatggctggtcccagggccagcacaggcccaagactgggccttaagtgggagtctggaggagtctcccacttccccaccttccctcaggcccaggcagagtgggtctcgggcaggtagggacctggagtggcctggtcccacctttaaaacaaaatacccttgtttgtaaatgagaatggggccccccagcccttatccatggctggccttgagcatgtgctcaccagggtggcagctacccacacctagagggctgggtacagcccagccaggt

SEQ ID NO: 40810 - DNA, 389 bp, Mus musculus
  source 1..389: mol_type = other DNA
atgctgcccagcacagagcagatcctctgaggggctagaccatcatgacagctgtgaacaagcttctgccccaagttcttcagggcagctgtgaaaccagctggacaggggttgctggcagtgtcagaaggccccagcccaggactcctgtcgggtgaggcctggcctaggcctgtcagagacgagagagtgctgctttctcgggccaacacttccctaaggcttcgcccatgtcctggcgaggtcctggtcgagctggaagctctgtctgggctggcacagcggtgggaaggttcagccttccgataggcaggccggggcggggtcacaagcccaggcaccgctccagccccgccctcgtcgccatgggaacagccgcggcggctggg

SEQ ID NO: 40811 - DNA, 267 bp, Mus musculus
  source 1..267: mol_type = other DNA
aattgccagcacatctgttggagcctacttctacagaagactagctgaaacaactagcctcgtggggacgctgcagactgtaagtcatcacaataaattccctcaatagagagacattctgtgactctagaggcaaggcaggttttcattggagcccaggctagcctgtaaaccatatgggtgccagcttggtctacatatcgagatccaggccagccatatggacttcatgacgtaggttttttgctgcagctcacgagtgagtgc

SEQ ID NO: 40812 - DNA, 409 bp, Mus musculus
  source 1..409: mol_type = other DNA
acacacacactgagccataggagttttgtttctttgtttatctgtgcaccagtttgaatacttcaaaggttttgcccataaattgcttgctggactacatgagaccctcaacattgagatgtgagctatcccaattctgtactgaatttctctgtgtagccctggctgtactggaactcactttgtagaccaggctggcctcgaaagtcctgggattaaaggcgacacctagcatcatcttaatttgatcctctgcgtgccgagaacggaatccgaattctctgccagagcagccagtggacttaactgcagagccatctctccagtcctcgaatccttgatgtcttgaagcataagagacttggctcccagaagggctggtgctgttctaggccggcgcagccgatga

SEQ ID NO: 40813 - DNA, 420 bp, Mus musculus
  source 1..420: mol_type = other DNA
ccaaaaggcacaggcagttgtttttcccgactgcctggcacatagtaggcattttaaattcttttagaagacatgggttcagttatggtgggttaacatacatgcaggctgcttaaaaccaagaaattttaactttagatgcccggctcagtgacgtcagccggtgctcaactgcaggcagaccggaaatgtccgggccgggattcgaatcggggatcctgtcctcctagcgagggcagcccgcattgtgaggatcacacgacgtgcgttctataaagagcgccactctttggcctcgacgtccagacggcgtccccactgggcgccttggtccaccgcggacgacgccgacaggacgccgcgcgctgacatagcagagcgcgctgagcagggggcgtgtctgggccgcggggccgggga

SEQ ID NO: 40814 - DNA, 660 bp, Mus musculus
  source 1..660: mol_type = other DNA
gcaattgcctttttaatatttacacgttattttacaaatgaaaacgtccctaaaacagctttgttagagatggcgatcaaagaaaaaatttcccctttctcttctagactgtgggccatgacctctggcgcccaaggtcctcggatcaccgggcctccgagatcaactatccggggccccccaagcctcggagcccggccccccaaagcgcgtgcccacgctcccgcctctctcgcgggagcccagaggaatctggccctctccatacccaggcctaccgcggcctggggccttcggccggtgcaggcccggcggacgcccgtggggctaggcgagctcaggccctagcgcggcctactctttcgccgaagcctccggcctcacctgaacacgggcgggaaggcccgggactctgctccggggcgggcggcgcggcgataacggctccgcacggcctcggcagcggtggcggcggcggcggcggcggcagagcggtagcggtagcggtagcggcgacggcgacggcgacggcgacggcgacggcgacggctgcggctcctcctcagcgcgcacgacccgctccccggccccgcggcccagacacgccccctgctcagcgcgctctgctatgtcagcgcgcggcgtcctgtcggcgtcgtc

SEQ ID NO: 40815 - DNA, 253 bp, Mus musculus
  source 1..253: mol_type = other DNA
tacaattttaaaagtgggccagcaactggaattttattcagcaactaaaaaataacattaaacctggtctacaaagtgagtccaggacagccgtggaaggaaagaattgatttatgtgtgccctgttctcatgtacaaaataataataaaaattagaaataataaaacttttaaacgcagctaactataatgcctcaaggttcatggggcaggtaacccttggtctatctgaaagagagaagtcccaagtctc

SEQ ID NO: 40816 - DNA, 211 bp, Mus musculus
  source 1..211: mol_type = other DNA
ctggttgtactaggcaaggagaggccaacgtgggcccaggcccagcaatcctctaggttggtctgaccgacgcctgcagccacaacagcctccggtcggggcggggcctgataaggctggactgggctggggaccaggccttgcgcctggtggcgtgggggcgaggccaggccgccggcggttctttggcccactgggcccgaccgcactg

SEQ ID NO: 40817 - DNA, 376 bp, Mus musculus
  source 1..376: mol_type = other DNA
aaaactgtaattcatgtaatgtatgttaaatagcccaaagagttgtttgtgagctttgaaacaggacatgcccgggcaagccctccgccattaaaaaacctcttgttgttacatcaaggtgttgccgaatcgggatgaacacactttttgagaatatgttctatctgactgcttcactgaacacatctgctcagagttgtaatatttgtttctttatgcataaaaacccttaaaatatattcagattcaaactccaggaaatacccgactggggtggtccgtggcagggcctccctaagggctcggcgtggaagcctggcccactcattggccaatcaggttctccaggaaggcctctcagtcagaagaggcgggt

SEQ ID NO: 40818 - DNA, 321 bp, Mus musculus
  source 1..321: mol_type = other DNA
gaactgagtgcagtaacacggcttggcccacttcctagaagcgctttaaaaaaattatttactttacattctcttcagaaaaggggaggcaagttgcagtaagactaggtgcatcttctcgtgaggtgggagtccaagacccaggcgcacaactgttacttatgtgcagacggcttaggcctattgtgacacaaaaggcgcttttagcaagttaatttttgtttatcaaaaccttgtatctgatatgtcctgggactaagttatgcaaacactctgagcacagcctcagaaggtcttagctaacagcttagcacattgctg

SEQ ID NO: 40819 - DNA, 524 bp, Mus musculus
  source 1..524: mol_type = other DNA
tttgtagaccaatgcttctgactctagagtagtagaattaaaggctaaatataatttaacattacttgaaactacccagtgtctggttcctgatggtgacaattgcttcatctgtagccagctccagcagtggctaaaacacatacatgtttttgtttgtttgtttgtaatgatctactgtaattgacaaccacactgattaagccaattaaaacttttacgtcctttttattggagatcaaacttgagcccctaaaaactatagttttaaaaagcatttattattagcagaaaatagtagttattttagacataacttgctaattatttcgtttaatacctctgaccatggccaaggctctggaaatcttaaaggtgttgccaaagagtcaatcaagatggcatatcttaatcgatttttgagaaagcattccaaattacacaacattcaacttccttttgtttcgccaatcccacaggtggcgctgaaggactatcagagcagttactgaatgctcctctag

SEQ ID NO: 40820 - DNA, 478 bp, Mus musculus
  source 1..478: mol_type = other DNA
acataaaaataactacttgatatttccaaaaacctcttataataacaaagagttatactgtcactttgacctaatctagagtttatgcctctttgtattgtctctatctataaaacactttgttgccatgtcaatatatgtataattcatgtgtaagtaatatgatcaagccctagaagtctgtgaaacatgcatatgttttgtggacatcatagttcatatgtaagaaagctgaaaatcttcttcagtcaacttatatgttttaatataattttcaaagctttagtaccccctacttaaagttggaggagagaataatacactttactccactccaactcttggaacattctatacaattcagagtttaactaaaattattcccagcaaactttcctggcattaattattaagttcattatcatgtcaataaatgattaattataactttctaacgtggcttttcaaagagacacca

SEQ ID NO: 40821 - DNA, 686 bp, Mus musculus
  source 1..686: mol_type = other DNA
ggcactgggccgggacaaaggcccgcagcggaggtcggtgtgaggcggcgggtgctgctccccgagaggggccgcctgacaggcgggcagtggcccgggcaagcgagcgccgcgtcggcgcggttccatgtcctggagcgcagagataaagggcgcctcctgaatcctcgcaactcgcggcccccgcaggcgtctgacgcgcgcgggcctttgtgtgcggggagggcgccaggacccgctctgcgcgcagctccgcgatccgaccggtgcctctgtccccgccgcggagagtcagcgcgccgggcgcgctgtcagagcactataaacgcggggccccgccacgcagcccattggctcgccgcgccgcgagcgcgcgctgattgggcagcattcccgtcagtctgccgccccctacccgacactgggcacccagaggtagggcgcccctgacaggtgagccccgcccccaggacgagccccgctgggcgccgggcacagggttggtcgccgcaccagcagggtcacctcgcccggcaagtgcctgtgctggcgagtgccctcgctaggatagggcgagacgtggtggacgcagcgttccgccttgtggcgctcgctcctccggcccggtcctcagactctcacgaggctgagagccttagcagcccaccggcagtgcgagccagtct

SEQ ID NO: 40822 - DNA, 393 bp, Mus musculus
  source 1..393: mol_type = other DNA
tgacactctagtgtctaagaaagtgttccccacactttgcctataatttctgaatctaaggtgttcaataacactatcagcgccatgaattatttattactatgtaatacataattatttttattattatgtattatttctgcacagtgaaaacctgaattaattttgcaaaagtctttttctggctgtcctggaagtcttcagaagccagtcctgtcagggccgccaggcagagacagtggaggcgcgctgcgcaggcgctctgagccgccgcgccggcccgcccctgcctcgcctgtgccaagccggcaggctcgcctgttcccactgcgcctgcgcggcaagcagctggcggaaacgcccggccggcttcttgtggcggcagcttccggt

SEQ ID NO: 40823 - DNA, 397 bp, Mus musculus
  source 1..397: mol_type = other DNA
gggtgtacaggacccggagggggcggtggacagcgggtcctccgccccgggccaagctgctgtcactgcaccaggatggagtggcctcgggaggcccagagcaggcgactcggcccccggcggcgcccgcgggcagacctgcagcggccgcggcgacagtcggagcgcggggtggggggtgggggggagggacagccccgccggcggccgcccaagctcggggcgcggggagagccagcgcgctccggtcgccgtcagtggcagagacgcggcatgcccctggcaggggagagcgggctgtcctcagctgggccatggggacccgcgcgctgacaatgccggggtgataggagcagcgccagccttaggtcggaagcaagatcttcctccaaagtat

SEQ ID NO: 40824 - DNA, 293 bp, Mus musculus
  source 1..293: mol_type = other DNA
attacatagtaataaataattctgatagtgttattgaacaccttagattcagaaattataggcaaagtgtggggaacactttcttagacactagagtgtcaccctgtggtgttgcaaagccacacgttactgtacaggagcatcagcggtgctcgtacagcttgtacaacgtcaggcactattagttaattcaaagtaatggagaaccaaatttgttttatcctcagagtggggggaaaaaagtatcttgcccctacgggctaccgtagcatgaaggcggagcccagtgtcct

SEQ ID NO: 40825 - DNA, 432 bp, Mus musculus
  source 1..432: mol_type = other DNA
tttaaaaaaaaatgcaactaaagggaaccgtataaaataatgagtcattggtattttgctatagcagctcaaaaactaaaagactcattgagacttttctgtctttaaagagagctattgctctctgggactaggccttgagctcattatgtagtccaggactgtaaccttttaaataaaactttattaagagcatttaactggctctaacatatacattcttaagttctaatttattgtttgtttacaataaattattaacaatttattaattgttctggttggtatgtatgcatgcatgtatgtatgtatgtatgtgtgcaaccccagtgatacattctcaatgcattcttagcggcggaaagagccgagcgcgctcggccgcattcgccggccctcctaggcgacgtcgtcagggggcggggctcgtgc

SEQ ID NO: 40826 - DNA, 175 bp, Mus musculus
  source 1..175: mol_type = other DNA
ccaagcttctgaggcaggctcctgccttcatgtcaccaagcccaggcacagactgaggacatcctgtgtccatactggggactgagtctcttcgttgcccaaagtagactgagcttatctgacttgtacattaatgtaagagcacactgagcttgtctggagtgagtcagtctga

SEQ ID NO: 40827 - DNA, 319 bp, Mus musculus
  source 1..319: mol_type = other DNA
cacactgtgggtacctgtaatatgtcttacacttctaaaatggtttcattttaaaagtaatcggggttcagttcccagaacccacatcaggtgcagcttggatgccttgagaacagcccaggggactgcctgagcttggggagagctgaggctaggagatgcttgtggacatctgggacgagagccgagggctctgccgtcatcagggctcggaccacaccctgggacgcaaagccagcttacccaggttgggaaatcagcttgtgagaggagctcagcggaaagtacatttcatgagccggggctgaccaagttggcc

SEQ ID NO: 40828 - DNA, 598 bp, Mus musculus
  source 1..598: mol_type = other DNA
ctccgggagtaccggcgagatcctggcattttgaaagctattgagaagcagccgcactgcagcacacctccacgctagtggcaggctgtagccgcacgcacgtgacgacccttcccaggactgtggcgctggaatgtgtcaatcaagggcgctgggctagcacgtgcagcgcagtggctcagacccaccctgggggctgctctgaactccaggaaaatgagctgctgctctttgcaaagcggggaccctaaattatgcattttctggagacaacagtcatagcttgggacccacggcaggatccgagcctgaggtctcttttaaagtgttactttaaacatatgccagaattaaggcatatctgtggtgtgtggcatccagacagttaaaatgcattggtaactgtgaagggcaattgacaggcatgatccatttcatgtcagattctgaaataattctctttttatctaaatgctgtagtgtgaaaaatctttaaaatgctgttttttttttttttttaaacacgggataccagaaatcgagaaagaaaagaaattaatacacaaaagttgtttaaggatttctacactattgaggt

SEQ ID NO: 40829 - DNA, 365 bp, Mus musculus
  source 1..365: mol_type = other DNA
gtaattcaactgtttaattgaatctgtgtactaagtccagttatcggtgctggtctctgggtgcatgtgcatgcacacacacacacacacacacacacacagagagagagagagagagagagaggagagagagagagtcacacacaccatccctcttgtattttaaatgaatgcattacagtctttaaaattggtcacccattctgtctggacaattgccacagttgccaggaggggagcccctgtgcagtgcacattgggcggaaaagtttgaagcgctagaccctttctcacatccttggagaaggggagggtagcagagccagcctgggaggcgcggtctccgcgaacgcgcgggagggcgc

SEQ ID NO: 40830 - DNA, 235 bp, Mus musculus
  source 1..235: mol_type = other DNA
ggcacagcccacttggctatgcagactagaattttaaagttcatcgtaatgagaaccattactcttcaacccggtctgtaaggtgagggtaatgcacatagcttgctatgccttgactaggctagggaggagcggcatgaattaatcactggtaattaattggtctggaaactatgtcacagtgtctgtcctgtggcattattagagaacacggaatctgagcagctatgtaaat

SEQ ID NO: 40831 - DNA, 573 bp, Mus musculus
  source 1..573: mol_type = other DNA
gcgcggaactccaagcgccgtggtcccactgtcacagttgctagcagcagccacctgcaaaggtccccttcacctaggagaccaggcagaaggcgacttaccctcgcaggggagactcggctcgatcccttcctaacctggaggcaagtctgtcccatcacttctccgtaggccctgcctggagctcctcaggatccaacggagcgcgcagcctcagcctactccggcgctcccgggggtcgctctcacctcagggtcaggagctgctgcccgcgcgcatgggcccctgaagaagcgttggcccgtggcacaccggcggccaggccggcctggctctgctccgtgggcgccggactctcggccccggcgtgccttgctggtgcttgcccgggattggcgagccaaggggcggagctgggtgcggagcgcagagccccggcgttcggactccctgcgacaccaagtcccgagcggcgcgcagcctccgcctcttacccgcgccgcagggtcctccccttggagacgccgcccgcgcactgccgaggggagggggcagcgccaacaaattgggga

SEQ ID NO: 40832 - DNA, 551 bp, Mus musculus
  source 1..551: mol_type = other DNA
tctgttctcaagcgagtggcgtggggtgtgcctggccacccttccagccccgacccactcgcgcgccccgccgctgagagccttggcgatgagggttccgggggaagaatgcacctggccgtgccacccgcggtaccctcgagggccaggcggcttgactgcgccaggcgctggacaaagaggcctcgcgggctggggagcgcagcccgcagggaactcaccttcgcagctgctcggctgcgctcctcgtggagcagaagggcggcgaagagcacgctgagccggggccccatggtggcgcgcccggggcggcaggggaccagcagagacggcggggaaatgcagcccagttcccgtgggccacggcgaggtgctcagtctcggagggcccgggcgtgagccctgctcaccgtcccgggtgcggtgactctgcgcagagacctgagcgcgccgcccgaggagctccccaatttgttggcgctgccccctcccctcggcagtgcgcgggcggcgtctccaaggggaggaccctgcggcgcgggtaagaggcg

SEQ ID NO: 40833 - DNA, 367 bp, Mus musculus
  source 1..367: mol_type = other DNA
atttgtgggggtaatttgaatgtaactccaaacagtcctcaagagatgaacgatagacttctgctctcaatctttgattatcgatggatgcactattttgactctaaaaagttttaaatgatttattctttgcggaccacatgcatcttggcccctcttggaacaatttctccaacaggcatttccagttacaggttcttgaggaaaggatcatttcctggtgtggttctttcattctaagaactgattgtggcaaggtacatacttgcagatatgctgtaatattgccagacttcaggcagagtgtagcctcttccgggagtgggcggagccccatgaggaacgggcgtcctggttcgcccggctg

SEQ ID NO: 40834 - DNA, 433 bp, Mus musculus
  source 1..433: mol_type = other DNA
aacagctagcggggacacagttaccctgtgctgtgtcggccacacatctatcgctactccagaaacattaagaggtgtggggaaagctgaccaattctgctttctcctagtccagagtctgactagtcttgactctgagatattgcattcatgagtgctcagtgactcggaggctctgcctccatttcccacggtggctaagtaaagggaagctccccagaccttcactaactcgatcagaatgtattacatagccaaggctgtcctggaactcacttagaccagggtggcctttacaaaaagtcagaacttgggagtttcatacattggaaagaaactataccatactatgtatcttatttctttatcatggaaaagggagaagccactcacgtgacttgcgcaccagccaagactcggcactgggataacc

SEQ ID NO: 40835 - DNA, 156 bp, Mus musculus
  source 1..156: mol_type = other DNA
ggtttgtgtcactttgtagaaaaaagccttagacctagctgtggttgggcagcacggacaggctgccaagccagtacgcttccggcggtgcaggaagctggggccgccgggcggagcccagaagaccaatggcggtggcccggcgtccgcgcgggg

SEQ ID NO: 40836 - DNA, 654 bp, Mus musculus
  source 1..654: mol_type = other DNA
agtgcggcgaggcgggcggcggagcgcgcccttcccgcagccggccccgctctctccgctctccacgctggtggcgggtgggcggcggtggccggccctctttgggtgtgtgcgcgctagtacgcacggccccccgcgccgcccgccgcccgggagggggcctgcacggccggcggggtgtgcgcttgagcttcggccgccgcggcccgcgcctgcaggcgccggggtccccgcggccccggaggcggcgcggcaggcgccagatgtagccgccggccagcccggccggagcggcgggggggcgcggaaggggccgaatcgccggggacctccggggtgaaccatgttgagtccgagcagatccacctggtgaagaggattacctggactcaatcgagtcactgcctttcgacctgcagaggaacgtctcgctggatgggcgggggcggccgcgtccatccctgggtcccggcggcgaggctgaccggtcctgctggagccggagcgcccggtagcgccgaggtccttgtgtaccgagctccgggatgcgggggagggggcgcggggctcggccgcgtcctcggggagggggtgaaggcggccgcgcgaggtggagtgctatgcgggcgccgcggccgtagggcgcgggcaccg

SEQ ID NO: 40837 - DNA, 362 bp, Mus musculus
  source 1..362: mol_type = other DNA
agtactgggcagtcctgactcggggtcgcgcgatcgcccaggccctgctctcctgggccctctcttggctctggacagggctccgggccgactgcgaggggcgccggcgcggtgtactgcgctgcgcggggcaggtgagggacctgcagcccacccgaagacccgggctgcccagagtggcgaagaggcggagcctgcgtgcccgccgggggtggtggagggccactgcccagcactgcatacagattgctggggaaagcgcccctgcgcgctctatccgagatgcagcttcgcagctcggctgctggggcgggccaccgtcgctggctcttcagcgtgcgggcagggcggggcgcgcttcc

SEQ ID NO: 40838 - DNA, 252 bp, Mus musculus
  source 1..252: mol_type = other DNA
gattcctgggtgatgacaccctctcaggtcctcatgagagcagtaaaccctggtgggcacacctcactgggtctgggcactggatctgtccagggatattgcatggtactccgatcccagaactgcagagccatgggccatgttcttcaaggaccatctggatctgcttgtcctggcacacatcctgcagttcatcaagtcctccagcacccttccaggacgtccgttcatggaagtacctcaaaggtgatt

SEQ ID NO: 40839 - DNA, 456 bp, Mus musculus
  source 1..456: mol_type = other DNA
cctggcccaggggaaaggtctcctgggacactgcaatgtcgattgacgtgcgctggaagaggacgcccaagttctgggcctaagcgtggacagcacgctttccagcggacgtcgtccgcgcccgccgagccagccgcttagcatcgcgcccgcgtagcatgtgcgtgccatccccgccggctggcgaggtggcgaagagacgcccgcgccccgcagtcggcgggctagctgggaagcgcttactaatcgcgcgccgccctacccacaaaggcgcgcagccccggggcgcgcgggcggcgcaggtgagcggggggcgcgccagctgtcgtgcgccggggctggcgcggggtgcgcgcgggcggccgccgcgtctttcttctccggtgatgtcatcgggcgacggcggccgcggccggggggcggcggcgggggcggtgccgggcgcccgcaggttcc

SEQ ID NO: 40840 - DNA, 524 bp, Mus musculus
  source 1..524: mol_type = other DNA
tgtgctccgcaggcgcccaataaaaaccgcggaagcaggccagggccggctgccagagtcctgagtccccactcgcgagtgtgcctggcagagcagcagctctatttagaagtagcgcctcaggcatcgtcctcagcaggaacctgcggccgagctcgttaaggcgtggctttcatgccaatcacagagaggccggcctgggctttggccttgccccaggcaaggtttacagccagggtcgtaggcctccggcttcaggcgaggtctcaggcgcggcctcctcaggccctggctcaggctggcctctttgacgcccaagtgctgggattaaagggcggtgcggcgttcctgcgcagaccctgagaaggccccgccctgcagccaaggccacgccctatcccaggcgccagctgcgggaggccccaccctatccaggcgcgggcctcgccccaccacgggcgtcagcagcggtcggaggcagcggactgttaggccccaccctctcaaggcgcaggctccgcccc

SEQ ID NO: 40841 - DNA, 384 bp, Mus musculus
  source 1..384: mol_type = other DNA
acagcctgtaactgttcactcacagagcttaagaatgaaataaaaatctttcctgatgtatcagtaacatgtggcaagtatgcacgactgcattgggtggtaggtcagaccttccctcgctgctcatggtgaaggctagcaacaggagccttctctgaagccttagccacagtggccggcgactctggttaatcaatcacaaagcacatgggctgtgtttgggaagggaagctgccagcagaatgccgagccccgagcagggcctcggggctggggagtagactgccgcagcccaagacgcagcagccgcgggaaggggcagcgggggcgcggtttgacgccgtcacttccggtcccgggcgcgcttccgggtgcgggcagggg

SEQ ID NO: 40842 - DNA, 384 bp, Mus musculus
  source 1..384: mol_type = other DNA
gaaaagaatcaagtcctctgtgcagtgcgggccagtagggaggtggccaggactcctggctagtcttcatggatgccagtgggctgtggtgacagggcatcctgtcagccttggctcagcctctccagagcctcgccaagctgggtctctctgttcctgttactctttccggaaaaaatgctttttaaaatcttaaaaggagggatcagtttagaaatatctgttaaagtttaaatgtttttatgaatgtcccagtactagaatttaacatacttttttatatttgcaatgaaaagtggatatatgaatatttttaaggcagccttttaatgtacattgtggctttatgtagttggaagtatgtccacatgtatagagattaat

SEQ ID NO: 40843 - DNA, 390 bp, Mus musculus
  source 1..390: mol_type = other DNA
caagggagccttgctaggcagacacctggctgtgctcctcatagctcccagggagcaaattaatttccttcaattatttctgtaaaagttgccatgtttgcaagagctgcttcttatacacacttggttattaaatgccaaccacatttgtttacaaataaaaccgagagcactgcggcctccgcaggctccagagccttgtgctggctgtacctcagggagggtccccagggaccatctccagcagcttactgaaacatatggcagttttgtcactgtcacagcccccttccaagggcatgcttgcactacacagggccttgttcaggaaggagcaacttggattctaacttgaggttcccctttatgaccttgagcttcaaaatgatg

SEQ ID NO: 40844 - DNA, 581 bp, Mus musculus
  source 1..581: mol_type = other DNA
gagtgttgggagggtcgtgccccccccccacccatgcacaccctgacagacttgttcacacactgatccttagacggaggggggaaacctgccctcgctgctccgggggaggcctggcgcagcgcccacgtccaaggtgtcccctcggcgagacagcggtgggggcggagggggcgcgcggctcagatcccgcgcaatgaccgcgctgactcaggagtgcgggtgggggcgtccctcctgcaagaggtagggaaagccggagccgctccaggtgacagtcgccgcccgtgggatgccacaagtgactgctgacaatccctatggtccaagggtcccgaacctctgcggtcgggccagcgggaggggcggcgggcgccggcgagcggggacccggctggggagcggctagaggagggcgagcagcggctccacctccccgctcggctcggcgtcccagctgctcgcgaagcactcccttctattcactcagcaggaacaaaaacgcggctattttagaatacttgtttggtattgttcagtgccacacaaaaggcgcttcattatgccaataataaatttca

SEQ ID NO: 40845 - DNA, 511 bp, Mus musculus
  source 1..511: mol_type = other DNA
ttttcaaaatcctttggcaaacagcttctgggagaatgttcagaaaataccggagtaacaagattccagctagatcttggtagatcccgaatctgtaaaggcctttgcaggctctgagaatgcaccgagcgccaggggtgggagagactgagccgccccgcttggcctgaaacccagcagaggtactttgggcctaagccccccccccccgggaggatctcccccgctattctgcactcccggctgagctgagtgcaaagtgaggccttccaactttccccttcccagcgggcacagagttggctggctggggacaggggaggctgggtctccaatgagcgcatttaaagcgcgggcggggagaggcaaagggggcgagctctgggttcgccgccgccgccgccgccgtcgccgccgcgcgcgcgcgctcaggaagcagtgtggctgtgaccccgcccaatcaccgccgccgccggttcccattggccgcggcgcgctcatttaatggcag

SEQ ID NO: 40846 - DNA, 276 bp, Mus musculus
  source 1..276: mol_type = other DNA
aatatttggctgagattcccactccaagaacactgtatctttcattggtgttaaaagcaataaaggattagtgttaatgctgttagtgtaagaagaacaggcatataaaaatatgcttttacacaaaaggatatgtatgtgcttgagcatgtatcaatgtgtatgtatgtgtgtggtgcatgcacacatttgtaggcatcaaaacaagtttgtgacactattcctctaccttggaacgagttagaacattcccattaagttaatagaaaacttatg

SEQ ID NO: 40847 - DNA, 351 bp, Mus musculus
  source 1..351: mol_type = other DNA
ggcagtaagagctctgtggcctgaacagctcacacaccctctctgcttgtctggccagtggatttgcaaggatgagacaggaaggacctgtctcctcagcactcagcagtgaccaagctcagttcacccctgctgacatctgacttcctagttataggggtagcaagtcacagctgccccactgaccaggcttgtcctctggccatgtctgtctggtcattcaactgagtcacaggtggccatatgcctggatcctattcagaccctcggttaagtatgcctcacagggttaatggggaaggaacccaggtcagtgccctgtggtgatgtcacaggtcccccacattccac

SEQ ID NO: 40848 - DNA, 453 bp, Mus musculus
  source 1..453: mol_type = other DNA
gaggactgagctctgaccaggaatgactgatagttattcactatggcctatccttctgatggagcatcatctggctgaagccgagagtctcctcttgcatctgtacatcaatcatagtcctgagtcagcgactaagaagaccaccgagcatccgggcaggagcggcggagctgggctcccagtgacgaggactctcctcctcctgcgtcccagccaggactacctcctggtgacgtcaaggggcagaggttccagacctctgagaactcacttacgagagcctgtccctgtgtggctcaagcgcactcggactccgcatcagccagaccgcaagctgcggacgcgtacgggcatcctaggaacgcgttgctgcgagcgtcgcccagcaacgacttttccagcgcggagaatgcagaagccgggagagcgcacgcgcgtctcgcgcgggaagcg

SEQ ID NO: 40849 - DNA, 464 bp, Mus musculus
  source 1..464: mol_type = other DNA
agtttagtcactggcaccattgccacacggccactgcagatccctcgtctctggttctaccgttatcagaagcaaaccaccttccctgggtgctagctaaaacccaggactgtggagggtcttccctgaggcctggtttctggaaggcaggacagatcagtcccaaccctgtagccacctgaggtcccacgccacggcaggaggtgtgaccccccccccccccccgcaggcctagggacccaggcccatggcactcgccatggagtcctgggctcacagtggatcagcacccgacgagccacgcgggggcgatgacagccccccccgccccccctcccccagtcccgcagggaggcggaagcaacagggcggcggcgacgcgctagggagtcgcggcgcgcgcggggccggggcgggggctgcggcgcgcgcatgctcacacgcgcccgtgacgcgcggggcgc

SEQ ID NO: 40850 - DNA, 329 bp, Mus musculus
  source 1..329: mol_type = other DNA
tctatctagatagggcttgtgctgctagccaggaaagccatgcctggggcaatccagggtttcccagaagagatttctggggaccatcgacatcatccccacaatggtcatctttggacagtgtggcacaggcagacctcctggaaggagaagcacatgtgactcctttcactgctaacagatgggtcacctatatagctcctgcctggcagtggctgtctgctaccagccaaggaccctgtactacacaggcctgaggctctattgtaacagccctagaagcagaagctaggagtcctgtgctagccactgcagcttcctcagtgctg

SEQ ID NO: 40851 - DNA, 390 bp, Mus musculus
  source 1..390: mol_type = other DNA
atgttggtacacacatgtttctggtcaccatagtgctgagatatatacatgttggtgcacattgcgttgttgcacaccatggtgctgatatcctgttggcaggatgcgacccgtctgacaaagatggccagcagctggagaggctggtgttcgccccggtggtgtcagatgcagagcgtggccctctgccaaacatggcgaggttagggagcctcttaggtctggcaccgcccttgctgggagagtcaagtctcctcgtggagagcgcgctctaggctgctgtggactctgcacctgccctgcagcggcgggaggtaaaaggcagacctgtgcgcctgcgtagggcggcggtgcacgcccggcagggcgcccccctccctgtggcgcgga

SEQ ID NO: 40852 - DNA, 494 bp, Mus musculus
  source 1..494: mol_type = other DNA
taacaagtccctgatggcagcaggcaggaactagccctgtcacaggatcagctcctagggcatgtgcccagccaccagagtcctagtgcaggggccagaggtctcggagctcctcaggtgatgtctgaccctacttgggacagcaaggccatcccatggtctccgacagcatctcaccagctgtagcactgggcaactgatgctgcagacagtgttaacaatgagctccagctcacagtaagctacagctgggcctacagactgggagacccccctttggagaactgggaagcctgatggttatacccagacaaacagtctgcctgagtgaggagctaagggccggctcccttggccggctgagcctggacctctaaggcttagaacctgactgaggtagggcccctgcagggagggtcctggctctgcagccagcaggactcagctgctgccaggctctcaacagttaatcatctgccaagggatctgattct

SEQ ID NO: 40853 - DNA, 313 bp, Mus musculus
  source 1..313: mol_type = other DNA
gacatctgcagctgcagctgctcccagataaagggtgactgcacaccttctcagaaggctggaggaaaaaagaaacagtggcatggctttggtttcctcctagcagggttacctggcaatgccagttatccccattgagatgctcccagctgcctggatcctggcctcggcactaagaacaagggccctggctttgggtccttccattatttctaagagaggaagggcactccttgccaagcattgatgaatggcccataaaggattttttttttttttgcaaattttaatgaattctgactacaaataaatt

SEQ ID NO: 40854 - DNA, 359 bp, Mus musculus
  source 1..359: mol_type = other DNA
gctgctccagacataagagagctgggatgaatggctgccatctcctctcatggggtcgggaccccaggagtcaaaggtgcccctggggtacacctccctgaaaagaacattttcctcagagggtccaactgaagcccacagtgtagtctagggaaagtttcacgtgctgagaaaccttgttgatctcaggcaacccagtgtccacaactccacctggagcctgggccaggggcagcccttgagagccattgacggctgcacagcccaggtctgccctacagttaacaatgtcatcactgtgaatatggacatccatcggtgggtgagctctgttcacacctccggtctgagcggtggac

SEQ ID NO: 40855 - DNA, 385 bp, Mus musculus
  source 1..385: mol_type = other DNA
ttggatgactaactcagagctacatcatgaggaaatagccaggacagtgctaccacatttcagtgaagccccatgtggggccactcagaaggggctcaacccccaggacagatcagctgggtgttctgctgaggcgcacgtgaacatgtccccaggggtgttctgcatgtaatgaacacgtggagggagctcttcatgcccctgtgtattggacaacccgcagcacactggtgtgagctttgggtaccagctttgccgactgcataatttatagtgcactgtagcatcctcatggattcagaaaccaggcattcagagtgggtgcctccagcctgtctcggaggattggctggcagcagaggctgctggcatctgtgactcaggc

SEQ ID NO: 40856 - DNA, 354 bp, Mus musculus
  source 1..354: mol_type = other DNA
tcccaagttctgttatgtctgccacagcctaggaaatgacagtgacttccctcctggtgagatgccagcatcagcctcaacatctgatgtcacgggtgtgtgtgactggtaacagtgataagcaccgtactctctgtcgtgcatgctgagaagcctattgctgctcactaattagcaggcatggtgcgcatgtctgcggtgagcactgcctagggacaccggagcatgggcctgtagccccaattacatgagcatgtgagaggagctgtttccacgccagtctccaccctccaggcctgcgggaaggctgggagtggcaggcctggtgggcagaacacacccccacttgtgtca

SEQ ID NO: 40857 - DNA, 397 bp, Mus musculus
  source 1..397: mol_type = other DNA
agggacaccggagcatgggcctgtagccccaattacatgagcatgtgagaggagctgtttccacgccagtctccaccctccaggcctgcgggaaggctgggagtggcaggcctggtgggcagaacacacccccacttgtgtcagaagattgagggcttggattcaaatcccacatctgacctgcctgttccttaaaacaaggaggggggactgacccctctaccagctgggtaaaggaagcaggccctgcctggcagttctggataagggtagcctcccctagaaaggctggggctggtcaccacagtccccagtcccctgacctcattgctggcccagggctccaatcagaagcagaaggcccatggccacctggggcccagggtgagtgaacctt

SEQ ID NO: 40858 - DNA, 376 bp, Mus musculus
  source 1..376: mol_type = other DNA
ctcagagttccctgagtgctgacggctagaaaattaatttccagcttgggtcactcacgaaaggtacagttgaatttgtttctcatccaactttttaaaaacaactccacagtgtatgcattgaagatagggtgctgccctctctgtcgtgattgtccttcattcaaccaaagatacaggagacacgccagcatcatggaactttgcactgttgcccggacccaggaaggcgccttgtgggggaaatgagcccacctgtgcagagatcccctccaggaaggagcggaatgagagtgagcctcctccccgagcctctgggtccataggctagcctctgtgtgttctgaggcacacactgaccgcaggtcccagggcc

SEQ ID NO: 40859 - DNA, 756 bp, Mus musculus
  source 1..756: mol_type = other DNA
ccagccaggtgctcgcaggccctcgccgccgctcacctggtacagctcctccaggttgtacctgatggatcagccgcggcctgtctggccgcgcggggacagcacaggccggggcaccgaggcagggcccggccgggctagccaggaggtgcgggatcggggccagctggaagtcgggttgcggcgccgagacgggacagtgcgggaaccaggcgggccggggcgcggggacagggcctgccgggcagccccaggaggccctgtccgagcgcgcgacccgccggccgccccgttcgctcctcaccggagcgcacccggagcctcccgtgccccccggcttggcggggccaccggccaacgccgcgggcttggtgaggccgttggtgcggcccatgagagccgagacgctgcccttccgagggccctcgtccgccatggctgggccggacgccgccccgccccgcgccgcccggctcctcctcctgccctgcgcccgctccgtgcgcgcccggctctcgggctccgcccgtgagcttctgctcgcggccgggtccgcgcgcccgaggcccaaccgccgcggcgcgcaccggaacgatccggctcctcctcctatgcgcgaactccgcccaaggagggctcggggactcgcaggcgttctacaacgaatgctcgcgagagggcgccgtgacacctgcaccgagggctccggagctcgccgccccacgtcacgtcgagggccgtgacgaggacaccccg

SEQ ID NO: 40860 - DNA, 570 bp, Mus musculus
  source 1..570: mol_type = other DNA
ggcccatgagagccgagacgctgcccttccgagggccctcgtccgccatggctgggccggacgccgccccgccccgcgccgcccggctcctcctcctgccctgcgcccgctccgtgcgcgcccggctctcgggctccgcccgtgagcttctgctcgcggccgggtccgcgcgcccgaggcccaaccgccgcggcgcgcaccggaacgatccggctcctcctcctatgcgcgaactccgcccaaggagggctcggggactcgcaggcgttctacaacgaatgctcgcgagagggcgccgtgacacctgcaccgagggctccggagctcgccgccccacgtcacgtcgagggccgtgacgaggacaccccgctggatccccaggatgctcagggatgctgctccgtgcgctagcgcgccgatctggggatcctaggagtgcgcgggacgccttcccagtatcgggtcgctagcacaccgacgtgaccagggacacgttcccaagtcggttggctccgccctcgcgcgcgcccccgccgcacccgaggcgtcccggcgaccgcgctgacagct

SEQ ID NO: 40861 - DNA, 442 bp, Mus musculus
  source 1..442: mol_type = other DNA
gacaggattgcccagagtgtggggccagcctggtccatgtgggctttagggtgacgccatgtccccaacgagttttgagtgtgacattcacaaaagaggaaaatactttagtattgaactcttcatggaaatagtcatctcagatgaacatcatctgagcactcaggaagcagaggcgggctgatctctgaggctaaagatatattctgaaatcctatctcttaaaaagtatcttttccttcggggctgacccgtctagatgggaatacccacctcgaaatgtggctctcaaccaagactaccactgggctgcaggccttcaggggcttggacctgacaagatatcacgtggtccagcgcccacgtgatgccgactggcacgtgaccacatcacgtgcgggcggtccacgggctctcgcgagaccctcggctcacgtgaccg

SEQ ID NO: 40862 - DNA, 523 bp, Mus musculus
  source 1..523: mol_type = other DNA
gcggcggccgcgggtgttgagtgcctcacttccggcgcagctgtcagcgcggtcgccgggacgcctcgggtgcggcgggggcgcgcgcgagggcggagccaaccgacttgggaacgtgtccctggtcacgtcggtgtgctagcgacccgatactgggaaggcgtcccgcgcactcctaggatccccagatcggcgcgctagcgcacggagcagcatccctgagcatcctggggatccagcggggtgtcctcgtcacggccctcgacgtgacgtggggcggcgagctccggagccctcggtgcaggtgtcacggcgccctctcgcgagcattcgttgtagaacgcctgcgagtccccgagccctccttgggcggagttcgcgcataggaggaggagccggatcgttccggtgcgcgccgcggcggttgggcctcgggcgcgcggacccggccgcgagcagaagctcacgggcggagcccgagagccgggcgcgcacggagcgggcgcagggcaggaggaggagc

SEQ ID NO: 40863 - DNA, 312 bp, Mus musculus
  source 1..312: mol_type = other DNA
aggtactttgaagtttctaactagttcaagtgagtgagggtcattccaactacagtcagctgaaggtgggtagcacctttttccgagggcacctcgctaagaaaggcagtcaactggtttccaagcccagaggcaccgcggcactgtgaccctgcagtagcgcacacagctggggctcctttccaaggctagacctcgggttccaaggtttggaggatggtagcatcggagctggaagtccgaagtccaaagtccagtctgccaggcacggcttaaaatcctctccatggattttcaaatccgggttcgtcg

SEQ ID NO: 40864 - DNA, 465 bp, Mus musculus
  source 1..465: mol_type = other DNA
aggagtcccatttaaagagggatccctctactgcgctactgcagggtaacagctactgctgggaggtcctgcagtccagagggccacaggggttctggcccttgggagaaagtcctgtaatggccgctatgcaccaggtcgaaccaagtttccgcgcctgcggggatgcggctggggtccaagagctccgacacccggctctccgtggaccagagcgcgtcccccgcgcagcatcgactggctcagacccagtccggagagggcgcccagcaccccgcgcgcgcggcctccgcacccacctgggcacccgagctcgcgccgcctgcgcgcgctctgcgggatccatgcggagaagggccagggaccgcgggactcacaacctctgcagccccgagcgctggaccccggtgcgccgctggccccggggcgcgcgagtgcttccggcgggggcgtggccgacgaacc

SEQ ID NO: 40865 - DNA, 514 bp, Mus musculus
  source 1..514: mol_type = other DNA
ctgtctgcgggcagcctcacggggcgtctcctaggaaggatccccttaggattgagcaacccggatgaggaccccggtggagcgcacaggagaagtcccgcagctgcagagcttaccccgatggaggaggccgctctctggactcgagagttccccgcagcgaacctcagggccgccatctctttcctggcctcgggaccaggacaccgaggacggcaccgccctcttcttacttcaggcgcttctgacgcgcagctggaaagtaggtgcggctcctttaagcaggctgccgatggacagctccgtcgtccttcgcgcggcgcgatgcacgccgggaactggagtcccgggagccggccggccagccagcttccagcctcggagctgaggggcgcctgtccacgctgcacgcggaccccccagtcacctgaagggagcgttcgaacactgcgcctgcgcagagcgcctgctgctagccgccgcggcaatcgcctgcgcagaggaagagcggcgt

SEQ ID NO: 40866 - DNA, 404 bp, Mus musculus
  source 1..404: mol_type = other DNA
agagatgcatcctctcggagcaaggctaccccgagacccaaggaatgggactgtcaggcgtcctcagggccctccccgcctccaggattcccagcctgatctcaggaagagagcgggcgagtaggggatatcctcgccgcggcgagagctgagcggatcgcaactaaccccgcggagcgaagcgggacggctccgcccagcaggcaggcagccccgtcccgccctccggtccggtcagcacccagctgacccggcgccgctgcccaccacgacgggcacgcccggcctctcggttcggtccacagagaggtgacctccgcgcccggctctggcccgcacctgctctgcgcaagcgcacgccgctcttcctctgcgcaggcgattgccgcggcggctagcagcag

SEQ ID NO: 40867 - DNA, 539 bp, Mus musculus
  source 1..539: mol_type = other DNA
agggccctccccgcctccaggattcccagcctgatctcaggaagagagcgggcgagtaggggatatcctcgccgcggcgagagctgagcggatcgcaactaaccccgcggagcgaagcgggacggctccgcccagcaggcaggcagccccgtcccgccctccggtccggtcagcacccagctgacccggcgccgctgcccaccacgacgggcacgcccggcctctcggttcggtccacagagaggtgacctccgcgcccggctctggcccgcacctgctctgcgcaagcgcacgccgctcttcctctgcgcaggcgattgccgcggcggctagcagcaggcgctctgcgcaggcgcagtgttcgaacgctcccttcaggtgactggggggtccgcgtgcagcgtggacaggcgcccctcagctccgaggctggaagctggctggccggccggctcccgggactccagttcccggcgtgcatcgcgccgcgcgaaggacgacggagctgtccatcggcagcctgcttaaaggagccgcac

SEQ ID NO: 40868 - DNA, 292 bp, Mus musculus
  source 1..292: mol_type = other DNA
atttcaaaccaagaagcctggctttataaagtgcacctatccatcctcattatttaataattccatgagcaagtttgtttgtatagacacgcatcactattcacaggagctgggagcagcccacagccctcaattttataataaggtgcctcctgaatgctgaatgctgaaactagaggtggtatgtcgctctgccagcagggggcacaactcacgagtagcacagctcacgggctctgagctgggctgagctggctgggtgtacactggtgccagcagactcctttgctgg

SEQ ID NO: 40869 - DNA, 540 bp, Mus musculus
  source 1..540: mol_type = other DNA
agcccaggctcagggcatgtttctgtgtaaatgaacaagattcttctccctgtgtgcacatgcaggtactttagcagacattaacataggtccatatgtttgcacagagggttctcttctgtatatatgttcaggcgtgcacacacgactgatactccatgtacacacacgtgtatacagtcagactctgcatatccacaggtgtgcacacacatgatcctttccctacgtgtgcatgcaggtatgaccgttggcgcgcgtggtacacgcgcacacacagagcgcatgcacacagatatgcatacagttgcgcgcacacacgtggcctctctccgagcgcacatggagacgcgcgcagcgctgttcggcgtcggcggtctccagccgggtcccgccgcacgcgcacgcgcgcgcaggccccgcccctctcccagggcgggtagcaccggcgagaggcgcgggaggcgcgaaaaggcgcgcaggcgcgctgcgcgcagcgggcccgccgccgcccacgtcaccgcgccgcgcgcacgtcac

SEQ ID NO: 40870 - DNA, 209 bp, Mus musculus
  source 1..209: mol_type = other DNA
aagggcccagctcactgggggaggtgccacccctgagtaggtggtctaagcagagcctgtccgtggttgctttattgaagcaacaggaacttaactaaggaacttaaataagacatgcccagtctgcttcagtccttggtctgcggggccacctctgaccgagcgttgggctcaggccagcgtcttaatttccagggactagagacgct

SEQ ID NO: 40871 - DNA, 446 bp, Mus musculus
  source 1..446: mol_type = other DNA
tgttaaaaagctcagtaatcacacatggagcgcctccatgctcactgagagacaatggctgtgactctaagaccccaggcttgggtttgcatacacaagctagctactccaggcctacaggcaatttccaggccctgaatctctctctctctctctctaaatatatatatatatatatatatatatgtgtgtgtgtgtgtgtgtgtgtgtgtgtgtgtgtgtgtgtgtatatatatatatatatatatatatatatatatatatatatacacatgggtatgcatatctccacaggagaatacagcaccttctccaccatcttgaggaggaggggagtcttcccagggacctgagtggtgaggtggcaggtctcaggcctagggcatttgacctagaatccctcctgaagggcaggtgggacccttcagctaacatcagggtagatg

SEQ ID NO: 40872 - DNA, 211 bp, Mus musculus
  source 1..211: mol_type = other DNA
tcgtgaataaccaacaccacttttgaaaacagtgttccttcttaagaaagagccttcccatggcagtcatttctctgaaattaagacaagaatctgggttgcattcacccagaaaagagggggagggtgactccttatccttttctatcaaaatgctgaggtaaggatgtctctttctccacgccactgggtgtggcccagtcagcctgcc

SEQ ID NO: 40873 - DNA, 376 bp, Mus musculus
  source 1..376: mol_type = other DNA
gcgggaggcggctgccaagcgcttccaaggtgagccagcctggctgagctaaggggtgggctgagctagggaatgagctcagccacgcccacctaagaagaccaaccccctgggggcctttcccttaccaagaacttcaagtgtcagggatctgggaagaggtttcctggggaccctcttcttcaacctgttcctcgtgtggctcctggagaagctggctggagctaggtgtctcaggccagagcaccttgctcccaggttcagcctctgggagacaggaatcttcagatgtcctgcagaccccaaagctctgagatcgcaggcctctgaaggctgggggtgtcctcttgtgacataatgagattaccagatcagg

SEQ ID NO: 40874 - DNA, 239 bp, Mus musculus
  source 1..239: mol_type = other DNA
ctcacgcacagaaaaaaatttgtctaaagcaaatgtcatcccctcctgggagaggctgcaggggagacatccctgcccctccttgagacatgttcccaactgaggtcgaggtccgtggtaagttttgaccaatgtaaaccacactgccccagggccatttacacatttgtgagacactgccatctagaagcccctcgcctatcttgtgatgtcacagcagcgtcatagcaacagtgagt

SEQ ID NO: 40875 - DNA, 374 bp, Mus musculus
  source 1..374: mol_type = other DNA
tatgtgtcacctctgggaagagctcttggccctctaggaaagctgggagttatgccagctgcgttgtagagatacaacaattctaaagttgcataagggccgcgttgaggctgcccaagcacaccacagggtaagcagggactgcttgctgggcacagggtccagagcgatcggcaggtgtcaccacgatctctctttgtcccaggtccagagagaccggaccagcgagggctgtgaagagggaccgcttcaggggcactccaaggcaagtcccttcagtgtttgacagtaggcggagtcgtactaccccacccggggctctggcgaaggaaggcgcccgcagccccgcccccgagctctgccaatggaagggc

SEQ ID NO: 40876 - DNA, 409 bp, Mus musculus
  source 1..409: mol_type = other DNA
gagtaaggctgacccttgaccagaggcagtattaataaaaagacgggtttagaatgttaatccgcttctttctcagataactagctctctgaataacatctgacttaaagattaaattcctgtctttgatgagcacaaatttcctttataaaacaattctattcgtaaaatgaatgaagtgtgtgtgtccttaaaatattaccctgtcatacatatgtgtcattcacagaaaaggacagtctctatactttcaaaaggctgcacagtgcacagaatggaattttaagaacacaaaataccctgtgtggtgatccagtctggtacccagggacagctctggaccactgtgtagctatagaagcgtctcttccactcccggaaggcacggcccttttccctcccgggcacg

SEQ ID NO: 40877 - DNA, 194 bp, Mus musculus
  source 1..194: mol_type = other DNA
gtcaactgactctagctgcgtaaaagaaaatcttccacctgaactggagttattgttattttgttataagatttttattacatttgtaacattgttataaatgattcggaaagaaaagtgtttctcttcctgaagaaatacaaagctgagttgctcttctcccgacagcagcagtgccaaggcctgggtgccat

SEQ ID NO: 40878 - DNA, 496 bp, Mus musculus
  source 1..496: mol_type = other DNA
ataattttggctccaagcttgtaatgttccaactttcgtgtgttttcctaataaaggttaagaggctatcagaacttctgtgtttgacgcagacctaaacggttttttaaaacgtcacatttcaggagtgccacgatcgatttctgaaaatctctcattctctaccattaacgtagggagaatggtggaaaactgtattgttcgtatatctgctacaaataaaataaaaatagaggatctctgagctccaggagagactgtcccagtgactccgggtggaccgggggctcccagtccccaccgcaggtcagcagcgcacgggacgtccggagtgagcatctgctctccgcgtggctggcagcaccgccgtcgccgccgttctaggacgtccgctgtcttttaaaaactgccgcgctgccccctacaggcgcgggccagcattggcaccgccccttccctgtcagggccggggaggggacacccaagggaggggctg

SEQ ID NO: 40879 - DNA, 449 bp, Mus musculus
  source 1..449: mol_type = other DNA
tgtgtatgtgaatgtacctaaatacaatctgattgggtactgaataaccaaccactgaatactggataaccaaccactgggtactggataaccaacggtactcttccttggggttttattcaacaaagtcacattactgacttggagcacttgactttaaagacgatcattaaatcaaagcccctcattaagggatgctgtagtgcgggtgcagcctgcaagcccatcggctgtgactgtgtgacacccgggatggctcagtgcccaatcaggcctaaggctcgaaaccagcactagaggtcagaaagagctgtagagcctgcggtcccgcacaacaacgcaggtgggcgtgccgtccggcgctgcccctgcgccgccccgccccctcggtcgccgcgccgccccacgccgattggcttgtccgcagcccgtcggccgtcacgtgccgg

SEQ ID NO: 40880 - DNA, 412 bp, Mus musculus
  source 1..412: mol_type = other DNA
tgtatagccctggctgtcctggaactcactttgtagaccaggctggcctcaaactcagtgctgggattaaaggcgtgcacctaatcccagcacttgggatcaagaagtgtgcttgctgactctagacaaaaacaaagtcactaatgtgttatgtgtgttcatttctatcatcattcaagcttaagaaattacataggtgtaaactaaaagtgaatacatttcaattgcaattgaagccaatttttagattggagacatgaaacctgtttactgccttcgaaaagatgtcttattggaatgaatgaatgaacgcatccttattaggaaagagacagaagcccaggcctggggctgggcccttgcttcctccggcacagcccagctggggcgacccggaggcacgcgacggcac

SEQ ID NO: 40881 - DNA, 334 bp, Mus musculus
  source 1..334: mol_type = other DNA
ttgtggttttagagtataaaacgcaaacaaactctcactgatgtccgagtgattagataggctctaaaaatgttttgagcattctccttctcaaagatgtgtaggaacttggcagtcatgtttcagcggtacaactggcagggaaccttgccttgctccaagttccgcaagtgtgcagagccggtactgtccccagctgtgtcttggcccacgtccatcactcaggccgtctgccttccgcgcaggctccagagccaggctcctagcccccgaatatggatgattgacatccagcggcggggaatcggattaggcactcctaatattgtgggcg

SEQ ID NO: 40882 - DNA, 509 bp, Mus musculus
  source 1..509: mol_type = other DNA
ggtgtgtggacggaataatgctgacttccacccataattgttttaaagtgtatagcgcaaaacactattagactaaaagcacgtcagaaattatttacataatacatttcaaatatgaatacctgctatttaaaaatgtaaaagactaacctgaatatatatgtttttgctcattacattaaaatatttttgtttactcgaagtctaggaactgaaagccattctaggctgcaggtcagcaagactgtctttgagccccagggctacgagcaagaagacttgcattcacagatgcctagctaggcaggcaggtaagcggtgtccttgctagccccagcccggcgcaagggaggtcccagaaccgaccctggggcgcctaggatgggtgggtggggcttgtgctcactgagcacgcgcgccccgaggcctccgagttcgggtagcaacacgaatcacgtggctccatcagcgggacgccaaggcggggcgtccagcggtggccctcggcg

SEQ ID NO: 40883 - DNA, 372 bp, Mus musculus
  source 1..372: mol_type = other DNA
aaggccagaagtcaagttgctgtctttaccacttttttcaaagataagaccagagctcactgattggccacactgagtgcacactgtctctgaactcaggctgcattagtctgagtgtcaccctgagacggccccaggtccaactggctccactaatggacaccgacgccggcccccggcggccccacctcggcgttgccttggtgatccaggatggaccacgcccatcgggctgggccttggtaaagcactcggcccgctgattccctggggggcctagtctgggggcgggcctgggggcgggccggggacggccgcccgcagctgaccgcccctccccgcccagtcctccgcactgtcccagcgccgcgg

SEQ ID NO: 40884 - DNA, 337 bp, Mus musculus
  source 1..337: mol_type = other DNA
atttcctaaggttgtatcagacaatcctggagttagtgcaagcttccaattaagggaagcaatgaaacagtcctacccagcttcagtactagtgaaccgtgctactcacatgctagtgggaaccaacatctgtctagctagcgtgtcttatctatacttaaagatgagtgtagctaccatctgttggacacagtacagagatcaatagattgtaaagagcccagctctggaagaatatcaatggacatctcaacacgggtggggataatttcattgaatggtcatccatttacatacttacatattaatgcacgcacatgcaaatgtatgtgttaat

SEQ ID NO: 40885 - DNA, 234 bp, Mus musculus
  source 1..234: mol_type = other DNA
ctataaactttgcagcttaaatggttgagccacaacgtactttaaaggagtatgttagtctaatttggtccaaacatagtgtgtcactaaacccaagctctttggttatgggcacataaggttcacacctgcaactgaagaagtggattgcctctttcccctgcaacttctcagatgccagggcgcttggaatcatgagttgctcgtgtagacgggcctctccgacatcacata

SEQ ID NO: 40886 - DNA, 463 bp, Mus musculus
  source 1..463: mol_type = other DNA
attaagttttggtcacatttaaaagaaactttttaggtttcatcaaaatatggctaattttgctgaatttgcctgttttttgttgtgtttctgatttcgctgaggaaaaaaaaaaagatagttttttttctttgcttccgagtgcagcagcaaacaagggctctggaccaggtttacacagcacccagagcagcactgtgctctcttagtggccagtgctgagagctctgccgatgcgtctgcagatcccacatcggagcacacgcggtgtgggacctctccgctccccctacgctctgcgcgcaacagttgggatccgctgtgcgcgggctcccgggccgtgagcgccatgcgacctctgggccaggcttgccattggcagcggcaccgcggcctgagcgctccccctaggcgcgtggcgctgggcccttcctcagatggagccacgcaccggccgcccccc

SEQ ID NO: 40887 - DNA, 450 bp, Mus musculus
  source 1..450: mol_type = other DNA
ctgattatctgctcagagagaggggactgattccgcacctctcaccgctaccctaccagccccgcttggttagtaggagcacaggttaccaccgcctggaagacaatgctgctgtagcaaggggcagtcgcctggagcccaaccaggagacgcgtgcgcttgcgtttcacctctgcgctctgacgtcagaggccttagggaccggtccacacagaggtgggggttgaggaattcctccactgatccctacgatagtcaaatctagcatagcgcgctgcgaactgtgtagcctgctccaggcacccccatggcgctggatgggatgatcctaccccaactcgtgccccccgagtctaccttggtagcgtcctagggaggcagtgcgcgtgcgcagtggatcgcgcgcccagctgaggcggggacacagatgggcgtggggccctagtctcc

SEQ ID NO: 40888 - DNA, 501 bp, Mus musculus
  source 1..501: mol_type = other DNA
caccaaggcccacattcttggtcttcacagcgcctccctttccaggctcagccatgagcagaaaggctagctaagctctctccagcatcgcttcctgcatttagagagctatggaaagcgcgggacgaggagcccctgaccctgaccagccaggaccgcctaggctggcagggtggctctgccccactgcccgtgggacccaagatgggacctgccagcgacagcgcagctcccagtgctggccccgcgccatttcccagtgaccaggagtctgaggggagaagcgtcctctgggctttctgtgccccctctgtccccgggggcgcaaggtaggcagcatccctcctactcacggcgcggggcgttaggctgggggcggggatggccacgtggcctcgcaggaatgcgctggcgcgagggtcgggcgcggccgaggaacgggcaggcacggccggttccgcttccctggcgggcggggtgggagcgcatcgcgggcggggc

SEQ ID NO: 40889 - DNA, 354 bp, Mus musculus
  source 1..354: mol_type = other DNA
cagcagtgggccagcctggtaattgagcaatgctgacagtggggcagtgctggctgaaagacagctgcttctctacctgagcattgctgacagccggggacgctcccagtacgtgtttcacgtattcataaagcccacacagcctgaggatgcagccctacatgcagtgcccctgtaggtgtgtgcccgctcccagacacactccagaaatgacattctgccttggcccccagactctggtgccgacatcacagcatcagcctggggttacctccggatactttcagtggtacccaggagctatgatagtttaaagtacttttctttcaaaggaccaactgagtcctcagtaat

SEQ ID NO: 40890 - DNA, 337 bp, Mus musculus
  source 1..337: mol_type = other DNA
agcccagtgtgggagctggtccacccagcatccagagccaggatgatggaggctgggcactgaggccgcatcctgcaaatggagacacaaattaacataatgaaaatgaaaatgatctcagcctgtttctattgtaaccaacaggaacggaaggaaggagtcattccagcagtttgcagctttctgcgagcaaatgttcacatcctctgttcacagaaaagaagcatttatcccaggatcaacctggttgtacagaactttcttaagattctagacgcccgcggggtgcagcacaagagcgagctcccagcttctgctcgcgcaggagctgttgcgg

SEQ ID NO: 40891 - DNA, 204 bp, Mus musculus
  source 1..204: mol_type = other DNA
accaaactccagtggtgatcagacacgtggccaccagacttttaaaagcgtttcactcaacaatgctcaaatcttccctctttccttctgcagacaggagcaagaatgtgcttgaagctgccaccctgattcagacagcctcagctgaattctgggctgcataactggagtctgtagaacagagcaggtgactcagtgggagtc

SEQ ID NO: 40892 - DNA, 317 bp, Mus musculus
  source 1..317: mol_type = other DNA
cagctgcagaggaggttttaattatgagtagcttgttttcttctggactcctccaagacctaaaccgtggagccctgagccctacagttctttgtcagcgtgcacaaaaattacatcctggttgtcaagctttggttagcaagaatatttaggaactttcccaggtcttaaggtcacgataatgtctctaacatgacatcagatgtcctaaggtcttaggatgtactaagctctgtttatgatgataagagcccagacttgtactatctgatgtgagtgggaacaaaggcttccgaagccttggaaaccatggggaa

SEQ ID NO: 40893 - DNA, 304 bp, Mus musculus
  source 1..304: mol_type = other DNA
tgtcaagttgacatataagcaacttgtggacggttgctaccaccaacaacctaagacagcagcacagagctctgcagcgttgactggctagctgtgtgaagagatggacacctgccgctgttatccccacagggagcttgcccagcaagctgacatctgcattagagtggtttttaaaccaacacacatccatagccaatagcagccatggatctgggtgctctggctaacagctgattcagatgttgctcatgtacaacaggtatgggtttgggagaggcagtcccttgcctaaatatagcac

SEQ ID NO: 40894 - DNA, 326 bp, Mus musculus
  source 1..326: mol_type = other DNA
agtggctccaggagggaccggctgcagggtgcctcccgagcccagtgtcggagcaacggccagtggagcagccccttgcccatctgtcgtttaccctaaggtatataggtcacactaagggagtgtcttctatagcacaagcctccgtcagcccagggtatgccatggggtaccctattccaggttctgcaaaatattttaacaaaatatttaaggttcattcaatttggttatagaaacagtatacagctctataaacatttatttatcttaaggaaaccaaagctttcatttgtaaattcatgagtttcatgaaattcgcaggg

SEQ ID NO: 40895 - DNA, 364 bp, Mus musculus
  source 1..364: mol_type = other DNA
aatgtcaactttgtgcagtttttaaaacttaatttgacttaattttcttttgcaaagctcacagacagctgagtactttgtgaagacaaagttgtgttctcagagggggcatttaattgatgttcagtgtgtccttttttggcaacaagtcatgttgataaacctttgtacaagtaggttccaatgtgaatgaactgggttttaaatttatttttttattagatattttctttatatacatttcaaatgcgcatttttagctgtataaataacttcttcaattgtagaggaggaaatgcttccaacttgacccgatcatgatggtgtcatgattcctaaacatgtcaggagcccagctggtgtc

SEQ ID NO: 40896 - DNA, 467 bp, Mus musculus
  source 1..467: mol_type = other DNA
gtgcgatgatgtggccatcagcctgcctccacacaccatccttgtgctcacagtcagcatgggatgatgttcccatgctgggggcctgagatgtccatccacaaccagaacagggtggcagcccagttgggtttcaccttttcaaaggtaatttataatttcttttaaaagcaccataacttaggcagaggtcttcttctggtcagtagagaaagagaaggatggaggctggcctctgcctgcccccacagagccctcgggctcgctcgcgtggccagctccagcctgcgcgcagccgcgccagagactgaacgctgcgctgcctgcgggagcactagcaggggcctgaaagcccgaggccaggctgagtcccggactgcgcggtgccagcctccttcccctctcggtgggtaggatggttgagtccagccaccacggcagcggctccttgcgcctctagcagcctg

SEQ ID NO: 40897 - DNA, 459 bp, Mus musculus
  source 1..459: mol_type = other DNA
agtgaaagctctccactggttagtgaagatgcttcaattcgtgaattcccattaacagcatttggctttttaaaattatatatattatatattttaatatgtacatttaaaataattttgaaatatatatatatgtatatgtgtgtgtatatctatataaattatcttttttttttttttttaaagtgttgtgagctagaaaccaaggccatctctctaaacacggttaagaacatttgctctagcagaggacccgaatttggtccctgtggcacataaccagaaaacaacctgtctgtccaaaccagttgggtggtttttttaacgcccggcgcttaaggcgacgaaaggatactgttatctacagaagagcaggcactcctcctccctctcccggcagcccttgcgcggggaggcgggcccgcgtccgacccgccccctcgcagactcgcgggcggg

SEQ ID NO: 40898 - DNA, 456 bp, Mus musculus
  source 1..456: mol_type = other DNA
agtaccgatctctgcagcattaacttggtgactctggaccacttttatttgcctgagcccactgactgggactaatttaatcaggaactcaaatatctattgttacttaacagacaattaatcaggccaaactactttaagttttatttgtatagtattttgtgttaaggcacagacatgtgagtgctgagaaaactgatgttggtaacttgatttaataatatcaaactgggttaaaataaaaaaaaatccccttggaaaagcacatttacaagggctgatcttagcctttatatttacaataaagaaaataaaccaaggtcccgatatagctgtaattttattcctaaaagaacagaaactttcactatgctttaaaattaaagtgattacctcagatactctgcatgttcccagaaggcttctgcagtacacagtcctacttatcatataagg

SEQ ID NO: 40899 - DNA, 257 bp, Mus musculus
  source 1..257: mol_type = other DNA
cgcatctcagataatatttaaaacgtactttatacagatctgagcgtgcgtacatgtatagggaaatactttcctacacattgaaaagaaaaaagttaaggctttgaaagattgcttcctatgcacgtgggggcacgggtggccctccggcacgcgaagacgtgcggcatcggctccacgacttagtcggctcacgcgtgtcttgcaggaagcataagtcggccaatcaggaggcgccttattacccgggagccttg

SEQ ID NO: 40900 - DNA, 450 bp, Mus musculus
  source 1..450: mol_type = other DNA
tacatgtatagggaaatactttcctacacattgaaaagaaaaaagttaaggctttgaaagattgcttcctatgcacgtgggggcacgggtggccctccggcacgcgaagacgtgcggcatcggctccacgacttagtcggctcacgcgtgtcttgcaggaagcataagtcggccaatcaggaggcgccttattacccgggagccttgcttcaccccgcctccccgctgacaagcacgggtcgcgcggagcaaagcgagcaccccgaggcgagtgcgcccggcaagccgaggcgtgccctttccaaggcggcgagcagaggccgtcactgtccccgccgggtcccgggcccccgcggcccatgctgggggcggagccagggcggagggcggcggcgcggccggccccgcgcagtgattggcgggcggccggcggtggctgaggtcctggtg

SEQ ID NO: 40901 - DNA, 326 bp, Mus musculus
  source 1..326: mol_type = other DNA
gtttttaacaaatgaaatatagaatatgtttttatttctcaaacctgagattgaaatgttccccaatcactaatcatggcaagggttataaaacatttttccgctgggcatggatcagaacagggtgatgctttcccatctcccagaaagactttccgtgggaaggtttacgctattaaaggctcagatgccattttaggcgtgtttccttctggacacacaactgaaatttttcaaaagtccctaggaggctgggacagcatgcaaagcaacttggtaagtcctgtcttggggccccaagccggaagcctccccaacccggtccc

SEQ ID NO: 40902 - DNA, 383 bp, Mus musculus
  source 1..383: mol_type = other DNA
cagcttcagtgcagtagctgaatataaaatttaaaataccttgatgtgactctaaccaagtaagtgaaagatctgtaagaacttcaagtagaaatccaagatctcagaagatggaaagatctcccattctcatggattggcaggattaatatagtaaaaatggccatcttgcagaaagcagttcttcactgagttagaaagatcacttgatctacaatatttcttaaatggtgatatttatatcataataacatgaaagtctgggaaagacattgatacctaccaatgtgtaattactagaagtttacaatccttggcaataactattataaagaaattgtgtgtttcctatggaacatttatcctgtttagataagaggtaa

SEQ ID NO: 40903 - DNA, 371 bp, Mus musculus
  source 1..371: mol_type = other DNA
ctacttagtaggtatctgtctaactacatagtctacattttcatgtatatgtgatgtgtggcaggcaaacacttctgcctcagtctctggagtagctgagttacaagtctgtgacaatgaatattccttttgatgcccatggttttcattattaaaggatattgtgattatacacgttctgctgaacaatattggatggccttccagtccccacaatagctctggaagcactgagagcattcaaagtgctcctgaaggcaatacttgtgctttgttccttgagaagtcatggagacctatcaggattctctcccttagattaggcatggagaagaaatggagcatgtaatcgtgctttcttcattgattca

SEQ ID NO: 40904 - DNA, 554 bp, Mus musculus
  source 1..554: mol_type = other DNA
aaaaaaccctagatttttgtacaacctaaagttaagtgtccatgtttggatccacagtaaggtatctgattctgtagtcaccaatatactcagggaccaacagcattacaatcttagtcatctataatgatgggttactttagacaaagtaccatatatgggaatcaaaaataaatatttttatattttaagtattttcattttgttagttacttaaacatctgtgataactgtttagtgctgtcctcagaggttgtgtcagtgaaaccaagacaggagacaggctcctggtttccctacattcatagcaagttcttgatatatatgaacatttttcatggtcaaaagtttgatatatccaccatatttttttcaatgatggcatttaaatcataaaaatatgaaagtctggggaagacgtctccctctgcctcctatcagtcaaccaaatgtgtgactaggatgagttttaaaaccttggcaataagcataatttttaaaagttgtctgagtttcctatggaacatttataagtagcacttagcattttcagt

SEQ ID NO: 40905 - DNA, 432 bp, Mus musculus
  source 1..432: mol_type = other DNA
agctcctgcaatagggaaaataagtttctattactggagtgatactgggtatatcaaccatactccagaatgggccttatgctcagggtagttggccaacccaaatcagacaacatgaagtttggtgaaaagcactgactgctcttccagaggtcctgagctcagttcctagaaacatgatgccttcttctggtgtatctgaagaaaactacaatatactcatataagtaaaataaacagattaaaaaatattgtgtgaagttctcatgatgtaaataacacttgaaatgggctttacacagctcagttcagcgtggacagctgttggctcagagtccaccactcccactatagctgctggactccataggttgagcaacacccactgaggcaggtgggctccatgaatcagggatacgcttcactgatcaa

SEQ ID NO: 40906 - DNA, 214 bp, Mus musculus
  source 1..214: mol_type = other DNA
acaaatttgttagaatcttaagaaaagactaaaatctatttgtttcaatccaaatggagtcggctccaagtgggggaccagtcaactgaggtggatcctggccagttgaaaggatgcatctctaccaccagggcttggtgcaatgtagccagttgccaatgtccccagtggcaatctatttttaggtaaaaaagagagagtagctggtaccatc

SEQ ID NO: 40907 - DNA, 498 bp, Mus musculus
  source 1..498: mol_type = other DNA
gacatgatcatctgactgaatagattatcaatacacatacaacagtaataggattcctcaacatttaagtgtattagtcaagaatctattaactcttcagctactgaattgatatctagtagaattaacgccttctttaaaagctcatgggtaaagaatgcctccatgttttttgtaagcctctctgctacaaagaaaagatgaatatgtaccattatgattctctaggtagtttagactagagaacacctattaacaaaggcttttctatataaattctgaatacattcaaagcttaactgatttggttctcagaagactctcaagtatcttttgggattttagatagctacagaaagtataggattgtattcaaaggcaattcagtcccaagttacatgtggggaaaagaaatatcttgttacacccctcaggcttgcaaatgcctgtcatcatggtgacattacaagaattgtactcatggcttaccttgttata

SEQ ID NO: 40908 - DNA, 386 bp, Mus musculus
  source 1..386: mol_type = other DNA
ccagcctggtctacaaaaaatgttttccccatgatactagggagtaacccatgagcctagtgtgtgatcaagtgctatgtaacagaagacctcttataccagtttgagatatggtttcacaaagcaatctagaaacagggtcctatgttcaggtaagatggtaccaatgcattgctttctctgagacaggaaacagcagtgagttgcttgagattttttagtagcaaatgaacttcaacatgtatccagcagctgaatgtagactttgagatggtcaagtcaaatgtctgagatcagcatgggtctctcccacgaagtagagcagaaagctgctcttggtccttgaaaatagtaattactggcagcacctggcactatataaggca

SEQ ID NO: 40909 - DNA, 255 bp, Mus musculus
  source 1..255: mol_type = other DNA
gggcatttcatgattaaataactcttgacccaaccaacacctctgcttcttggtttagtctgaatcatgtgtgattatcactccgcctcaattctaggacatttttctgaagaattgaattggatttaatgatcagtgatagatattttaaattcatctgactcagttgcacaatagtgttccactaggacaaacgtattctgcagactttaaaatttatactctgtctagaggctcccagcctacactcccagc

SEQ ID NO: 40910 - DNA, 418 bp, Mus musculus
  source 1..418: mol_type = other DNA
ccatgttttagtcttattaaaagaaacaaagctttttccctacaaacatgggtttaattcattcagcattaaaaaggtagaaatcttttctttttctttgtaataaagattagagtgcagttcatatgcatatgtataaatgaataaatgagcatgtatgaatctgtatatgaacttatgtgtgattatgcatatttgcttatcaatagaagtgacaagcaagaggtgcagtaagtgcagtttctgccctcagatacaatagcatagtaacttacataagtaaacttttaattatacaaatttctattaagacaaagtcttaccacagaatctcccaagacaaagtctcctcatctgcctgaagaagaatcagtgtagactcctacacaggagaaagtacctggcactatataaggca

SEQ ID NO: 40911 - DNA, 356 bp, Mus musculus
  source 1..356: mol_type = other DNA
aatactgagtaagataaattattttctcttacaaaatctgcctttctcagctcagagtctcatggtcatggattctaggaatagaatccaccacaaattgttcttcatgtggtaattagaacaaggtactccctgctaggtgggcatggggctctatgttcaggtacaattaccaactcattgctttctctgagagagaaagcagcacactcctctttattaaatgaactccactgttgagcagtcacagcaacttagtgtgcccaaaaatggatctatgggaaattactttccactgaggcctactttgagatgaccaagtcaaatatttgaacactgagtttggattcaaggca

SEQ ID NO: 40912 - DNA, 301 bp, Mus musculus
  source 1..301: mol_type = other DNA
ggagtactactcagatattaaaaagaatgaatttatgaaattcccaaatgatatgtactcactgataagtggatagtgtggacactttgcaccttctctagcaagagtttgctgaaaggaccctgatatagctgtctcttgtgaatgaccatgtagttgaggaaaatatgtaataaaaaaaacatttaaataaataaataaaaaagagactctgagtgtgctctccaaggtcactttgagaagagagatttataattgtaattggatttaacagaggcagcacctggcactatataaggca

SEQ ID NO: 40913 - DNA, 228 bp, Mus musculus
  source 1..228: mol_type = other DNA
tttgtgtaggaccccaaatttagggacccacaagaatcctctcttgttgtaaacaaccagttgatgtatatgatagcttagataatgtagcccctaccttttcatctttacggccaagatgttcttaggaatgccttaacaacagccctgccttggcctgcctagaaacaagtttaatgcttcaaaaaggaaattaatgtgcaaataaatacggcaccgcattgggcg

SEQ ID NO: 40914 - DNA, 285 bp, Mus musculus
  source 1..285: mol_type = other DNA
tgtaggaccccaaatttagggaccccaagaatcctctcttgttgcaagacacacgaacaaccagttgatgtatatgactttactggccagattagcttagataatgtagcccctaccttttcatctttacggccaagatgttcttaggaatgccttaacaacagccctgccttggcctgcctagaaacaagttaagagcatcaagtgtaatgcttcaaaaaggaaattaatgtgcaaataaatactaggatctgattttgggactccttggcaccgcattgggcg

SEQ ID NO: 40915 - DNA, 344 bp, Mus musculus
  source 1..344: mol_type = other DNA
aaaggatccctataaatgtataggaagctgctagagtagctgatttccatatagcttttcaaaaggcccaggtaggaatccctgatcaactccagtcaatatcatgttgatgaatataataggctgtggaagggtgtaccccatgcctcttccactggttccttacaagatagatcatagttctcatctcagatccttaataaaagaggccacataacatatttgtggtgttgggtctggatttggcaacacaggatgatcatttttgccccatcaggccggcccaggcactgggctcctgatagcaccattgtgtgctcagagcatgtcactgtggtggtgct

SEQ ID NO: 40916 - DNA, 407 bp, Mus musculus
  source 1..407: mol_type = other DNA
gaaaagctgtccagcaaggtagcattaatagatcctccagtgagtcaatgggaatttgacctattagttgacactgtagtgttaattgatcagcataatttaattaattgattcacaaagctcaatgaagacttgcctttttaaattttttctctataaatacagtacctatgaaagtcagattagatcaaactagcctctgagattattttgattactctccattcttaaaatagaagcttttgctttagtattcaaatgcacacatatgatcaatgaataatagagagtttctggggattcaacgaatattattcttatctacatttctgaaatgagcaagctgggttcagagaaagctgtcagctttcccaaagctgacaagtggtaaacaccacatgtttggt

SEQ ID NO: 40917 - DNA, 254 bp, Mus musculus
  source 1..254: mol_type = other DNA
ctaatcattttgaaatcactatgttttgagttttgagaagtcttttgtaaaaatcttccattacaagcttatacttgtggaactcaaaagggctattttgattatcctaatattttcagactgtttagtcttcttgaaaagtatcaatctaaaaaacaagtgtatgaatataaagactttgcttagtttttcagtgaaatagcttgaaactgactgggtgtcttatgagacaggtcaaattggcacctgctccc

SEQ ID NO: 40918 - DNA, 474 bp, Mus musculus
  source 1..474: mol_type = other DNA
caggtgaaagtcatatgacttctcacataatgatagacattaggattttcctatgtattagaagtactcaaaaataactaaattcaaacatttggaagtttggtttacaaagaaaaatttgatatatatacatatacatacatacatatatatatatatatatatatatatatatgtattttacttttcctgctctcatttgctaaatgaaaaaagttcctataaaatctcatataggaaccaaggcaactcttatgatatatgttctgtcactgtgacttcttcagaacaacttgaactcaattcactggtgacatgaggccattttagtttcttggtcccaaaggagaagattcacaaaatcttccttcatgagggtgactgataataccctgaatcatgcaaagggtcaaggtctggtcgaaaagacaataatcctttgcttcatgtacttattaaattaggcaatgccca

SEQ ID NO: 40919 - DNA, 426 bp, Mus musculus
  source 1..426: mol_type = other DNA
tttgagcatagatgaaggcccaaaacaggacctgtcctagaagttgtgctggaagctgttagcttctgtagtccacacacagactagtctcagagggatctgggaaccaagatggctcccctacaggccaggcagacacctttactctggcagggaagctgccggaagctattagcttctgtagtccatactctcatctgtgttctgaaagtaaaaacattgcagaatctcaaagagggtctgctcctgtgaggccatcttgctttctctataatggccccaagtaggggattcacattgttacccctcatgaggatgattgataatacctgaatcattctaatccagactttctagaatataaaaatcctttgttccttgagcttattaaattcttctcttgatattactgaacacaaagctgat

SEQ ID NO: 40920 - DNA, 454 bp, Mus musculus
  source 1..454: mol_type = other DNA
tatgtgtgtaaaatatatgcttagctaactatcgtactgaactttacatagaaatatttttaaaaataaatagtattaattaacgtgtaaatatgagttgtgttctgtaccttttgttgttgaacagtggtcatgtatgacgagatgacacttcttaagatttgtagatcagtattcattttctgaaaataaaaacattgcagaatctcaagcatgtggaatgacgcattccttaataggggcacaatgaggccatcttactttctctatagaatgttacccctcaggaggatgattgatacctgaatcatgcaaagaacagactctacagtctacctccagaacataaaaatcctttgtttcttgagcttatcaaattaggcaggttttcttctctagaagaccgcagggccccttcacctttatcagtgggagggttttgtcacagaacaca

SEQ ID NO: 40921 - DNA, 564 bp, Mus musculus
  source 1..564: mol_type = other DNA
tgtcatagagacttcatgactcatgttgcaaaagaaaagcaaaattactgttggttttctgtataagtattttatgcatatagccatataatgatagacactaggattttcctaggtattagaagagttcaaaaacaactaaattcaaacaattggaagaagactttggtttttttaaaatagactcagagaccatgaataatttaaggaaggagaaaaaaaattgatgtagttttttttatttttttatttttcctgatctccttttccaaaagaaaaaaggtcctataagatctcatataggtatgatatatgttctgtcactgtgacttcttcagaacatctgtcttgaattcaattcactggtgacataaggccattttagtttcgtggccccataggaaaagattcacaaaatcttccttcctgagtgtgatttccctaaatcatgcaaagaactgacaagccaataatcctttgattaatctatttattaaattaggcaatgaacagctcttttctttcccatcaatgagtgccttctctcagtggggatgcatgcag

SEQ ID NO: 40922 - DNA, 433 bp, Mus musculus
  source 1..433: mol_type = other DNA
gtttaatatgtatgtaaaatagtattctcactgcttagctaattcactttgagaactctatataaaatcattttaacaaatgaatattattaattaacatataaatatgggtttttggtgtgtatgtactgtgcgaaatgggataaaacacatagagaacagtggtcatgtatgacatgatgacacttcttaagcatttcttatacatcagtactcattttctgaaagtaaaaacattgtagaatctcagacatgtacacatggatttaaacaggaggattatggataatacctgaatcatggactttcaaaacataaaaatcctttgttccatgagctttataaattacaaagtgcctagctctccccttcatcattattaatgggagatcttaatgataacagactctcccagttcccatcaaatataggc

SEQ ID NO: 40923 - DNA, 371 bp, Mus musculus
  source 1..371: mol_type = other DNA
caagcttgtgaagttttatatgtgtgtaaaatagtattcttgctgcttagctatcatactgaactttacatagaaatattttaacaaatgaatagtattaattaacatgtaaatatgagttgcacttgtgataggacagaacagtggtcatgtatgacgagatgacacttcttaagtagatcagtactcattttctgaaaataaaaacactgcagaatcaatgtagaaggggcacaatgaggccatcttacacaatgttacccctcaggaggatgatggataatacctgaatcaccaagtccagaacataaaaatcttttgtttcttgagcttatcaaatttttcttctctgacaaataagccccttcatc

SEQ ID NO: 40924 - DNA, 386 bp, Mus musculus
  source 1..386: mol_type = other DNA
tatgtaaaatactattctcactgcttagctaactattgtacaaaactgtatataaaaatattttgacaaatgaataataataattaacacataaatatgagctggcacttgtgtatgatgtgatcacttcttaagacgtcttgtagatcagtactcattttctgaaagtaaaaacattgcagaatctcagacatgacttgagggtcccaagtatggagactctaataaaataaggtcatcttactttctctataatggcccctcatgaggaggattggtcaaggtctgatccagacttcctgagatcataaaaatgctttgttccatgagcttattaaattaggcagtgccccttcatcattatcagtgggaggggaacttgaggg

SEQ ID NO: 40925 - DNA, 409 bp, Mus musculus
  source 1..409: mol_type = other DNA
ttaatatgcatgtaaaatagtattctcgctgcttagctaattctttttgagacctctatataaaatcattttaacaaatgaatagtattaacacataaatatgatgtgctatgtacagagaatgaaaacatcaggaagttctgtaccttttgttgtgtatgtagtgtgacaaatgggatgaaacacatagagaaattacatctcttgtagatcagtactcattttctgaaagtaaaaacattgcagaatctcagacatgtggaacacagcttgacataaaaatcctttgttccatgagctttataaattacaaagtgcctagctctttactgaccactgagcggtaaaccccttcataattaataatggtcttgatgataacagactctcccagttcccatcaaagact

SEQ ID NO: 40926 - DNA, 532 bp, Mus musculus
  source 1..532: mol_type = other DNA
atttgtcatagagacttcatgacacatgatctactaatcatgtcacaagtaggcgttgcaaaagaaaagcaaaattactgctgcttttactgtataagtattttatgcatatagccatataatgatagacactaggattttcctaggtattagaagagttcaaaaacaactaaaatcatggtttttaaaaataattaccatgaataatttaaggaaggagaaaaaaattgatgtagttttttatttttttttatttttcctgatctcctttcccaaaagaaaaaagttcctataaggtctcatataggaatatgatatatgttctgtcactgtgacttcttcagaacatctgtcttgaattcaattcactggtgacataaggccattttagtttcgtggccccataggaaaagattcacaaaatcgtccttcctgagggtgatttccctaaatcatgcaaagaaggtaagccaataatcatttgattaatctatttattaaattaggcaatgaacatctctttttccgggac

SEQ ID NO: 40927 - DNA, 390 bp, Mus musculus
  source 1..390: mol_type = other DNA
aatatgtatgtaaaacagtattcttcttagctaattctttttgagtcctctatataaaaatcattttaacatatgaatagtattaattaacatataaatatgaacagcatcaaggacatgatgacattcttaagattggctatgtcatttcttatagatcagtattcattttctgaaagtaaaaacattgcagaatctcagacatgttaaactcaattcaataggggcaaaatgagggcatctttctttctctataatggccccagggagttacaatcaaaacataaaaatcctttgttcagtgagctttttaaattacaaaccccttcatcattattaatgggacaaagagatcttgatgataacagactctcccagttcccatcaaag

SEQ ID NO: 40928 - DNA, 385 bp, Mus musculus
  source 1..385: mol_type = other DNA
taatatgcatgtaaaatagtattctcactgcttagctaattctttttgagacctctatataaaatcattttaacaaatgaatagtattaattaacacataaatatgatgtgctacatatatgaaaacatcaggaattctgtaccttttgttgcattacatctcttgtagatcagtactcattttctgaaagtaaaaaaattgcagaatctcagacatatgaggccatcttactttctctataatggccccaagtagggagttacaaaacataaaaatcctttgttccatgagctttataaattacaaactttacttccctgaccactgagaggtaaataccccttcataattaataatggcccagcaaagagtaccttctctaag

SEQ ID NO: 40929 - DNA, 617 bp, Mus musculus
  source 1..617: mol_type = other DNA
ggatatttgtcatagagacttcatgactcatgtgttgcaaaagaaaagcaaaattactgttgcttttaagtctgtataagtattttatgcatatagccatataatgatagacactaggattttcctaggtattagaagagttcaaaaacaactaaattcaaacaattggaagaggacattggttttttaaaatagacttagcaattaccatgaataatttaaggaaggagaaaaaaattgatgtagttttttaatttttttatttttcctgatctccttttccaaaagaaaaaattcctataagatctcatataggaatatgatatatgttctgtcactgtgacttcttcagaacatctgtcttgaattcaattcactggtgacataaggccattttagtttcgtggccccataggaaaagattcacaaaatcttccttcctgagggtgatttccctaaatcatgcaaagaactgaccaataatcctttgattcatctatttattaaattaggcaatgaacagctcttttctttcctgacacttgagggttacagaccctccagttcccatcaatgagtgccttctcagtggggatgcctctctgccgtataaatgc

SEQ ID NO: 40930 - DNA, 324 bp, Mus musculus
  source 1..324: mol_type = other DNA
gtgtaaaatagtattcttgctgcttagctaactatcatactgaactttacatagaaatattttaacaaatgaatagtattaattaacatgtaaatatgagttgcacttgtgataggacaacgaacagtggtcatgtatgacgagatgacacttcttagatcagtactcattttctgaaaataaaaacactgcagaatcaatgtagaaggggcacaatgaggccatcttaaatgttacccctcaggaggatgatccatgtccagaacataaaaatcttttgtttcttgagcttatcaaattttcttctctgacaaataaaaatgc

SEQ ID NO: 40931 - DNA, 378 bp, Mus musculus
  source 1..378: mol_type = other DNA
tatgtaaaatactattctcactgcttagctaactattgtacaaaactgtatataaaaatattttgacaaatgaataataataattaacacataaatataagctggcacttgtggtatgatgtgatcacttcttaagacgtcttgtagatcagtactcattttctgaaagtaaaaacattgcagaatctcagacatgacttgagggtcccaagtatggagactctaataaaataaggtcatcttactttctctataatggcccctcatgaggaggattggtcaaggtctgatccagacttcctgagatcataaaaatgctttgttccatgagcttattaaattaggcagtgcccttcatcattatcagtggggacatat

SEQ ID NO: 40932 - DNA, 363 bp, Mus musculus
  source 1..363: mol_type = other DNA
ttaatatgcatgtaaaatagtattctcgctgcttagctaattctttttgagacctctatataaaatcattttaacaaatgaatagtattaattaacacataaatatgatgtgctatgtatcagagaatgaaaacatcaggaagttctgtaccttttgttgtattacatctcttgtagatcagtactcattttctgaaagtaaaaacattgcagaatctcagacccataaaaatcctttgttccatgagctttataaattacaaagtgcctagctctttactgaccactgagcggtaaaaggccccttcataattaataatgggtcttgatgataacagactctcccagttcccatcaaagact

SEQ ID NO: 40933 - DNA, 331 bp, Mus musculus
  source 1..331: mol_type = other DNA
tattttgagcatagatgaaggcccaaaacaggacctgtcctagaagttgtgctagctgttagcttctgtagtccacactctgacctgcgggaaccaagatggctcccctaggtgctcgccctcccaggccaggcagacacctctagtctggcagggaagctttctgaaagtaaaaacattgcagaatctgaatcactgtgccacaatgaggccatcttggcctcaggggtcacattgtgaccactcatgaggatgattgataatacctgaatcatagaatataaaaatcctttgttccttgagcttattaaattattcttctcttacaaat

SEQ ID NO: 40934 - DNA, 593 bp, Mus musculus
  source 1..593: mol_type = other DNA
gaatcaatgatatttgtcatagagacttcatgacagtgagcagcatgatctagtatcatgttgcaaaagaaaagcaaagttactgttgcttttaatctgtataagtattttatgcatatagccatataatgatagacactaggattttcctaggtattagaagagttcaaaaacaactaaattcaaacaattggaagaggactttggttttttaaaatagaataatttaaggaaggagaaaaaaattgatgtagtttttaaatttttttatttttcctgatctccttttccaaaagaaaaaagttcctataagatctcatataggatgatatatgttctgtcactgtgacttcttcagaaactctgtcttgaattcaattcactggtgacataaggccatatcccataggaaaagattcacaaaatcttccttcctgagggtgatttccctaaatcatgcaaagaactgactgtccagttcacctggtcaaggaagccaataatcctttgattaatctatttattaaattaggcaatgaacagctcttttcttctcccatcaatgagtgccttctctcagtggagatgcttct

SEQ ID NO: 40935 - DNA, 384 bp, Mus musculus
  source 1..384: mol_type = other DNA
tatgtgtgtaaaatatatgcttagctaactatcgtactgaactttacatagaaatatttttaaaaatgaatagtattaattaacgtgtaaatatgagttggcacttgtggatgtggtcacacttcttaagattgggtactaccttatgtagatcagtactcattttctgaaaataaaaacattgcagaatctcaagcatgtggaatgacacattccttaaggatcctaagtattgagatgaccagaggcaaaatgaggccatcttactttctctataatgttacccctcaggaggatgattgatacctgaatcatgcaaatccagaacataaaaatcctttgtttcttgagcttatcaggttttgtcacagaacctataaatgc

SEQ ID NO: 40936 - DNA, 354 bp, Mus musculus
  source 1..354: mol_type = other DNA
gagaggcaagtctctatgtcaactgctctctgaggggattcaagtttcctgaagcagcaccagttaagatccttcataatattctaggaaatctgctcatagatttacactgaaaattcaatgcaaaataagatatttggctttcatccttgaactcagttcagcattaagaatctcctgtttgaatcgctgggcttcttacaggctctctctcttagaatcccaacctgagagtttccattttccaggctgaaaataaaatccagtggactctactcacagcgaatagcatgaaggtgtcattagaacctcactgtggtttgcatgaggttatgcaaccagtgttcctataaa

SEQ ID NO: 40937 - DNA, 388 bp, Mus musculus
  source 1..388: mol_type = other DNA
agccattacatctcctgcatgtgatacaattaattacattaaattaattaattacaattaaatgccagtatgataaaagatcaaaattagcaccaaaagtattttatatatactgattgaagtggttattttaatgtgaaaaatcagtctacttactgagacagtgtgcacggcaaaagcttctgagactttatccaacggccccatgggagtgtacttctgaggatactcaatagaaaaaactaggcagctaattgcttggagtgtgatgcctccctccataggctttctgagtccttatagacagagattctagctggagtctttctaatctctcacaaatggtcactgggccagctggaccatcaatctagattataagcttatg

SEQ ID NO: 40938 - DNA, 280 bp, Mus musculus
  source 1..280: mol_type = other DNA
aaatgtggtacatttacacaatggagtactactcagctattaaaaacaatgaatttatgaaattcttgggtatctggaggatatcatcctgagtgaggtaacccaatcacaaaagaagtcacttgatatgcactcactaataagtggataagtgtggatacttcattcctccatagaattcgctgaatggaccctgatatagctatctctagtgaggctatgccagtgcctggcaaatattgaaatgcaaatgagcttcaccctcagctgcaggcaaccc

SEQ ID NO: 40939 - DNA, 273 bp, Mus musculus
  source 1..273: mol_type = other DNA
atccttgggcatatgggagcctaacaactctcagagaaacccaaggggaatttccctttctctgaggacaagagaagtaaagtgcattaatcaattaactaaataataaattaattaaacagacgtcaaaactcaatcagcttagcttctgttcagagggtttgcagctgagctacccgcccagaatgatactagcagatgctacactgtcaaagaacattcagattgtctaccctgaaattaatgagcttccccctcaggggcaggcaaccc

SEQ ID NO: 40940 - DNA, 189 bp, Mus musculus
  source 1..189: mol_type = other DNA
ctcagctatgcttgtccacaggagcctagcataactaagtggctttgctcatcaactgaatgtaaagttaattaattaattaattaaaaaaaaggcatccctctatcaccttaccttctcttagttgtcagagaacattcagactctctaagcttgttaatgagcttcactcacagtggcaggcaaccc

SEQ ID NO: 40941 - DNA, 254 bp, Mus musculus
  source 1..254: mol_type = other DNA
gtgatactgggtttatgctcagggtagttggccaacccaaatcagacaacatgaagtgtggtcaagagaactgactgctctttcagagtttctgagttcagttcccagcaaccacatagtggcagacaactatagtatactcatataattaaaataaacaaatctttaaaaaatatactgtgtgaaattctcaaaaaaagcgtggatgtgtacttcttgggaactttccagatgagtgacacccactgaggcgg

SEQ ID NO: 40942 - DNA, 407 bp, Mus musculus
  source 1..407: mol_type = other DNA
cttaatatcatgtcagagagcaagtgtattttctcagtgtctattaattcttacatggtgagtttatggtactgattgactgattttgataagaaagtaaattttgggtgctctgaactcactatcccccaaaggatatatacctctgtgaaatagcaggtttgttcattttctgtatagcaaaaggttcactatgttgacaaaaaagatctggtgttgaaatatttaaaatccatgaactcaaaaaaaagataaaactttagacttgtgggccacgtctgacctttgatgaaaaactaagtaaagttgtccaatatcaaagaatttcagtctagggcctcattttgatctccaatctgtgactcagaattaaaaatgaatgactgctgggatgagcccaggagacg

SEQ ID NO: 40943 - DNA, 429 bp, Mus musculus
  source 1..429: mol_type = other DNA
gtctagggcctcattttgatctccaatctgtgactcagaattaaaaatgaatgactgctgggatgagcccaggagacgcatcaccaggattctgatgtgactctgccatctgagggctccagggccctcccagttgttatgtttttattgaatttataagtatctatataaacacatagtcgtttctattgtccttgatatataatacatatataaagactcaatctcaactattttatttttaaagagcatttggttagagaacaacttacaggaaagattctgtagtggtcacttgataaaaacttgaagataatttttcctctactcttctagcctagcgatgaggagaggttgtctagagaaggcatctccttacctaagtctgtagtccaaagattctaaaatcaaaattctaaatcagttata

SEQ ID NO: 40944 - DNA, 428 bp, Mus musculus
  source 1..428: mol_type = other DNA
tcaaccaactggtttacgaagcagcaggtgagctcaggccccccgcttacacgccttcctgcaggttgccaggcggggcgcacacgggcccatcccacttgggccacgccgctgcggtggcggtggtggggcgtggcttgtgatggacagccggctctctcgcccctccggaagcccccttgagggcgcccagccctgcccccaccgcggcgctgccagccggttgggacccaatgggaggtccgggcgggcggcgagtccccagcggccgcagtagcggggcgcggggtggaggtcctcgctgcaccctatctgcagcgcaccgcggacctcgctgtccgtagtccgcagcgccggggctgggagatctgagccctgtgttccccaggaaccacggatgcgctccccccaaccaggtgacctttggg

SEQ ID NO: 40945 - DNA, 434 bp, Mus musculus
  source 1..434: mol_type = other DNA
gctatcttgctgtgtgagtaccaccccgaaagttatatattcccacaggtaacctattgcagttgcaggcagcacctggggtttggtggctcagcaattagtagcactgactgctctatctgtaatgagatctgatgccctcttctggtgtgtctgaagacagcaaagtgtgctcatttatgtaaaattagtaattctttaagaaaaaaaaaaaagaccttgcatgagaaacatgcttcctcctgggagtatgttacagctgtacactgcttagcatgctggggaccttaggattcatagaatggaaagtttgcccgattgtcccacctctgacttatttattatagagcggaggagcgggaagacccggggtacctggaaatgagccctggggttctcctctgctctctctcccccgggcgagggtggccctg

SEQ ID NO: 40946 - DNA, 430 bp, Mus musculus
  source 1..430: mol_type = other DNA
ctcttggcacccttgatctagaggggatccatccccgagcccaaaggtcacctggttggggggagcgcatccgtggttcctggggaacacagggctcagatctcccagccccggcgctgcggactacggacagcgaggtccgcggtgcgctgcagatagggtgcagcgaggacctccaccccgcgccccgctactgcggccgctggggactcgccgcccgcccggacctcccattgggtcccaaccggctggcagcgccgcggtgggggcagggctgggcgccctcaagggggcttccggaggggcgagagagccggctgtccatcacaagccacgccccaccaccgccaccgcagcggcgtggcccaagtgggatgggcccgtgtgcgccccgcctggcaacctgcaggaaggcgtgtaagcggggggc

SEQ ID NO: 40947 - DNA, 197 bp, Mus musculus
  source 1..197: mol_type = other DNA
ctgaggaacaggcgcagggattacagacattggtacaactagaatcttaataactttctgctatttccgggaagaaatacacatttcagaatgagataaagtcatacagtaaatgctagcagtgtccggagcaataactcaaatctttaaaacagctctttggggctcagctactcagagaacagcgccaggggcac

SEQ ID NO: 40948 - DNA, 297 bp, Mus musculus
  source 1..297: mol_type = other DNA
tatctttttataacacacaataggtttaacttcacagaattatatcctgaatgtttgcatttcacaaatgcatatataaatgcacagacttaggccagcctgggccagcctggtctacagagtaaaaaaaaaaaaaaggttttgtttgcaagctgtggcatgaagacatgtcctgacttgtcaagcctggtcctgctatatcctgagccaagtctctggattctgggacggccccgcccctcgcctgggccccgcccctccgcgttcaatccacgccggcgccgaggcgcgctcagc

SEQ ID NO: 40949 - DNA, 335 bp, Mus musculus
  source 1..335: mol_type = other DNA
tgcctgagaggctctgccagagcatatgtagcagatgatggcctgacatcaataggaggggaggcccctggtcctgcggataatttccaatgtaaatgaataaaatgattaatacaaaaaagaaaattattttttatgtgtatgggtataggctagccctgagtgtattacataatatgctggttacagatatattaaacggaagaaataaaaaaaaagtccttatttacagcttttaacaagcatgtcaacaagtttatgtgcacgcgagtggcagccgccagggggcgccgcctgtccgtgtcggggcgccccacccccgccggccaccaggg

SEQ ID NO: 40950 - DNA, 321 bp, Mus musculus
  source 1..321: mol_type = other DNA
agctcccacatatgagagaacatgtaggattttttcaaggaatatgacttcaattaatatttacacattctaagtctttatttttctttagagctgaataatattccattttagttgtaatttaagtgcacacagtagcccatgggatacgagtgtctcatcccccgggcatatgctcaattatagttctataggaccgtaaacagactaagcttactcctgaggttacgccctgtagcctgagctcacctcatattcatactcatgtgatcttgaagaggaaaaaccagagaaaccttatgtagattgtagctcagattc

SEQ ID NO: 40951 - DNA, 347 bp, Mus musculus
  source 1..347: mol_type = other DNA
cttgctaagcaagagctccgctgctgctctgtaacagtccaggctccaggtgtgaaatcctgtttccccagttcctgagattacaggcacatgccccaatccagtctcatgggtctgacttacacgcaatagcctccggttctttcagaaagaaaatacttgtagaatagacttttttaaatgtttatttttaaaatgtttaattaaccaagttttgctagaggaagagaaaggaaaatgcgctttatctgaagtatattcctttcaaatagcagggcctctggacccagtgggagcggggcggacctcttgcgcttgacccccgccctctgagagcccgcctcggg

SEQ ID NO: 40952 - DNA, 329 bp, Mus musculus
  source 1..329: mol_type = other DNA
tcttccagattgcagactgactggatttaggcaatccctctactgattctaggctgagtcaagttgataagtatcaaaggttctttacgagcttctaattaaagcctcaggaatatatcgctgggaactataaaacctgcagcggcagcttatgcaggggaggtaggaagatcaggaagttcctgaccaccctcagccaagctgcccataagggaacttatagttcaccactacggctggaacgctgggagacctcaaggtgagtcctcccggaggctgccagctcggcagtcagcgaggagagcagccggtagggcgggacttcgaga

SEQ ID NO: 40953 - DNA, 407 bp, Mus musculus
  source 1..407: mol_type = other DNA
cagactgactggatttaggcaatccctctactgattctaggctgagtcaagttgataagtatcaaaggttctttacgagcttctaattaaagcctcaggaatatatcgctgggaactataaaacctgcagcggcagcttatgcaggggaggtaggaagatcaggaagttcctgaccaccctcagccaagctgcccataagggaacttatagttcaccactacggctggaacgctgggagacctcaaggtgagtcctcccggaggctgccagctcggcagtcagcgaggagagcagccggtagggcgggacttcgagagggcgggccctcaggagggcgtggcctccggagggagggctcaggagggagggcccgagggccggacccacagggcgaccttaaaaattg

SEQ ID NO: 40954 - DNA, 653 bp, Mus musculus
  source 1..653: mol_type = other DNA
cttagcccccttctcaggggtatctgtcagtggcttgggggatatgcaggacctgcaaaaaccagaccggtctgcgcggatttaaactatttaggagcctgctgtatcccgggtgctcagcgcaggtgaggctgcctttcgctaaggagggacccgtctggagctgcagctggagctgcagctgggctgcagaaggccgcctgcctgccaccaccatctcgggcccagcccgggacaaccggggtgccaactactgccgcagctgcggagcgcttcacccggcctgacccggattctgctctgctccgcgcagcgcgcgcacactggccaccgcgcccgcccgcccgaacctccgcgtctcccgggaccccgcagcgagcccggtgcgcgcgcccggagccgcggcacgtgtgcggcagggcggggactgtcagccgcgttccccagccgggccggtcgcccactcgcaccgccgcgcctggctgtgtccggctcgccctctgccgcccgcgcgctccgctggcggccgcgggcccccgggcaatttttaaggtcgccctgtgggtccggccctcgggccctccctcctgagccctccctccggaggccacgccctcctgagggcccgccctctcgaagtcccgccctaccgg

SEQ ID NO: 40955 - DNA, 317 bp, Mus musculus
  source 1..317: mol_type = other DNA
aatgagaattttgagagactgtggctcagatacacagttgattaacccaagttcccacattcaaacatggaagtagtttcattaaatttttatagttttacagaacaaggtaaattataaatcacttttctaatgctagaaccagcccaaaataagataattaaattaatttctagaccgcaagtccatctttaatttgcactatcgcttgactcaaattatcttgcttatttcaggagcaactgtcacagagcaaccgctccgtcactcacggaagggcaggagattggtctccgtttcctaccggaatccaaaag

SEQ ID NO: 40956 - DNA, 541 bp, Mus musculus
  source 1..541: mol_type = other DNA
acttgtgaaaagttacagtctaattatttgctccacgtggacaatgtttcttttaaaaacatccacagccgggagatgaggagaccaggcttcgtcccgggagcacgcgcagacaccccgagaccgccccaccgcggaggagcctcggcgccctccggcctgagcccgccgcttcccgcccgcgccgacccgggccgcggcgcgcggagagacgcaccgccgcgctgcaccgcgctgcgctcggctcccgccacacgcggcacgcggtgccgccgcggcgtcgggctccgatcccgcacagagggtggcttctcgttccctccggaaaccgcgggccggcaggaagtgacgaaggcgaggtcgtccggtccgctgggtctcggcccgcgctccccgcccgactcccggaacagcccgagcggagcggagcggctcggcgcggcggcctccgcacctcagcagccgccgagcgcccgcccgcccgctctcccgctcgctcgcccgcccgcgcgcggctgcgtcaccgccccgcccccgtccc

SEQ ID NO: 40957 - DNA, 496 bp, Mus musculus
  source 1..496: mol_type = other DNA
gaaaactgacatcttccctcagctgtccggtgatgtaatgtttaaactattattgcattaggagctgatttaagctgcaggttaaacacgcatattaagagcatgacatctatcctaagttttaaagcaccccatcctagaggacggagcatagctgaggcctgtggactgcgcagtacacggtggctctgagatcccaaggccacagggacccggggaacgggaggcgcagaggtggcacacagatctgacaggacagtcctcccgcgacgggacgccgcacgctcccgccggcgtctctgcgggctccggggaccctaggcacgctgcagccgccccgctcactccgcccgcagagacacccaggtcgggatctgacccgcagcagctcgcagcccgcggctgggcccggactggacgggacggggcggggccgggacgggggcggggcggtgacgcagccgcgcgcgggcgggcgagcgagcgggagagcggg

SEQ ID NO: 40958 - DNA, 402 bp, Mus musculus
  source 1..402: mol_type = other DNA
aagtctaataaatccccgtggcgtttttaaataagtgtccactcagggcaaagtttgccatcagaactgaaatgcctaaagtaaaccagtctgaatcatccaggttagacgctgcagactgcgaaaaatagaggatcacagatgtgctgcgaagagcacatcacaccactgccacctggttgccaaagttctgatatgaatgtgcttgaacatcaagtgcttgcctgttctggagaagaccggggaagactgtattactctttctctgttggtacttgcagaaccgacttaaagtaagttagtactattcaactgagttcagtaattagagtactcctgatgccgtgcattgttcggcagggcacgccccttggcggggatcccattaaagaggacaccagt

SEQ ID NO: 40959 - DNA, 374 bp, Mus musculus
  source 1..374: mol_type = other DNA
gtgcttggtgcccaagaaaaccaaaactgtcagaccacttggaactggagtttcagttgtgagtcacctcaaaccctagtccttcagaagaccttgtttttatgacaagaccagtctggccttgaactcacagagcatgtttacactaccaccaagctcagtttaactgattctcttccaatcttttttactggaagttaagatgttgatttttttttttttttttttttttaaagataatttattaatatgtaagtacactgtagcagacactccagaagaggaaatcagatcttgttcgggtgctctacctcagcaagtagattaactttgtaattggatgataggcctgtgtcactaggcctaataggcta

SEQ ID NO: 40960 - DNA, 463 bp, Mus musculus
  source 1..463: mol_type = other DNA
ctaattctctaactttaaactcaaactaaatggtttaaaaattatataaatgattgtgtgtataatatacgtaaacgcacatacactgacttgtgaaaagttacagtctaattatttgctccacgtggacaatgtttcttttaaaaacatccacagccgggagatgaggagaccaggcttcgtcccgggagcacgcgcagacaccccgagaccgccccaccgcggaggagcctcggcgccctccggcctgagcccgccgcttcccgcccgcgccgacccgggccgcggcgcgcggagagacgcaccgccgcgctgcaccgcgctgcgctcggctcccgccacacgcggcacgcggtgccgccgcggcgtcgggctccgatcccgcacagagggtggcttctcgttccctccggaaaccgcgggccggcaggaagtgacgaaggcgaggtcgtccggtccgctg

SEQ ID NO: 40961 - DNA, 430 bp, Mus musculus
  source 1..430: mol_type = other DNA
gacaaattaggttcacaaccaagaatatcacacctgaagttagctaaggtcctttcaaataatccaagccaactgagaagactcacattttaaaattacagagagggtggcagggtctgggagcgacactctggctggcagctcgcgtccgcagagcccgccctgggtctctgctggcgccctgcccgcccgcgccccttcaggggacctcgcgagagccgcgcggtcctcaaaggcctttcgcgccagcagggcccccactgcgcccgcgcactcgcccgcgcacgcgcagccggacagttggcctaggcgcccgccgcggggccccttgcacgtctggtctgaggcgcggcgccgcgccgcgcgcactcgcgctgggggacgacgggcgcgcaggcgcacaggcgcggcgggggagcgaggtcgcgca

SEQ ID NO: 40962 - DNA, 421 bp, Mus musculus
  source 1..421: mol_type = other DNA
ggtttctctgtgtagccctggctatcctggaactcactctgtagaccaggctggcctcgaaccactgcctggcagttaaaaaatctttaaaccttattacacactggaactgcaggtggcaatttaagctcttatgtatcagtttaaaaattaagacacttgaaaatgaaatcacactatttttctaataaaacaactgacttcaaagagttcaatttttattgtaagaagagtgatttcctaatgtcattcatctgaacagaaaccctaaccctaactttagagtccagatgtcagggctaaaggttacccttctccactttaaacagggtcggaaatgcaggtgattatcagagctgcctttgagagggattcccgcctggaggaaagcctcttttgaactattgatcaaagatttgaa

SEQ ID NO: 40963 - DNA, 269 bp, Mus musculus
  source 1..269: mol_type = other DNA
gagcaaattagcagtttggctgctgattttaaatactgcaatcaagtaaacatcaattctagacctctaggttaggtaatatgccagactcagccaccaagtttctggaaggtgaggggctctatgacttcattacatcacttcacacggtctgcatttctgtattgtaaaaacaaagtttgagcatgcattctgggtaacactgactcttagatctctaggtgagaggcagagctttgctctggagtctcgggatctaggagacacgc

SEQ ID NO: 40964 - DNA, 375 bp, Mus musculus
  source 1..375: mol_type = other DNA
atccagtagcgaaagcagtgccctaacaatgcattgctggacctggtgtatgagtctgaggccagcctgctcttcatagttctaggacaacctgggctatggatgacaagcccgtcattgacttcagattcacccacactagtgtgtatcttaataacaatttatgcccaaacgaattgttgcagttaatatggacataaattttcattcgggatcacatatagaatatgagtgttccatgtctttagccgacggttggcagagcagctcttggattctgacagcagaacccgcgtgtcagaccaggagagcagatttgatctctcaggctaactcaccaggaggtagccccgccccgtagcctggcgcgtgacg

SEQ ID NO: 40965 - DNA, 235 bp, Mus musculus
  source 1..235: mol_type = other DNA
aaagatctttggcttcaatccagagagagattagatcgctgtctttccccaatgtagtcacacagcctgacctaataactagtaagcatcaggatggttgattattcttaatactgaacctcggcagattcgtgaagaagagctccaagccgccaggtcctgcgccgccaggtccagcaccttggctggctgtggctgcgtctccgagagccagtggctcgcgcgtcccccgtga

SEQ ID NO: 40966 - DNA, 246 bp, Mus musculus
  source 1..246: mol_type = other DNA
tagcaaaactcagggcacctgtgattactgagactggtgccccgagactgccgagcagaatagttttctcaattctctgagagatctctgctgagatgccgcagagaagcacctcgggagcgcaccaaaagtcatgtgcgtttgcccggccaattaatccccaactgggcggggctgtttagaactataaactcatgggtcaagacaggagcttgggttttaaaacaggatgagtcttaagtcccc

SEQ ID NO: 40967 - DNA, 288 bp, Mus musculus
  source 1..288: mol_type = other DNA
actcctcaccttccatctgatttgaggtagttaatctaactgaagataaaatttccatcacactttcagtcacagtaacctgtgatctctttaaatttaaggtggtttcaaatcattatcggaactgagagtctggaaggagaagtcagtcttatctgtcgacctgcgccacaggcccggcaagctgatgcattaaattagaagcatcccgggaatcatttgtcttcatcctccaatcggggcttggagtctcagattggcgggcggagccttcgtgcaaggagcact

SEQ ID NO: 40968 - DNA, 418 bp, Mus musculus
  source 1..418: mol_type = other DNA
acctctagaaaccgagctcggtgggtggtgtttcttataaaaagccctaggtgggcatcttgttggctgacaaggagtgtcccgcccagccacggagctcccgaagcccctgcaaggcagccgcgggtgcacgcccccgggcgctaacaagggcctgggaacccgggcggacgccgcgcgccgggagctccgagcttcctagctccgaggtttcggcgtcgcgccgaagccgccccacccaagcgcccgcccgcccgcccgcccgcccgcccgcccgctcccgcgtgagaaaggaggaggggacgcccccagctgttggcctccagcccggccaactcccgcttcctccggcccttcccggcgacgagccggctcttccagctaccggccgcccgcgcaggctgctccccaggcagcc

SEQ ID NO: 40969 - DNA, 611 bp, Mus musculus
  source 1..611: mol_type = other DNA
agaggggtgggaacagtacctagtactactccttctgctcctcaccagagctgcttcaaacctgcacaggctcgtcaaacaccagtgttcaagactgtccttaggcctgtcacatgactgagtggtgaaatgagcttagtagctgcgtgacccccagctggtaaggttctttacagcagcccaacaccggtccagaccacagtacctacggaggggtattctaagtatatttggtaaaggtttgaccggggcagatcaagctctcctccaggagccccggcccttcccggagggcggcccgggccaggctcggcgctagcggagtccgtgccgcagcggtgccccggtcccacgctccgcagctcggccaggcgaccgccgccgtcaggcacgccggtccgcagggtcgccgggcccgggcggaacggccccgctttgttcccgtcgcccccaaggcgccccgcgatccccaccccgggaccccgctgcagcggggacccagcgccggctcgcagcgccccgcgcccagcctggtggggcggccgcaccgagctgcccccgctcctcccgcgagcccgcgagtccgccctccgcggcccgcgccgcagtac

SEQ ID NO: 40970 - DNA, 365 bp, Mus musculus
  source 1..365: mol_type = other DNA
cagagagtgtggctagccagcttcctctgggcatggtgtgcttggcccacaccatgattctcttagctcagcattgtccattcagctcacaggtgactgaggacagagcgagatgattgtgcaagcgcctgcatcatgttgcttggtctctgacccttctgacccaggtctacagccagaagtggcatttcaaccaaaagggaggcagtagtaacattaacacgcctgcctgttccctggggctctggcacagcctctggatgtgatggaagagttggaaatctacaaattagactctgctgagctcacgctggcctgctgcgggctccctggcggccgagacagggcgagaacgagagcgcctc

SEQ ID NO: 40971 - DNA, 266 bp, Mus musculus
  source 1..266: mol_type = other DNA
agcaccagatggttgccctgccaggggatctggcccagcctccgtcacccaggagccccttagcaaatggcaacaccccactggctggaactgctggccagcggtagtgcatgccattaatcccatcgaggccagcctggtctatagggacagccagggctacacagagaaactctgtcagtgacttggagcccagtttattaaaattgtgctctgagggccacatgcaggcgccgccctgcaccctggtgcccgataaggccttt

SEQ ID NO: 40972 - DNA, 286 bp, Mus musculus
  source 1..286: mol_type = other DNA
tagctaaaactagagaccctaactaatgtgttaggtgagtagtgcttgcccttgtaactcccagtggctgctcccaccaaccctgtgggagccacacacgcccccatagttgctcagagggtaacggcctgatccagactgtgaagtccccagcccctctgaacacatgtgttatgtacaaattatgttgttttttaaacaaattcgggtccagacctggcccacgttcttgggacaccttgttttatggagtccctgaatgagagaagctctagcagctggctca

SEQ ID NO: 40973 - DNA, 551 bp, Mus musculus
  source 1..551: mol_type = other DNA
ggtctctctcagtaacagagcatgtaacatagttcattttttttcataacaattaaaaaaatcaaggtcatttcaaaacttctaaaagtgcagactgcagcattctctaggcacgggagcgcgcagccatgccgccgagggcgggggggcggcgtgccaagcagtcgggccgcgcagggcgctaagagccgctactgggcggagggtgcggggcgaggcggggcgaccccgcgcccgtgctcgcccgccctcccggggccgccgcccctatcccccaacccgcgcactggcccggggctagagcgcgcgcgggctggagtccccgggagggcctccagggcgtggggggcgaggaaggtgaccgccgtccaccagtggctctgggagagcgagaagagcctgccagtctctctcctggccctagggggcgccgcccgggcatggcggagccggattgtgctgattcgggcctccctctgcaggagactctagtgtcctgagggcaaggcaagaccagccagttgagggtccccttcctggcctggccctga

SEQ ID NO: 40974 - DNA, 443 bp, Mus musculus
  source 1..443: mol_type = other DNA
gtgacctctcctcaagtagccccttgggaggaggtagctgcttgcttgacaccagtctgctggagagtacacaaaatcagggaatttagttataaacagagtctctctatatagccctggctgtccaaatagaccaggcttaaaggcatgcagcaccatgcctgactgtaccagtataatgttaaaatagtgctttgaagtagtgctcaaaacacagtctgagcctatctcaaaccttaaggctcactgggctttaattactgttctgagaacaaggttgatgtctgagaaggaactaagttagcagacccaagcataggtagaatcttccctggaagtgaggaagccaggcgatcttcagcaggctgcagtgcccaagagccagcctcagcagccagctctctactgagctgccccgaggtccttcactgtgctcagctcgg

SEQ ID NO: 40975 - DNA, 237 bp, Mus musculus
  source 1..237: mol_type = other DNA
tcaggctagcctggcaggctgctgccctgcttaggtctctgcctcaggagcccagggctgctcatggtctcaaggccagagagtctccccacttacccaggagaagatactggtaagcaaatggagcctgtgaccaggctcagggcgcctagactggctgatttacagtcaatctttcaaagtggaggcccatgtggtctccaaccaatggcgacacagcgatatctttatcaagga

SEQ ID NO: 40976 - DNA, 482 bp, Mus musculus
  source 1..482: mol_type = other DNA
cattaatatgcaaatttgctttaatagttaatataggaaagctacaaatacatagcaaaaatgcttttaaataaatttattatcattaaatatgtcttgtattcctgttatagttacatacctggagttgtgtaaaagtttgtgaagaaatcaacaaatgcccccagcactttataaaacttgggacggtaggcacttcaagtctgtattacaagacgtcctgtcttaaaagggggtggggtgggccaaagaggcgtgtcccccatcccttcgaaaactgcagttggccaaccagccaatttttcgtggccagccgcctgttctggacacagctcagacaggccccggttggctttcagaaagcgacctcggctcacgctggcgagcatcagtgcgaggagcgagcatcgccggagccccgcccaccctggggtcctccgggagaccgcgcaagcgcggttgggcgggactacaaagacggg

SEQ ID NO: 40977 - DNA, 512 bp, Mus musculus
  source 1..512: mol_type = other DNA
agtgctgggcttagaggcctgtgccaccacacccggctcatctttcaagtagtaatatgtcaggatgcataatttataggtatataaaactataaaaatttgcaatctgattccatctcttgagcacttgctctaaaccaaacagctcataaccacatgttatgagctccatcggatgtgcatacatgaaaataaggaaatatatctataaaaataatctatgcgatcgtgacctgagcatgtaccacatgcgtatattgcattcacactcactaaaaaggtagaatcctagaaagtcagtagagtgagtctcttaaatgtagtttcaacacacatatatgaatctgtgaacaggctgtaccgattcgccacaagacggcgctacgcccccacgtggccgtcccgagacggtgccacccgggatagctcggcaagagcccgccccggggtaggcggggccaaggggcgtgtgtccgctttcccctgggtcccgcagcgcggagacgttttcc

SEQ ID NO: 40978 - DNA, 227 bp, Mus musculus
  source 1..227: mol_type = other DNA
ttaaatgagtgggtttactatacaccctttattgggatcagagatcaccagggagtggacgacctctgatttttttaatgctatttttaaaaccccaaaagagaaatcaattatcgtgacaactgatcaagtatctaatcaattatcagtatactaaaaagttgtactaatgtcttgcataatgcagctcaccgcaacgcgcagccgcggaggcgtcgctttacggc

SEQ ID NO: 40979 - DNA, 383 bp, Mus musculus
  source 1..383: mol_type = other DNA
acactcaagcaattcccaggaagttctaatccacaaacgcgtctgtgtgtgtgtgtacatgtagggtcttaaaaacatcgtttaaaaacgtgatcagtggtctttgcaaaagcccagactccccgggaatttaaaagaggcctgcccatccgagcagctgggaagccgttgttccttggaactaggaaaagaagtagaaaaaagtcttcacaactgcatcaatttgcaagtattatgaagagtccttttttttttttttaaacaaaccgactcaagaaccgggccggcgcggcgattggttaactgcgcggctgactgacgcggtgtggagagcggctcccggcagcgcggagctgattggctgcgcgcggggagatccaggg

SEQ ID NO: 40980 - DNA, 299 bp, Mus musculus
  source 1..299: mol_type = other DNA
cctgcctcagccttctaagacagatgtgattttcttgactataagtgaaataacattaaaagtccattctagtttcttggaggtagcagcattctgataaaaaagatcagctcattccttgtgggcattgcagacatacagcactcaggtacagtttgagatttgtgcccctcaccctgatagggacaggcaaaagctaggctgccagggtctggcccacactttaaaacttttgtactaattgaaactctgttgagcttggcaagcttgtagccagctatctctaaacaagaaatagc

SEQ ID NO: 40981 - DNA, 622 bp, Mus musculus
  source 1..622: mol_type = other DNA
gcagacctgggagacagattctctcctctgagtttcagtgctcagagcactctctgctggcaagctctcttacagggaaggtgcgcagatatcttgtatttgggcctcctcctggccgaagaagaaggcccaaaacaggacctttctcagacactgtgttgctttggccgaccgctgctgctgtggcttaggccgcctccccagccgggtgggcacctgtcctccggtccggaaggtggccggctgtccccggcccacacagggtgctgcctcagcgcctctgtgcttctgcctgttccagaagctgtcaggttctctgggaccgctgctgctgtggcttaggccgcctccccagccgggcgggcacctgtcctccggtccggacggtggctggctgtccccggcccacaaagggtgctgcctcagcgcctctgtgcttccgcctgttccagaagctgtcaggttctctgatcggcattgttaaaaaagactggatttcatttttttttttggctaaacattattccattacatatacacaaatgcacctgcatgtacaaatgtagaaatagaaatgcatatatacatatttacattcatttaatatttgtatttctgtaca

SEQ ID NO: 40982 - DNA, 374 bp, Mus musculus
  source 1..374: mol_type = other DNA
caaacagactgagaagactgtactcctatatttatatgtgtttgtgccatgacatagatgccaggtcatggcaacagacccaagagggtccttgtcgcttagggatgatgtcatctgtttctgatgctaacaatacatatatatgtaatgataacaagaatgatataaatacattttaatttcagcaaataaatacattttcaaagataaagccaataaaactgactcctagtttagtcattttgatacactgtcagaatccctcaggaaccaaactcatgttgagtatggatctgcacagccatagctgagcccctttctcatactttatgaatgagaagggaaaggtggagttcaacctcagggcaaggttc

SEQ ID NO: 40983 - DNA, 282 bp, Mus musculus
  source 1..282: mol_type = other DNA
ttgtgaccaggctcatggcaggtgcttagatcttgggcctcccctggtgacccctggtgagacctcaggtagagttccaagggaacttggggagccttctgacactaacagaaatgctggactaagaacctcagttcatattcctcccccctcgacacctggcgggaggagaaccttacaggttgtcaatgaaacatggaattatttcctttgatggcttagataatagtagaagccaaagcaaggccgagaccaatgcagtcctgcccgggactggagagc

SEQ ID NO: 40984 - DNA, 361 bp, Mus musculus
  source 1..361: mol_type = other DNA
tttgtcacaatgacttttccaagaaaatctgatttcagtatatgagatgatagatcaagcaacttttgtttcatactaataatgcttgtggtttgccaagcataatccaaaggaaggtatgaacaaccttgattgtgctcaggtaattatgtcattaaattggactgtatcatatcttcattatcaatccgggtgactctaggacccagggtagcagcgagcctgtatcagctcgcccagccgggagcgatctgaagcatgcaccccgcagtgctcacgaggagcatcctgcgcagctcccatccaatccagtggcttgctgcttggggcgggactacagtttagcatgcagcctcaggct

SEQ ID NO: 40985 - DNA, 389 bp, Mus musculus
  source 1..389: mol_type = other DNA
gcagatggaggtgggatgtcctccgtcgtacagtggcaccatgctggctagtttcatgccagtgtgactcaagctatagtcatatggaatgagggcctcccaattgagaaaattgccccatcagattgggctgtgcgggagggcccggcctactgtgagcattgcccctcctgagcttcctgaaggaaacaagatgtctcgtttgtaagatatccttccctgtttataagccagtatagcaaggaaacatagtttccttttcatcttccaccacaataaaaaaaggagcgagggcctgtgccagaagctggtgttggttctgggccaggtggagcccctgagcctctggcgagcccctggtggcggctctcccacgctgcccacgtgcc

SEQ ID NO: 40986 - DNA, 629 bp, Mus musculus
  source 1..629: mol_type = other DNA
cacacagaaatttgtacatcttactattgattcatttatagtttctatgtatgacctgtttgtacctcattcagaaacaaatacagtatccagttaaatttgaattatttgaataatctacattaatcaggtgaaagcaataataatgttactcaataagcacatgtttctgattttggccataacttttgtgacctatgtaaaattttaagaatgtcttaaggctccagacacaattgaaagccgttataatttgctgtcagttattaggtcattttttttcagtatatgaaaaacatctggccttatgaaatattgaaatactaaaataaatataagagaggtttaatttttattgttgttcatcattagctacaacagctatttcttgacaaaaacattacaatgtttaggaagcactcatgaaaaattaaaaatttttattgtctagtttctgttttcttttacaaaatgggaacggtattcattttattttacatgtaaatattgtagctggtgacagggctcatgagctggcagctctttcagagatcctctgacgtcagtcatctgggctctggtcacagagctgctgtggcaccctcaccgtcgaagagctcaggcgcagg

SEQ ID NO: 40987 - DNA, 373 bp, Mus musculus
  source 1..373: mol_type = other DNA
ctttcttaaaattaattaattaattaattaattaattaaaaacccataccatcaaagtggacataaacttaggagttctctgtagagcttgtcaggagtcggtccctggcagcaccttccaagatatggcgtgtgtcccaggttgtgtttcagagctggagagactttattttagtaacaggtggccacccaaaccactgatggggtggtttccagggccgaggcctgagtgtgcactcggtcaccggccatcagagccaacagttgatgtccttatgggataaatctgataagaaacacaaatgtttagtttcttcatatgacgaagctttgtggtttggttgtttatcaaattgcaaatacataaaacaga

SEQ ID NO: 40988 - DNA, 462 bp, Mus musculus
  source 1..462: mol_type = other DNA
agagagacagagagagacagagaccttttctctttttaatcaatatcctaatcaatatattcaaaatactgtagcgataatttccaattaaagtgtatgttttccacttacctttaatgggccaccaaaaaataataaagccttaaatcagaaagagatttttgaaaatattcttaatgttatttatctttgtgacaatatgatctcgcagaaaatgttttgaaagtccaacattttattgttctcaattctggggacagtacgccgaagtatcctggaagtaacctgaatattttcggatatcttttcctcagtgatgtgtaaattttttttaaaagacatgataaatgatacaaagaaatgaagagtaaacctgcaggcatccaccttcctttttacagttagcaggatggttggtacctgaatctatgtagcgacaaccctgcaggttcagggcccaga

SEQ ID NO: 40989 - DNA, 522 bp, Mus musculus
  source 1..522: mol_type = other DNA
ttgtactttgaaaggaatgatattgacactaaaattttaaacatttaaattttttcataatctttcataaagaagtttaataataggtatattaactgaatttcattagttttttaaaataatattgtttgtgtatatatacatattaaaataaaaacatttacaacaaataaaatacttgaaattcttgttttgtcgtcctctttataaatacataactattttggcaaatgtgactgcacttaaggaaaacacattaaaagatagactgttcatttttttttttttttcagcaagtactttagcagttgggtgtactgacaggactcttgacttaagctgtgtataaattaaccattctggtaagctcctagtttaggctttcttgaaaaatttgtccacgcatcttaaaatgcagaaagagtataaacgtatgtgtgtagcgcgaagcagcctggctctgtagggcgctccaaggacgtggcccacggtggcccctggcacgtgccccacagccccgcg

SEQ ID NO: 40990 - DNA, 472 bp, Mus musculus
  source 1..472: mol_type = other DNA
agtttaattgctttctgtggcagggcaattgcccgaggtggaagcagccttccgctcttgaggccgcgggaccctcgaggtgagcggcgcccgaggccgcctggccgcacagcagggcagccgcccagcaccatcttcccgggggccggtcctagagacctggccaagccaggccgccacggcccaccggagcccggcgctgtcaggcctccgccctccagtagacccttcactgctgcacggagcggagggagggtggagcttcccttagccccgccctccagcccctccgtctccgctgagcgggcggaggggcggaacagccgggcgcgaactggagcggcggcggcggcggccgccggtgggttggcccgtcagtgccgcgcgcgtgctcgccgagggcgagcgccccgccagcccgggggcccccgcggggttgcaaggatgaccgaaggggcggaggcggcggccg

SEQ ID NO: 40991 - DNA, 463 bp, Mus musculus
  source 1..463: mol_type = other DNA
tttaaatttgagacaagttacccaggctggctggttggccttgaactcatcctgaaagggtgcaggaagtggaagggttctgtagcctacaagtttaattgctttctgtggcagggcaattgcccgaggtggaagcagccttccgctcttgaggccgcgggaccctcgaggtgagcggcgcccgaggccgcctggccgcacagcagggcagccgcccagcaccatcttcccgggggccggtcctagagacctggccaagccaggccgccacggcccaccggagcccggcgctgtcaggcctccgccctccagtagacccttcactgctgcacggagcggagggagggtggagcttcccttagccccgccctccagcccctccgtctccgctgagcgggcggaggggcggaacagccgggcgcgaactggagcggcggcggcggcggccgccggtgggttggcc

SEQ ID NO: 40992 - DNA, 581 bp, Mus musculus
  source 1..581: mol_type = other DNA
ttcgttgattttattattttaagtatccttactaacaaaaaaaaaaaaaaaaaaaaccatcgggatccctgtggatgcccgcaaagcactcgctgcagcccgggagtagcgagcgcaccgccacagtgcagccggccgccggccaccgggctccgggtcagcgctgacaggggagccggagcccagggtccgcctcgcagcccgttcccgtccggcacccacctggtcgcccggcctcgaggactgggcccagcaggcaaggggcgagagcgcgcgcggccccatagcgagggcttcggcaggttccgctcaacgcgcggccgccgcctccgccccttcggtcatccttgcaaccccgcgggggcccccgggctggcggggcgctcgccctcggcgagcacgcgcgcggcactgacgggccaacccaccggcggccgccgccgccgccgctccagttcgcgcccggctgttccgcccctccgcccgctcagcggagacggaggggctggagggcggggctaagggaagctccaccctccctccgctccgtgcagcagtgaagggtctactggagggcggag

SEQ ID NO: 40993 - DNA, 420 bp, Mus musculus
  source 1..420: mol_type = other DNA
aggggaaaaaaaaaaaaaagaagcgtgtgtttttcattctccgaaccagctctacttccaagtagaagttcctagtttactggaagcaaactgaccctctgagtaagcagtggactagacttgatacttgttttcagtgtcaaccaaataaacagctatctggtagcagatgcctgcctgagtcaattatagtcacttataccaggtaggcgttgaatcaagtgaatatttggcaaaaacacacagtgtgactgcgtgtttgagccgtgaaacacctcctgcaagcactgagcttagtgagctcctaattggtatgtagcaaaacgtcattttctaaaaactggttggttgcttgttttgtaataaaaacatgtgaaataggaaagtagaagtgagccagactctgacctttataaagtc

SEQ ID NO: 40994 - DNA, 336 bp, Mus musculus
  source 1..336: mol_type = other DNA
tctggtcaccctaggctgaaccctcgaccgcagggggcgatacgccccctcgccctccgggcagccgcggtttgggccggctgcacagtgcgcagacacccctctcctcccccctggaggcccgaggagcatttgggttttgctttaatgtgaaacgaaattagcgaagccccgaggcgcagagctctgggacccgatgcgacccttgctgcgcagagcgcggtgagtcgggcaggggtggtggacggcgaccggaggtggcccaatgggccacctcccgtgcactggcgcctcctgggtgaccaaggtcgccaccgccaggggtcgggctgtggg

SEQ ID NO: 40995 - DNA, 455 bp, Mus musculus
  source 1..455: mol_type = other DNA
gggtaagctcatgagcatcctgaaaatcttcgcctctgtgggaattgtagccacctcacagattctctgagactgagaaatgtcagtattcgataaaggggggaaaattcttctcttcaccttcagaggtaaaagccttattctgaagactgtcaccagcagggcactccggagccctcatgagtgtggcttggtaacactcacactgtacagcgcagccacgccagcgccgcggcgcgcacacgctcggaaatggacggcggcggcgcgcggcgcgcggcaggcgcggatcccgcggggagggcgagcgcggtcgagcagcccctgcccaaggccgggcgcgaccagcgcggcggggggagcgcgcttccaagcggccgcccccgcgcgccgcgccagtagttcggtccgagggggcggctccaggggcgcggctccgcggcggccgaggctgc

SEQ ID NO: 40996 - DNA, 298 bp, Mus musculus
  source 1..298: mol_type = other DNA
cagtcttttgtaaactttgcaagacttttttttttttttgcaaaacaacccaccatggatccactggcacgtacttattaatattagacaagaaacaagttcgctgctgtcttcagggaggtgagactccttctgaaggaaggagaatcggacctcaggcagtttcttctcaaaggcaaagtgcccatttagcggtacccccaagctttggttggttgcattggttgcagccagagcgagcgggcgggcggaccggcgggaggtggctgcggccccgccctgcttctggcccttcctc

SEQ ID NO: 40997 - DNA, 353 bp, Mus musculus
  source 1..353: mol_type = other DNA
taatgtaaaatgcattaattcaactttaaaagtgacggtagatcttctagagaacccaggtttgagccccagctcccacatggaggctcatgatcagctgtaacagggcatgtctagaatccagacacatatgcaggcaaaacattcatacacatgaaattaaattttaatctgttttgttttgtttagggtttctctgtgagtcgaccaggctgacctcaaactcagaactgcctcggagtgctggaattaaaggcgtgcgccaccacgcccggctttaaattttaaaaagtcacatttttgattaccaacaaaagtccaaggtctattctgagactaaagactctcattat

SEQ ID NO: 40998 - DNA, 162 bp, Mus musculus
  source 1..162: mol_type = other DNA
acatcgggagcaggatcaaaaatttttattttttaacaatctcaatatgatctggtttgactctgattaattcctaaggcaaacaatgaacagcactgtagaatttgcagggtccattccagcgtcagttcgtatattgtatcgggtgggagtgagagagcg

SEQ ID NO: 40999 - DNA, 184 bp, Mus musculus
  source 1..184: mol_type = other DNA
tcacatttcagaaatgtttctggagttgaagcttaactgtcagttgacagagttgtgtatttcatgttgaactctgtataaacattagagttagtcattacaatagttgctaatttgagcagactgcccctccatcactacctagcaggttgttatgaaccttgaactcacagagattaaagat

SEQ ID NO: 41000 - DNA, 359 bp, Mus musculus
  source 1..359: mol_type = other DNA
agcctggtctacagagtgagttccaggatagccagggatacacagagaaaccctcaggagtttgaggccagcctggtctaaaattctgaggtggtatttgaaacacatcaggaaatttcctttaatggtagcaaatgtagtcttcactgtatagccctggctgtcctggaactcactttgtagaccaggctggcctcgaactcagaaatctgcctccggagtgctgtgagtgcaccaccacgcctttgggttggaccttctaagtaattaccaggccccaagcccacgtcactcagtgcggagctctggcccggagcagcgcagggccggggcacgtgacccgcccgcagtcctcgctg

SEQ ID NO: 41001 - DNA, 252 bp, Mus musculus
  source 1..252: mol_type = other DNA
tttcagaactttaactttcccaagttatttaacaagtactctagaatatatttttgaatgttgagatttctacacaactaatgatttttaaaagtcatcaaagtgatgtcatcagtgactccaatttggtagtacagacgcagaagtgacttcgcgggctcgtgcgggggaccttgttgccttccgcgcggctgccgtgaaggacgcgagccagtcccaggggcgtcactcggagtgacgtccttccggccc

SEQ ID NO: 41002 - DNA, 587 bp, Mus musculus
  source 1..587: mol_type = other DNA
tgggttggaccttctaagtaattaccaggccccaagcccacgtcactcagtgcggagctctggcccggagcagcgcagggccggggcacgtgacccgcccgcagtcctcgctgtggcccgcggcccgggatgcagtcgcgctgacgtcctcccggctacccacaagcctctgtaccccggtgcgggcaggaagagggcaaccgggtccagtggctgcccgggagatcggggtgccttctgttgctggacgcggactgcccggcaacccccgggcacactggcggctaccggtctctctcccggggaaggagactgccccggctcgggctgtcgtcctaacgtgctggcccgtgtctgggacgccggggccagggcgctctgctgacagctgtcaggctgtcagtgactcccgggcactccccggtctgcgtcactcgagtaccatatggcgtctagtacggcctcgcaggcccgacctggctgcccctcctccagactctcgccggctgacgagtcagcgccgagctccggactgcatttcccggcaggcgccgcggccagtagccaatattggcggcggcggcgcc

SEQ ID NO: 41003 - DNA, 438 bp, Mus musculus
  source 1..438: mol_type = other DNA
tcctttgctttttcgtcatgatgtttgtgcaggaacagaaaccctaacacacacacagacaaatatataaatgtagtaatttttaaaggtcagagactatgtggtttttttaaaaaaaaaaaaagtccacgttttgttccttctcagtttctgggggaaaaaaaaaatccagagcgctgggctgcatccgtattctgtcagactcacctcttaggctttagggataactttgacagcctctcaatccaaatagagggaggggtcaccccagtcctgcccaccggggttgccgggacccatgaggggtcagacagcgcaggcaaggcctcccgtgcgtgtcccccacgcccctagcgcgtgcccggcgcgtgcccggcgcccgacgtctgcccgcaggaggagccaggtctcgcgcgagtcccccagtcctcaccgcat

SEQ ID NO: 41004 - DNA, 506 bp, Mus musculus
  source 1..506: mol_type = other DNA
tcatttgtgtccatttaaatattacacaataaacacattgaataaagttcttgatagattgtttacatctgtatttacctgtaatgaacgctgtagacctgtgaaatataacactaaggtccccaggggtatactagggcattactgtttaatgacttcaaaatatagtttaaggattttgtttattgaccaatgtctagttaacctgtacatatttaacctttttaacttacagatactttagaattcaaatatgttttctgcttctgtaagaatgtgggaaagcttttaatggcattccattgatttcattgactttaataaattgtcctgtatggtctacttaagaattacctgtaatttcatggtacagtttactgggaaatgagaaagtgatctgttaggtggtactcataacacagcaaatgagctctgaggaggccccgctggtagtcagtccccgcggagttcgctaggtggcgctggacaccgggcgggcggaacca

SEQ ID NO: 41005 - DNA, 616 bp, Mus musculus
  source 1..616: mol_type = other DNA
gctggaaatttcctacctccaggtgtgcacactacaaaccatttagtgtgtcagacaacacacacatttacataactattggaatcttactaaacagaaactttgcctgcaggctatagctgcgcatcgaccgagacgcactgcccccggggcgatggatgtcgggcgagttcccccgaccccagcgcggcatcgctgcaccgggcacggtcggaccgcacccgagacctcggcctgctcccgccgccagctcggggctccgagttcgggatctaggagagcagccgagccgtccacggatgccccgggataccgtgcacactggagcctctccacccccggctcgccccggcccaggctcccgcgcggacctggactcgctcgtccacaccgccgctcgcgctctcagccctcgcggagggagcccgggccacatcgccgctgcagcctacctcccaagccgggcggggcggacgggcggagcctgcggccgcgccccaatccccacaccgcgggctcctcagcgctccagcggaggagagcagtgcgcccgcggaggctgcgctcccggtgagagccggaggcgatgcggtgaggactgggggactcgcgcgag

SEQ ID NO: 41006 - DNA, 474 bp, Mus musculus
  source 1..474: mol_type = other DNA
gaattccaattattaaatatagaagaagtgtctctagcaaatacttagtaattacaaactgagcgctcagttgtgaaaaagataaatgaagtgtctacttttagcttgctacttcagctaatattaatagcactattaactctttaattttaacaaatgtttctgttagagaaatttttacaactcttctgtaagtttaaaatcatgttagtagttcaaaaaataacttaaggtatatacacatatatgttcatttgtgcgtaacatgtacacacacaccaatgaaggatgtgcattaattgaacacagctaagctttaaggtttctcctcttagagcataattgtcaaaacttttatagaaaacgcttggaggcctggctagcctggaactgtgcctctgcctcataatgctggagtgacaggcgtgttcgaaaaccttttaaagacatttctatattctcttttatatattc

SEQ ID NO: 41007 - DNA, 554 bp, Mus musculus
  source 1..554: mol_type = other DNA
gaaagcctacgttctcttaatgcggcgcccctcggaaggcgtttcacagcttggggggcctccgtccgaggctgtgaacaccccgcccgggcccagagatcactctctgggcccttgtcgagggacgcccactcgaaaaggggtcccatcccccgagggagatcctcgatgagagctctcgcaaggctgcaccggacggccgcgagggcgtccagtcgcccgtcggcgggacgcggacgggaaccggccgctcacctgcagctcagacaccgctagtcgccggaagcgtttcaggtgagcccgtccgccgaaagaggcgggctcccctccagtcagtgcagtgaaggaagggcggaggataggcgtttcctcacgcgtgacgagcgctgcccctcgcctcgctttcccgacccgaggcccggattgacccgtaccgtccatgaccgttccgcgctcggcgtgcaaggggcgggaccggctcgggattggctgtagccgtcctatccccctccgccgctcgccaatagcggcctcccgcaggcgcctgcgcaatg

SEQ ID NO: 41008 - DNA, 623 bp, Mus musculus
  source 1..623: mol_type = other DNA
cgtttttttttttcgtggttaacaagaacacttatgatggagccccggaaaagacttcgaagcttacctggtggcctcccctctgtcgcttctgcccaggcgcctcccgaggggtagtagccatcgccacctgcgccttcgcccggccaggtggtctcggccggggcgcccccgcgccctcgccaggaaaccggaggctggggaggctccgcggaggtacgtgcaccgggacatcgcctcccccgggcccgtagtagcggccgtaagaagggccgtcactggggccgtagcccgagcgcctcagggccgacatgggctccgctgccgcgaagcgcttcccgccccccacgaccgtcccattgcgcaggcgcctgcgggaggccgctattggcgagcggcggagggggataggacggctacagccaatcccgagccggtcccgccccttgcacgccgagcgcggaacggtcatggacggtacgggtcaatccgggcctcgggtcgggaaagcgaggcgaggggcagcgctcgtcacgcgtgaggaaacgcctatcctccgcccttccttcactgcactgactggaggggagcccgcctctttcggcggacgggctcacctgaaa

SEQ ID NO: 41009 - DNA, 274 bp, Mus musculus
  source 1..274: mol_type = other DNA
ctgcagggactgacaacagttcaggacctgtagcagggcaggccagccttagctgcatgaggaaagggtgagcttgcagggaacccaggcctaaggagttccctagaggacttgagctattgtcctatattgccctagcgataccctccagacctgatggacggtcttgcaggtagacacaactttagagaagctatatatacatatcttggccagcactgcaggatgaggcaatcattccatccttcacagccttcccgggaagcatttaagg

SEQ ID NO: 41010 - DNA, 174 bp, Mus musculus
  source 1..174: mol_type = other DNA
taaaacagcaaaggcggcacttgcttgccaagcaagaaaagagcccacccatatgcttgcactcagtccatccgtgaactagcaattcgtgttcctcgagcgcactctagcagccgcctggaaacggggcttctggcggccagctacgggactcaaagcgtggcggcaactcgc

SEQ ID NO: 41011 - DNA, 480 bp, Mus musculus
  source 1..480: mol_type = other DNA
taaggtctgacatttcttacagctttgaataaaagataaacaaaaatatatctcccaaaatatatatatagcttaaaaacataagtgattctttgaaatgtatatattttcagtgctcttaactattcatatttaagttgtcaattatcacacacctaccatttcatagtcaccatgtgtataggtgtgtggaagtgcaaaatatgtgtgtccagacacacaggttatactccttcattgtttcagtacaattttacaaatatatttcaatattactaaccaagtatatttactgtttacccacaatttttcaaaagaataaacaaaaatccaaatcattaaggaatttttttcctgaaattctcaagagaatatactattatctctgagacttggctaaaccatactgaccacctctcctgagtggttaagggactcttgatccctgagcctctcattggctttcccatcagatcttgg

SEQ ID NO: 41012 - DNA, 394 bp, Mus musculus
  source 1..394: mol_type = other DNA
aagctttgcaatttattgagctatggctccaaccttagcgttgcagtggcatgtttcactggtgcagagcaatgcccttggacaaggtggttcttaggtcaccacacctcagagtcccagtgacagaagtcctttggagggcggtttatctgaagtaatgacttctgacaatgctttcctgaaacagataaacatatttactacagtgtacatgtttacaacttaacacattcacttaactacaactacctaataattataactatttccttgattttcaaaagtatcctgacaggacatgtcccaatggagctgtgatagcagcaggaagactcctccagctgccaaaccagtatatccgtgctcagtaaacatccacggagcatgctcagta

SEQ ID NO: 41013 - DNA, 482 bp, Mus musculus
  source 1..482: mol_type = other DNA
aactggattcagtgacattggaacctgaaactatacgttataattttgaccactgttgtgtttagtaacaaaagaatgtgattctttaatttctttgcatagttgaatttgtaaatgagtccatcaaaaaaagtaaataagtttccccttcatcatcctatggaagcctctcacaggtggaaatgggaagcgcatgctgtccattcagcaactacaattttattacaaagaatacagaggtttataaggtcctcccttttactaaggactctccctcttttgcggttttctcccgatgggacagaaacactgtgcagagggtagaaaacagcctggctgccctcctatggtgtcccagctgggcggggcttaggaagcttccgcggggcgtgcctaggagggagcggccccgccctctccccgccatcccctgcgggacaggagcggtgacgccacgggagcgggcgatgacgggcgggtcg

SEQ ID NO: 41014 - DNA, 580 bp, Mus musculus
  source 1..580: mol_type = other DNA
aagttttaaagcttcacaaactgaaactattcattaaacagtgttcttaatggtgttttttatataatgcctataatttatttctgaaatacttgctgttatacatccaggtatattttctactataaatatggtatctggaccacacacaaacgcatttgtcagtctgagaagcaaaagttgcttacagggattctttgaagggagttctttagcatgcttagagtttggataataaacatagatggtttttgtttttacccacacactgtatgttttgatttcaaatctggaaaataaatcagtttagaagtagatgatatgtctgattttccagtactaatactagtgtagcacgatctgtgacgcgcagcttggcgtctcaggccaaagcgaggcattatcagtgcactgagcctcgcagccaccgctttgcagagactggtccccagtcccaggctcaaccttgctgttgcagcctggccttcaccagcagggtatggatgaccgcgcctacgctggcgcgggcgtccactgtaaggcaagaggcggccaccaggaggcagcctcacgctcgtct

SEQ ID NO: 41015 - DNA, 429 bp, Mus musculus
  source 1..429: mol_type = other DNA
cagctgcactgagaaactcagcagaccatccttggatttttttctaattaaaggacagtatgcttataaagacatttgtctctttctgattagaatatatggtgaccagacactatggtctttgcgctattgtatagtaaatatttgttaattgaatatatctattctctatatttagaaaggagttctgcacagatccaaatttaataataaaatgctgctattttattataggattatataaacgcctagcactggacccttttaaggttatagagcacatgcctagcatgtgcaagtcttccggttccatcctaagcgttgaaaaagaaagtaggtattcaggccaggcctccgggccgggccctctaccccacgcctctacccgaccggaagtgggcctcgccgggggcggggcgggccgcggag

SEQ ID NO: 41016 - DNA, 467 bp, Mus musculus
  source 1..467: mol_type = other DNA
actacatttatttaccaggaaattccagaattccactttgggatattgatgttctttagacttacagtggggttgtaaacccaacccccagttgcagcattaggaaggctgagaacctgtacagttttcatcctgatgtagggtggaaaaggcagcagactgctgctgctataaaatcctggatggcctgatttaatccatgaaagcttttatgatagttttaaaactatatgaaactccaagagggagatacacacttatcggagaattctgattgaactaagaatttgtgataaaaacttaattaggatataggtatagacaataaaataattttttaaggttgccatttctcttgtgagaactagttttctccactaatttgttacaagctgttaagtgcaaagctctaatcaacatacctcttgaatggctgtcatgacgacatatcataatggctctgaaaa

SEQ ID NO: 41017 - DNA, 621 bp, Mus musculus
  source 1..621: mol_type = other DNA
ttattaataaacgtatatgaaaccttctacaaggcttgtattaagggctccaaggaggaacgccgggctccccacagccgggccccttcgcccggagggagactctgggcaggctccggcgactcagggaaggctgcgctccggcttccggagggaagcggtgggcgcggagcctaccctcgcgcggtcccgcagctccccccaccgccaccgcgccgagtcccgcagtccgcgggtccccggcccgcccgtgcgggggcgtggcctggcacacgcccgcggccggagaggggggcgcgtacctcgtcgcggccgaggaactaccgggccagtcggcgggtagccagagcgccggcgtcagcgcacgcgcagtgcggagccccggcgagggtgagcgacagaccggccgccaccgcagggcccggccggggcgcgcgcccgcgggccttggactggctctgggagcgcgcctctaggggcggggctgagcgagcgcgagcgtgcgcagtggccctcggacctcgggactcgcgctacgcggcgcggcggggcgcggcgctcgcgcaagagggcgtgggctggcggcgccgggtgcgcgcaagggagtgcgcggccccgagc

SEQ ID NO: 41018 - DNA, 592 bp, Mus musculus
  source 1..592: mol_type = other DNA
gggtcccgactgcctctaccgggcgcccaggcagaaccaacgctttggatcactggggcagccaatctcaggccggacaagttcctcctggaccctgggcccagcctgcctgagcccggcctctccctgctgaccctgacccggccgcgggtgtagacgcggccgcaccggctactcagctccgcccgtcccaagccccggatgtgacggcaggtcgccccggggcgttcgccccccgggacgagcaccggtgtccgcgaaaaggtggcggagcccaccggcccggggtggccgcagcgtctcccttcaaccaaccagaagccgcggccgctcggctcggggtttgagtccgaaggggtcaggcagcagaccgggcgtctggcggaccttctcttccgtccgtccgctcccggggcgcggacgctggcaatcgctccgcactgtcgctcggggccgcgcactcccttgcgcgcacccggcgccgccagcccacgccctcttgcgcgagcgccgcgccccgccgcgccgcgtagcgcgagtcccgaggtccgagggccactgcgcacgctcgcgctcgctcagccccgcccct

SEQ ID NO: 41019 - DNA, 220 bp, Mus musculus
  source 1..220: mol_type = other DNA
ttatctcagtgacaccaggatttcagatttaagtagttggcgaatgtattaaaccatataccttaaatagatccttaagagaagcaatatttaacgccacacactccaaactacagagggtcaagcctgtgcagttgagagcactacatggtggctcacaaccatctgcagtgagatctgatgccctcttctggtgtgtctgaagacagcgacagcgagc

SEQ ID NO: 41020 - DNA, 596 bp, Mus musculus
  source 1..596: mol_type = other DNA
tcagagcgcccctgggggcgttccaggagctttgaggtgacgcttcctggccagggcgtctcaccgggaagggagtccttccacttccagtctgactggacaggctcaaagtaggggaatagtggatgcccccaaggcttcggcgcttccaagtcagctcggagaagctgccgagctcccgaggcgtagcccgccccccggcggtcccggggagaggcttggatcctaggaccggagcaggcgccctgcgttcccaccccggtctccaccctagacactagtgggtgacccgtgggctaggggcgctgggcgaaggccgggaggcggcgaccggctagggcgctttaagactctccccgcccaccggcggcgcccgcctccgccctccgctctccccgccccggggtccgggagagagctgcgattgggcgggcgcggcgatccctcgcctgggctagctgcggcggcggcggcggcggcggcggcggcggcggcggcggtggaggaggggaggcggcacggaggcgcagcggctgctgcacggcgttcgacgcagcggagcgagcccacccgccccgggagctcgcctcccggag

SEQ ID NO: 41021 - DNA, 405 bp, Mus musculus
  source 1..405: mol_type = other DNA
ccgaaattgcccttagaaattcttcctggtctgctatacccccccgggggggggggggtgcagatgacaatgctaagttttcaacaactgctgttgacctcagcactcacagatttcagaatccgttcattaaaaatcggaacaataattccttgttaattactttatgttgctgtggggacctcaagggaaagtttccttcggctaatgcagcaggaaaagaatcccccgaagccagcgcctcggaaggtgataccagagccttggtgtccggagcccgctctgccagccctgggcaagcctaggtgcgcagccagtgtgccagctcgcgagcgtcccctggcgccaccgccgaacactgcggctcgcagcgcgagggggcggagcggccgggcgcgcgcggac

SEQ ID NO: 41022 - DNA, 263 bp, Mus musculus
  source 1..263: mol_type = other DNA
gctcactctgtaacagcctatttaccttcaatatcattactcctaaagtctgggaatggagaggacctctgtggcagtaacaaaaatataaataaaaatatttaaattaaaaggaagtgcacctgttgctcttgcaaaggaccaggtgcatgcacataaataaatattttaaaaaagaaatatcaaggcctgaatgaaagttactttaatgtcttggccttccccaagatggcgcccgcctgggtggccaacctccgctgggg

SEQ ID NO: 41023 - DNA, 443 bp, Mus musculus
  source 1..443: mol_type = other DNA
gctttggcagtgtctaatgacatgcacctcccgctgggcaaggtcaatgctcaggcttcaatccaagctgagggcagccgcctggcagggtatcaggcggcgctagggcctgggggctggcggcgggagctgagcggcgcctagctgcccccatccatggcacggagctgcggcagcggcggcggcagcaacaggagcccggcacgatccgctaggtctcagccgcgcgcagggcgagccggccacgcgcagggaccaagcttccgtcggctcggagcgctgcgctgagactccggccgcgccgccgggggccacccgcgctgcgctgtcagcggcgcccgcgtccctcccggcccgggtgctcgcaagccatgcccccggagcgcagcagcggggaccccgaggcttgcctccgcccatggccccccgccccgccctcgggc

SEQ ID NO: 41024 - DNA, 433 bp, Mus musculus
  source 1..433: mol_type = other DNA
agtgtatcgtatgataaccacttaacagttctatgtgttatatggtttttcatgctattctctgaagatatttaaatctaccatttatttagagacatgttcttattaagttgctctgacctaaatgctaggatagagtacaacacaatttactgctctctcactgcagagtgatctatttactacatagaaaggaaaaaactggttccacttttttgaagggagttaaatcaggcatggtaatacaagcctgtaatcccagctaggtcagcctgggctagcatgataggctaaaaaataaattataaattggataatatattttaaaaaatagtgttttgcagacaacaattccacatctgtggtttgtgtcaactccccaactcaggtttctacccgcaaactgccagccgattggccagctggccggagg

SEQ ID NO: 41025 - DNA, 203 bp, Mus musculus
  source 1..203: mol_type = other DNA
gatgctgtgagagaccgactctctgtttccttttaaatttaacgggtgacacggcccaagtcctctggacctggtccatgaaaagtgactctttaggaaatggccctatagatctccagtgagctcttcctggctttagcatagatgctaagaatccaaacatattcaaaaatctaagaagcatgctcagaggttttatgtaa

SEQ ID NO: 41026 - DNA, 407 bp, Mus musculus
  source 1..407: mol_type = other DNA
ctagcatgggagccagggcaccagggctctatccccagctttaatgggacgtgtcacaggctttcaaagttattgaatgaaccgaggggttcggtttggcaaccccgtttcccctagcctcaccctatgtggtaagggcagagtagcacaggctagtccctcacctaccctccttcctccagagcagtacccaggggaccagaggcaactatgctataaacttaaatgtattactttctttacagcaatccaaggggtgactgtcgcctcgttttacgcaagaagaaactgaggcaaagtctcacgctgctaggcggatcaggcttgctcctgttcccggtccccgccttctccgcgaggcccgcccccagggcaggtggcgcgcgggcgcagggggcgtggtgctc

SEQ ID NO: 41027 - DNA, 245 bp, Mus musculus
  source 1..245: mol_type = other DNA
ccactggccctaattacgggctggcctcatggaggccttttctcaagcattttcctcaacttgacgaaaaacagaccgctttggagtggatgatacaaatggtccatttaaatccgaatattaaaattaaaaatgttagagtgtgacttgagctctttcaggtgaattgctcgggagctatagccagcaatgagttgggaggaagtgcctgggaatcccagggccatggaatgttcctgtacgag

SEQ ID NO: 41028 - DNA, 410 bp, Mus musculus
  source 1..410: mol_type = other DNA
accccagagcagcccgggcatctggaggctgctaatgggacatcctcgccagcctgttccagcctgttcatggcttagacacaagcccaagtcaggggcccatggatctcagaactgaaatctgtgtgagttccaatcaatcttttgttactagctattgatctcagatcttgataaatgagatatcattgaggaattgaaggtggaagaggaagaataatgtttcagcctcttgagtgaaagcagagagatgtcactcctatcatgtctgctgcagccaagagttggctggacactgtcaccccagtgatgttttaaaaacatctctctctgcaagacagtgaattaataatgtttttagcctcacaagacctgacagctcactgggcatcagtgaagtgcactttaaa

SEQ ID NO: 41029 - DNA, 300 bp, Mus musculus
  source 1..300: mol_type = other DNA
ccttccctgaaatcgtagttccaggaaatctgcttctcccaaagggaggaaggtggcccagtgtgttctctcaggccagcccggacaacagtgagaacagggttcttttcctaccatacccagtcctaaaactgtaaaactgtaaaagctgttcccagagtctcggggaggaaccagggaacccaaggggcccacactggggttcctgcactggagaggacagaagctgcctaggtcagcagctggggaaccacttgcaggcagcgggctggtggggccgggcggaccgcaagtctagcc

SEQ ID NO: 41030 - DNA, 328 bp, Mus musculus
  source 1..328: mol_type = other DNA
tctcatggaggcatttcctcaagagaggctctctgtgataactccagcggacttggggggagactgagaagatagagatattccgttttactctctgtcctgatcagggtcacaaattggatatcctttatggatgactgtgatttttttttcctataatggaagccaagtaaataagatgctattatcgcggttctcaacctctgggtctccaccccttgaggtcaaatgacacttttaccgagggtcacttatgaagtagcaacgaactaattttactcttcttccctgcacagaggtctagggtgacgccgagtgaagcagcagg

SEQ ID NO: 41031 - DNA, 479 bp, Mus musculus
  source 1..479: mol_type = other DNA
tcgaattgacagttgtagaagtccgcagaagggtcattcatgcattttctgtgtcagaaaatctttgcaagcacaaaaataaaaatcttaaaataacttctataataaaagtttcatgttaacaaatgttactttgcaatccaggatagcatccttattgatgccactgtttatatattaaagaaaaaaaaccaaacaagaaattttacaaattttattctaagattaacgccaagaatatatactgctttagttgcaacataggttaattgcatacattttaacatgttccttgttgacaaagtatcacctgctaaccaagtgcagatcatattcagaacaattttttttccactgctacaagtttgaaatggtatgacttattcatccaacccaggcctgattggctaggcagggcttcgcgcatgcctactcagcacacccatagcctccgcgtgcacactgtgtttagaagcgtt

SEQ ID NO: 41032 - DNA, 549 bp, Mus musculus
  source 1..549: mol_type = other DNA
acagaaagccatggtctgactgtggagacctggacagagctggttgcctgctccagcggatggggtagtgtgcttaaacaaatgttccctttcttcttacttactagaaaggcaatttctggtcagagcagttttgagaactttaaaaaaaaaaaaaaaaaaggttttgcttccttaaagtacccaggactgcgggtaaaagtggaactcaaagttgagcgaaaccttggtttcctggaagccgctgtctcactcagagttagcaagccagacgcccacattctgccgctgggcgctcgcctccaagaggccgggctgctcggcacagcttgcgctcgcgcatcctcgcctccggccgccgggctcgggcgcgctgcaatcccgcacgcgcgggggcctctgcagcggggaggcggtgcccgcacgtgcggcggctgcggactcacctgcgcctcccgagcccggccccgcccatcgccccgccccggcgtgactcattggccgccgctcggaggggtggagcagaggcggccccggggctcattagcg

SEQ ID NO: 41033 - DNA, 229 bp, Mus musculus
  source 1..229: mol_type = other DNA
acaggactgtagagcattttcttaataaatgaagcaggctgagcaagcagccagtggtgcctctccatgaaagaaatgacgattaatttcttttctggttaatagatgcctgtctgatgcacctctgatgcgtataaaagtcccctagaccctgtctggaaaggcttgcaacaaggctttgccattggtctacagggcagcagccctggcgtgcacgcgaggcggggct

SEQ ID NO: 41034 - DNA, 469 bp, Mus musculus
  source 1..469: mol_type = other DNA
agatgcctgtctgatgcacctctgatgcgtataaaagtcccctagaccctgtctggaaaggcttgcaacaaggctttgccattggtctacagggcagcagccctggcgtgcacgcgaggcggggctgcgggcctgcgcggggctgtaaacaggggcgggctgtgtcgctgcggtgtggcggctcccaccgctgcgtgacacggtgtccctgggtgtcaccagcgcgcacaccgagaggaagctgccatccacctgcgcgccggggcggcggcgcagcggcgggggccgcgaaagagccatgggcaccggactgcgggagcccgcaggccacctcgggatctggacaggagcatcgccgcacgtctcgctgtgccctgcttccccgctgcgccaggctgtctgggttggcacaaggctaagcgacagccacgccagggcctccaggggtgtattccagcctgaacttgaa

SEQ ID NO: 41035 - DNA, 274 bp, Mus musculus
  source 1..274: mol_type = other DNA
gaccatggatggagatcttccacagttgtcaaaggcagtctcttccagctgtgaggctcagagtaggagcccatcttccccttgtgcagtgcaagatcagttgatttccacagcaacaaagatggtccctgctgcccctgggcctgctcctcccactcgcaggcttctgtgcacagattcaagcaagcctccccgtgaaaagcttatctttgagacatgtgggggaaacccagcagctgggcagctagctccttcttctcgtaaacaaggacac

SEQ ID NO: 41036 - DNA, 205 bp, Mus musculus
  source 1..205: mol_type = other DNA
tgcactgatggtaatactttcttttaagtggaaagataaacaaaagcatacataaacagcctgagtatttttgtcccggccattgacaaagccagtttccgggttttcgcagctttaggccttattcttgtttgtaaaagaaggctctccccgcccgggtcctaggaggcggcgatcttcgccccctgcaggcgtcgccctcccg

SEQ ID NO: 41037 - DNA, 396 bp, Mus musculus
  source 1..396: mol_type = other DNA
ggccgggggagagccctctgcaggcagggagcagccgacccccgacttgtcgcaccggaggggctgggctcgccccccccgccccccccggggggggacagagaccaaatggggaaggtcgtccggggctcggtgtccccctgtcttgacgcaaggatcgagtgtcaatccacccagtatctgagttcgaggccagcctggtctacagagtgagttccaggacagccagggatcacagagtgtctttccgattttagcgctcttccagtacggtagctgtattccgcgaattctcgcaaaatcctagtaacagtttgaaattgtactagattttgtgtgcaaaagctaaatagagcagcatattagtcaccctctttgaaaaactggtgagactta

SEQ ID NO: 41038 - DNA, 406 bp, Mus musculus
  source 1..406: mol_type = other DNA
tgtaacactagaaattcaagttcagagaactggacactgttttctggcttccgcggggaccagggggggcaccaggtacacatatactgaacaaagcatttatacacatcagagtaataacttaataaaacaatttttcttagaaagaagtgaattgtaccagagcgacttgtaagaagcactctgtcattagaatggaatgtactttagtaataatgtattagtcccaggtaccctggaacatgtgcgtgaacacccaatcatcacgctttatgaaccagaaaggatcggccttactaagtctcaccagtttttcaaagagggtgactaatatgctgctctatttagcttttgcacacaaaatctagtacaatttcaaactgttactaggattttgcgagaattc

SEQ ID NO: 41039 - DNA, 336 bp, Mus musculus
  source 1..336: mol_type = other DNA
gcacttaacagtacttaaacattatattatacagtttatggtacaagtctctgaggaccttgagggtgtagaacattgttcccctcaatttcttcaaaatcacttgaactacttaatggctttcaactgaccttttaaaagcactttctcaggcctggataatggctcaggaaggagtcatacgacactgccgtgtgtgtttgctttcccctagggcaagggctgccggaggcgagcacgccaggatccaagcgtgcgctggcgcggaagcgcgcatgctcactgtgcccggggacgtcacgggcttctgggacactggctccgcggaagaagcgt

SEQ ID NO: 41040 - DNA, 281 bp, Mus musculus
  source 1..281: mol_type = other DNA
gtcagtgtcacagtgccacagtggctttgaggcagtgcattccttgctacattgtcatgaaaccctgtctcaagaaactaaaaaattgaaatcaatctcagatgctgtttttatcctgttatgatctgaatatgtacactgatatgaggtctgacttagtcaccaagttcccagccccatggtcaccgaaaggacagtacccttcctttcaagaggggctcttatagaggatctaggatctcgcaggcgcttcggcgggatgatccgggagctgcgcccag

SEQ ID NO: 41041 - DNA, 442 bp, Mus musculus
  source 1..442: mol_type = other DNA
tctgcactacctatggtgaactatggctcctcagttcttttaaaacttaagctgtagtaagagatcacatgctcaagtggcagatgtacgaagtgcttgaagttcacagctcttagtgccagagggaaacttccctggtgctacggttgcaaagtttacacacacacacacacacacgcgcgcgcgcgcgcgcgcgagcagcccccctaccgccccccagcctgccagggactgcgagcaccagggtcgcgcggcggctgcaagcttccagcgacccctgtcgggagttcccggcagccgctgggctccgccgcccctaggctggcccagctgccagaagaaaggggctgagccgtgatcgcccagctcaggctcctcccggtggcgtgtctgcgcctcgaggcgcctgcgtccaacttgcgggcaattgaaaaagagccgg

SEQ ID NO: 41042 - DNA, 661 bp, Mus musculus
  source 1..661: mol_type = other DNA
gatagagtctactcttgcttaggccagggccctcttgcctccgcggccacggccgccgccgctgccgccgcctccccttcgcctgcatcttcagctgcaagtgcgcagacgcccctgggtccgcactgcccccgctgccgccgcccggaggcccggctctcgcgctccggcctcggccggctccgcaccgcgcagctgccagccgcccagctccggctcggcagccccgggggtcccagccagccgacaaccaccgccgccgccgccgccagctctcggcccctccgccgccgccccccgcctccttccccgccgccgccgccgccgccgcgcgctctgccccccgccggagcagcggggcaggggcatcgcctgcggcgcccaccgccgccgccgcgcctcctgcggccgctgcctggattcgggcaccggcccgacgccgcggggagggcgggagggaggcggggagctgcctgaggggccgggcttgggaccccgcctccccagccgcgctagcggaaagacgggggactcgggctctgcctccgggcgcgccctgacggcagacagcgcgcggggacccggcgtgcgagaggcgggagggttgtgatttcccgcgactcacccagcggccgtcagctctgagcatgcgtgctgcgcg

SEQ ID NO: 41043 - DNA, 508 bp, Mus musculus
  source 1..508: mol_type = other DNA
agcaggtctgctctccaaaagttttgtcacaaaattgggccctgtggcccaatttccctctcaacccatctattttattaaaataatatcagaagccagtgttaataattcagggcataactgcgcaagcgcagtcagaagccccggctccaccccttgcacgtgcgcgcgtggggaagtggtattattattattattaattattattattattattattaatttgaggagggaccaggctggacttgaactccggatttcctccccagcgtcgagtgctgaggccgccgccctggcgctctgtggaaggccgcgctcacctcagcgcgggggttgctccgagggcctcactgaggtggcgtggggaggggggggcgccacacctgcgcatgcgcggagcagggcgggggggggggggcggccgggcttcccccgccccctgctggctttcccgcgctgcgccccgggagtccccgaggtgggcggggctcacagaggctccgccccc

SEQ ID NO: 41044 - DNA, 535 bp, Mus musculus
  source 1..535: mol_type = other DNA
aagagccagatctaagggtcttctcctcccgcgcagcacgcatgctcagagctgacggccgctgggtgagtcgcgggaaatcacaaccctcccgcctctcgcacgccgggtccccgcgcgctgtctgccgtcagggcgcgcccggaggcagagcccgagtcccccgtctttccgctagcgcggctggggaggcggggtcccaagcccggcccctcaggcagctccccgcctccctcccgccctccccgcggcgtcgggccggtgcccgaatccaggcagcggccgcaggaggcgcggcggcggcggtgggcgccgcaggcgatgcccctgccccgctgctccggcggggggcagagcgcgcggcggcggcggcggcggcggggaaggaggcggggggcggcggcggaggggccgagagctggcggcggcggcggcggtggttgtcggctggctgggacccccggggctgccgagccggagctgggcggctggcagctgcgcggtgcggagccggccgaggccggagcgcgagagc

SEQ ID NO: 41045 - DNA, 280 bp, Mus musculus
  source 1..280: mol_type = other DNA
aaaaatttaaaaatcatttcatggtttaaagagattagtgagtgagttcgaagtcagcctacgtgacataaacgtaaatacatcctttgttaaaagttatctttctgatatagctacgcaatgaattactgctaagagtagaaatttactcaataaatatttagtgcatgcaggggaccgtttctccgccgggccgcgcgagggcgctgctcccctcctcgtgcgccgggcccggcggcgccgcccactcgccttttcccggcggaaatgccggggcgat

SEQ ID NO: 41046 - DNA, 289 bp, Mus musculus
  source 1..289: mol_type = other DNA
ctggaactcactctgtagaccaggctggccttgaactgcagaacgtggttctgtagcactctatacagtttgtttaggacaaattcagtaacttacacatacttggaacttaagctaaattgccaagttgggaatcttgtgagaagatgcttagtaactagttagctaagaaccaaacgccctgttgacacaaggccaggacagggaccgtcccagccgaaggagatgacccgcgccgtctgaccgggcccctcccagcccgaggcctccggggcgagctcgcggaagg

SEQ ID NO: 41047 - DNA, 350 bp, Mus musculus
  source 1..350: mol_type = other DNA
ctgtatctatctatctttacacaattaatggtaaagccgcttggtcactgtgaccttgtaaatgttctcaagttattactacatttattacagggtactctaccagaaggaaaaatctgccttcttccttgatgagtttctctgtgtagccctggctgtcctggaactcactctgtagaccagcctggcctcaaactcagaaatctgcctgcctcaagcctcaacagactgtatagcattctgattcgtccagccccaagtgccctgacctgcacgttctcgccctcggtccacgcgctgcggggcggggacaggggccctcgggcgcggtgcttagtcacggcgacgct

SEQ ID NO: 41048 - DNA, 599 bp, Mus musculus
  source 1..599: mol_type = other DNA
gctggtacgtttcacggtggatagctaccggaaaactaacatttcacccccgagtaccaggggacgccatggtggtccccccaactccagttgtggccaagaagcggtcggcaccatccgctcgcccacccggaatccttcccgctttccaacccgaaagtttgctgtatggacgtccggaggggcgagcccctcctctcgggggctcggctttggagaacggctcggcggcgtggcgtccacgcgcgcgtcccctcggaagacgcgtcccgcttcggggcagccgagtcccacgcgggactcgtcccccttcgcccgccgccgcagtccctacctcagcgcccgcagcccgcgccgcctcccagcctccgcctcggccgcacgcccaccgcgggcccgcttcccgccccccgccgccgtcgcggcgcgcacgcccaacacggacctgccaagggggtcgaacccgaggcggccgtggtggtggcgttggcgacacagccccggccccgccctccacttcctggtgcggcggctaggacgctcgctcccagcaaccaccgcgacgccgctccgaaaaggcgcctgcgtcacggcgtgct

SEQ ID NO: 41049 - DNA, 329 bp, Mus musculus
  source 1..329: mol_type = other DNA
gttccggaggaatgccgccgtcttttgtcagggacctgacaaaaatttagttatacaaagttagtttctgcataattagtactaataaactacagctatgggatatttaaatactggattaacaaggatagtgggccaattattattatttgttgttgttgccaaatagttgaagtccagaagttgaattccaaaaaatatgacagatttattggtaatgctttccgttcttcccggcgcgcgctcagcacgccgtgacgcaggcgccttttcggagcggcgtcgcggtggttgctgggagcgagcgtcctagccgccgcaccaggaag

SEQ ID NO: 41050 - DNA, 420 bp, Mus musculus
  source 1..420: mol_type = other DNA
acaaaaatttagttatacaaagttagtttctgcataattagtactaataaactacagctatgggatatttaaatactggattaacaaggatagtgggccaattattattatttgttgttgttgccaaatagttgaagtccagaagttgaattccaaaaaatatgacagatttattggtaatgctttccgttcttcccggcgcgcgctcagcacgccgtgacgcaggcgccttttcggagcggcgtcgcggtggttgctgggagcgagcgtcctagccgccgcaccaggaagtggagggcggggccggggctgtgtcgccaacgccaccaccacggccgcctcgggttcgacccccttggcaggtccgtgttgggcgtgcgcgccgcgacggcggcggggggcgggaagcgggcccgcggt

SEQ ID NO: 41051 - DNA, 588 bp, Mus musculus
  source 1..588: mol_type = other DNA
aaatttttatttacctttactatgatttatctatatatttatagatgttataaatagtgatttatctatagatataaacaatatataaataaatagattatatatatccaatatatatatatttacccaatctcagggtctcagtatgtaatctggaactcactatacagaccgagccaactactcctttaattaaaagtaaatcttgattctgctatgattaggccaaactcttttcaccataactaaaaataattaaaaacataaaagctgtctatatcttaaaatttagaaaaaaaaattataactaaaaaaactaaaatactacttcttttctctcaaaaaaatacaagtgttcataactctagaaatcaagacttgagaacatattgaaaaaaaaaaactgttttaattttaagcttacttatgagattttatgaccatttcctgctaacattttactaaaatggttaacctgagcagttgtttcctaggtaactacctctagagacttagcactacacttcagagatacgttaaattttatagatgttcctatgaggtggcaggtgacatgtcagctgcatt

SEQ ID NO: 41052 - DNA, 501 bp, Mus musculus
  source 1..501: mol_type = other DNA
atatatgtatgaaatatttattcattttatagatttctctagagataaatgtcttgacagtcctgtattccaggaaggggctccccgccgattccagaacagtctggtgccggctgtgcgagtctgggggctcggtggtgggctgtcccgcgtgcccgtcacctttctgcccgggaagaaccgagtctcggcgggtattgccacggagggtgggtttgggtgcacacccgtcgtgagctctgagccccctctccaagcccaccgccgctggcccgcccagacgcctaggtccacggggttggagaaagaaggggcggcccgaccttccgcccgcggtccccgcggcctcgtgaccccggtgccgacccacccagcccagcccagcccagccctgggttcgaccgctccgccccgcgcccctcctctcgcggggggcttcgctgttctctgggctgcgtccggccgcgcacgtccagggagggcggaggggagaaagcgcgc

SEQ ID NO: 41053 - DNA, 578 bp, Mus musculus
  source 1..578: mol_type = other DNA
tacgcgcgcacgcgcgcgcttgtaaagacgtttaaaaactggatttgatgttcaaaagagattttgcgtagagtgaacttaacgattgtcaagcagaaggcgggtctctcaggccccgcctctcccaggccgtgccaggctctgcaatgcagagatcatcgctctagccaggctgcaaaaatcgatctcagctcttcctgagacccgggcttcacctccgcaggggcagaacccgtttctggtcggggtgtgggggcggagagggtttgttccgtgacccccacccatcccagcacgcctgcgcagactccattggggctgcgtgggggactgcgagaaggctgctcagcggtggctgcaccgtcggccctgcctctgatcaggaagagggaggcctggaagaagacactgatgctgtcatccttatgtcagtgcctgagagcccagggccggcaactatggcttttcctgtcacagtcttcaccagtgagagcaaaagcatagggattcatttgcattaatgtcttgagatatacatatacatatacagctgtatgtatatgcatgtatcggtgtta

SEQ ID NO: 41054 - DNA, 421 bp, Mus musculus
  source 1..421: mol_type = other DNA
aactctgagtaaccaagggtgaccttgagacttcatgcatgctaagcaagcattaagatatttcttggtgtgactagaaattgcttaattaagaaacagattgtttaaagggttcagagcaacactgaaacttcccccctgaaaagaagaaattccacctgttttccaaaaagtcctttcgaaatccttattatgccacctgggtcctacgtagcagtggtttcttcacatacacacgcatacgcgcgcacgcgcgcgcttgtaaagagacgtttaaaaactggatttgatgttcaaaagagattttgcgtagagtgaacttaacgattgtcaagcagaaggcgggtctctcaggccccgcctctcccaggccgtgccaggctctgcaatgcagagatcatcgctctagccaggctgcaaa

SEQ ID NO: 41055 - DNA, 363 bp, Mus musculus
  source 1..363: mol_type = other DNA
tcgagaccagcctggtctacagagttagtccaggatagccagggctatacagagaaaccctctacagaagacctgaaggaatctttcagattgaagagagaaacaagtccctctgaactctgagtaaccaagggtgaccttgagacttcatgcatgctaagcaagcattaagatatttcttggtgtgactagaaattgcttaattaagaaacagattgtttaaagggttcagagcaacactgaaacttcccccctgaaaagaagaaattccacctgttttccaaaaagtcctttcgaaatccttattatgccacctgggtcctacgtagcagtggtttcttcacatacacacgcatacgcgcg

SEQ ID NO: 41056 - DNA, 441 bp, Mus musculus
  source 1..441: mol_type = other DNA
ctcggtaaggacctccttgcgatgtccaggctaagcagacaggtctcaactagccgagagatggcttctcactcttgctttaaggaagtctcttttacattacttatccctcaaagaaaagattttataaaaatgtttcctttcacacttgcgtgacacttaacttcaataaatgtttattgaatacaaagcatatttttatctgtagatctcttgctttgcttataaagggcagaaaataaactaacccacactcctggaaaaaaaagaagtagttgagaagaggagttttatttttttcattgatttttctcattaacttagtgaagaaaatatagagcctgcaaggtacagcctctgagagtgacttttcaggaggggagagaatgcctgcatactttggtttccatggctcaggcctttctacatcctataaaaagg

SEQ ID NO: 41057 - DNA, 524 bp, Mus musculus
  source 1..524: mol_type = other DNA
aaaggctatttctgtaacatttgagacatctgtctcttcctcagaaatgaaaatatttacacatgggaaattttgtgttgcaaatatcttctcatgtaacacaggaaaggaagttcccctttacaaggagaaacttaaatcggtctgattttgtacagaaaaggagcgcagctttaaaatatgggggcagaaactacacctggttttgttatgctatgtgggaagcttacataaatatataggatctctgcggggcgcccccccccccacttccccataggaagcatctttatgttcacattatgactccatctcacgtgtcacagactgggtggtggcaaagacatcgcccgcatcttcacgagctccgcacgctctcttctcgagaccgcggggactccgggccggagctgccccgcacgtccccagctggcccccctcagccgcggaaggaaggacgccggcccggcccggcccggcctcgcgcgcccccacgcccccgcgcgagccgccggcggaagtgc

SEQ ID NO: 41058 - DNA, 601 bp, Mus musculus
  source 1..601: mol_type = other DNA
ttttttaagattaatttattttattcatacgagtacactacagctgtaagagggcatctgcaagagcagtcagtgcccttaactgctgagccattatcttgttttatttttgataacaaacttactaattattattcttattttttttaagcttaccgaatacgaggaccttgttatttttatgttatattaggtattcaacatgtacttgttgagcacagagaaacgtttttgtctgggtggttgaactgtgcgaaggtccatgctcagaaatcacaaagtcattcccttggtgcctttctgcctgattcccttttagtacatggtaactgaacatcaatcttaagcaagaaagattactggaattttgaatttaagtattattagattatttcctctttcagaaagtttctaacttctaaaactttggcagctttgcactgaacgaaccttccggaacatttggtaccacggtactgacaagtcagaaggtgtctgccccgagactccgcccacgcgacagcgccctgtctggtcccgcccacaaggcggtgccacgctaggggcggggccgaacgcgaccagtcacggacgcctacgt

SEQ ID NO: 41059 - DNA, 437 bp, Mus musculus
  source 1..437: mol_type = other DNA
ccccaagccctacggggtggcagccgcacagtgtcaggtttctcggagctgcaaagacctccacacggcgtcgccacccgtctctaccaggatcgccgcgctccggggctgaggaaggacagggcaccgcgccgcggctccattcacaaagtccccgagccgccggctcgcgggcgggtcggaggctgcctccagccagcaccgagacgtcgagtccccgtgactgggtgcgagggggccggcgctccattcacgagccggggtgcctggcgaggtagtaatgactcttccctcccccgggagagccgtggctggggcagtgcgtgcagctccggcggtgcagcggtgggggaaacggcggagcccacggagaggagccctctctcgatcgcttgccccgggtgccgcgcgcccgccagctttggcgccagagaagg

SEQ ID NO: 41060 - DNA, 429 bp, Mus musculus
  source 1..429: mol_type = other DNA
tgtcctgaggtttgttaatcttaaggaattccacaaagctttacatagggcccatcaaattaaaggtcattatgaactgttatgtcaaaaatggcttaaataagaacttcctgcacctgagaaagtgtgtgttttcctttataagctgacagaaaaagataatgtagttcagataattctgagctatgtccatgatctaatcagtattagggtataaattcaactctaacacacagttaggttatccttccctcctgtcccgtgtcagaatgagacgtaagagagatatctaacactgcatttaaaaatattcccaatgtgctaattataattattcttcagagcgtttgtatgcattagctcacttcattcctgcaaacaacacttttctacccttcggcaggaatcatttccgggtatgttggatcc

SEQ ID NO: 41061 - DNA, 379 bp, Mus musculus
  source 1..379: mol_type = other DNA
agctggaatccagagtgctgcaatccagtctgtcacccagctcagatggtggggcgggctgaagggtctcccctccgtggggcacgcgggggagttctccgacactttcagcgtgcagaaacatctcaggcaccggagctgggatggagcctagaggggacccccgagatcctgtgacactttgagttttttgtggcagaatctggagtccaaatacaagctcccggggcttcagtttcccgttacgaaatagacgcgagaaaagtagtgcggaccagtccctaatgggctcgaggcgagctccacccgggaacggggcagcccgcgtgggggtgctcgcgaggcgctgcccccatctgggctgtcccgccgccaagca

SEQ ID NO: 41062 - DNA, 318 bp, Mus musculus
  source 1..318: mol_type = other DNA
cttttctatggatactataaaacttgggtttaagacaaagaattgaaatctttttatcttcctccttttaatgaaaatgtttaaagacagcctccctggggtactgcacacacgcgaatgaaaatgatttttaaaaacgtccgcattggaaaggatgcaatcctgtagatttcagcgttgtggaatctagaccctaggagcagaagggcatacatagactatcgttgtcaaagcagcttctgaacttgcaggctctctcccgccgccgtcctaccgcgcgcgcgcggggagaaaaaggaggggacccgcccactgcgc

SEQ ID NO: 41063 - DNA, 394 bp, Mus musculus
  source 1..394: mol_type = other DNA
aggtttcacggctttaaattcggagattacttgagtatagatatgatctcaaacacggtcatttctttgaatccacagaatacggggaatgtcggattcaagatgtagcatgttgcatcaggcctgagatgtgctggctcaaaccaggggagctgaaaactaggcttctttaactaacttatcaaatggattaaaaggttctttaagctccttggacacccaggtccttaaattctgccggctctatagaggcttagggaggagtcccacatcagctttgaggaccgcatctggtgcgcctggcgcagggcgaagtccacgtcgccggcccttgcaactcccgccccaggggcggtgccgggaacaagcggcgcctccgccggtcacgtggggg

SEQ ID NO: 41064 - DNA, 649 bp, Mus musculus
  source 1..649: mol_type = other DNA
atgtcggattcaagatgtagcatgttgcatcaggcctgagatgtgctggctcaaaccaggggagctgaaaactaggcttctttaactaacttatcaaatggattaaaaggttctttaagctccttggacacccaggtccttaaattctgccggctctatagaggcttagggaggagtcccacatcagctttgaggaccgcatctggtgcgcctggcgcagggcgaagtccacgtcgccggcccttgcaactcccgccccaggggcggtgccgggaacaagcggcgcctccgccggtcacgtgggggccgctccaccgggcggcgctgtagcttcccgatcgcgctctccaagcgccggggacgcggcgctcgcgctcccgcccgagccgcggggaaacggagacaaggagacgccttcacctccggctccccggccctgcgcccgcagcatgcccgccgcggagccgagcgccgccctcctcctgcagctcgcggaggtgacgccgccggcctccggaccgccgctgcgagggtagcggggctggagtcggctaccgaggctcggcgaggcgggcggagctggaggaggagcaggcatcctccgcggcgcggcgggcggcggccctgctgcccggcgcgcccatggccc

SEQ ID NO: 41065 - DNA, 416 bp, Mus musculus
  source 1..416: mol_type = other DNA
ggcacccgggcccccaccccccgagcacatccagaccaaggggagggaaaggtaggtagctcttctccttgtccccttgtcctcggtgaggcaatgtcgaagcagggtggcccatcaggagcagcttgagccggggctgcacggctggctgcgggatccccttcatgcagacttcgtcaagcctacccgggagagctggccaaagttgtccggcagcacagcgatctggttgccctggagcaccagctcctccaggccatggagtctggcaggtaccggatgcggttattatccttttgagcctctgcagacggctgaactcagcctggaggttatctaacatgaggctctccaaactggccagctcgcagaagcctctgggcagcgtgccaagctcggccccgctaagccagtga

SEQ ID NO: 41066 - DNA, 496 bp, Mus musculus
  source 1..496: mol_type = other DNA
gttctgaacgggaaaaccctcttatccacttgaaaaaaaaacggtttgttattaatttttaaatgtattcactttacgagtttacaagactgaagagaaaactcttgagttaaacttcaggcagagcgtggagactttattaagcaagtctagcaaagtttccataatgcaactgtttggatacacgagcctggaaaccgtggtgcacacaggtcccgtgcatcctgagcgcaccactgtgccagcggtgagacgacactagcggcccgccccctttgtcccgcctacaagcgcgcaggcagtgcgagagagcgagggcggggcgacctttgctcgagccctaaaccatccgggcgggctggggtccgggtcctcagagtccgaggtcgcctccttgccaagtggccctggcgctcccgcccctcccacccggtagggtttggccttgggggccgcacctgggcgcgcggtttcggtctgaccggactcggagctg

SEQ ID NO: 41067 - DNA, 644 bp, Mus musculus
  source 1..644: mol_type = other DNA
ggccctgagcagtaacttcagtgcctggcgctggaggaagggaggcgactggctccctctcctgagagttaaaaaagatttttcgcccgaggaacaatatcttgaactccttgtatctcagccagtgactcacgcactggaagcggtgtaaacacaggtggaggacctgggtgccccagcatgattgaaggccggtcctccaggccaacatttgcattccactgttaaaacacatgaggagctgagcaggacctgaaatctctcagccagccctgctccagccggcttcctccctaccagggtctcctagggtcggctgggtggagggtactccgacagacacacctaccagagatcttccaagcagaactgcgctgagctgggattctggggggctcagctccaggtctaggggcgccaaggctcgggctgggggcggagcctcgctgtggcgagcgagggggcggggcgcggtgcggagttcctagggacctgggcaggggcgatcgcccgccctcctggactggggacgagcagagtggcgggcgcgcaggcccggcggggcagcctgcgggggtgcggcgggagcggagcgggcggcgtcacccgaggcggagggggcggagccgcgatcgcagctgcca

SEQ ID NO: 41068 - DNA, 236 bp, Mus musculus
  source 1..236: mol_type = other DNA
cccccatagattcgtttcagctccacccagtgtggaatagaatctcctcctggctgccttttgacttgggcccagctcatgagctcagagtaactgggccaaatgtccatggaaatgtgagacgcagaaaagctaacacacccatggagttgcttgggtttgcgaatcatatttattattattttattattattattcatgttgaagtgtaaaacaatcatttctaaatgtctttc

SEQ ID NO: 41069 - DNA, 454 bp, Mus musculus
  source 1..454: mol_type = other DNA
aagtacaaagaaccctgcctgtaactgtgttgttattaacactattattgcaaaaacaatgatctatatccattttggcgctcgttttagcaaaacattgcaagcgtcaggctgacaccagacactggaggtgggagacaggaaggcctgagcccagcctctggcgcgtccgggcgcggcgatcgcaggggacagacagagcagccacacggcttgggctacgccgcgcgcccgcgccgcgccgagccgactcggaggcgccgcgggcttgcgcaggcggtggggactccgctactctggcgcccaagcggtgcagctcggcaggaggtccccaccggagcctgaatgcgcgcggcctcgcggctgcattccaacttctctacggagccgcgctctagcccgggcgcgcgcttccgtcccgcgctggatagcccgggctgcgctactgaagagc

SEQ ID NO: 41070 - DNA, 401 bp, Mus musculus
  source 1..401: mol_type = other DNA
gaagccaactccaggacagggtgtatgctccagaggagaaaccattttgcccatatgaatgcgtttccatcagctccaaggtaaatttttatgaaaattgatgtggacttttaaacaccttccactgattatattctgtcccaagtttcaaaaatggggcttctgatgacataaggagccggcaactagctaagagctgtgaccatagttggggaaagcttccacattgcaggctttagcaagaaatggagctaaagcctccaagcttttgcctttaccccagaggccagtagttggcgacttttaggcgcttcccgccgccggtgggtggagtcagagcacagcccgaggccgcaacgtgaatcccgcccccgggggcgggctcagtaggaaggcgcggc

SEQ ID NO: 41071 - DNA, 396 bp, Mus musculus
  source 1..396: mol_type = other DNA
gctaaataaacttctgaagccttgcgaacattgacaaaagctgtagttacgactgttcattgcgacttctgagcagtctcagattacgttgtcaaagatatatggaaagccagatctgtacttcagaattgccttcaacaatcacggtaacaagatgtggatgttgggcgttttagaaacacaacaacatgtcttgtaaaagaagcaattggctcacatttcattcccaaaagtgtacaggaactgcctggtacttttttaaaaaatcttttgaggtgagtgtttggggtttatcagtaactattttattttaaaaactcaagctcccgtttaaaaaacagagtctcttgatctggggtcaggacagcgctacctgctcagctctctgctccatct

SEQ ID NO: 41072 - DNA, 328 bp, Mus musculus
  source 1..328: mol_type = other DNA
gtgtgtgtgtgtgtgtgcgcgcgcgcgcgcgcgcgctttagggtcatcacaatgtcttttaaaagccccttagactttcttaaagtggaattactcatgtcacaaaacccaaagtggtattaagcacactaacagactgccacaacatctagagatgaaggtatggatctgttttcaggagccttgagagactgtggagagaccttagagaatattgtgagtatttccatttttattctaaggcaaatctacaaacattgccctgagggctgaattaaaagctgttgaacgggctcctgcacgcatgaccggcccgcgttgccatgtc

SEQ ID NO: 41073 - DNA, 679 bp, Mus musculus
  source 1..679: mol_type = other DNA
atatttaagaataagggaaaataatttcttggtcttaaaaaaaaaaataaagtgctgcattttatgtatctatattagaagtaccttaaattgtgtagtttctatttttgtgtagtacaaaataattattcatatctttatatttttgatgctttctatgaaaaatagatgacttaagtaaataaaaataacaaatttctatgtgttaacttatattctgtaatatgcatttacatgaagttttcttattttaaatggagtgttatgagaaactatttttcaaataaatttataaatattacctgtttattaaaactcatgtgttgaaggaacaatatctgtggtttcattaattacttggagcaaggtgacattaatgtaattcacttgcattttcatgattctgttcacttctgtaaatataggtagataatataaagtcaaaaagatcatatagaatatctgtgaaccttttttgcactgcaacaaagttattggttcatattaatgaatcagtttggtataacaaaaataatggaaaaaagagaaaactttgtctgtaattggaattcataaacaattttctgggaaagaatataagcttttatgcactgcccatgtgataattaattgtttaatgtttaaaagaatgacgtcgaccacttcagtgataatttat

SEQ ID NO: 41074 - DNA, 411 bp, Mus musculus
  source 1..411: mol_type = other DNA
gttctgctatagtaagttaactaaatacaatatacaaaggactcacccttaaaaaatcttttctgagggacgaaaagtatatgtggtcatatttctattttttaaaaatacattctttttgaaataaaataatttacattgctctttttgaaatctgaaaacatctttatatttgcaatttttatatgccacaataaaaagtccaaatttacaacctgttagaatgaattcaaagaaacattttccagcagaaaacttaaaatatcttgagttgcatcgtggaaagaaatctttaacaatcctacgtctcatcatttaaaattagtattttaggtaaaagacgagatttaattgaatgcataaaaatgatacaggcaagcctgtgtctctgctagcaggaggaaaattgcg

SEQ ID NO: 41075 - DNA, 457 bp, Mus musculus
  source 1..457: mol_type = other DNA
atatattgtgtgaaattccaaaatataataaaagtatttttcagaaattaatacaaatattttaaaagaatgacctttcaccacgagaattaaacattgttttgaatacagaagtaagtaacttctctagctgtaatatcattgattcaggcaataaaaaaccactttagttattaagagagtcattgagtatagcaattccacatttaacaattaaatttcagaataatcaatttgttttgttttatactttcattttaattttataattttaattttacaattttaatttttatcatttctaatgaaatttcttttttatttttattaggtattttcctcaattacatttgcaatgggagccctgtgatccatccaatagctgactgtgagctgtgtttgctaggtcacaagagacagctatcagcaaaaacttttgtttatttatataagaact

SEQ ID NO: 41076 - DNA, 508 bp, Mus musculus
  source 1..508: mol_type = other DNA
gaatgttgtgatcactacatcaaaaatcacaagattgaaactgctgtcagatgccatctgtgagcactgtttgatatttacaatattgtgttggttagcaaagtgaattatttcaatgtgaatatttgctttataatggattccttaataattatatatatatatacataaatatatatgggtgtgtgtataatttatgcagttaaaagtactttcaatgtctttaggtttttcatcagactatcaaaggtgtttatcgtacaagagaaaaaaatcttattacgctctattcatttttgaatagaaaaatgttgttagtttctagatggtaaggacctcaagagaataatagggtccctagaccttctggtgcaagaaggcagcgggatgtcctcctgatccagatggcaggttggctcaacgggctcattgcacactcctgtgccctgtgtgcttagtgggcagcttcttgatgcttgcacgacgcgcgcgcacagagccgctttct

SEQ ID NO: 41077 - DNA, 476 bp, Mus musculus
  source 1..476: mol_type = other DNA
aattgtgagaaatactttgccctaaaatactaatgcaaattaaaataatgtgacatttttcactatttcagaggtgtacacatatgcacgtgtgtaagagaaatctcacattgtaatacagcagtacattgtagagggctttgagagaaacataaataattcatctgccaggtgacacagactgatgagtgtctctttaaaaaatgccgcattttgtaatggcaaaactatatacgattgcagttctacttttttcaaggcataaatacacaaaagttttgaaccatagtgtttctcaacttgtagaatataaataataagaaactttgatttgtacagttctgagggcttatcagtatttcatagtgaggtttttttttttttttgtctttttaaaagcaaatatgacttctttagtctttttgccttcatagaaaggatcccctcactgaggaccttctgttggcaaacctaga

SEQ ID NO: 41078 - DNA, 339 bp, Mus musculus
  source 1..339: mol_type = other DNA
cctgctttttctgaaagaaagtggagtattgtatgagataataataataataataataataataataataggaggaggggatatgttacatatttctttcagaaatattagttgtaaatcttaataatgcaatattgaatttttaagtgggttatactttaacgtcagaaggtaaatgatttactagtaagcaagagcatcattgtttaccttggttaaagatacaaaacaaaacatggtatctttctctacactgttcattttacaatgtcctttaaggaaagggaatgagttatctgacaaatttagattttgctaacttgtgcattgaatcacact

SEQ ID NO: 41079 - DNA, 371 bp, Mus musculus
  source 1..371: mol_type = other DNA
cactattgtagatagtattttttcattcatagcaaattataagaatgtgtgctatttgactattctaatgaatttggagttaagataaaaatgataaaagaaaagagtaatgcttgtacattttattagtgttttaaaattagtgagttaaactgtcaaagcgcaggctcccagcagctccaaggctgtaaatgagctcacatcaaaggtggttgtttgttcagcagcggctaaacaacatcatggttgtcccagagacaacgtagtataccaggttgttggctgagccctttggcctagtgcaaggaaagagttttaggctggtttaagatttcaaacaaaaccaacctccccccgcatatataccggga

SEQ ID NO: 41080 - DNA, 637 bp, Mus musculus
  source 1..637: mol_type = other DNA
ggactgctgtacactaattggcagatctaaagaagccttcagaatggacggtagctgcagcaaccagaacggtgctgaagtgcacagagacgtgcctggcgtggatctacgctgctgttacaggagctcgcagtgcttcctactcctccctgggcaggtggcacacctggcagtccagccctctggcgtcacctgcgcggtgcgcgcacgcgctcaggcacttaccgctccttggcagcagccaccgggatgggcagcagccccctgccgcggggcgggtcctcgagttccggggccgctagctccgaggggtcggctctggggtccccatacagctgccgaccagccccccgccagccgccgccgcgatgctcagctcgccccagcgtcgccgccgccacgccgcctccgcgacggccccctcgtcctcctcccggcaggagaagggccggcccgacatcccgggagccgtccccgcaggccgcccccacggtgagaggaagggctgctgaggggcgagcgccggcgacagccgaggcggcggccacaggaacctccgcagcgcagccatagcgggagctgcgggccgggccgagccgagccgagtcgcgagaagtcggcgcggtgctggagctcg

SEQ ID NO: 41081 - DNA, 568 bp, Mus musculus
  source 1..568: mol_type = other DNA
agctttaaggaagtaaaactgtattaatctctattaaagcaaaacgtaacacagcatatataatctgaaacttttcaggggttcctggcaccgttccacacaaaatgcaggcataactcagtcagtaaaagaatgatgaaaacccgttgtttcacatatttgacggttttattgaactgtaattacacatactagtagttcctaaaaaatattaacactaactataaatcattaagccagccttatggagtccaaaaatattcattcagaactgcagactttatgattgaagccgagcagggcacccagagcagcgcggcctgtcttggaggggcgccgggtcaccccgcagctcggctcctggagttccgcctcccagcggttccccagggttgggggtcccttgcccacagccgtggttacgggcgccgtcctctaccacggcgtggctggggagcttctctcgcccgtgcgctgcatcccacggcgactctcggggaagcaccgcccgggctacggaggaccgcgggtccgctccgagctccagcaccgcgccgacttctcgcga

SEQ ID NO: 41082 - DNA, 511 bp, Mus musculus
  source 1..511: mol_type = other DNA
ctgtgggatgtttgttctaactaccattagaatcacgttccagtggttttgacaaccgctttaaactctactatatgctaaatttagaatcaactttactcttagaatcacatggcgatctgggcacctaggtaggcgtactgatctcagccagtttactgggcctgggcgcctaaggacttggcgcaatcctccctgggcctggccggtgaggagtgggggggctgacgctcgtcctcctacaagcgcgtccccctccgatccgcgccctgggagtggcttgcggctggggagggcgggagggccaaggtgggcaccgggtcgccacctcgagcgcccctgcggtggcccagggcaagggcgcacgggtagccgagagtccgagggcgccgtgggagtccgcgtccggatccctgcacccgcccgagggcgcagcccgccgcgcagtgggaggcagcgaggcggggaccgggcggggaccaggcgggggcggagcggagcttcccgccgc

SEQ ID NO: 41083 - DNA, 740 bp, Mus musculus
  source 1..740: mol_type = other DNA
gcacacggtgtgtttgcaagcaggagtgactcgatcagccgctgcttctgctgctggagacggccggcaggggacccagccgcggaggatgacgcgctcttcgccaggggaaagagccagctcatcctcctcgggtccccgggcccgaggccctacaaggttctggcagcccagtgcttcccgggcgatcgagcacggcccggacggggtgcccaggggccgcgccgtctcccacacgccgcgctcgtgagtccctggccccgggggtccgagctaccactgcgggcggctggagaagggcgactcgtcggctggacggaaccccggtgtgctccgggccaccaccaccccggggtcagttagctaggcctggtcgccttgccggctcagctgctccaacgccggggcgttcgtcacctgcccgccccgcctcctgagggagggccccgcccacccggcgcccggcgtcatcaggccgcgccctcggcgggacgtgcgaggagcgacgtcgccgcgctgggccgagcgccgctccagctcccctttccccctttcgcagggcgagaggcgtctatggggctcccgccgccgccgccggtaccgccaccgccaccgccgccgccgggtgctagctctatggcgaggagatccggcgggggcccgggcgtgctggggcgcctcccgagattggcgcgcgcgatggcgcccgcctaagcgtgggggggctgtcaggggcgcgg

SEQ ID NO: 41084 - DNA, 617 bp, Mus musculus
  source 1..617: mol_type = other DNA
taaaaacactgagttgcaacagtttaaattttcagttcataaaactgttgggaattatctttccaactgtctcttagcatgttaacaattcgaaggcacccatcaacaggaggcagctgatggagcggcctacggattcgcacacggtgtgtttgcaagcagggagtgactcgatcagccgctgcttctgctgctggagacggccggcaggggacccagccgcggaggatgacgcgctcttcgccaggggaaagagccagctcatcctcctcgggtccccgggcccgaggccctacaaggttctggcagcccagtgcttcccgggcgatcgagcacggcccggacggggtgcccaggggccgcgccgtctcccacacgccgcgctcgtgagtccctggccccgggggtccgagctaccactgcgggcggctggagaagggcgactcgtcggctggacggaaccccggtgtgctccgggccaccaccaccccggggtcagttagctaggcctggtcgccttgccggctcagctgctccaacgccggggcgttcgtcacctgcccgccccgcctcctgagggagggccccgcccacccggcgcccggcgtcatcaggcc

SEQ ID NO: 41085 - DNA, 521 bp, Mus musculus
  source 1..521: mol_type = other DNA
caaaaggtgatgcagggcacgccttctttctcctccaaggggcagccaaggccttctcatccctgaggtcgcgcgtcctccgtgggcgagcaacgtggagagagcacggccgccttcattaagtcgctcggctggccgccggccaggagcagggtgcctattctcccaggtacaaagcggtggcgtcatcactgcgcgccgcgcccctgacagcccccccacgcttaggcgggcgccatcgcgcgcgccaatctcgggaggcgccccagcacgcccgggcccccgccggatctcctcgccatagagctagcacccggcggcggcggtggcggtggcggtaccggcggcggcggcgggagccccatagacgcctctcgccctgcgaaagggggaaaggggagctggagcggcgctcggcccagcgcggcgacgtcgctcctcgcacgtcccgccgagggcgcggcctgatgacgccgggcgccgggtgggcggggccctccctcaggaggcggggcgggcag

SEQ ID NO: 41086 - DNA, 497 bp, Mus musculus
  source 1..497: mol_type = other DNA
ttggtgccttaaagggaccttttgtgtctctagctgtcgtttagttacagctaggaaaagacagccgatatgtacctaacaccatcagtgaagtcacatggttatgtgagatgtctgacttgacagcactctgctgactgagacccagtagactatgcatactgcatcagggtgcagtcatggcagccaatgagggtataaagcttcacagattcattcaggccctctttgtgccttaggaaacagtggtgccacagtattaccgtgttttgatttttctttttttaaaaaaagaaaatatggggggtcagcctcctgagtggctgggattacaggcaaggcgcagagccgcgatctcaggcccgcgcaggcgcccagcaccaccggcgcacctggaggaggagccaaggccgggacccgcccacgcccgcggccgccgaagccccctccccgcccttcccattgcgccgcacgcgcgcgcgcaggtgcgtgaggcc

SEQ ID NO: 41087 - DNA, 303 bp, Mus musculus
  source 1..303: mol_type = other DNA
gaatgtgtctacaagttgaagtttattctcaactttctcctctagttatcttagatacaagtctctgacaccatttgctgaagatgcattttctcctatgcatattagtttataaatggatcttcaattctattccattggtcaatgtgggcttactgagcctcagttgtacatgggagtaggagaggtagttccacccccactgcccctgctccttattcagtactaaacagttagccctaatacatacagataacattgtatggacacaaaaggttgtttatgtaagattatacagcacat

SEQ ID NO: 41088 - DNA, 485 bp, Mus musculus
  source 1..485: mol_type = other DNA
taaaagatttctaggcccttaaagatgtcataaactaagtttattgagttaaggcatttactttgtgttctgatgtgatagcaaccatatgactcctttaagaaattatgttgaaatcatactgtagatactcaaagataatagacagctaatcttgtttttgtgagaaaacagcccacatagtcaatttaactataaaatttgtttgcatgttaattcgatgtttaaaatgtagcataatagataaggtatatttatacatagatataaaaatgtctctgaatcattcattggcctgaagaaaggtatagatgattactaatgtggattacttatagaagttttaagatgtgtttgaacttttttttggaacctgacttcatgtgctccacgatatggcttgatatgttcatattgctaagaggctctggttgctaagcaactggatctagtacttaaaagagagagtttatgttctcatgtag

SEQ ID NO: 41089 - DNA, 447 bp, Mus musculus
  source 1..447: mol_type = other DNA
cagaattcggagattcagaacccagtctgctcctgggctctggtgcaaagaaggaacatgtgcctctggctgggcaggggtgcctgaatcccctgggtaccaagggtcccagttaatctctagaaatttctttcattcaatagattgtgttatgtcatattccagattttgatatgtgccttaaattcactattatcagataaaatacaaataattatttccatctctctatactttagaagacttcaattctttcctactatattatttcttttaaacaatattctgaatgcacttcatctagaatgacatttaatgggccatgtagacaacacgaagttaacttactttgaaggttatgaatcatactagaaaatctgattattcatactgaggattcaatagaaaagaatgtggagaccaatattctctttgtcatgtaaagtc

SEQ ID NO: 41090 - DNA, 421 bp, Mus musculus
  source 1..421: mol_type = other DNA
cagaattcggagattcagaacccagtctgctcctgggctctggtgcaaagaaggaacatgtgcctctggctgggcaggggtgcctgaatcccctgggtaccaagggtcccagttaaatctctagaaatttctaatgacccattcatcattcaatagatggtatgtgccttaaattcactattatcagataaaatacaaataattatttccatctctctacattttggaagactttaattctctaagatgaatgcacttcatctagaatgtcatataatgctgatgcttattggactaggttttaacgaagttaacttactttgaaggttatgaatcatactagaaaatctgattactatactgaggattcaatagaagaaaaagaatgtggagaccaatattctctttgtcatgtaaagtt

SEQ ID NO: 41091 - DNA, 417 bp, Mus musculus
  source 1..417: mol_type = other DNA
accatgaattcattattttcaactactaattttaaggcctttatacattatttgaaatcactttctgataggcttaaatatgatactttttatttttagaaatttgtatcttcaatgacccattcatcagtcaatggattgtgctatcaattcactatgatcagatagactacaaataattatttccacttgtctacatttgggaatacagaatcagatagaatacaaaaaattatttccatttctctacatttggtaagacttcaattgtatcttttaaacaatgttccttgaatgcacttgctttatgttttacaatagtaataaaatgaagttaatttactttgaaggttatgaatcatactagaaaatctgattactcatactgaggattcaaaagaatgtggagaccaatat

SEQ ID NO: 41092 - DNA, 578 bp, Mus musculus
  source 1..578: mol_type = other DNA
agaaagtcctactttaaagaagaacgattctcattaaacctaggtaagtcttactagtaggattgaataaaaggcccttttacacatacaatgatattcaattctgtgccagggctccgattcatttttgtgttaaaatcaagagtttcacattgtgactttaatcttatcagagcacagaatgaaaaacctcgattgtgtaacttctgtttttgctggctaataccaagtatgtttctttaaaaacccataaccatgactatgacctgcctattcacgagtctggaatcttcaagttttgatcagaacgtgatactttttgtttattatgatcatatactactatttttatgttcccaattctcattgccaaggaaaaggggcatttcccctctgccacagcgggcaagcgtgtaatccacgtgcgcgcgcgccctgatggagtctctgcgcgcccgcccgccgagccgtgacaaacgctccaggcgagggtcgcgagcacgagggaggggcgggacggcccccgcccctcgctgccccgccccactccgccccgcccctccgcctctactcagagg

SEQ ID NO: 41093 - DNA, 386 bp, Mus musculus
  source 1..386: mol_type = other DNA
atcaaagtttcaaaatgagtttgaagattgtggattgttagaagaatgctaaatgggtttcccattaatatttgatccaggctggcactgcccacagctccagctgcagtctgagcagtgtgccccctgctgtgcattctgttagtgcaggacctcccttcacacaggccacagggataaccagtcggcctgtctgactctgttcaatttttgaaatttctaaggcttgaaagacaaattttgctttaaaaaaaaaaatgttccttgcttgtttcaagaatcttcccaagatgccagagaaaaactgaaaacgcaaggtgacctttttttttctttgtcaagaaataactctgaagcaaaaccatgaaagtaggtatccagctatc

SEQ ID NO: 41094 - DNA, 454 bp, Mus musculus
  source 1..454: mol_type = other DNA
tttttttaagtttatttttctaagcaaattcttaatagtgtgcactagtttgaagggatttttttttaactaagtaagaccaaagaatcttagtcatagaaaacactaagatgtataattaaaatactatttagaaaacacccagcgtactcggaggggttcttaaaaggcctttctaggttgctgtgagcccctctgactgcagacaggcagacctgcataagatgcgcaggttcatcaggtccaggactagatgcgctcttaaccaacaatattttttaatgcgatagcaaacccatttttttttttttttttttttttagtgcaagtaagagaacacagacgcacttttttgctaagaagcaagaccctaccagagaaggtggactgattcctgattccatcatccattacacaggggaaaaaaattttttttaatcttcttttttttccc

SEQ ID NO: 41095 - DNA, 401 bp, Mus musculus
  source 1..401: mol_type = other DNA
tgcaggataacctggatatatatatatatatatatatatatatatatatatatatatatatatatatttttttttttttctcctctcatggctaaggtaaatgaacagagctggggctatgcccaatccaagcttggcttaaataaaaatatattacaaatatataaaaaggtaaaaaaagtgtgctctattattattactattcttattaatttttttcatacaatacaactctcaatattaatttttaaaactaacgcagggcctgctcttctgaagaatagattttcataataaagtcctttccgatggtaggttagccagacgcaaacctacggaagtctttgatagcctcacactgacctacttcctcctcctctgggtggaggaggtgctgggca

SEQ ID NO: 41096 - DNA, 433 bp, Mus musculus
  source 1..433: mol_type = other DNA
cagcaactgaggctcagagactgcattgagttaatggcaaaggacccatttcagacaggtcactgaatgcagaggctggtctcaacatagtattagtatgttaattaaaattaaagagggttattatttttgtatgtattcattgtttaaaattttaaaggggtgggggaaaaccccaaagggtttatgctaacaggtaattaattctctgaaaatatgactagcatctttgtcctactgtgcaaattaaaagaacaaaagagtttgtgacacattccataatatcacaccctgggttttctatcgaacagccatgttgaactggccactgccccagtagcctgtctgacacaaaaggggtgtacccgcagagcctgtctagtggccatgcgtcccccttacagattaagcgtgcacgtctgccagtctttct

SEQ ID NO: 41097 - DNA, 356 bp, Mus musculus
  source 1..356: mol_type = other DNA
tgttaagattcataacagtagcaaaattacagttatcaaagctatagtaattgggtgtgggtgtgctcgctcagccccacagtgaccctctgtgggttgccatcctctgacaggacaaggcatgggtaccgagtctcagaagcagcagaccttttttagtgtggctctcaatacatgagaattagagttgacaatttgacaaccttagcacagtaaaaaaaaaaaaatgctgtttattttaaagattggaagtattttatgtatatctaggtaaagcacctgggaaagtgcccagggggaatcggttcatttctttctttctttatttagcctagctaataaatagacattaggca

SEQ ID NO: 41098 - DNA, 350 bp, Mus musculus
  source 1..350: mol_type = other DNA
gaaatagttacaagtagagctatatatttttttaaaaatgtctttggggatacttgaggtgactgttaaatgcaaactttcatgttaaatcacagtcagttgttggccaaagacatttttttgcttagccagccagggttagccgtctgagataaccttggacaagcatataaatatatttggaaggcactgcaaatcgtttagtacctaagactcaaaatgactctgacttcttaggtggccttttgccccaggcaagggttttgatttatgaacttggtatattttaaaaaccccattggatttttagttactcaaataatttgaggcttgaaggcccacctttaatc

SEQ ID NO: 41099 - DNA, 330 bp, Mus musculus
  source 1..330: mol_type = other DNA
gcttttatggtcatatttcatgttttcatatctgaagttctcaagaataaagaaaattttcatacctaagaaaaacgcagcctctgttatctatctgtaaggcaaagtttcagatggctttgacttttagtgaagtataaaattctaactataatcataaagatatgtaatagtggtggtggcacacccctttaatcccagcacggcaggcagatttctgagttcgaggccagcctggactacaaagtgagttccaggacagccagggctaaaaaaaaaaagtattggagcttgccctccagttgtttttttttagccagagtcaacttt

SEQ ID NO: 41100 - DNA, 494 bp, Mus musculus
  source 1..494: mol_type = other DNA
tgctttttccacgtagttttatatatgtatacacacatgcatacattaaacttaaaaaaccttatattaaaatatgcttagtaatttcctcagtttgattcaagaacaaggactttggacagggaattctggctgcgaggggacccaggaggagccaatcctccctctggctagctagcctgtccgacggtcctggggccccaaagttgggcttggcagagcttagctttcccacggggtcgcgcgggacagccagccaagcgcgcagtcagcagcggtggctttgcgacacacgtggcaacaggtgcagcgcgatccaggacgtacgcccggggcttgtggcttaagccagggagcccgacccggctggcgaccgtagtggagctccgcgggagtcatcgttgggctctaggagccgccgcgggcgaggggcgaggccacccagcccaggatcctccgccttcgctcctccccctggcggcccggggcgggga

SEQ ID NO: 41101 - DNA, 519 bp, Mus musculus
  source 1..519: mol_type = other DNA
aaacaatttgttggtaattgtgtagcaatttattgtggaaaaacagaaacctattctttctcaattacattattttacatttaaaaaaatcctattttagacatttagaagctgtctaaaaacagaatgtgtatgcatgcaactaaatgaaagccttgcaacttaaaaaaaaaaagttttgttttgtgctgtttttatccatttattaaccttaacacagcgaatataaaacttctttctaccaacaaagtaggggacagcgttccaagtggcaatgaccactgacaatcttatttatgatctaaaattaggggttagattgtaaaggctcatcagttcagtgccagtgagtgggcaaggggcggtacgtgactccacggaaggcccgagcgtcacgtgactcaggtcaccgcacgcccggagttcgcactgcggctccagccccggcgagttctcgcccccgcgcagccgttgccgaggagaccgcgctcgtctcgcggagcgttgcgcccccccccc

SEQ ID NO: 41102 - DNA, 415 bp, Mus musculus
  source 1..415: mol_type = other DNA
ttttacactgagaattaaaataggattttaatggtcctgagtgagttttatagaagcatttttttaaaagcctccaaactgaaaatgtaaatctagaggcatttttttttatggagagccttgtccaaggtaaaagccaagcaagtatttcacttttatctgcttttcaaagtagactatgaagtacgtttaggtccgctggacaaactaaaatctaaatcctaggatttagcagtgtacccgagagattgactcacttggagccagccttcggcccccgcgctcccccgccccggggtgcggctaaggctggacgaaaccactgcgtggcgtgctgggggcgcagcccctctcggccctgtgcgcggactccgctctagggactcggcccggcgcctgctgctggtggaggtgg

SEQ ID NO: 41103 - DNA, 332 bp, Mus musculus
  source 1..332: mol_type = other DNA
ctctcttgtccactcagatgagcgtactaagtgtgtgtctggattccagccagatcacacattttatatttgtcaagtgttgacaattctaacagcattcatgtttctttcacaaaaaccaaagatcacacagaagctgtatcagcggtgcattgtttcagtattcggtgtggagaccaaagtctcttcagtagttagcaactatacattgtatcattcctcaattgtttcttgtgtgttactcatacacaatacacgagtaaaacatggttggataccttccaacgctgacgtgattggaccctccacggccgccgtagtgcatcggaagc

SEQ ID NO: 41104 - DNA, 336 bp, Mus musculus
  source 1..336: mol_type = other DNA
cctgcaaatatcatatatagatcaccatacataaatcactgtactatacatttatatttctagaaggtgaaaacaagcagcaactatatttctaccaagataggattctttctaggtaatcttcaagtgtcacttagctacttttcatgatatagttctccattaggatgaatacaatcaaacaaatgcacagagtacttgattactgtgtggaaagcttaagctttggtgaaacaaatagctctacaatttttgtgtggtttccactaagtaattcattttctgaaccccaagcttaaatttgcttattatatcagatactagcatttagcatgt

SEQ ID NO: 41105 - DNA, 389 bp, Mus musculus
  source 1..389: mol_type = other DNA
ctcatggtctgcattcctattaatgatcaccaaaaaagtacctttcttttgttttatagtttttaaatttgcttttaattaccttaaggaattaaaaaaatacattttgctttgtctgtctgtctgtctgtctgtctgtctgtctgtctgtctgtcttttaagctttttactattattattattatataaaattcgaggatgaatgtgatccaagctgggtaggaactcacctctttgagatcacacccaaggtctgtgtttagtgttttactgaagagttttcagacaactgtttagaaatgtaaattaacctacctaggagattcaaaagtatctgaagccacttctgctgcttccggaccaatccggaccaatccggtaataaagg

SEQ ID NO: 41106 - DNA, 404 bp, Mus musculus
  source 1..404: mol_type = other DNA
gtggcattttttaaaacgcctaaatgaagtgttctggaaacgggatgacaggaggtttatcctacttccattcagaggaatgagagacacttcataaatagtcaaaatttcatcagtcaaaaatttttttcgatctcacaactgaattttattcaaaagaagaaaaataaattacagaaaagctcaggttaaatgtaagaggatcttaaatattgcgtatttatacgaaccattaaatttcactagaccgtttgtagtcagtatgacccacgctctcaaagtgaggctttgcgggaatccagcagtcacattaatgctggaaaaaagtctgtaacagaggctgggtgggtcacctgaagggccaggggcccgcccacatccgctcggagttagttactccgtaa

SEQ ID NO: 41107 - DNA, 510 bp, Mus musculus
  source 1..510: mol_type = other DNA
catttaaatttgtaaatagaaaatatccaatacaaaaatgaagattacatcttcaggagctgtttgcagaaattattgtcaatcactacaggttattactaatgtttttggttacaagctacaactaatcataagacataccacatacttatggcatataacatagagaaatctagatgatagtaaactggagacttcaatcttcaggcaagctttcatacatatctttaaagtaccttatttgcttccagaataaagatgataataatcttactcagatgtcacatagctatgccaagctatagttgtatgacatggacaatgcatctacatatggaatggtaaaaccaatggcagacaattgaattcttaataatatattttaaaagaagtggaattatttttcataatgttaagtgctttgagtattccttattatggtcaatactaaataaaatggaacagtaataataaaatataacagggagttctcatggttttatcatgagt

SEQ ID NO: 41108 - DNA, 464 bp, Mus musculus
  source 1..464: mol_type = other DNA
gaaaggaaaaaattggttttccttaatagagtaaaactgtattctaaccccacttactcatttgtgtgcacatatgatgatcacacataataggccaacagtaacttgttattttgctttgttttaagacagagagaaaacataaattataaaatgcactactccaagattggtgtagtctcagttattggctattccactgccaaagcatatactagcttgaatagcagttgtatgacatagacaatgcatctacatgtgcaggtgttcaatgtctctaagaatggtaaaaccaatggcagacatttgaattcttaataatatattttaaaagaagtggaattattttccataatgttaagtgctttgagtattctttattatggtcaatactaaataaaatggaacagtaataataaaatggagttctcatggttttacagtaaatgagattttcggcttct

SEQ ID NO: 41109 - DNA, 513 bp, Mus musculus
  source 1..513: mol_type = other DNA
acatggcattcatgagatcctgggcatgctgcatgatgtaagtgcatgtacatgtgggttacgtagctgcataatggccccatataaatcaaattttccaaaattcagcaactgtagttatgaagaaatgttttcagttgttaccaaaagaaattgtttgtatgatattccagatatactaaatcctgtttacaagatccatgctatagcagcgactgtgaaacctgctttgttgccaagattgccagttccttcaaacaggcactgtgtggaacttcagctgagtgtccagaagatgctataaaatgacatgtcatgaacgtttgctatatggaaatgaacaaactgggtgaccatttcggtaactacatactgcattgaactcacttcagtagtactataaacatatatgcattgaaagaaagtgtgtcagtaagtctattttgtttagtaactgttcagaaagtctatgcaatatgcaaggtgtctgcaaccactgccattgtgatggtt

SEQ ID NO: 41110 - DNA, 422 bp, Mus musculus
  source 1..422: mol_type = other DNA
ggtaaaatgtcagtgctcagagatttgctgcagatggtaatggttactgtaattcctttaaatagctttgcagtactaagtgagacaacttaattatttttatgaagaaataattccaggataaatttgtgagatcagattacaagctatcattacatatggtcctgtaaggttataagcttccaaggcttggtgagtccatccttgactacatgaaattatgtctcaaaagaatttttcctgccagaaaattaagtttatatgatttcttttttcaaaaactgatgtctgtgtttggcctgaagacgtaagtttaacaatcaaattcagggttaaaagaaagatagctgtcagacattcttctaggcttgatgcataaggcttatatttacaatttattctttttcttctattacaggtgg

SEQ ID NO: 41111 - DNA, 490 bp, Mus musculus
  source 1..490: mol_type = other DNA
attttacttaatatgatttgttgagacaggattgacacattgtttaattttaatacagattttaatattgtcatgtctcactctttcaaagggactttggaaatgcttaggatggagagcatgaaaatttaagtgttcaatatgagaacatcatatgttttttctgttttcactgatagtttcaaaagaacatatacacctgtcatctgcaaatatttacattttgttagggtgtgatttaatatcattattactttatttttacacatcattgactattaaagttgatgagttagattctattttcatcttcattttcatccagggcatctagtcctggttaggattcaagttcgtgaatcgaggccttcctccacgtgtctcaccgagtctcgccacacgggggcgcaacgtgcacgcactgtgggacctccgagtccaagttgctgggcagtggacagcaggtgtcagcaggcggcagtggccaagt

SEQ ID NO: 41112 - DNA, 236 bp, Mus musculus
  source 1..236: mol_type = other DNA
ctgagtcagctgctgggtggagcctctcagaggacagacagaatcaattttgggtcaaaagttttgcaggctacatgaggtagcctctttaggtttgatatcctcaatgctgtgaatcccaagctgcagatctaaataagattcaagcatcagtattccaacttctaaggcacacagacaacctcagattcttttgtgtgtgttgcttatttgaacaaacgggtgaaagaaaacac

SEQ ID NO: 41113 - DNA, 461 bp, Mus musculus
  source 1..461: mol_type = other DNA
gattttaggctttaaaaacatgcaaacctattagtcatttatctcttcaatagattctgggttagccaactgtgcagttagagttgaatgtgcaagcctggcatcagggtccattgcaattacattgatgatttgagcctccagaggcaatttgttcccaaacacaattacagtcctggaaaagattctacgggggtagtagacccggtgactgggttaacatcctggagcctgggtctgcagggtctggccggatactggaatttcctgagacccgtgaaaagtaatgtttacatcactcttcttcacacggttaatgtgaaaagtctaacattcctcaatgcgaaggcatttttttttgtgcacagagaattgttcccatggattcttctgcaaagggacccattttggtgaaattggtaacatattaaattgacaggttaaacagttgaaactgatgc

SEQ ID NO: 41114 - DNA, 320 bp, Mus musculus
  source 1..320: mol_type = other DNA
aaatgagccccagtgtgcagtaggcaagggcacttctcatcctgccctttggtaaggacaatgggggtagactagctagtaaataactttgctaggtaccctgaagcaggggccagagtgtgtccggtgcccctgggcaaccggccctgccctagggcagcaactgatgcaggtttgcgcaagggctagttgaatttagaattccaaaaactgccttcatttgaattttttaaaacagactgcttatgagatgctttcacgtgcattctgaacttcagagctcagaagtgctttccccgccccctcggaaagtttgtccc

SEQ ID NO: 41115 - DNA, 404 bp, Mus musculus
  source 1..404: mol_type = other DNA
taggtctatacgtttgtgatatattgatatttaaaagtagatatctgggcacacatacagacacacatgcatgcacatgcatttgtacatacactcatatgcacacacatccccaggggtggctacatagtcagtccctgaccaacttggagaagcagagactacacagcaaaggatgctctgatcttgtgtattatcagacctaaagctctgattaatcttgcatttactagatcgaccttgcatctcattgatgctggcaggaaggatgtgaaatcaaatgtggggttggctcagggagaccaccaaatcctctggtctctggatatagaaatctgatctgcagaagcagtggccagcttttccggaggtcctggccagagagggcgggaaggggcggggag

SEQ ID NO: 41116 - DNA, 530 bp, Mus musculus
  source 1..530: mol_type = other DNA
atctgtaatgaaaagaaaactgacttcattcccttgcaactccgtttctttaaccagttggagtcctcatagctaattgaggaagaaggagtctgcttgagtaagaaaggctctttgtgacacccacaggacccatttcctgctggaaaactggatggccatttttacctaagagattaagttcgactttactcattttgcaaagaagataaagcgaggtaagtgaatggctttcactttgtttcgaccagcactctgggtctctgggcggcagtcccaacctcagaccatgcactgcgcatatcacaggtttgcaaggatctgaaacccactgcagagggcttggctctgaagccagaaacttactgacttccagaattctgcccccaggcggcggccggttccatttcaatgaatcccaggaggcccttaaaaagaaactaaaaaagggtaacagtttaataacaatttaactgtttcgcttcaacttaagtttcactttcaggctgaaaggaaatgtgtgatttaaa

SEQ ID NO: 41117 - DNA, 417 bp, Mus musculus
  source 1..417: mol_type = other DNA
agccttattgctccagagctcgtctaagggcttatctcagtcacaacctgagatagataagtatctgtttttttattgtacttcaagaacactgtattacagccattttcaatatgataggtagaaaatgatgttccaattatgttttgaaaagatcattaaaagtgtttttaaatgttgtcatagttacaacaaaccatagctcagctcatacatatataaaatcaaagtaggtgtaatgccatttgttccacataagatatcttgacatcttcagtgatggacagaaaacttctcacatcaaagatcatgatcatgagcatggtatatttgaacttgtcaagtcgaatgagttccagaacattctggaaccgaaggtcctagtagctcctgggcaggctgtggacacagcccact

SEQ ID NO: 41118 - DNA, 407 bp, Mus musculus
  source 1..407: mol_type = other DNA
gaggtcattaatttacaacctcctggggcaatttgcaccaggatacaaagttacgactgagagctcaggcactcccctctcttggcttcaagacaagaagatcaggtattacgtttaactttttttttaaaactaaataacaacctggattgctcatctgtaatgaaaagaaaactgacttcattcccttgcaactccgtttctttaaccagttggagtcctcatagctaattgaggaagaaggagtctgcttgagtaagaaaggctctttgtgacacccacaggacccatttcctgctggaaaactggatggccatttttacctaagagattaagttcgactttactcattttgcaaagaagataaagcgaggtaagtgaatggctttcactttgtttcgaccagc

SEQ ID NO: 41119 - DNA, 441 bp, Mus musculus
  source 1..441: mol_type = other DNA
gaaaattttaaatgtgtgtggccaattcactatcttcatgatgtgtgtgttcatttatatatatatatgcatgtttatgtaacacacatatataacataggtatatcatatatacacatatgtgtatctatatataatatatagtataaatatgtaatatatataaatttacatatagattattatgtttaaatacctgaagctcttgaccaattcatacccagtatatgtaaggctgtcaaaggtatactttttgaaagagataccttgataaaggcttaagttcttttatcgtagatttttatgtttttttatatcagtactttgtaaaataaatgatattgtaaagacctttcatgtaagcgattcataacacattcttgaggtaggtagatgattccctaatgggcaattctctgactgtatccctaggggaaatat

SEQ ID NO: 41120 - DNA, 470 bp, Mus musculus
  source 1..470: mol_type = other DNA
ttaaattgttaatgacacatatcaagatgtgaagggaatgattatgttggatccttcatttgatttttttatttaagtattttaaaaaataaaactaaagtataaattgcattaaagggaattttcgatggaaactacaatagaacttttaaaagctctactttaaactatgtgatgtataaaaatattaaacacattctatagataaatggatcattcagaattactaaattatctcatctgactagactatttattattttgaccacatataacacacaagtcagctttctttgaattaagttggaaggtcgaacctggtttcacccatggttccaattagcgatatgcatattattaacctggatagagaagccttgatctcacagtgtaacactgaaaaaaatgatgagtttgatttaaaaagacatgatcagccgttgctatggctacgaaaagccagtggaacc

SEQ ID NO: 41121 - DNA, 332 bp, Mus musculus
  source 1..332: mol_type = other DNA
aaggtcgaacctggtttcacccatggttccaattagcgatatgcatattattaacctggatagagaagccttgatctcacagtgtaacactgaaaaaaatgatgagtttgatttaaaaagacatgatcagccgttgctatggctacgaaaagccagtggaaccattgcagccacgtgtgcccgcaagctggcacgctcgcgtgtctcgggaaagcaagcctgccctgcacggctatctctgcagctccccagctgagagaactcggggttctaaagggaggggtcgccctctgccagcacagattcccaggctgttgcttatgagctgcagg

SEQ ID NO: 41122 - DNA, 321 bp, Mus musculus
  source 1..321: mol_type = other DNA
caggaatctatcttcatggaatcaaggctttaaaaaaatattgcatattcacttggaatagccgttagttttttgaaacaattggacaggtggtcctggacagcaggctgagctacccagtaagcctttccttcagtcttggtaaaaggagactttgattctgttttcacttattcttgcagcctgagtacaataaatagaaatacaacttctagattgtggttattcattctgaaaaccaaataaaagtccagaagcctatagcatagttaaagtggacatgtaggtgtgttctagaaagaaaccatttgcctgtggtct

SEQ ID NO: 41123 - DNA, 314 bp, Mus musculus
  source 1..314: mol_type = other DNA
ctttccttcagtcttggtaaaaggagactttgattctgttttcacttattcttgcagcctgagtacaataaatagaaatacaacttctagattgtggttattcattctgaaaaccaaataaaagtccagaagcctatagcatagttaaagtggacatgtaggtgtgttctagaaagaaaccatttgcctgtggtctgatcacggttggaccaaggtacagtgttccttggcagttttcctcaaaatttcaatgaatatttgcacaatgaagtccgcctcccccccccccatggagtgggggtggtgaaacgggc

SEQ ID NO: 41124 - DNA, 427 bp, Mus musculus
  source 1..427: mol_type = other DNA
ttttggctgcagcatccagagaggcgtcctgactcttgcctccatgtattaaacagccgtgtccaacatgcagagtctaagcatgctgccgcctgcggccatttctgtatgaacatatattttaattatagaaatactcgactttttttgttttttatgctgtgcggggcgctgcacagaaacatttcattttacctacaagtacaataattactcctgtttttacagccgaaagaaatgaagagttttattttaattgaaagcatagaggctgattgcttttaacttcccagtaaagtgcaccgcggggagaggtctgggcgactgcacccagctgggagcgcctctgaccaggcgctgtctctcacttccaaagttggactccgggacagcattcccagttaggtcgcagccccaggagctaagt

SEQ ID NO: 41125 - DNA, 610 bp, Mus musculus
  source 1..610: mol_type = other DNA
aaattaataaatctttaaaacttaaaccttttctactaaaggtcatttttctgatagattaactgagaagttatcctaaaataaaagtagatttctgctgagaccagtgcacagattaaaattgaggttaacattgcaaacacttatcattttgacttagtcatctcatgaaaatctccaggtgatttctatgtaattagagttgtcacataatatttcattgttacattaatacccagcatttgatgaactatattattttctttagaatagtggtttaacagatgtattaggctgaaaaatttaaatgtattaaagctgtcgctcatgaacattaaaccatcataagccaggtgtaatttattaagtaataaattattacatcatagtggctgtcaattcctactcacagtgatttaaaattcagttctcaatgactgtatattctatctgagataactgattttgcaaaaataagtcatatgtatttattgaaaacttttacttaaaagctcgtgttttagtgtacaggaaaatcagtgcacttcatataaatgaacggaaaagggtgggggtgggcagggctccccccccccccgacctccgttac

SEQ ID NO: 41126 - DNA, 298 bp, Mus musculus
  source 1..298: mol_type = other DNA
cagctatttatttaagtggaagcagttgactagacttaagctgaagattatcatctgcggttaaggaagttaggtctatcttttcaaaaccaaaagttcttttagctagcttctaaagaactgacccggagagtcgcatgacccggtgctgctggtgaccagatcaggagcagctccttttaggggcctggagcaagcaagggtcgtcccggaagtgacgtcacgcccgccgactgcgggcgtgcgggttcgaacgttccgagggcctacagtagcacgttgggaaagggttctcccg

SEQ ID NO: 41127 - DNA, 427 bp, Mus musculus
  source 1..427: mol_type = other DNA
aaactctttaagtaaaacttacaaagtattcattcacacatttagtaggaaaacagatttaaaaggcataaattttggtttataatcaatcgtgggattctacccaagtagaatatggcaagttcccttcaaactcaataaattcttttctacgccaggaaaaaaaaaaaaaaagataaatggactgattgtctaagttattccctcgaccctgctccggtcggggatcactccacagcagagcccgaagagctcgaggccacgcgcttggccggggctccagcctagagcgcagcagcagaggcgcgcgccgcacagttccgcaagctgccgctggcgcatgttaggccgcgttgccgtgggaacgggagaaccctttcccaacgtgctactgtaggccctcggaacgttcgaacccgcacgcccg

SEQ ID NO: 41128 - DNA, 203 bp, Mus musculus
  source 1..203: mol_type = other DNA
ttagttttttatgataaacaacagaatgaatggacagcattattaaactttttgttgacatggcagcatccagacaggcatggtgcagaggctgctagaagactggctcccaggcagctaggactatggtgacgaagcaaagccatgacttggtgaagcctctggagcagcatatgagagctcacatcttgatcaagaatttc

SEQ ID NO: 41129 - DNA, 386 bp, Mus musculus
  source 1..386: mol_type = other DNA
gctgtcagcagatcacatcactaacattttcttattattcctaataaccggagtgtgccacctttgggagagcatctcctatggtaaaccctccatccccttccaaagcatcctgcggcgcgcgcggcggcggaggacgtggggcacggctcgcatcatggccgccgccaaagcgcaaaggccagcacgcgtgctgcggccgcctgggcttcgctcccaacagggcggacccagggggaggtcggcctggccaatcagctggcaggccgcgcagcaggctccgccccctccccgctgggcagaaccaggccgtgggaacgctcccaggctggggagcggcggggaggagccgcggccctgcaggttcccgagagctttaaattctc

SEQ ID NO: 41130 - DNA, 297 bp, Mus musculus
  source 1..297: mol_type = other DNA
aaaggcgctgtcagcagatcacatcactaacattttcttattattcctaataaccggagtgtgccacctttgggagagcatctcctatggtaaaccctccatccccttccaaagcatcctgcggcgcgcgcggcggcggaggacgtggggcacggctcgcatcatggccgccgccaaagcgcaaaggccagcacgcgtgctgcggccgcctgggcttcgctcccaacagggcggacccagggggaggtcggcctggccaatcagctggcaggccgcgcagcaggctccgccccctcc

SEQ ID NO: 41131 - DNA, 373 bp, Mus musculus
  source 1..373: mol_type = other DNA
aaagatttatagtatgtgtgtctgcatgcatatatgtctctctagagctggagctacaggtggttgggacccactcaaggtggcttctggaaccaaatgtgtgtatgtgtatcactagagagatacatgtgtgtacatgtacactaggcacatgtgtctagtgactgaataaacccagtaaccagcaactttgttttttctagcagagatctgctaccatgctgggcccattaactttgtatatcaaggaaaggacactttaagaacctttatttcaaactacagataaagaaattagctcttaattacagacatttcagtgatgtaagtatgtaaatgcagctttccaatcacacaaagcttctcttaagaa

SEQ ID NO: 41132 - DNA, 254 bp, Mus musculus
  source 1..254: mol_type = other DNA
tgatttgaggtctgtgtcagtgtgacaggccgatattgactgaatggttcaaaataatggcattaaacagagttctgcccttgaagcatcaaggggccccctctcagagacacggtgttccctcggctcgctgggcccccaatgccctctgcaaaggagggggatggagaggggctgtccagggaccagcccagccaatgcgcgctgcgcgctcgccggggtccctcctcctctcgcgagacgccgagccgggg

SEQ ID NO: 41133 - DNA, 563 bp, Mus musculus
  source 1..563: mol_type = other DNA
atgagctcctggataatgtaaatttaattgcatcagctaaattcttgtgccagataaagtaacatattcgtgtactctggtgattagaggatagagatcaggagtgtacttgaccaaggcactcaaccgtctatagagatcattttttatattgcttaaagtggaccttcacccagaatagaacacagggattcctctatggcacgttttgctgaaataaaatcgaacaaaacacacagccatttttattattgtcatcttgttacagaattacaagattgacgtctagacctaccgcagcgtcgtgggtaggcgagcaggtgatgccctggacaacagggaggccttggtggcctcctttccatgagcctccgagacctcgcgaggtcctgccgagaagctgtcgcccctgcagcgccggcctgatcactttgaccgggtctcccggaactacggacgacaggagcgcagccctcaccctcgccggcagagactcggctccgcgccggagcttccgcccgcgctcaggcgtgcgccggtctccggcttctaccgcgggggag

SEQ ID NO: 41134 - DNA, 396 bp, Mus musculus
  source 1..396: mol_type = other DNA
cgctttctaaaaccataattttcagtgacgctgtgaaaatatgtttgcaaaaaatagacaatcgttggattaaacgtattcatatgaaataatgcctttttgtgcagctacttgctcggatcaaaacatgctgttaattccctgaagtttgttaaattgaccaaaattaggcaaatgaataggggtctgtaggcgccccctcatgcaggtgacggcgcataatgctcgcctgggccaattaaaatttagcccaatgaaactattcatacttttcaatggacattttcctataggataataggctaagcctcttccccccgcgaagagagagccggaggggcgaagcgaggcgggagcctcgtgtgccagccgcagccccacacctgccgggatgtc

SEQ ID NO: 41135 - DNA, 320 bp, Mus musculus
  source 1..320: mol_type = other DNA
aggctgagcagggcagacaagcctttaaaacttggcaggtggacaccgtccttgagcaacgactaagtctgcggggcctgaagtcctgtattcctagccaaggactagatctgacagccatgctcatggacctgagggaggccacgcccactgggccttaagtgagaggcaccgcgggtctgaggggcgcctcgacctgcggacggggcggggcggcgtggcacggcacgcgcactaccagccgcccggccctgctgctgctgctgcaacgccggtggcgcagccaagagagcagctgcggccgcgactccttaaatagc

SEQ ID NO: 41136 - DNA, 476 bp, Mus musculus
  source 1..476: mol_type = other DNA
tttaagtgtttaaatacaaatcaagaaatcattgtttgactcagccatttggagcctcttgccaaagacctcagagtccacggatgtgtatatatatatgcgtgtgtgtgtgtgtatatatacatacatatgcgtatatataataaatatataacattttgcatcgatacacataaatcttaaaaaaaaattcattgccaagtccaacgtcttgatcaatttttcattcttttgtaccacaagaaaaatgtaaaaacaaaatgctgctacagggagctaaaagcggcatctgcatttaggatccgctggcggctggctcgggtccacccacacccacaccagctccgggtcatttacccgcccacgaggccggggaggcctggatttcatcgtgctctcgcccaggacgctctctggccccgccccggaaaaggcggagcatagcgaggactaggctctgattggctgttcagagc

SEQ ID NO: 41137 - DNA, 348 bp, Mus musculus
  source 1..348: mol_type = other DNA
ttcaaggagtaatgcttaaaatcgggacagccccgcgcggccctcgaggggtctgaacccgctccggctcacccaggtttagggacaccgcaccggctcacccaggtttagggacaccggtttggcctcccgggtctgggttctcagctcgggatcgcgctcccggccagtgtttgcctgagcaagcctggaggcaacacaaagtcctccaaggagctgcagacccgacactgcaactgcagcagcagcagcagcaacagcagaacacgccagtcgcgattggtggtttcagccccgactgagccccgtctcgtagcgcaggccccgcccacccagggcaagcctagg

SEQ ID NO: 41138 - DNA, 453 bp, Mus musculus
  source 1..453: mol_type = other DNA
gggtttctctgtgtagccctggctgtcctggaactcactctgtagaccaggctggcctctccacttatccttttaaagcctttgatggaactggaacgtgtacgtcagtcccttacatccaacgaagcaaagtacatttgtccttaagaatattctgggcccctgatgctcgtgttttcgtatattatgcaaaaacaaaacaaaacaaaacagagtctgaatgcctctcactgagcggggcacagctctattttctcctgctggcagaggcgcctccctagacgcccatcttggcgcccccggaagtcggccggaggcggcagctggcggagcgcgagggggcggagccggagggggcggggccctaggcttgccctgggtgggcggggcctgcgctacgagacggggctcagtcggggctgaaaccaccaatcgcgactggcgtgttctgct

SEQ ID NO: 41139 - DNA, 440 bp, Mus musculus
  source 1..440: mol_type = other DNA
gtctccacggaagttcatgtaactcaaacccttgcattttgcaggaactggaccggttatggagagtgactttctaggggaaggccacactgagtgccaggcaattgtatatgcagcctgtgcacgtcgggaagggtccccaggcttccggggctctctctggtccatctccacccttcaggtaggatgtagagtcaggtccaccagctggtggccagctcccaagtcccagcgtggccccggtgaaaagcgcgcgcccttcggcgcgatccccacgctcacacgcgctgccgcttgttgctccccgcagccgcgacgtggggaagtgaaaatgaaattgacttttccccggccgccaatgaacagcggcggcgaacttccgcacctccaggctggcggctggagccctccctctgcctccacctgggggggatttccag

SEQ ID NO: 41140 - DNA, 283 bp, Mus musculus
  source 1..283: mol_type = other DNA
gtgtctgtcagagcagatctgtgtccatggagcggcaacagcagcagtcggtattaatatttatgaacaactattatttgaaaaaaaaaaatgttacctctcaatgtgcttttttttttccaatacaatcccgcaaggtgtagtccccggcttgcgccgaggctggaaatcccccccaggtggaggcagagggagggctccagccgccagcctggaggtgcggaagttcgccgccgctgttcattggcggccggggaaaagtcaatttcattttcacttcccc

SEQ ID NO: 41141 - DNA, 395 bp, Mus musculus
  source 1..395: mol_type = other DNA
ccttcaggtaggatgtagagtcaggtccaccagctggtggccagctcccaagtcccagcgtggccccggtgaaaagcgcgcgcccttcggcgcgatccccacgctcacacgcgctgccgcttgttgctccccgcagccgcgacgtggggaagtgaaaatgaaattgacttttccccggccgccaatgaacagcggcggcgaacttccgcacctccaggctggcggctggagccctccctctgcctccacctgggggggatttccagcctcggcgcaagccggggactacaccttgcgggattgtattggaaaaaaaaaagcacattgagaggtaacatttttttttttcaaataatagttgttcataaatattaataccgactgctgctgttgcc

SEQ ID NO: 41142 - DNA, 323 bp, Mus musculus
  source 1..323: mol_type = other DNA
catatttcattagctttcatataaaatttgttatttaattttgcaccaggtaaaagcatcactgcagatatgtcctgcggcgacctggacaaataatttgtttttaaaggctactctagtttataacctaagttttgagttactaaattgttcagtggagaagttagaaacaattacaaacgggttgactttgttaactttcaaggtttcaccggtggacgttcatatttacggaacgtttaccaaaaacaatgaggttgtattttatttttttttttaattgaattgagtataattttattttggtaaaaatggagccttta

SEQ ID NO: 41143 - DNA, 173 bp, Mus musculus
  source 1..173: mol_type = other DNA
gtggggtctttttaaaacgtactggaggagcaagctcactgtgccctgtccctgtgactgaacgcagctataaacccgggggtggtgtcaaaatttgaagcccagcccagtgttcttctatgaagagcagaggacacactggtgtggacagagtgatctcatgataaaagacc

SEQ ID NO: 41144 - DNA, 396 bp, Mus musculus
  source 1..396: mol_type = other DNA
tggtatgttgcctatttaatctgcttaagtcataattactgcaaaaatttgtgtgaccatgatacctgaatgtcagtaacgcccattcgtgttagcaaagggtaccttttaaaggcttgtcttgaatctaaaaggaggtcgctaaacatttagctaataggtttgtagttagtaattaatattctatgtattagagcttccggaatgccacctttaaaaatgattgggaacgtctcgttgtcacagatgcattccagaggcaatcaagtttattctccttgtttagagctcaaaacgcatttttggcaacccaaatggggcggcgcgtggcggggctggcggccaggccgggcgcctttaactcggcgtgacctcgcgtctggcccgcgtcctgca

SEQ ID NO: 41145 - DNA, 510 bp, Mus musculus
  source 1..510: mol_type = other DNA
ctaggcaaggctctgcctctgagctgcagcccagccgttctttagtgaaatttccttaataaaaggttaaaagatgaatatggctgcacctttgttcttgaatcataaggaaaatttaacaggagaacatatttctttaagctatgatggctcttttttcttgaaaattaattcaaagtctatagaactttaatggacttataaattgggaaagcccagacttctgctctgtcatgagtttaggtgtcaaacagttctttcaaaaaagagctttccagagcttaggtcaaagctctagataggtaattaagtagtttactggaaaacgaggcatttccttttgtgttttgttctgtaaaacacaggtggttcaaggtcctggaaaggcccgatgaattcatggttccgcttccaggctggggtgacggggcctgggaactgtgccaagtggatccagggcccagtcatacaggtccttaatgaaaccaattacttcaggatttatttgca

SEQ ID NO: 41146 - DNA, 382 bp, Mus musculus
  source 1..382: mol_type = other DNA
gtggctgccatccatggctctgtaaagatgactcagcgctgtgtgctcactgtaaagatgactcagcgctgtgtgctcactgtaaagatgactcagcgctgtgtgctcactgtaaagatgacttagtgctgtgtcacgtgaccaggtagtgtacacactcgtatgtttcctctcagtaaactgtgcaaagtgaggttagtgagtctagacttatttaagaataaatgtacttgtatttccaaagtctcatttctggcttaagtaagccaagaatattattcttagttcttataatgtgtagcttgaatttcaaataagatatatttagtgtgaagctagcctaatttttaaaatccagtgacccagcactctgcgaggcagg

SEQ ID NO: 41147 - DNA, 506 bp, Mus musculus
  source 1..506: mol_type = other DNA
gaggagtgacttcactgagcattatggacagaaaccgaaacaccagggtcattcatttttctgtagaaagttttcaaatttaaaggcgttcagatttgaagacagaagcgggaggctgagtctcacgtaaccccgcagcccatcgtgccgggcgcacggcgttcgctaccgcgatgaacgggcgggcagcgggcgggaggccggggcaccccgtttccgcgcctcggtctagagaaatcctcctcgcagccgtgggtacgacctcgtgcgctccagatcctcggcagcaccaagccaccggcagtcgattgtgggccgggaacccaggatcgcgttatgtgtgatcgggaaccgggatcacgttaagggacacctaaccagttactgatgggcggtaccgaggaagaggaaatggaacaccttcctaacaaggaaacccgttctattccaggactggtgtggagtgctgtcactcaagcccaggaagtgcttcctgtgccagcgga

SEQ ID NO: 41148 - DNA, 396 bp, Mus musculus
  source 1..396: mol_type = other DNA
taccttacaagcttggacacttgcaatggtcctgactttcagtgacacacaggaaagaaatcgcttcctgatttcccggaaaataagtggtttagggctgtccctaggatctcagcattaggctctagtagctgcctctggcaataattctttgcaggggaaggccaccaagccagccgggatagcctggcctggaaggtctctgggcccaactcaccctggccgcacgccctggacccgctgcagctgcggcgagtcgccggggcgacagaaggcgacacttccttttccccgcctccgctggcacaggaagcacttcctgggcttgagtgacagcactccacaccagtcctggaatagaacgggtttccttgttaggaaggtgttccatttcct

SEQ ID NO: 41149 - DNA, 690 bp, Mus musculus
  source 1..690: mol_type = other DNA
atatacattccggaagtctatccgtaattacagtgagctcctcctaccggcatttcactgatggtactgggggagtaaggcggacgagtgaaaagacagtgaggactgtgtgtcctcgctggcggggaccggggcggcgtgcagccttgccacctcccgagcagaccctgagagccaccccggcgctggggggtggaggggccgcacgcaaggcggggagtccgcatttaaaagggcagagggcgcaccgcctacctccgcggtccgccccggtgctccgggaccgtggccgcggggcgctcggcgggaagtcgccgcgcatgcccggagccgcgcccgctgcaccctgggtcgccttccccctcaggcctcactcggccagcggcgcccaggggccgctcgctgctgtcttggaggctcgcgagggaggcgctcactcggggccgagcgagccgagccggcgcttcctatccctgtaggggaacagaaacgaagagagcggtcgcccggcctctcgggggcaaccgtcaggacttcggtcggctcagccatgcggtccctttaagagggggcggggcgcggcctgccgtttggccggcctccgcaccctccccccgcccccaggcgagagctgacagaccaatcgcccgggtggcgataggggcggggccccagccttattaggagcgg

SEQ ID NO: 41150 - DNA, 521 bp, Mus musculus
  source 1..521: mol_type = other DNA
cagggcgctgggttcaattcccagcacccacagggcaactccaggagagccattgctctcttgcctccaagggattttggtccaaccgggattaacagttaaaaccagttggccaggtccccaaacgcccggagaccttccgagcctcgggcccaagggttcagcggctttcgcggcagggcgcaggcgcggaaggccgcgtgcgaccgcgagcgtccgagggcggaacgcgcaggaggggcggggcggcaactcggacgcctccaggtctccgcgctccggcccccctctcccggccccccggagcgcggcgtcacaaagcgccggcggaacgccccagcggccgcccctaggcgccgagggcggggagggccgctggccgctgaagtcgcctcggccccgcctccgccggcgcgaccgccgagcgagtcgctggcgactgggcgctgcaaagcatcctgggaggacgcgctcgcgccggaaggtcgcgtgtgcgcgcggcggcagcggcggcggcgagg

SEQ ID NO: 41151 - DNA, 341 bp, Mus musculus
  source 1..341: mol_type = other DNA
tccttggtgttctgggtgattccagatggaccaccagaacatctcatttctttcctcaaaagcttcaaatttaaaaagaaaaaaaaaaccacaaaaagcatttaaaaatttttttttgctatctagattctgcgcttctggcttaagcacgtgagtgagcttaacgtgcaaacaggcctgatttcaagtctagagggattaagattgatttatttggttaagaaatacttctctctgaatgaaatgtgagagctatttagctgatgaatatctgaattaaacattttttttggaacgtgaaaggcaggtaacacaaacaaggccccggggccactccttag

SEQ ID NO: 41152 - DNA, 643 bp, Mus musculus
  source 1..643: mol_type = other DNA
gggccctgaccccgccagtgcagccccctgacccggcggggcagcaccggtgattcggacccctagggcccgcgcggggctgactggcggcgacagtggcggggtggccctgtcgcttctatcaggccggagttgccccgtgggccactggggcggacatgccttaggcccgcgaggccctggtgaggtcaccgagggccagactgagcagaaggctcgggggcgccgcggccccggacacgccccggacaccaccgccgggaacagccaaggcacggggcgcggcgtgggggggtttcctctcgaaagtcttgtggtttccctagaagacggaaagaggttgagaaggttgcagactttttgacatctcgggctgcagaggagggagcgagctgtgcattcctccgccctaccccccgcccgggctcagccccgcgtcccgccgcggccgccccggcagctgcagggttaagcaggcgggcgcggggcgggccgggggcggagcgcatgctaatcgcatgcaaatgagcaggccagtcgccgccgggccgttgctccgcggagcttcccggatccgagcccagacggcgtcggccggggcagcctgggcgccgcgaccctcggcggccacagggggacgggg

SEQ ID NO: 41153 - DNA, 578 bp, Mus musculus
  source 1..578: mol_type = other DNA
caccccaccccccacccccggtccgggactggggtggagaacttccatgtcccttggatttaagggccctgaccccgccagtgcagccccctgacccggcggggcagcaccggtgattcggacccctagggcccgcgcggggctgactggcggcgacagtggcggggtggccctgtcgcttctatcaggccggagttgccccgtgggccactggggcggacatgccttaggcccgcgaggccctggtgaggtcaccgagggccagactgagcagaaggctcgggggcgccgcggccccggacacgccccggacaccaccgccgggaacagccaaggcacggggcgcggcgtgggggggtttcctctcgaaagtcttgtggtttccctagaagacggaaagaggttgagaaggttgcagactttttgacatctcgggctgcagaggagggagcgagctgtgcattcctccgccctaccccccgcccgggctcagccccgcgtcccgccgcggccgccccggcagctgcagggttaagcaggcgggcgcggggcgggccgggggcggagcgcatgctaat

SEQ ID NO: 41154 - DNA, 330 bp, Mus musculus
  source 1..330: mol_type = other DNA
tctagtcacactgagcagttggtgcagaatctgaaacctccatgaatcaggagagtttcctgtcttgtgagagaagtaactaaattatgttcgacaccgatgttgtggctgaaggaccagcagcaaccggtgatatttagtggcgacaagatagtcaactaaagtgactaacttgacattgaaaatcatcactttgatctatgtggctctttgaagcctgggtcttatcaaggcaaagaaaaaaaaatctatagttaacaatgaaatattttcatcctttgcactaagagcagcacataatttaattacggaatccagaaattagctaga

SEQ ID NO: 41155 - DNA, 303 bp, Mus musculus
  source 1..303: mol_type = other DNA
gaaaaaaaaatctatagttaacaatgaaatattttcatcctttgcactaagagcagcacataatttaattacggaatccagaaattagctagaaccaactgtttatttaagctacaaactttaccaggggactgtcaagtgagcagtttggagagttaactctggcctcggggcatagctaggacacagtctgcaggcttattatattaacttcactccttaactccttaaagaagttggtgatggattgaggtgggtgtggctaagcgctgtccctccctgagcccatgcctgcaccaatgg

SEQ ID NO: 41156 - DNA, 550 bp, Mus musculus
  source 1..550: mol_type = other DNA
gtttggagagttaactctggcctcggggcatagctaggacacagtctgcaggcttattatattaacttcactccttaactccttaaagaagttggtgatggattgaggtgggtgtggctaagcgctgtccctccctgagcccatgcctgcaccaatggggggcgggaggggagccgtaaaggtcaccgcgacatgaggtccccctgcgggataagctctggctccccgcgcgccgggcagtctgcacaaggatccgtggtcacggatgcccgcagcttgtgaccgcgtggagctgcacgccacgttccgccccgccgccccttccgccgcgcgccggacccgcctccctcccgacttcctacccgcgcgcacggcggctgtgtggggtggacggtgcaagcgtggtctgcacctcgaaggagcggacggtgggcgcatcccctcggccgaggaccctgctcgtgggtgctcagcctgcacgtgggctgcacccggctcgccgcggcggagggagggagggaccgagtctcttctggcgcccacgtggagg

SEQ ID NO: 41157 - DNA, 632 bp, Mus musculus
  source 1..632: mol_type = other DNA
ttcaagtgcaactgtagtgtttaaaacacacaacccccaagcaggggccatgtgtttacagtttaaaaacttgacagattttgtgattttcacaacctaatgatgattttagatacatcgggaaagtctccttaatttttaaaaagaaaaaaaaatgattgcaagttgttagtctggttcctagggaataggtgttaaaagcttttttcttttaatatgactgttaaggactgaagtgagggagatggagatgtctaagcatctcaccttctgcactcgaaaatgctttattcagaaaaacacaggtatatcctgaatatttaattactagctttttaacccattacactgattattaataaaacatgaccagtataatatgcggtttgatttcttagatggaaaggagtcttttgcacacattttaataaatttgaagtgaatatctcatctaatttcaaaggtccttggttaagtatttctcatgcaaagttctcttataaaaaaaaattattttaaaaaatatttagaaaagttgtaccctccccccccaaattggggagtgggggttaagatttcttagataccagtggcctagtgtatggcataatagaatttagtttttctcaaag

SEQ ID NO: 41158 - DNA, 286 bp, Mus musculus
  source 1..286: mol_type = other DNA
aaactgagatgatgcttctctcaacctgtgggtcatggcccctttgtggatagaacgtacctctcacaggggaatatgtagatattcgtaattcagaacagtagcaaaatcagagttaggaagtagtactccatatctgcagagagacttgacatgagtctcacctggacttccggaaggaagatttctgcccttattgagtcccaatttaggttcacccctgagcccagagtcccagtctagtttcctgtgactctacctctgaggtcacaaaggcatagtgaca

SEQ ID NO: 41159 - DNA, 588 bp, Mus musculus
  source 1..588: mol_type = other DNA
aagcttccagctccagggcccctggtgacggtccccagcatctggggaggaggggggaccgggatgcacggccgcccctgcgccgtcccggggccaagagtggcggagcaacgtgaccgaggctcagggcgagcgcgggctgcgcgggtccccgcggcgctcccaggcgacacccacccacgcgctgcgcacgccgggccgggcgagctagactccgggccgcgtgtggactcctcccgcctgcaggtacgggctggcgcgcctctgccgggacttagttgggccgaccagtttgcaggatgcacagcagcctgccgggctgtacgggagcacagtgccctccagggtctccggagcacgccacctgatcagttggtgggcaggtgcgtgcgtgtgtgcatgcgtgcgcgcttgtgtgcagactgtggcgagtgccaggcggcggcggcggcggcagcggcgggcgggccgcggcggggccaggctcgaaggggttaagcgtcgccgccgccccctcggcggccgggtgtaaacaagatgtctggctgccgctcgcagccggagccccgagcccggcgctgtaacgcg

SEQ ID NO: 41160 - DNA, 524 bp, Mus musculus
  source 1..524: mol_type = other DNA
ccagtctggatagatttatagatgctctttaaaatagcatcccagagtcccagtgggattactggtaccaaacatttatttagtacttaatggtgccaggcacaaagataagactggaattagacttcttggctggaggcaagcagtgggcaatgtacagggtacgtttctggtcctttccctgcagctcagggatttgtaactaaaggacgtcctacaaaaacctgtggtgtactctatagtcattttaaaaatttaatgaaagtccagggtagctaccttgaatttgcagttaagatggcaaatgcataaaactcatataatatcttatcagttatctgagttttctagggtaacatattttcatattcattttcaataaggtcaatctccctttaaaaaatgggctaagcactaaaagtactagtattatatgtatgtatcttttcacaaagaactaaaaatcactgggccaatagaaggcctcgttgtctcctcgcgctggccggctgggcgcgcggccg

SEQ ID NO: 41161 - DNA, 571 bp, Mus musculus
  source 1..571: mol_type = other DNA
gaagttgttactacttaacagtaattactgttatgaattataatgtaaatatttgtgtctgtgaaagcatcatttgactttgtaacaacagctgcttgtgatctgcaatcacacctagagcacagctaacctcttgaaagaggatcccctagcttggactttgccaacttctaactcacagaaatttctaaataataaatgatgtcattctttagatagcaatagctatttcagacttttctccatcaaaggacagagatcagaaatgaattttgttaacagaattagtctgatgtagacaaatgtaaccattgtacagtgctgggcttttatgaaaccgcaaacttgacgttgttttaatatttcagctcaaaaagctgagtagttcgagttctgtgactcctttcactgtgcactggtcaggacaagtgtgagacctgcagagccctgagttctgtgggctgcctggatcccagagcagagtccgcaccacctaggcgtggcctggccgcagatgggcgggggcaagcctaggctgggcggggcggggcgcgcgggagatttgaacttc

SEQ ID NO: 41162 - DNA, 467 bp, Mus musculus
  source 1..467: mol_type = other DNA
tctggaccatctgtccttcagatggaactttaggtcttccggaagatcactaagatcttagcctttgcattcttgcttcaagtaaaccagaaaagaagtctcaggctggtcccaaacttctcaggataaggaagtcaagcccccagaccgagaggggagggctgactgggctcggcacgctccctccctcttataagcgcaggcagagggcgcatcagtcatgccctgcccctgcgcccgctgccgccgccgccaccgccaccgctcggccccgcgcgcgcaggaggctcgagcgcccgggagctcgcgggcctcgccgccgccgggcgccccgccgccctcctcccgccccccggccccgcggctcccgcggcccggctcctttcacttcgggcgaggggagggaggagggcgagggctcttcggacatcgcggggtgactgggcttaaccaccccacccccgcga

SEQ ID NO: 41163 - DNA, 535 bp, Mus musculus
  source 1..535: mol_type = other DNA
actcagttataaacctcagtagggtttatacaaagtgatcaatatacttttgtgtacagtaactatttattaaaaccttccttcactgaatacagtttttattggctctattctagaatatgccttaatgatcctgcctgtatgctgtatgaaaattaattgcatggtaatgactgagaggagtttaatcaatatcagtttctcattaacaccgtttcatggtttacagcagctgttgtacaacaacctattttggataagtggctaacttaagtagttcggttctctgttgaatccaactttaccagctttgatagaggtgagccagttaaggggccgctgtccctataaacttgagcagtggaggaggcgggtctccccccacacccccgtgcactgaaagcaccgccttccggcgcgtgcacggccgcccagtgggtgggacccagagggtgtgggagcgtgcgcgctcccgtcggaggaccggaaagggggcggggcgggacgtgcgcacccgatgcgcgggtgggcgggg

SEQ ID NO: 41164 - DNA, 533 bp, Mus musculus
  source 1..533: mol_type = other DNA
ctataggtacaaaaagcaccttttgtgtgtactgtaactagatctattattaatctatttaacatatagaaagcagctgatagttgttttaaagtattacactgctggtgtaaatctattagtagatgatgggacagtctaatcagtcataaaaaatattgtgtaacaactaattcaatgtaatcatttatttcaatgagtcctcattcaggtcatatccgtgacctatttaatgatttatttcatggttaataaagttagagttgagttagaatatttgacgtctcttcaatattatgaatattattacatgaactatgtggataaaatacacaaaaatgtacaatttttctatttaaagttacattcatttattattgagtgccctccttcccctatgtggggctcaagagatggaactcaggtctccaggcttggtgcagcccaagttggtcttgataattaaataccaaaaaaggaaatcggccttagttatttcaatattcgagaacttttatggacagtataaataa

SEQ ID NO: 41165 - DNA, 704 bp, Mus musculus
  source 1..704: mol_type = other DNA
tggttttctcagtctcctattgaacaaactgaagttttaaccttatacaaagtcacattagtctaccttataaatgatcaaatatacaagaaaaccaataatatattacatgcccatgttttatatgtgggatacgtattcatattcaacactgaatatattcttgctatagagattttaagagattgatattatcttcctgcatagcaatctaatttgtaattgcctatcaccacattgtaataagtttcattttctgaatcactcattaatggatagaaatatctgcatcagttacaggcacagaagaaatactcaataaatacttgttgaatgaaattatacatctcaggacatcttgaagtatatgaatgtaatctataaatagctttaaaatatgtgactaatgtacattttacataatcattatggaaataggtatgatgaattttaaaggtttgttttcttcttaaaacaaaatttttgtggaacaattttcactgtcttctagagctcacatttctcttcaaaattctttattgaacaatacacactataaaatgtgtaagtgaagccaacaatttatacttgaagctctgtcttcaactacgttcatggatccagagattactgactccaaaacattgagtcacatcctaaatgtcattaagaggccgaagccccgcccttcgacgctaaatcag

SEQ ID NO: 41166 - DNA, 555 bp, Mus musculus
  source 1..555: mol_type = other DNA
taaggattgtccttagacacatctagcgacaatagtttgttaactacttccacggtggaacacactattacttgtatccatactgtgcttttaatggtcagtttaaaaggaccaaattaaagaagctacttcagaaatataaaccctaattacatgacactagcatatgctttccaccagtgtccacggggcaaaaattgcttgcagctggactaatcaaaacaatttcggttatgcttcaagactaatgtagaaaccaggtgatttatttcttgtacattcgattcatttttatataaggtacagcttcgatgtagtttaaaataatgtacatgcttagcttgaagctttgactcaaagcttaggaatcacatcttctgcacagcagccgcgttgctagggggccctgtttccaggggtcaccagggacgggatccagagtgctgtcctccccaacctgcactgtgaagggtgggcggaacccgactctggctcagggatgttcagggccgccccgcccctgagagctgagtgggcggcgaggagggcgtggcg

SEQ ID NO: 41167 - DNA, 376 bp, Mus musculus
  source 1..376: mol_type = other DNA
ctcttgggacttaccaaaataacctcttcaggataaatcttgaaaaaattaggccaaatctccctagaattatgatctcatttggtttgaagagacgtcagaggtaactttttcctgattgcttattttacaaattatgaaaccaaatgttttgtgtaatataacattttacatataagatagtcatgttatattgcaaaaataaatatttaatgtagaagagattgtccagtataaaggaaaaaaaatctttctcttgtttttaacatccttattaagaaaaaaaaagtgttgtactaaaaacaggggaaaaaaagaacaatattgaatgatctttttttttttttcggggctgggaccggcggggctgtctccg

SEQ ID NO: 41168 - DNA, 490 bp, Mus musculus
  source 1..490: mol_type = other DNA
ttaaaagtgtggtgtgaaaaaatgctgctgacatgtcttacaacctatgtgaaaattttcgtttatatgtttgtttcgagaggaacataggcaagagagtcttcctttaactcgacacagccttgacagacagtgcgccagactgcagcattgtgatttgcattcctaatcagagtgcagattcccattgtaaaatgctaacaaaattcccactcggaattggcagctttaaactaatcataatttacaaagacatcgattctttttctctttacctgtaaaggtccacttaataaaatacttattacaacaaaagatttatacttatttctttgaaaaccatgtttttatttctccttgattctgaaagacgtgaaataaaggtcctatcttaataataagctttaacagaaatcaaattaactaagcagaaagacacgacgagaattcgggctttcccactgtggtggcaaaggggggtttaaagccg

SEQ ID NO: 41169 - DNA, 457 bp, Mus musculus
  source 1..457: mol_type = other DNA
tccagtctcaggagacttcttcccttgcctgcaagctggctctgagcatgagatgcttgtagaagcaacttgtttggctgggcagtagtcatctctgaaaagatatgtctttactaaattgtgcttttttttctgaaagggaaggagcctccgcccctcctttttaggggctgaaaggctgagcattcctgtgcagctgtgattggcgggaaggacaagtcctctggcccaggagtgagattctggctcttggacctagtgcattcccaattgttcttcttcgaaccctgcctgggtcagagccaagaaaaggcggaactgttgctcaggacctctgcactcctgacctgtgaatctttctgctcagtgcacagaggtcctgcgggagctgtctgaggtgctgaagctcctcaagcgtttatctccagcagccccaaggggttacatgtcacatttt

SEQ ID NO: 41170 - DNA, 402 bp, Mus musculus
  source 1..402: mol_type = other DNA
ttagtcagtggactcgtgtcctggcaaacagtcaccctggcataaagtcagggctccagttcctgcaggtctggggacctcaaatctggattactgagccataggaagattcttaaaactctggcgttggaacacagagcaaaattaaactcttgtgctcactgtttgtacaaaacgtcagtaaataaaagcaactatatttgtttatgaaatgagaagttatgaagtcgttcaagaaacttttccagaaagtttgtccactgtgttcatgcagccagaggctgggaaaattcctgctggggaatctgcaacagcgccgaccctaccctggtgctcaggggcaggtgatcatccccgcccactggcaagagagggccgctgcacacgcgcacggagtgggct

SEQ ID NO: 41171 - DNA, 507 bp, Mus musculus
  source 1..507: mol_type = other DNA
cagtctagtgtagcagtaagtctagaatacatatgttaaaattagttttcttttcatacagactcaaagtagatggagaattcttttttttttttttttttggggggggggagacaccatgaagatgaaaacaagaaggagtactttttctagatgtatttttgacggaaagaaacttaaaggctggtacacaagcaagtctcgaattccctttctgcctctaaatttaaagggatgaaaaggtagagccagagcacagcaggtccacgagctctggctcagccaggaaccgggtctgcagccccagagccttacgcccgcgcctcgggtcgcccctcgtgccgacggtttgtttttagaactcagagttcgagccgagagttcgatcgttaaagtcttatcaattacatgtcttttattgaatgtcacatttcaaattagcataattttgataaagactttttggcgaatctgaatgaggaaaacggaaatctttttcctttaagg

SEQ ID NO: 41172 - DNA, 575 bp, Mus musculus
  source 1..575: mol_type = other DNA
agtatttaaaggtttttaaaaagtaaataaacctgttttagatctacttgttttttagtcaataagatatgttggtttattgtatattatataaagacctaggtttaaaaaagaacaataaatgcttcacaagaaagtcaagactgttttgattctcatttagcaagtacagatttgcaagtcttacagcttttgccgactagctttaaaagcttagtgggagcaaaattatttgcaaaatgttatccaactttattggcacaaaacagatatacagttcaagtttgagcaatgaatttaaggtgcttagttctagaattatccatttacacgttcttccagaatagagtgcatataggattgtttaaacatttaaatgaagaaaccagctttaagaagtaaaccaaagttttcaattgtggtaaagcaatgcacacaaaataaaatttatcagtatattcagtttaaaatgtaccggtcaatgatatgcaatatatttaacttatagtggctagtgactatttccactatctacctccataattacttacatttatacagctaaaagtgtatgt

SEQ ID NO: 41173 - DNA, 638 bp, Mus musculus
  source 1..638: mol_type = other DNA
gggcccgcgcctggcccgccgggcccgcctcagctgtgccgcggccgccggctccccatggggcgcggcgagctggtcccggcacggtgcgcccttgctggccgccgccgcccgcccagctctacagcccgcgcgccggctcccgcgttccccgctgcagcgaccaggcagagcgctccggtgctcatgcaaaagtgccggccggctcccgcgaggcagtcccgcagacgccggccacgggactcctgactccgaaacctggaatccggggcgagtccaagctggggctgcaggagccggcccggctgtgccgggaggcggcggggtcgcagcttagcgtggagctacctcggtgcgattttaataaaaattcgctcctcaggctctctcggaggctttgcagagaggtctcagcgtccggacaagaatcttgggcccttgaaggcacctcggagctgggaagcggcgcagacagtggccgcggaagctcctgggtggcagcggcggcggcaagatctccatgtacagctgctcctcacgccaatcccggggcggcgggggcggcgcctcgcgctctccgcaataaaactttttcgaggtcctcttctaggattgtccactcataccttttatcagcc

SEQ ID NO: 41174 - DNA, 425 bp, Mus musculus
  source 1..425: mol_type = other DNA
agatgcccgcttttatgagggaggcaggaatgcagagatatatttatatgtttgttcataaaaactagaaaataaattcagttacttaccaaacaggctagttaatcgaggtgccccacttttaacttgggtcatccacttcagtgtaagcagccactgcaactttgccaaagtgtgccgggtcagaggagcgctggcgctctagcctggtcaaagtctatagaaaagaaagcgaaataatactgtacctggtttaagattcttcagtattgatattttaatagcgaagcatctgttaaacacttgcattaacctatggctgataaaaggtatgagtggacaatcctagaagaggacctcgaaaaagttttattgcggagagcgcgaggcgccgcccccgccgccccgggattggcgtgaggagc

SEQ ID NO: 41175 - DNA, 684 bp, Mus musculus
  source 1..684: mol_type = other DNA
cgatcgggctccgacctcggcgatcggcggccccccaacccccgggctcccgggccggccctgcagccgcagagggggccgctgcagcccggggcccgcgcctggcccgccgggcccgcctcagctgtgccgcggccgccggctccccatggggcgcggcgagctggtcccggcacggtgcgcccttgctggccgccgccgcccgcccagctctacagcccgcgcgccggctcccgcgttccccgctgcagcgaccaggcagagcgctccggtgctcatgcaaaagtgccggccggctcccgcgaggcagtcccgcagacgccggccacgggactcctgactccgaaacctggaatccggggcgagtccaagctggggctgcaggagccggcccggctgtgccgggaggcggcggggtcgcagcttagcgtggagctacctcggtgcgattttaataaaaattcgctcctcaggctctctcggaggctttgcagagaggtctcagcgtccggacaagaatcttgggcccttgaaggcacctcggagctgggaagcggcgcagacagtggccgcggaagctcctgggtggcagcggcggcggcaagatctccatgtacagctgctcctcacgccaatcccggggcggcgggggcggcgcctcgcgctctccgcaataaaactttt

SEQ ID NO: 41176 - DNA, 284 bp, Mus musculus
  source 1..284: mol_type = other DNA
aatctaagtttgagatggtcagaccgcctgaccatataactgtctctgaaattattcattaaagtcattttcagggattctcacaggatgactcttacgtttatgatctgagagcaatgacatcagcctctgtcttttttccgcggtcagctgagcgccggcgcgcagacatcctcacggctgtgccctgtggtgctgtcagcagtgacagatcccagatatcttggactcctgaaggccactcagagcaaggctcagggcaccaagtggtggaaccagcactg

SEQ ID NO: 41177 - DNA, 273 bp, Mus musculus
  source 1..273: mol_type = other DNA
caaaagatagttaaatagaggttgggctttctagaatttcactatttattcaaaatacagcaaactatttatctttgctttcatcaaatggataagatggtagaaggatgaaatatgaatttgaaaatatctttaatcaaaatgttgtaagttatatagaaagacaatagacgttcaacttttgttcgttacctagcaatagccaggtacaagcctggctctctgggcctcatcatggcagagagtctacatcatgcgggttcttgtatagac

SEQ ID NO: 41178 - DNA, 217 bp, Mus musculus
  source 1..217: mol_type = other DNA
aatatgaatttgaaaatatctttaatcaaaatgttgtaagttatatagaaagacaatagacgttcaacttttgttcgttacctagcaatagccaggtacaagcctggctctctgggcctcatcatggcagagagtctacatcatgcgggttcttgtatagacaagagaggcagctcctttctggctggagcagagtctgtcaatcccaggcagagac

SEQ ID NO: 41179 - DNA, 359 bp, Mus musculus
  source 1..359: mol_type = other DNA
gtctgcagctttaaatggtcttaaaccctcttagatccgtttgaaaggaatccaagaggcgacaagcagcccgatgcctgccaacccgtcggcacacgagtatgccaaggacctaaagagcgctaggtatcccgagttttctttcaataaaggtggctcgccacgcgacgcatgctgggatgagtagaccattcccgtggggccgcgcggcaggtgtggggcggggccagaggaggggcgtctccctcgcgcagcagcaccgacagaccggccggccctggactctgggcgtcggaccgtgccgccaccagacttggggtgcgggcggagcggcgcggcgagcggggctctgtagcggc

SEQ ID NO: 41180 - DNA, 379 bp, Mus musculus
  source 1..379: mol_type = other DNA
tccacttgaaataaattatttttgcttaagcttaagtctaataattatcagaggttcagggttggcatggccacgcccattctcgcgcacgcgacacatgtacgcatgcatatgactcaagtctcgtctgcagctttaaatggtcttaaaccctcttagatccgtttgaaaggaatccaagaggcgacaagcagcccgatgcctgccaacccgtcggcacacgagtatgccaaggacctaaagagcgctaggtatcccgagttttctttcaataaaggtggctcgccacgcgacgcatgctgggatgagtagaccattcccgtggggccgcgcggcaggtgtggggcggggccagaggaggggcgtctccctcgcgcag

SEQ ID NO: 41181 - DNA, 521 bp, Mus musculus
  source 1..521: mol_type = other DNA
agtccgggcgaggggcggaggagccccgcaccactgcgcgagcgcgcgctggggaaggtggcgttcaatcagaggcacgcaggatagggcaggagctggcgttgcctgccgcgcgcccgcaccgctccagggccgggaccggccgctccaggtggcccagaagctgacactgcaccggcaccgggtacctctgccccaccgccggctgcgttcccattccccgccgaggcggcggcagccgcagcagcgaccaccgcggccacggcggcggccgcgtccccgcctcggctcatcccagttcgggggcgccggcgccgctacagagccccgctcgccgcgccgctccgcccgcaccccaagtctggtggcggcacggtccgacgcccagagtccagggccggccggtctgtcggtgctgctgcgcgagggagacgcccctcctctggccccgccccacacctgccgcgcggccccacgggaatggtctactcatcccagcatgcgtcgcgtggcgagccacc

SEQ ID NO: 41182 - DNA, 465 bp, Mus musculus
  source 1..465: mol_type = other DNA
ggcctgttaggaccgagccctccttccccggaaagcagcttgaccggcaaggtgagggaccctggcctcccacccgcgcccgcgaagtgttggggtgcagtgcggccaacccgcagatcttaggcgggtcagctgtggaagacgccgtcccggcgcggaggcaggcatggctccgatcgtttaaaggagtccgtgagactctccgcacagtctgaggctccccgccgcgcccaggcaggccacggcatccaaaccgcggctggcctctggccggggcagttgggcctgcccagcgggccctctctagaccggttccaacgggtctgggagttaacgacctgggagacccaccgaacctgctaggcttagcctggagggacgggcctggccagacacccaccaatcggaagccttctccgtgggggggcgggctggtctggtcaagttgccgtggcgcggagaact

SEQ ID NO: 41183 - DNA, 210 bp, Mus musculus
  source 1..210: mol_type = other DNA
aggaacttgcaagtccatagtcgacttggctttctaattagcccaagagagaaggcaatactgcctttccaagtgagtcctggagttactgctgcagcagcggtggcaagcctagggcgtctgcaggtccacctgaggggcaccgggcggcagcatcctggcaggacacgccggccggtcggagctctgcggaggccggcggagggcggt

SEQ ID NO: 41184 - DNA, 564 bp, Mus musculus
  source 1..564: mol_type = other DNA
aactaactcatttatcttgacagtcatttcaattttctgttgaaataactagcacgtgtcacacatactgaacataaattttatcgagcatctatacttaccatcaacgtttgggggaagtgagttttaaaaggacatgctctgccatctaggatctcatgtccaatgagggacatggacccacagtggacagtcatgagtccaatgagggatgtggacccacagtggacagagcagttcagacaagacagctgcgtgggctagtagacaggcaccccagacagacttctctgttggctgctcaaggaaggagctttccttgcaagaaccaggtttggtggtacacacaattttgtctttttttaaaagatttatttatgttatttatatgagtacactttagctgtcttcagacacaccagaagagggctggtggtgagccaccacggctgagccatggctgccaaggcagtcgacattgcaagttccaggcagcaaggcaccttgtctttaaaacagaagtgttcaaggcctgatacctaaaggtatcgttatatcacgagc

SEQ ID NO: 41185 - DNA, 350 bp, Mus musculus
  source 1..350: mol_type = other DNA
gccagcgggaggcggacccctgggtgccagctccacgcgacattcattcccaggactgcacttggaggaagggacgtcttgtagcctccttccagccaggttcccaggtcgcctagatgctgcctgcagtgacaagctggcttccaagggagttgaacttgagttcaggtgggttatcacttttcttccagacacttgactggacggacctcccacactaagggcgggggatggtattctatgaaacgatcgtatttactccactgctttatattaatggaggtcaatagatttaacgatttcctctgactcgtttatttctaagccaatagataatgccgtcgtcatag

SEQ ID NO: 41186 - DNA, 281 bp, Mus musculus
  source 1..281: mol_type = other DNA
tcccagggacaagcttgaaccctgagttccaggtaatttcatacgcacttacacagtggaagcagagtcttcaaatttggggttgggagtaactatccccacaggaccaggatcctgagataccatcagcttccagaggctcaagctgtgctgcgaggctctgagcagttgcgagactctgagcagatcacagcaggtgacttgggctgcctgtggtcagctgccataggccggccggcggggcgggagagggcacccgggtcagccactgcccctctgtg

SEQ ID NO: 41187 - DNA, 635 bp, Mus musculus
  source 1..635: mol_type = other DNA
agaagagcttggtcactgtcccagaaactgaatagatagatagaatgatagatagatagatagatagatagatagatagatagatagatagatagatagatagatagatagatagatagatagaataatattccactaatattgcaggactgttcacagaaaacttatgtaggtggtaaaaatatttttagaatacttattttttctcatcagaacaacttaactgctctttagagagaatgtcgaaactgcaaataattttaaggggcagttttataaattttccgcaaacaccctgctgtgtcttgtcgtgtgtgacagcgcggccggccgcctaggaggccccatatgtggcatccaagatgacattcgaagacgcctttgcctgcgtgtccttgaacgccactgagacgctgaggacgccggcagcgccctgcctccggcagggtggagcgcgggagcaccgcccagtggccgcccggtcccgcccagaggccgggctctctgagcacgatgcttccctgcagactgcagggccagcccggggtgggcggagcccaccacccgcagcggcccgccccgggccgcggctgcggcgaaaacccggttgtgcagagtgcaccggacctcggcgc

SEQ ID NO: 41188 - DNA, 307 bp, Mus musculus
  source 1..307: mol_type = other DNA
atgagcgaagattattcagtgaagtctttcctaactagctaactcagcaccaagtaatcacagtgtgtcatcatggttgtctactctaataaatactttttaacttctgaaagatgatatgaagttggaattgatcctcactgccacacagtttccatgccgtggcaaggatggaaaagttccaaccaatatttttaactgcacttttgtttttttttaattaattaatttatttacttattcttattagttcttcaaaatttgcatataatttatcttgatatttattacatttttaaatgttttc

SEQ ID NO: 41189 - DNA, 303 bp, Mus musculus
  source 1..303: mol_type = other DNA
atataactaaaaataaaataagtttaaaacccctgagagtcagattctgatttttaagctctggtgctgcagctgcactttctgagtcaggacagccaggactacacagagaaaccctgaattaattctttaaagctggcgctaggcaatgggcggggccccggatgtagctcagggggcgcgttcgggggggcggggccaccccaggtctgcggaccgggccttgcgtcctcctccgtctcagggggcggagcctggtctcaaattggcgcctctgagtggctaagcggcagctcggattgg

SEQ ID NO: 41190 - DNA, 643 bp, Mus musculus
  source 1..643: mol_type = other DNA
atcacatatgaacactagatatgtttggttttcaggctggtgggattaaaggcctgcaccaccactgtgctgcagtagttatgtttggaatagctgttttaaaaacaaaaagttacatttttaaacttaatttttttttttttttaagcaaagatgggagtagctaactttgatacatatttttttactcaaagtctttcttagcacagtcttctataagatggaaaacgaaagtctcctacaaaataaatctttttgcataatcaacccagtgactcaggtttttaattctccataataggttgaggattaaaagacagttaaggacagtcttaaagctaatactatcgagaacttgttggtatgactcatacgaatttactgcataaattagtacatttataaaacatccgttttagtgctgacgtttctacattagacatgaaaagcatcattctctggaactacctttttctttcttatattttcataaattaaaaataaatatttctactgtcttactattaaaactacgttgtgagcactttaaatttctcaaaccctgattaagaaggctgcgctgcctgcctctaagccgggctagattgtagccactagcaaccaggctgcaataagatgacat

SEQ ID NO: 41191 - DNA, 569 bp, Mus musculus
  source 1..569: mol_type = other DNA
tcaaagtaatgactttgtttagcccgaattactcttttaaagggtaatttggaccttatgaccaaatagtcactttctaattggggagcccacaatgtagtcccgtcgaacagttgatgtccgtacatcttcatgtgcacatgtcaagaacacacagacgtacagaggaagtcttatttttgtacctaaaagtaactcacttgattatgccttcgagaatctgagttctaaacaagtataattggtgttctttcagaaagtgggattgttccaactcaagttacctttcccagatgggccactgcaggagcaggaagggtgagttctagttttctgtttctacacacagaatattaaatagagcatgtagccaagagttgtgattcaataaagagtattatttgtttatctgtaagaaaaccggcttggtgtttttacaagggcacaattgtgagaaacacaagagtgtctagagtactcttgtattaactatgcaaaggtcaatacaaagaaaagtgttctatttgactgactaacctgtaaaactcttacagcaagtgatgaaaggg

SEQ ID NO: 41192 - DNA, 221 bp, Mus musculus
  source 1..221: mol_type = other DNA
cagaccaaggtttgcgtcccagaaccctggtcttctgtagccatcccttaaaataactttttaaagggcattgtacttaaagaaaaattacttgtaaatatttggcatcctcagttaagtaatgagcgctcaaattaaaaggcagagggctagctcagctgctggctgagagccggggctcctgcgcgctgacgtcacacgccagcgacagtgacgcgagg

SEQ ID NO: 41193 - DNA, 500 bp, Mus musculus
  source 1..500: mol_type = other DNA
atctgtcatctttatagaaaatagatcgattggctatgactactgcttttaataaaaagtgagagctcaagtcacacttaatatatgtaagacagtaaatatactaggacattagtattcattaggcgatatataaatatacatccaggctcttgggcaagctctggccgaggccaggtattgtgacacgacgcggctctggaaccccgggggtcatacgctcgttcggcttctcaccgctgagcggaagccaggcattgccacgatgccggggaccgcacacttccgaagcgctttctccgccggggagaacgtgagcgacgtgagagcaggtggcacctcggccgcccagcgtggccttcgaggctcccctaggaggtcttctcccggccacgccctggtcgcctcccagtgcggccgtggaagtgcttggacggtgggacgccgagcggccgttcacgtcaacgcgctgacgtcacgcgcgtgcgacgcacctgtcg

SEQ ID NO: 41194 - DNA, 349 bp, Mus musculus
  source 1..349: mol_type = other DNA
ccggctctcccttcccaggccaccgggaagagtcggtctccaggcaccggccaggcggagccggaggccggcagggcgcccttgccccagcctcttcctgggtgcacgtcctcggggcgtgaaggcgcgggtccccgagccgcgtccccgaagctgccgcccgctgggggctccagcgcgggtccccgagcggcgggcggcgctgtggtgcgtccctccggtccccgggcgcccgctgcgcgctgcctcccgcgttcccccgccctccttgctgggcgggtgggaggcggcggcggcggcgtgctgtgcgagcgcgcgcgaggggggcggccgtgaggaggctcccggt

SEQ ID NO: 41195 - DNA, 405 bp, Mus musculus
  source 1..405: mol_type = other DNA
gtgttaatacaactttgtactttaataaacaatttagcccattagagttttattctccctatggtctacttttttatttagtacactaatattctgtcaagaaatgttctctttacactagaatgctaacaaatcatgccatttatttatttatttatttatttatttatttatttatttattatctgcagagttctctgtgcagccctggctgtcctggaactctagaccaatctggtcttcaagcccagctaactttttcttaaaaaaaaaaaaaaaagcactcaggatatcttatttaggagtataggaacccaatattgccaataatgacctatcttttcctcaaaaagaggagtacaagcatttattgaatccctggccttcggcttgtgctctttgaca

SEQ ID NO: 41196 - DNA, 564 bp, Mus musculus
  source 1..564: mol_type = other DNA
ggatcctctgtacccacgtggtggaaggagagaacagactataactaaagttttaaaaactttaaaacttaattatggaataaatcaatatgtcttatttcttccttaaaaacacttcaagagaaaaaaatcaattttaagcagtgactgaggtcctccaatagtttaacattgtttccaagactttgtaaaagggagtctgagaaacttttacccagaaggctctcggattcagcgactctttggcacgccttttcttctttagaaaagaactgtcctgtgtgcctttttatttaaagggagcctgccagtctgccccaggactggcatgccctgagatgggattttgagggcacctctatttcctctgtaaaatttaggttaaatttttccctttatcaatcttaaacccagtttatagcttggcttctgctaagcagtgatttaccctaacctggggctgctccccagggcctcagccacgctccagctggcctagcccggccgccgccgacggacccgaagccctgggaggctcactgagtcactgagctgcttggcggg

SEQ ID NO: 41197 - DNA, 219 bp, Mus musculus
  source 1..219: mol_type = other DNA
ttgacttcaagaatctgtcatgcctttgatattttatggactctagttgaattaataactttattagtccctcatgagtttcttcttcaaatttctatccaaaccatgctcactctcagtgaatcgcagcttggatgctaaggaacaaaaaccagatttattctccacattctccctgtcgcctagttaccaaggccccaggtcatagcaacattcctg

SEQ ID NO: 41198 - DNA, 313 bp, Mus musculus
  source 1..313: mol_type = other DNA
tgcttaataagtatatgtgaaatgaagacatgtcaatcattcatttacatcatgaaaacgtattagtcatttgtatatattttttctttttaaaaaatttccaacatttttattgtttgggagttttacaaccttgtgggtttttttccaagaagaagacaaagatattggagcatggtcaaatttccagttcaactgtgaagagtgacacttcaggatccttatcaattgtaacagaatcctttaatcctctcattctcaatgagtctgcagtcagtgatatctctgcgaaaagacagctgggatctggcag

SEQ ID NO: 41199 - DNA, 368 bp, Mus musculus
  source 1..368: mol_type = other DNA
aggtcatgagatccagataaagtctcagtactttctgaatttccttagttctatttgttactaaaaacaaaggatttgtgctgcattttttaatagtttcaggttttccaggaaattatttgcttaatacacactctagtcatatgacaatttttaattaacaccatgaggtaagaaagcagtttttaaatagttattgggtttactattttagaagaactgaccacatggctaaaatttaaacatctcactttttaaaattggggattataaacatatttgtaaataacaaaaatgtcatgtttttaaaagaacccagcctcagattcctgattgtggcactcagctgaaacatgagttcagttacc

SEQ ID NO: 41200 - DNA, 361 bp, Mus musculus
  source 1..361: mol_type = other DNA
ccttttcaggtagtattttaatgtaaaggaggacagaaagggtgggaccttttcttactgttaccagggtccattcttaatggccttcaaaacaatggatgtttctcaagttatcttttctagaattccaatattgaaaatagaattgtcatatttagagccttcctaaagttcagcaagcataggatactaagcaagccagctttcaaacccaaatttcaggtaaaagtaggctccattttcattcaataatagactcatgtaatctacctttaaaatactacctgaaaaggtagctgtcgttagcacagtaggagcaattggcacagcgcccggagttctgctgctttctttgagcttc

SEQ ID NO: 41201 - DNA, 450 bp, Mus musculus
  source 1..450: mol_type = other DNA
cataatattaaaatgactcctaattatttattgtgatatgcatagatcataacatatgtttattgagtagatagcaattagcggaagatccctatactgtcaacatgaagataatttcatattttctatacacaaggtactgcacatatgaactcataactatggatcagagcatgctctactctcaagagtagttaatatgtaatggcagtgaatatgttcaaaatacatagcatgaaattttcaaataattactaaaagtattattaaatattttaataaaatcacagcctagattaataataattaatcagtcagcttttacaaaaggttacacttcttcattatttgcctaatgtatttccttaaaccaacgcataagtggttctatttattctatataataattctatctatttacatatgactgatagccaagtataaatactg

SEQ ID NO: 41202 - DNA, 397 bp, Mus musculus
  source 1..397: mol_type = other DNA
cctcctgaattttagaaaatacaaaggtcatagcttgggaaggtgtagcttgcctgacatatgtaattcaaatacagatggctaacacttttgtagtctgttgatttccaaaaatctattctgtaagtacaaggaaaagaatttcttcactgggctcttcagaagactatttatctttgctttaaggactgtagcatacaagcatggcatgctggtgaaatcaaacactttgcctgccaaatttggctctgaaataattcagaagttcagcttccccaaggcctttctcacggactctcactctgagacaggatgccttgcttcaccggcatgagcctactgcatcctctggctccagccaggcttcgcatccggaacttgctgcagctgggattca

SEQ ID NO: 41203 - DNA, 383 bp, Mus musculus
  source 1..383: mol_type = other DNA
tctcagctctctgggctcccggaagcttgggggtcacctattttggaaactacttacagatgtggggaaaccgaaaatttgcgagccctagctccagcccatcagcgagggcttagcgttgaactcgattttttttaaaaaaaattaatttctctagttcttagtaaaacttgtttacccaaacagagaaaggtcagatacttttccttccactcttgaggtaggatgcagcgaagttgtcacgatccctcgcgaatgcattcggttttttatctttagtaaaatagaaatggaaatgtcagcgtcgtgtctgtttgtttgtataaggctatcaaacgaagcggatcctgacccttttttttcaagttaggaagagggtaaaa

SEQ ID NO: 41204 - DNA, 390 bp, Mus musculus
  source 1..390: mol_type = other DNA
cgagggaaaatgtccctcatgaaacattccactttgtagagtaacatctgctgcagatgttgctccaaagtcactttgtgaaagggatgacaatatatatttcaggattgaatcagaatgccaaacgaaatcctttgtttttttttttttccaggatatcacagaaatacaattaaatgcaggatctgtgaaagcacctttaaatcaaaacacagtgttctggcttctagccagagcaagcagcgggttgtttcttacccccaccccgcatggtggaaatcaaaaggccctgttaacaacccaagaatgtgttttcaacctcctggctcccgctccccggggcgggtagtgcagcgcgcagagccgtcgcgtcgccgctgtcctctgggt

SEQ ID NO: 41205 - DNA, 668 bp, Mus musculus
  source 1..668: mol_type = other DNA
accttaatatcattttcatatttatgtctcaaaaatattattaacatgaaaatttaattcctagttttattaatctgattacaataaatattagaaagtgatttttttaaaaactccagggtagcctaaaaaaaatccaacttacatcactgattttgtttttattattttatattatttgaaaatgtcatccatctatacagttttgtctctggctctgtgagtgtaagaaaaaggatacattaataaatttgaagaataaatttagtatgtaaaaattaattatttataatggaattcaaactattataactaaactatatgatatgtggaccagtttaaagtgaaaataaatgtagtattcatactagtataaataataagaaataagtgtcattttcaaaaaaaaaatcagtctttaaaacatatataagcactgggcgcctaggaacccaccgcttggttgccaaggcgacgccgggtccgcgcggctgccccgccccgtcacgccgtcacgcgctcgcgcggcgccccgcctccagctgcgctgccgcgcggacgactggctggccgcgcgggtccgcgcagccaatgactggcgccgctagggcggcagggcgggagtggggcggaccaattacgacaggcgagccggggcccggcctccg

SEQ ID NO: 41206 - DNA, 518 bp, Mus musculus
  source 1..518: mol_type = other DNA
catttggccagtaatggtctagtactgcctcagttacagtaagagagtctcagaccttgccccttcaagcctggaatcctggctctaccccgagggtggacagtaagtttggagtggaactgaagaattcccatctctctcaatccttgagtggttcaaggttcatgttaattcatctttgtttaacagatgggcagctagctaagctaaacgaccagcaggtgctcaactcagttgaggcagtgaatggtctgccctcccccgcatccccacgggggtgggggaggcactccaccggtgaatcagagcaagcggtgcaccggagagcaccccttccgcgcgagccctccccgcctccgagctcccagcctcggccccgggtctactccctcccccgcgggcgcgcgctcgcccgtccgcccgccgcctcctcctccagacgccgcggaggaaggggcggcgccgagggaggggtccctccgccgcgggaggccgcagcgcccgcccgtcacggcgcc

SEQ ID NO: 41207 - DNA, 520 bp, Mus musculus
  source 1..520: mol_type = other DNA
aatgcataaaataaaagcattttaaaaatactttgtatataaaacaaaacaactcatccgttgcgatgatgcacactagcgatgccagatttcactgtgtgaatggatcaggaactgaaggcccgtttcagtgcacatcaaagactttgttttaatttttacaaaaatgaggactgtgacttaatcttgagttccggaacacgtagcgctatgtagagctacagaaatttcctgtggagacatctgtaaatcgtgttatagaaattggaatctattctaattaagtccctgtctttttccaaacagagctatctatattgttgcaaacaaaaattagaaataagttaatattctaaagagaagtagtttacttggagaaattcatcctttaatttccaaatctctgataaatggatgaagcaacagtttaggggctacactgcagctcaaagctggagtctgcagggggggccacgcccctggctgctgatgccttcggcggccggggcggggcgagcgc

SEQ ID NO: 41208 - DNA, 464 bp, Mus musculus
  source 1..464: mol_type = other DNA
ttcattagaataattacaatacttctcagatccaacagtcttgtattacaggtaagaaagacaaaaactagactccttttgtttcttctgactgtttagaaaccagctacaacagtgccggtgacgtttacctggaaaaactcttgaatgtttgcagatgaaaatgaccttcatcacttcttaaattgcacttaaatgaaaagataaacatttcacagatttacttctgaaccttctaaactccaggaatctctgatggtgggaacccacacacattaagccatttggagatttaatataaataggcgctactttgtagtaactctgatccctcagttagagctctagcattccttctgcaagaggacacaagggagacttcccgggcaatgcaaagacagattgaattggagtgactctccttggagctttgcagagacttccccatttcaccaatatttgct

SEQ ID NO: 41209 - DNA, 297 bp, Mus musculus
  source 1..297: mol_type = other DNA
tgcaggagttagctctcccctcctgccttggaggtcttaggggcaactcttcccattacattaataatttatttcataagatctgaaggtgtttatatacttatgtatttactgtttatacactacaagttaagatcttcatatgaaaaagatatgcattttttgtctgagtttaggtcaccttaattaatataatatacttttagcctgcagattccactaatagaagggagctcctcactgtgagacaatcacagaaacaaagtctggctgtgtccttaaagttaatgaattgac

SEQ ID NO: 41210 - DNA, 319 bp, Mus musculus
  source 1..319: mol_type = other DNA
agcaagagtttctgatacatgtgtgttctagattcattgaaagttataacttacgaatgttataaagaacacctcctagatggcaacccttggggaagccaagagaggctgccctaggatgttccctagtccctagagtaccacaggaggaactgttgcctgtagcacagggatcatcacagaagaaaactttcctaatttagatattgatttaaaagtcaccagaacagaaaatactgttttatctataaacaggttcttgttaggttctaggaataagtaaagactccgttctggatgacatcatgggagcccagtg

SEQ ID NO: 41211 - DNA, 586 bp, Mus musculus
  source 1..586: mol_type = other DNA
ttagtgagaaagttatgtgttttactgaatcagtcaaccagactagagtatagacctgtaatcccgttggtttctcttgttcaaaagaaaagagactttatctctagtgattagaacattcttagtccaaatattcaattctatatcttaacaaatcctgactgtacttaaaaataattacagtgtttaccacaaacacttggtgtgttaattgaatatgcaggttctaaacaactcaaactgacaatttgttcatgtgtaaaattattgtaaagattagataaagccacaggataagtccaatagtgaattattggtataacatggcttctactatattagcattgtctacactaaacataacagtgtgaagaagtcaaaaaaaaagaacttagtgaaataaacttaacttttcattgtccatctgatttatttcaagttgttagcttcaaattaagaaaagtcaacaatgtttttgaaagatgtgttttgtttactctaataatgaattcacaacagtagtagctgcaggattttatattttacaaactgttctcaaatatatggtctcattttacttttgcaa

SEQ ID NO: 41212 - DNA, 395 bp, Mus musculus
  source 1..395: mol_type = other DNA
taaagattagagatttacccatttaatctgcaggaactctgtgagccaagtactgcctcagatagcaggtgagtggtcctactaactttatctcataattgtctaatcttataacttagaacataactttaagttttaaggccaatacaactagaaaactgtttaacttagcagtaatcttaaaaaccattttatgttgttctttctcagaattgtacaaacaaatgtacaaaacaaaaacctaagctgttatggatcagtttcttagacagatttgtcctcatctgttgctctgcccgggtggcctggccagccatgcactggcagacgctggacggcaatggccccttagttcagaaactcttatgatgaatccttgtggatccaccatgata

SEQ ID NO: 41213 - DNA, 443 bp, Mus musculus
  source 1..443: mol_type = other DNA
aagatgaattattacttcacttggaaactcgacccactgtacatttaaaattgtaccattacgtgtccaagtatccaaggaatccattcatgttaaatccacttagtctatggtaataatttatattataatagtatttgaaatactaacttctttatgtcccactacagatagaaattagtcaaagtaccttcaatgcgtagcatgtactaggcatttgattaataattactacgtaagactttctatcaaattttaccatgctgttcaaaaacggaaggcacctctaggtgaggtaatgctatctcctaacaagttgctcgcccatggagagctgccttctggccgatactcaaggccggcctttcagtcagaaacagaagacagacagacttctgttctctgagcttgtgtggctcccgggctgtaaaacaaggcgggcg

SEQ ID NO: 41214 - DNA, 494 bp, Mus musculus
  source 1..494: mol_type = other DNA
aacataactgacctttacaaatgtcaaaaacttaataccttagaaaatgttgtgccacaatttaaatgagtgaaagaggaatttgaaagacatgctaagtagttcttatttggagatcttaagtcctgaggtcttttaatttttctactttcatttacgtaaagaacttgtccaactttactcattttatttgtattaatacatgggacctggattccagctccaatagtcaaactgcaacaaaaaataaaatggaagaatttttaaaacttgaagtgttagtatagtacctaaaatatttttcctaaggcatgatatatggttaggagaacatctatgaacttctcctcaaggagatgtaaagcaacatttaattatttttaataatgttgagcctgaaagtgaaaaagtaaaagcggttgtgtgtgcgcacgcgcgcgcggcttaagaccaggggcgcatgcgcagactttcctcaacggtcgcctgggtca

SEQ ID NO: 41215 - DNA, 402 bp, Mus musculus
  source 1..402: mol_type = other DNA
cagtgccttggggttacagcaggcaatgcagcacacactgttgttatggcaggccaaccgaggattggccaaatactgtgacaatcataaaaatgaaaatcaagctttggtgcaacactttatgtttttgaaagatgacaaaacagccagacttctttatgttagaaaggcaagaagatgttctgtttaaagaaaacatggaccttgaaggtttttctcacaaaagctatcggaaaaaaacgcctactctcatagaagccactatgatgcatcctgtagccctagagcggctgcccggggcctccaaacagtgtccggggtctcagggactgtcacgtgttcccgaggctcttctaaaaccctggcggctccggggcctgctcctgctgccaccgcttccat

SEQ ID NO: 41216 - DNA, 289 bp, Mus musculus
  source 1..289: mol_type = other DNA
acttgttaacagtttgaatttaaacaagttgtagttcctagataagtaaattctgtgacttttcaaagtgcaatgagttatgaaatcagtgaatcaataatcgtgccccgggcccggtttaaagaactagtcactgagaacaaatctgactcaaatgcattttcttagtgaagagaaaaaagggtcaaaggctctcaactgagttttaaaagtacgggtctgaaacatagcttaggtttaggcaacgcacctccgagttgtgcatccgaggggtgccatcacatgatcc

SEQ ID NO: 41217 - DNA, 570 bp, Mus musculus
  source 1..570: mol_type = other DNA
aaggattcacctttgcttttaaaactcacattggattgtaagcattgtaatgtgcatacaatcaattgtcagtaaataacatataaaattttacatagtccttcatgaatatgtatgcctactaagttgttgcaatattattaggtgagacattgatgcatcaaattgaagcagaaaaccagaaaagtttgatcttttcctaaatcttggcgataactccccaagtcttaagaacttggtgcttgagtgcacaatctgacgaaaagatctccagattaaaatgctaacattatttacaactcttgtcttttcaatatactggagaaagaaaagtattgttttttctctcacggtgagaatgtaaatgtggttttattttcatttaactttcaagataaattactaaaagcgtcttttgaagacgttctgactcaagattctcaagtacagaaactagtactattgagcagcacagttcaccagaagcagtgaacttggcggactcgcggaagccaagtttcctctcgttcatgacgtcaccggccctcccggaagtcccgtgaatgatgc

SEQ ID NO: 41218 - DNA, 399 bp, Mus musculus
  source 1..399: mol_type = other DNA
actatttttgttttgttaatttgtattaatacccaaaccaatgacctgcaagtctggtattacagttaaagttattacattcaaaagtaacttggtgtatcagaactaaatatatctcattttctaacaaaacttgtaaatttttaactttcagtatgacagggaggtaagcatttgctgagcaagtcagcaatttctgtctaagtccgttataggaaacattaattcttctgatcagcaacacaataaattattgattaccgtgatgcctttgtggctagtcttgtgccacaagcctgtaattgattgagcctggtgacgtttagaaatggagatccttgttgacattaatgagattactgcacaatatcacaagagaaaggcagcctggtgcttcct

SEQ ID NO: 41219 - DNA, 351 bp, Mus musculus
  source 1..351: mol_type = other DNA
caagatgaccttgagttcttgatggtctcccttagttctagtttaggtataaaactatacattgttgttgcagaaccatgcagagaggtattgctgtgcatgcgtcacagtgacgatatagttctataactaatttaggaatctattttgaacccagaatataagaacagtggccaaggagtctttaaattatagtgtaaaatacataggacagttgtcgtttttttcgtcatacacattccacagtgtctttggaaagagcctatttcaagctctgacctctcacaggctcccagagatcataaactctgtgaaatatcacgagaaatgcaaaaatatcatgatatctca

SEQ ID NO: 41220 - DNA, 481 bp, Mus musculus
  source 1..481: mol_type = other DNA
tgtattttagtagtctcatcaataaaatgggttcataatagtagctattgtagagactatattactacacattttctaacctaattatattatttataaaagtggccattcattttttataaattaaaataaaatttataaattaatattttttataaattaaagtgagcacatttctcatgctgattgcaatattaatgatactgaagatgagttacttactttttattaagatttatttttaatatttatatcaagtccaagagtcagtgttatgttactaactatgtattaattttatattattatttacaaaaggagtgcttttactgagattgcttgaaaagtattgcatgcatccaaagtactgtaggtgatgtgaaaggtttccaattactatcaattactgtgaaatattaatttgtcacaggaacagtaatgtaatcattagtaaaatgactgtgtttaaatgcttttcacc

SEQ ID NO: 41221 - DNA, 470 bp, Mus musculus
  source 1..470: mol_type = other DNA
atcttctattggccacatgggtaagacaatagaggcagccatacaactgcccaggtgagctttttagactggataagctagtcctggctcctgaaaaggagtggattccagccctggtttctgcaagctcagtgaagtgacatttcaatgcggggcaggtgtccctgaacccccgcagcgtccagcgactgaaggctctggggaggcctgtggcccgagcgccctcgtaggcggacgcactcgctccccacagccgcgaccctgtggagaggcgcgggcgcgcgctcgggcccaggtgggacggcctgcgcgcggcgctctcggggaggaaacgcccgtgagcgcgcctctcggcagcagagggctgcaggacgctactccgccgagccgagccgagccgagccgagcctccgccgacgccgcctccgcctccgtgccgggcgccgcccccgccgccttcgccttgacgt

SEQ ID NO: 41222 - DNA, 305 bp, Mus musculus
  source 1..305: mol_type = other DNA
actcaagggttttctgcggttgtgaaagcctaagataaacaatgtttgggtccagcatgtataaagtcacaccgtgtttcttacccgtggaaaaggctggtccacctttccacgccctgatctgttagtcttccttgatcatgctcggtaaagccacacttcagagtttgataatttacttagccaacttggcctgcaggacccaggttcccaaatgggccttgcctgcctccgcaggctccacctacaagttggaaggggccggactattgtaattaataagtcccacagacccccactgaggt

SEQ ID NO: 41223 - DNA, 458 bp, Mus musculus
  source 1..458: mol_type = other DNA
actcaagggttttctgcggttgtgaaagcctaagataaacaatgtttgggtccagcatgtataaagtcacaccgtgtttcttacccgtggaaaaggctggtccacctttccacgccctgatctgttagtcttccttgatcatgctcggtaaagccacacttcagagtttgataatttacttagccaacttggcctgcaggacccaggttcccaaatgggccttgcctgcctccgcaggctccacctacaagttggaaggggccggactattgtaattaataagtcccacagacccccactgaggtaggactagtggccttgctgtcactggaccaaggcagccaagcttgcctactggccctggagcgcctccagcacccgggtggggccttgagggagcgcccagtcagtcaccccagcatgtgggcgcggcggggcgggccagggctgcgatctgg

SEQ ID NO: 41224 - DNA, 458 bp, Mus musculus
  source 1..458: mol_type = other DNA
acgtccatctgcaaatggaaattgccatatgattgaaataactgatgtccacatatgtacgtgcatatctatgcagtgtgcagctagaaaaattacactgtatgttttgtgatttggcaaacacggattcttctatttttccacgaatctcagctgagttgatacagacatcgcttagccacagttttgtaaataaaagcttcttactgaaggccttattattattaattctctcaagttctagatgccccctctctgttggggcgcaacttccaacagaacttctctgatgttggtgatcaatacacaggagggggcaccctctggagcggggacgtgcctctcggctcctcgggctcccactcggaggccggcgctgtgcttggccgcctactgctccgggtccctggaggctcagcggctgttggaactggaggtggagccgagcccagggccgc

SEQ ID NO: 41225 - DNA, 393 bp, Mus musculus
  source 1..393: mol_type = other DNA
aattgagatgctgatgtcacttaagattacatggtcacagtgagagattctcagatggcatctggtaacattactgttgctatttagtaagtgtaggctttctgagtaaacaaaaccagtctgcaagggtacactgcatataccatgctcagtgggctatgctaaaaactgaagcataggtcagtgcttaatatagtcaataatttaaaggagctgagaactggcttcttgataaagtgactgctccacaaatacaaagtcttaagtttggaatataaagctaggtatagtgacatgtgtgcctgctcactgtctgcccaggctagttagatcagtgagctaagacagtcagtcagacagacagacagacagaaaacattaatacatgtatga

SEQ ID NO: 41226 - DNA, 523 bp, Mus musculus
  source 1..523: mol_type = other DNA
gcacatgtccttaattccagcactttggagatggaagtcaggaatcaggagtttaagatcatcctcgtatacttgccaagtttaaggtcagcttggggctctgaattcttctacagttgataggaactatatacaaacacctataagaaatatatatatatacatgcacttaaattcaataaatgaatattgccttgttgttttgttattgtggttgttcaaatgcaaaaccaaagccaggatttcgtgttcaaatgatcaaagtttttttcttctaaatgctaatttttccgtataggagaaaaagaagtcgtcttgcacagtccaggcccagccctccgttaaccctgggcaccaggtttatttacaccgaaggaccgccgctccgtgtctgagcgtgtcgcggaccttcaaacccgggctgagggttgccgactctgacgcttactcccaggcggtcagcggcgcgctaccatcgacggatgggtctccgtagtttccataggactctacagaacctctg

SEQ ID NO: 41227 - DNA, 293 bp, Mus musculus
  source 1..293: mol_type = other DNA
acaatgataagcataatggaatttggaatatttctatatggtcatttggcatggcctctcccactgttattcttcttgctgaattaaaggatcgagtacgtgggtcttttcttctactacagaaggagacccatccgtgcaggcaccatgcgctgagcaatatgtgtcctaaggtccctttgtttaacaaagatttatcaaaatataggggtccctagggaccagattcctcccggtaggcaaactggagagcaagcttaataggtgatgcagtggaaacagtgtcagactct

SEQ ID NO: 41228 - DNA, 335 bp, Mus musculus
  source 1..335: mol_type = other DNA
aaaagatgagcacagtatatgatgtgcttttattgtccactttgcaaaagctcagtattcttgcaaaacaatgataagcataatggaatttggaatatttctatatggtcatttggcatggcctctcccactgttattcttcttgctgaattaaaggatcgagtacgtgggtcttttcttctactacagaaggagacccatccgtgcaggcaccatgcgctgagcaatatgtgtcctaaggtccctttgtttaacaaagatttatcaaaatataggggtccctagggaccagattcctcccggtaggcaaactggagagcaagcttaataggtga

SEQ ID NO: 41229 - DNA, 494 bp, Mus musculus
  source 1..494: mol_type = other DNA
cccagaataaagatttataagaggctattagaccacagatgtttgttgtgtatttatgtgtgcttctacatgttcgtgtgcaaatacatgtgtgtgcacatatgtgtggaagccagaaatcaatgttggatgtcttcctaccgtctcttactaaacctagcagctatagtggctggccagaaagtccctggaagcctctttccatgattacaggcttgtacttttttaaaatgttttcgtgggtcctaggaatcaagctcgcagcctaaatattaggatttatggctagagaacagtaagcacttatcttttcttcatataaacgtctcacagtttattacttttaaggaaagaattgggttctatttgcattcagatctagccagagtctctttgcttaggaaaaatacacttggccctgtctgtctctgatgcagagagctaagggtctaattccacaaagatttaacgcgcgcgcgcgcgcacacacacac

SEQ ID NO: 41230 - DNA, 337 bp, Mus musculus
  source 1..337: mol_type = other DNA
aaagatccatgcttcctcctcttgtgtatttatcaacaaatctatggggaactaacacaaagaagtttttcagtatgttgctccgtcatagcttgttttcctcttctgttcttatattgtaaagagaacaacaatcaatttactgtgttgttcgtttagaaactagaaccctttgtgcgttctaacctctgcatgcgcgcgcaccctgcaccgcccccgcagagctccagtcacgagtctgggggcggggcgccgccgagagggcggggcctctgccgcagcttcgaagcgcgcatgggtggggccggccgcacgggcctccctgctatatgtgcgc

SEQ ID NO: 41231 - DNA, 411 bp, Mus musculus
  source 1..411: mol_type = other DNA
agagattctgtaattctcaggtataaatctgtattctctaattttaacaattattctaaaaaaatgcttaaaaggcgcctagctaaaacccttcagctgaaacgcttttaaaatggaaccttattttcaggaaaaaaagaggaaaaaaaaaagtcttctttcaaagctctctgcctggctttaagggagccgtgaagaatgactggcttgtctaaacatggcttcataacagtggaaagcaaccttccatttaactgcgtttggttagctggtcagtaaacgaataaacaacagaagaccaagcaaaggattaagaaactcgatttttggttcctctttccaggcattctcgcctggaagcttccctgcacggtccacctgcccagaggtccacggggcaaagggggacgg

SEQ ID NO: 41232 - DNA, 230 bp, Mus musculus
  source 1..230: mol_type = other DNA
agagtgtcagaaagactctgattcagtcatgctattagtgatccaacctgcccctttcagggcaaagctctggacagatcgaaattaaggccacaacctttatctctgagctaattatccaatatatgaatttaaaccaagaaactcaagcctgaccggcgcgggctttgcgggccaatgagcgttgactctggccccgtgccccgccccaccccgccccgccggcggcc

SEQ ID NO: 41233 - DNA, 436 bp, Mus musculus
  source 1..436: mol_type = other DNA
aaggcagttagttgtctaaaagctattcaaagaagacaggtctagtttttcccactaaaaaagcatagttttgcccgatgggtaagacactcctgtgtggaaaaggagcactgccccttctcaaagatccagtagaaacctggattgacaggccactcactggctgtagctgtgtgtcatggatcgatatcttattaatggcattccctctactagctaagatttttttttcaattatttttaccttttaaaaattttttaacttaataacatgtacactttttattttcttaatttaggttatatgtgggaaactgagacagtaattcaaataaaaaaagtgttttggttgtacagggagtttccccaccaggagaagcagctggctgggatcacttttcctccagtcagcaatttgttatgagcctgctgcaat

SEQ ID NO: 41234 - DNA, 422 bp, Mus musculus
  source 1..422: mol_type = other DNA
taaatagagaagaaagaagctctctctctctctctttcttgtggtatacagtgaagcgtctagctggaccacagcctgcgagccgacatacagagagggaaagaatttttatcatttctgttcatctagagaaccttgactaatacagcgttttctcaccttaactcagaaaaatgttaggaatagtgttcataaacaacattcttcctcgaaccattattcaagttaccgtggagactacacttatcattagtgttaatttgtcaagagatagacctgaatttgggatggatccaccatccagccttcttgtgggagaaacacaacaaacatttgttttcggacaggagaaacactccactccacattttgtaatgtgctatttaaactagctaccttgtgcaacaggaaatactgttctg

SEQ ID NO: 41235 - DNA, 274 bp, Mus musculus
  source 1..274: mol_type = other DNA
attagagcccctatctttaaaatcgtgggaatagtaagaatagtgttcataaaaggcatgtttctatgaaccaattcattctaagtattcaagttaccatggagactatacttttcattattactaatatgaggaaaactcctataggagtggagtcaggttacatgcagttgaacttcacctagcctcagtgtcaagcaaaagaacaaacgttttgattcctctacttgtgggacacaaaaataggcggacctccagtcagaaggggaggcgg

SEQ ID NO: 41236 - DNA, 188 bp, Mus musculus
  source 1..188: mol_type = other DNA
ctgatatggctatctcctgagagtcatgcatcaatggaaggagaggtccttggtcctatgaaggctcgatacatatgaaatgtaaataaatatccagtctcaaaatattctgaagacaaacactagtttggttcttgcggacactgcaagaggagctactcctgtcactcagatcacctagagcagtt

SEQ ID NO: 41237 - DNA, 394 bp, Mus musculus
  source 1..394: mol_type = other DNA
actgaatatttaaaacgccttcaatcttatttccagctgttataagttaagagttgtaaaatcacagtacagatagcgtcttaataactctacaatgaccagactttgtgcaactttaactagcccagatttttacaatgtagaccaggctggcctagaactcacagagatcttctcgctgccagcaggccatggtggctcacaaccactgacgggatctgactccctcttctggtgtgtctgaagacagctacagtgtacttacataaaataataaataaatctttaaaaaaaataaaatcacgccttaaaaaaaaaaaaatttttttttggcttccctgaataaaaatccagagttgatgcactgtggcgccagggagcggtgggaggcggg

SEQ ID NO: 41238 - DNA, 196 bp, Mus musculus
  source 1..196: mol_type = other DNA
ctggaagtttttcaggaagtatatcccgaattcctggttgggattgcaggaaaagcaacaccaccttctctgcttaaaaagaaaaggtgcaacttgttataattcttgctgaaattcctgaaaggacatcaagtcttgaagtcctgcttcaatcagatcgtcttgaagcagacttgcatgaaacgcagctgcatct

SEQ ID NO: 41239 - DNA, 345 bp, Mus musculus
  source 1..345: mol_type = other DNA
ggtgtgagtcctcagcctgtggccaagccttaacaaagcctggttaaactgttttataagtcacttcaatcatgaagttttatcatagctttgacacaagcttgttcatcccaaccagagtggtctcctcctaggtctgaggcacaggggccattgtattagacactgaactgcttacgagaaccatctggtaccctgttagactaggaagtgcttgccgagttcactgagacagcagggcccagctctccaagaacaagaacaagttctgtaaaaggcaggcagtccagggcagagactgcctggtcatcacttcagctcctgctgtcaatcagcagtcgctgg

SEQ ID NO: 41240 - DNA, 185 bp, Mus musculus
  source 1..185: mol_type = other DNA
aaaccaaaaattaaataataaaatgttctgatgatttagtacacatcctgcactgagaacatcatgtccagttataatttgaccttctaattaaaactgactgcaatgagcactcggtgtgcacagtgacgacttggtgatggagtactgctttaccagggagaagccatttgaatcccacactt

SEQ ID NO: 41241 - DNA, 337 bp, Mus musculus
  source 1..337: mol_type = other DNA
accttgaagttgtctcttccaaaaatgatctatattggatctgggtagggtggccagcactcgcgagtcaaaggcagcggccactactgcttaactccaaatccagaattcttagggccccgtaggagcgcgcgcgcggagacagatacatacttatatatttttaaatcttcaaaaccttcttatggctgtgtttaaataacagtacttgtacagaatagttgcataaagcatcatagtatatttcataagtacctaattttccatttatgttaatgtaagggactagttcgccacggccgaccttagcaagccctgaacagacacttgtgttaac

SEQ ID NO: 41242 - DNA, 424 bp, Mus musculus
  source 1..424: mol_type = other DNA
aaatcggcgtctgcaattttataaagcttgctgccacttatatctgtgccacacagggccccctgggaattggaggggccaggtggtcactcaagggcctaggattaccacaggcccagaggagagagacaccctctgcgggcgttcctggacctaggacctgtcactggccaccgtggatagcctccttacatgcatggaggtcacagtgcaaggtgtttgtggccttgcctgccctaaaaccactgactgctagatttattctctcttcatgctgaaccagaaaagaagacatcagatctcatttgccctggagatttggggtttattgcagtccttcattgcagttcttcacaggaatctacagaagggacccctggctcgctggggctcctctactgtggcatagctggggcggggcgac

SEQ ID NO: 41243 - DNA, 417 bp, Mus musculus
  source 1..417: mol_type = other DNA
tgtgcacatgcacaaataaaagaaaattttaatttaaaaaaaaaaatccgctgggcggccacacacctctacttgatcctagcactcaggagatagaggcaagaaaaacaaaataaaataagataaatcttgtctgttcttgcacatttgtctttgacaataagtcaaccctttattaagagcccaagatgagtcactcagctcagtgtccctgatccggttctggaggctgctgcaggctcgagccagcggcaggctggggcgagactgaaacgggggggggggcgcccgcagagccccccccccccccgctgtggctgccacacccgacgtgggggtgggactttccagggggcgggacacccccaagggccagcaggtgggggcgtggctttgaggtcccgcctctcccgcctc

SEQ ID NO: 41244 - DNA, 231 bp, Mus musculus
  source 1..231: mol_type = other DNA
ccctgtggtgctgagactctgtctcaagttatttttgaaacaactatgtagcctaggctagcctagagctcacagagatccgcccacccacaaatttttgaaatttttgaaaaatatgaagatggcgttaccatggcaaccccaaccatggggttcctttcttactggcagttgagaaaggaagtttctagcgcccacagggggcgggtctgcggcggttggctgctgcgc

SEQ ID NO: 41245 - DNA, 341 bp, Mus musculus
  source 1..341: mol_type = other DNA
aacgcggttcctaaccggttagcaggtctgaccgctacccgcgtgcgtggagggaggcagagcagacttggtcccgggccggaggtcctcagctccccctcttccgccctcaggctgggatgcggaggctggcggacgtcccttgcagcgcccaagagctgcgccggccgcttctccggacgtctccagccggcaggttcgtgccgtccgccgaaagtttggcctgcacctgccaaaatattctcccctgcctcttttgtgtaccaggccagggggtgggcggggcagacccctgctggggggtggcctccagtacttgccagcagcttcaagttaggtcc

SEQ ID NO: 41246 - DNA, 552 bp, Mus musculus
  source 1..552: mol_type = other DNA
ggatgcgcccgttgcgctgcactgcctgcagcaggtcggtggctgctgcctccatcacgatgcacttcgatgaactcgaaaacgtgtacgatgtgcgggtgccgtactccccgcaggatggacagctcgttgacgaagtccggaggcgctcgccggcggtccaccaccttgatggccaccgtcttcttggaggtggccactttcaccttggagtagctgccctcacctgcccgacatggtggcgcccggggcgcgcggggagcaggaggcggctgctgtcggggggcggccggactccaatctcggcttggcacctgccgggtaagtgactgcgggcgtcactcggccttggggcggggaccctccctcccccgccccgcggggtcctcgtgagaagtcactggcgaggagactgcccaccaggtgggtgggaaccagcctgttgcctcgagcctggctaccatggctcaaacccaaggtttttagtgcaagaattactccctgcctagggccagagggaggagggactgagaacttccgccacactcaaaa

SEQ ID NO: 41247 - DNA, 485 bp, Mus musculus
  source 1..485: mol_type = other DNA
tctagatcagtctctgctaggagtttgaagcctccaaactccaggttagtgcttctcgcaggcttagtttccaggcccgtggaagccagctggaaactaggattctggcttccgggatgctcactgtgcactctgaagcccgcaggctgccctcactgacccgacagtccccggcggggcaggttccgcttgtagtcgatggggccgtagccccctggcgggggcatgtcctgcttcatgcaggacccgcttttgagtgtggcggaagttctcagtccctcctccctctggccctaggcagggagtaattcttgcactaaaaaccttgggtttgagccatggtagccaggctcgaggcaacaggctggttcccacccacctggtgggcagtctcctcgccagtgacttctcacgaggaccccgcggggcgggggagggagggtccccgccccaaggccgagtgacgcccgcagtcacttacccgg

SEQ ID NO: 41248 - DNA, 486 bp, Mus musculus
  source 1..486: mol_type = other DNA
gagttatggtaggttgtaagccaccatgtgggtgcttgggtcttctgcaagagcagccagtactttaattgctgagccacagatgtgttttttaaattaacatattttatttatgttaaaccactgagccatgttgaaattgtaaatggaaggagacagccgtccacctcgttccgggggagaggggtgaccgctcagccgatcgcaccttctcaggccccgggcgcgtcccgtgcagggctcgggcgaggtcagcgtgagtcagccctgggcgcggccgagctctgtgcactaagctggccatggctgaggggcgcttagcagcccaagtgggaaacccagtcgcttagcgcagcgtcggggctgggagggcggtgcttccgggtaggcccgcccagcctcgcctccagcctcccttcccgaccccgcccatccgggtgcgggcgggtggcgtcgcgggggccgcgggccgggcgcgctgacctg

SEQ ID NO: 41249 - DNA, 550 bp, Mus musculus
  source 1..550: mol_type = other DNA
gcattcaggagatttagggatgctgaatcccgccacaattctcagaaaagcgtcctcaggcgatgcgaacctgaaggttctcctccgaacgggccggggacgcatccccggacgctcttcagaaggtggcggcggtcagggccacggacaggaccaggccgcccatgggtctcagaggcgcctgtccaggcccgacagcctccggcgcattgtgggtggggcgcccctgctgagcacagcggggaaccctcagctcagccagttgttggccgcccggtagcccagtcgaaccgccctccaaggtcccagcaagcgggccacgactggctctgccccctaggcccgtcccagccaccggagcgatccggagggccagccggccaacgcgctcattggctggctggccacacccctcgtggggtgccgatctgattggcctgcggcgccgccactctgtgagaccgagcggcggctctgagcgcgccgcggcagctccttccgcccggggtcagcgccccggcgcgcgcacgcgcaccctcgctgcctgagc

SEQ ID NO: 41250 - DNA, 480 bp, Mus musculus
  source 1..480: mol_type = other DNA
ccagctccagatctctcctctaggtgtgaaagcaagtgatctagatctaagcattcaggagatttagggatgctgaatcccgccacaattctcagaaaagcgtcctcaggcgatgcgaacctgaaggttctcctccgaacgggccggggacgcatccccggacgctcttcagaaggtggcggcggtcagggccacggacaggaccaggccgcccatgggtctcagaggcgcctgtccaggcccgacagcctccggcgcattgtgggtggggcgcccctgctgagcacagcggggaaccctcagctcagccagttgttggccgcccggtagcccagtcgaaccgccctccaaggtcccagcaagcgggccacgactggctctgccccctaggcccgtcccagccaccggagcgatccggagggccagccggccaacgcgctcattggctggctggccacacccctcgtggggtgccgatct

SEQ ID NO: 41251 - DNA, 350 bp, Mus musculus
  source 1..350: mol_type = other DNA
gcctggccagccttcgagtgctgaagccatcatctgcctctgagggtgacagccaattgcacctgttccaggactcagtgccatctattgaagggactggaggggagagtaatggctctcactttccttccagtgtccctgcactcagggacttctgaggacctggaagtcagactcttaatctgagtggtcctccaaggcctaagcatcaggcagaagtcccattggacctgaatgagagggttcctgtgaagaccacttctcagagctttggaagctccaagaccttcatggacctttctgagccatgtggcagagactgcccatggccaggtcttgggtcccaggga

SEQ ID NO: 41252 - DNA, 369 bp, Mus musculus
  source 1..369: mol_type = other DNA
gttgcaaaatgcttccaggtgcactgacacgcaagcttatatggtgatgggcaaatgcatttcatcgccctggctgacccagtgcagttcggaaacgcacatttcgtccgctccccaggcctttgagggagaccaggagcgctcctcagccacgggcgggggttggggggcgaacccgagtctggggtctcggcagaccagagaagggcacacgcaacgttactgtaagtttccctggggctctgctccggcgccacctgagaagagacgccggcgtcagttcttacgatgatgcagaggtatccttgcgtagcagttctcgcgagaattgcgggtcgccaggccccgcccctcaaggtgcttccgcct

SEQ ID NO: 41253 - DNA, 543 bp, Mus musculus
  source 1..543: mol_type = other DNA
actgacctccagacccccgaggtgcaagtgactctagaagctactttctgggatctgggactccagacctagacacctgactgtcagaagtcctggactttcagatttcctgcagggagctcgcatcctgttcccgcggccacccgactaggagggtccccgatcccccgggtggcggagccgcgtctgtcaccgcaggtgagggcgaggccttcggaagtcccaagggcggagaggatcgagtccccggtacccgcggcccgcccgcctggcccgcacactcaccgccttctccaggtggctgcgcgctaaagcaccgagccgagctgcaggtgcgtccgggcctcgatccgctgaggcggcttgaaccagataccacgactcggctgcctcggcctgtgcggcctgtgcggcggcagcctgagctgcagccgccgcctgcgccgcagccgccgcctgtgccgccatcttggcaacaacaagccgcctccacagagaggcggaagcaccttgaggggcggggcctggcgacccgcaattctc

SEQ ID NO: 41254 - DNA, 153 bp, Mus musculus
  source 1..153: mol_type = other DNA
cactgaggctcattgagtcagtaactggacccagctgggaagaatgataaatctgagtcggagtctcctgatagtagggcggcactccccagaaagggtggtgaccagctcctgcgcggggcgacctttgcgcgcgggggggggggggggggc

SEQ ID NO: 41255 - DNA, 313 bp, Mus musculus
  source 1..313: mol_type = other DNA
aggctgggaggcttcaaactggtgctagctaacacatggcctggagataggccaggctcgtctcaagcttgctgtctacgacctcgaacctgcagaagataactaaactgctggttctcagaatacttgagtaacatcacgcctgtcatcccaggtgtggagtacccccgtgctggggggtgagggttgtcccacccccaccccgtgctgtgcgtgcgcacgcgcgcgcggcacctttaaagcgccctcctctgcttgcaggcagacgcccggattgcgcgaccggcaggaccagctggccagaccgctgtgc

SEQ ID NO: 41256 - DNA, 544 bp, Mus musculus
  source 1..544: mol_type = other DNA
gactccagacctagacacctgactgtcagaagtcctggactttcagatttcctgcagggagctcgcatcctgttcccgcggccacccgactaggagggtccccgatcccccgggtggcggagccgcgtctgtcaccgcaggtgagggcgaggccttcggaagtcccaagggcggagaggatcgagtccccggtacccgcggcccgcccgcctggcccgcacactcaccgccttctccaggtggctgcgcgctaaagcaccgagccgagctgcaggtgcgtccgggcctcgatccgctgaggcggcttgaaccagataccacgactcggctgcctcggcctgtgcggcctgtgcggcggcagcctgagctgcagccgccgcctgcgccgcagccgccgcctgtgccgccatcttggcaacaacaagccgcctccacagagaggcggaagcaccttgaggggcggggcctggcgacccgcaattctcgcgagaactgctacgcaaggatacctctgcatcatcgtaagaactgacgccggcgtctc

SEQ ID NO: 41257 - DNA, 276 bp, Mus musculus
  source 1..276: mol_type = other DNA
aatcttggcttttaaagaacaggtgtgaaaatggcacatatgctcctgaatgagtgaatgaatgaatgaatgaatgaatgaatgaatgaatgaagctgctggagcagttctgcagttaacacatccagactgatgatttaacagaggctcagttttcccacctgtaaatcggagcaggtggcctcatgaggcatacccagcccctggactgtgtccggagctggaggccaggggctgcgcatgcgcagagcatccctgtgctcctttataagtgag

SEQ ID NO: 41258 - DNA, 519 bp, Mus musculus
  source 1..519: mol_type = other DNA
ttccataacatgttaggaaagcattcgctgagagactattgagctccttagctgaggagatggctcagttgtaactcctacacgttatgctctaacttccacatattaataaaagtaatacaaaaagtagactctggaaaatgtttgagagcacttcctgttctcgcagaggacctacagtcggtttccagcagcctcactggaagtggtggtacaggagatcccatgttctcttctaaaaacactcattacacattaaagtgtttttaattaaaaaatatactttaatcccaatacggggcgtgaaggtgcatgcctttaatcccagggctcggccattacctgcgaggcaaattccgagaccctgtctcaaaaatatattaggcagatctgctgtgcagggctcccaagtccacgagcaaggccttctgcagatggtgtgttcaacagaaccagaaaccggcgaaggggaggtgccataaaccccgccccggccccgcgaacggaacagtgtctgtg

SEQ ID NO: 41259 - DNA, 259 bp, Mus musculus
  source 1..259: mol_type = other DNA
tcagaaggcagagaggtttgagaccatcccggtctacacagggttacataaagatgcgggggcccatcgaaccccgcaggccgggaggtctacggttgttatggacaaagtaacaataatattcggtctctttaaatttgacccgtggggccccaccgtctgtggatccgattggggcagcgagtctaaggctccttcagccctttgtagcgtgcgcatgcgccactgtacccattggcctcaaagcgctagaagcagc

SEQ ID NO: 41260 - DNA, 183 bp, Mus musculus
  source 1..183: mol_type = other DNA
ttaaggtgtatggtcctgactagccagtccaaggtaaggtcagggtcatcacagtgaggtccaggagccctgactccttaagcagtgttttttaatttttaagataatatatatttgtatatgataccggagatagaactcctgttaccatgcttagcactgtagaccaggctagcctcagcc

SEQ ID NO: 41261 - DNA, 422 bp, Mus musculus
  source 1..422: mol_type = other DNA
tttgagttcaagactagcctagtctaaatagtgaattccaggacagccatgagataaatatcattgttaataaattaacaccaggctgagcctcattccctcgttaataaggtgaagatgtaaggcctcagagaggtcatatcaggagagatactaatgtcaaacttatcaatgtcccactgtggttatttgggccggaatcccccaaaatgaagcttcacaaacttttctggttcagtagatctcgtaaagagcaagttggtgtagcttcctctccggacatagagcagctgcttctagcgctttgaggccaatgggtacagtggcgcatgcgcacgctacaaagggctgaaggagccttagactcgctgccccaatcggatccacagacggtggggccccacgggtcaaatttaaagaga

SEQ ID NO: 41262 - DNA, 184 bp, Mus musculus
  source 1..184: mol_type = other DNA
ctctggtgagtgagaacactgaccgggcatggtgatcttacagcaggatcagaaccaaacagggttagcaagcctgttcagccggttgaatcccctggggtccacatgatagcaaagctagaaagttgtttttagggtcaaaggatctggccttctcctctggactccaaggatgctcgtcaac

SEQ ID NO: 41263 - DNA, 336 bp, Mus musculus
  source 1..336: mol_type = other DNA
agagacgtcactttctgaaagtcagatcacgtcagcagtgcacttttgcttcccatgttttgcacatgaactcaagtagcagagtttcaactgtcaaagtctaccagggcagacaagatagttatggtctgtacctagtacagctgcagcgcgccagcttactcagagcgctgaccttgctcttcagcgtggcaattggccggaaccattttctgcgggacgcccaccaggcctctccgccttgtacccggtgtagaacgctcagaagagcgctgattggacagggcgtgaccaatggcggcagggcctgggcccctcccggcctcgagcttaggg

SEQ ID NO: 41264 - DNA, 227 bp, Mus musculus
  source 1..227: mol_type = other DNA
ttactgtcacatgaaataatctatgttagggtttgaggcagtgtctggtcttgtagcccagactggtgggctggctacatagcctctccctaaagcagtcatgacaggtgcagcaacaggcgaagcatttgcttcccacagccacaagcacaggcggccggtgctcctcaccgggtctacgcagccacgtggggaaagggtggggctcgcagctgtcacccgagact

SEQ ID NO: 41265 - DNA, 520 bp, Mus musculus
  source 1..520: mol_type = other DNA
ttgtgtgtgcacacacacacatgaaccactaggtcaggcatcctaatgttgagcctgaccaacagggcattcattgtgagggcactttctgaatgttaggtagagcagggactggtcagctgatcctgaagtttccccgtctatggtactggcagactcggaggctgcagtggttcccggcagctggaggcccgaagcccgctcgccgttacgcccaactcgcccggccgactgagggctcaagcgtacccgccagcaggccccgggccagccctcccaggtctccagggcccgggcctcacccggagcctgccgcgtgcggtgccgcccccgccgctgccgccgccgcctcgggccccttatccaccgcctggcgaggcggggagatgcaaatgagccaacggtttccgcagcgccgcgtcgcgcaggcgcaagcctctgccttgccttggtgcgcaggcgctggctgccaccgcctaggtcctcatgcgcaagcgtcgagggcagccatcttcgctct

SEQ ID NO: 41266 - DNA, 374 bp, Mus musculus
  source 1..374: mol_type = other DNA
cttgtagcccagactggtgggctggctacatagcctctccctaaagcagtcatgacaggtgcagcaacaggcgaagcatttgcttcccacagccacaagcacaggcggccggtgctcctcaccgggtctacgcagccacgtggggaaagggtggggctcgcagctgtcacccgagactaagcgcaagcgcagaggcgccgcctcgcctcggcgtccctccttcagccgagaggctcctttccggggcaacgagggccgcctgcgcgaaagagcgaagatggctgccctcgacgcttgcgcatgaggacctaggcggtggcagccagcgcctgcgcaccaaggcaaggcagaggcttgcgcctgcgcgacgcggc

SEQ ID NO: 41267 - DNA, 194 bp, Mus musculus
  source 1..194: mol_type = other DNA
ctctgtaacaataacctagttactcccagaatttatttttgaaagtcagggtctcacactatatagaccaatctagcctagaattcacagagatttgccgacgaaagcgaagggtcgttgtccactcttccccgccctccgtagctggccagcagggggcgctgggcagaggcggggcggcgcggggactggcc

SEQ ID NO: 41268 - DNA, 277 bp, Mus musculus
  source 1..277: mol_type = other DNA
ctgcttatgaagatcaggctgaccctcctgacttcaggtcagcggaagcttggcacaggggtgcacacctgtcatcctagcactggaggggtgaagactggaggcggagagcgcgccggaagctgctccgcacgctgcccaccttcacgcgctgagcctgatgtagaaagcgttcttcacgtcgctctccggagccgccagagacgcttctgggacacgtaggccggaagcaggtccccgtcgtctccaggccggactgcgccggggtggacgtgac

SEQ ID NO: 41269 - DNA, 292 bp, Mus musculus
  source 1..292: mol_type = other DNA
tatctaatttccaacaattattataattgcttgtttgaaacaaattttcaggtagcccaggctggtctgcaacttgctaccaaactgaggatcaccttgaactcctgatctcagtattgagagagtttgacggcttctacgtcaaagcctgcgggtcagggtccccgaaacactcaagattcctggaacccagtgcacccgagctgcaccggcgtgggctgcttcaaccccagctgtcgacactgtgtcacgtccaccccggcgcagtccggcctggagacgacggggacct

SEQ ID NO: 41270 - DNA, 272 bp, Mus musculus
  source 1..272: mol_type = other DNA
gtatatgagtcctctgacgtcatgcacaccagaagtgctctacacccttggcgtgcatgagtgcacatagttcatgcgtgcacatacagcgcaatgccttgggaggctgatctttggacagtcctcagcaccagtgaatttctatgggtctaggctaggacactcacgcgccctgcattcagaccagtggccaagcatgggaacgggggcggggcccgagagaccacgccccattcttgctctgggggggcccgcgcgccccctgcctggct

SEQ ID NO: 41271 - DNA, 287 bp, Mus musculus
  source 1..287: mol_type = other DNA
ccaagcagagcagatacacttctgtggggggaatgcctttcccttcagagctgcaacacttacacttcctccactgaagagtgggattcaatcgattgcgtggtccccgtgccacaggctcccctgaagcccggaggtgaggacgtcgcatgcgcgcatgcgcaccgcaaggcccgcctcttcgcgcaggcgcacggcgagttccgccctcccgcttagcgcggtggctactttccgggaggaacgcgcgcgcctgcgccggcgtcggactcgcgcacgcgcatctg

SEQ ID NO: 41272 - DNA, 354 bp, Mus musculus
  source 1..354: mol_type = other DNA
ccaggcagccctccatggtttcttcttggagcaagagatcttcttgggttgcagcagccccaagtgggccagccccctgtttacagatgtaagctgtgagtggctggcccgggaaagattttcagttcccagccagtcttaggctgtgggaagctagtgcaaaaggggaagttgaggccgtttattcagagaggaaccctcactcagtggtgaaccagagtgagtggagtcagctgcgggtcatcccgcagggctgtggggcgcggccctgaatgcagagcccggcctgtttacggcgggctctgggcagggccgcgggggctgtcccggacccggcgcggggataaataggcc

SEQ ID NO: 41273 - DNA, 476 bp, Mus musculus
  source 1..476: mol_type = other DNA
ggcaatatttttaaatttaaaacatttatctatgtacttgccaaatacaggtaagggtggcttgaattccccatcccggtcgtaccatcatggccagtactgtgcacatttctcccatttgaaactttattataagtctgcccaggaacattcctggtaggaagtctgctgccgcctgtgccctggaatacagcaggcgcgcccctcagcgaatgctggagtccagtgaatgcaggcactcgctgatgggacaggacccggaccgctgtccagcgaaccacgcgcactgcagtgcgcctgcgtaggcacgcccctcccaggctcccgacgcgttgcccaggcacgcgcaggcgtgttcaccccaacgccacacgcctctcccgcgcgccggcgccacgctctgggccgtgcttgcgcctgcgcgttctctccggccgtgggcccggccggcgcctgcgcggtggctcccgagagtg

SEQ ID NO: 41274 - DNA, 53 bp, Mus musculus
  source 1..53: mol_type = other DNA
cccaggcatggttggagccaaccggctccgcccgctgccccgggccccgatct

SEQ ID NO: 41275 - DNA, 229 bp, Mus musculus
  source 1..229: mol_type = other DNA
ctgggggcctccgagtcccagggagacaatgggttccctctgaaatggagggagaccaccttaagttttgctccctgaagttcctcgaggacttcctggaggaggcagctgcccctagagtacctccccccccggaagcaggccaactgtggctggtggtcggtttttaaaaaattccttgactaaggatctagaaggcgcagatccaagtccggtcaccgcatcccag

SEQ ID NO: 41276 - DNA, 351 bp, Mus musculus
  source 1..351: mol_type = other DNA
ctgcgctcaatcagtgatggctgcccgcgttacctgaagttggcgggcggcggccgctgcagtgattactcaccgcgtggcgcaccccacccgcgggccgctgagtggaatgcagggttcggtcccgtgagaagggaccagaggccggagactccctccctgccttctcacccaactttcaaactcggggatcctggaaaagcaccagggctgcgacccagggcggaggccggccgggcggggcgcgcggtgcccgcgggcggtgggaaggccggtgcggggcccacgatcaacccccccccccaggggccgggccgggccgggggcggggccgggcggggcgagcggcgc

SEQ ID NO: 41277 - DNA, 381 bp, Mus musculus
  source 1..381: mol_type = other DNA
ttcgaacctggttgccagcagcttgcaaatccccaccaacatcaaagtaatttagggaaggaagctttcaatcctacctccccggtgctgggaatcccatttcaagtggttaagagcactgattgactgctcttacagtgtacttacatataataaatacttttaaaaaaaaaatgatcccatcactctgaggccagcctgccaggacagccagggctatacagagaaaccctgtctggggttcaactactggcctgttgcaaggatctggcaaccatttagttgctttagaaactatttagagttccaccaggcggtggtgacacacgccgcgcgggctggtggtggacctcccggccggcagggggcgcagcggccatt

SEQ ID NO: 41278 - DNA, 412 bp, Mus musculus
  source 1..412: mol_type = other DNA
gtttctctgtgtagccctggctgtcctggaactcactctgtagaccaggctggcctcgatctcggtttctctgtgtagccctggctgtcctggcactcactgtgtagaccaggctggcctcgaactcagaaatccgcctgccttgctggctccaccgtgatggtgatggtaacgtgcctttagccgactggtaggtagcgcgggctagcctagtactcaccgcggtccgcctgttgcggtgacagcacaagaaggcagcggagaaggctcccgcaggagctgctatcactcatgtgttaagctccacccggaagcggctccaccaggacccaacatggcgcccggcgaagcccggggcgggacgacatgcggcgcggattgtaacgcgcagcgtgctcagtgcgcaggcgct

SEQ ID NO: 41279 - DNA, 376 bp, Mus musculus
  source 1..376: mol_type = other DNA
cagatctctgagttaaagaaatactgccttgtttgcaagaaatcagcatgcatgctgaaatcctttttttgcagaaggcatattaaaaacggtttctcttatttggacgtacagaagaaatcttgtttcataaaaccaaaactggccgagtctggcttggtctaaataagcaagtccagaacaggcaagctctgttttcaccagactctttattagagagaggggcactacacgccaggatgataacctaggctccatggcgagctggaatccagcctgaggtaacactggattgataaataatacatttaattgcccagcctcctcgcggtgagtacgcgcaggctcctaggcgccaggacagggggcgctcgtg

SEQ ID NO: 41280 - DNA, 375 bp, Mus musculus
  source 1..375: mol_type = other DNA
tcctcagtgccccacttgtcaagtactgagacaacaggcaagcaccctgtctggcttcctgaccccgtctgtaccttcaaggtaacttagtaagcagtcacacaagaccccagaaccttggggctggagcatgtgtctaaagacagtgacagtgtactaataaaattaaatcaataattctttaagacgcaagctaaacactttgctgtcagcttgggcttcatggtcagaccgccagcctggtctgggaaataaagtattaagtaaaattatgaaatattattgttttccaacctcgtatgtaagcaggaggaagcctgccccagcatgaactcaaatcagggcgtgctgctggctagagcccctttaagtgtc

SEQ ID NO: 41281 - DNA, 356 bp, Mus musculus
  source 1..356: mol_type = other DNA
ggggtgggggagtggccacgcctgcttcatgaataatacagcaacgcggagcgcttggggagcagccctggcaactgcgaacaaacgtgttcgtcgtcgcggcctggcagtctaccaacacgtcgaggctgccttcgtctcatgaataatgcaggaggagtcagagagctctgaagagctgttttaatgactggcctcgcgagacccttagggaagcaagactcacagtctccggtcccgagagcgggcctgtaacgcgcccggagtggggcgtggctatgctggcctcatgaataatgcagcacgtcggcgggcggcgcggcggggcggggcgggtcaggccggcgtgcgggcgc

SEQ ID NO: 41282 - DNA, 296 bp, Mus musculus
  source 1..296: mol_type = other DNA
ttggggactcggccttgctcccagccttcactgtggcacacgcgggcccccacagctccagctgtggaaagtttccgctaggaggccttgcctacccagggggaggccgcgtagacctgcccatcggcgggacagacagccgagcagctctgagacccccccggtggctgcctggtggtacaagggtgcgcagcgaggtaacgcgcaagacgctcgcgcctgagactccctgggtttagagcacccagaaccctggtcgcaagtcacgcccatcaggggcgtggtcgaggcgtggt

SEQ ID NO: 41283 - DNA, 449 bp, Mus musculus
  source 1..449: mol_type = other DNA
gacccctcgtgctctcacggggccgcgtgttatacacgtgcgtctgcgctggagtgggggaaagaagcatgctctcattcccagcgtgcacccagaggtggaggcagactttgagacagggtctcaagaccaggctggcctcgaacaaaacgtgcttggtctgggctctgtgcacagcacacagaccaggctttgagacaagcctggcctatatgaaacgggcccctcacagcccgcagcgctgtattggctcgcagaatgtcatgggcgcatatcctgtgagcccaacagatctgtacaactgggagtcttgctccgcagccgaggtatgcttggagctcgcggctggtgggcagtgccgcccccgcgggctctgcgcgtgcgcgctcccagcgcgcgcgcggggggggggcccacccgcgctcccgccgttgccactttaagagcgg

SEQ ID NO: 41284 - DNA, 323 bp, Mus musculus
  source 1..323: mol_type = other DNA
tctgcctcaggaatacagattcggcccgggactgagtgtgagagtgaggcccacacttgggcctcagggtcttagctcctgctgcctgccaggcacttatttttaaagatttatttattatatgtaagtacactgtagatgtcttcagacattccagaagaggacatcagatctccccaccatgtggtcaactcctagctatgtgttgctagctatctcttcttagcctctgatcactgtccagttctttaagtgattgttcattgagtgaatatttgcagaaaggcccctcctcctctcgtgagagcctgaggctggcagag

SEQ ID NO: 41285 - DNA, 371 bp, Mus musculus
  source 1..371: mol_type = other DNA
atggcgggtgaagacttaccatgcacctaccttgtagtcagtcattaacctggagtgaccccacaggtcagaggccacccagcagtatgtaaatactgggagggaccccagcaggagcccttgatgacacctggtgccctttcagggcccaggctgaccgtggatggggctcctggcaccttcatcctcctccacctgccgcctcctgtttggaaggaggcccgcagcagatttcctcttccctccattcccaagaggaacccctggtctggggatactgaggccccatttgggcttcagtctggactccagccctgggattcccgcccgaattagcctggtcacccgagttggcatcgcacacgggggcg

SEQ ID NO: 41286 - DNA, 304 bp, Mus musculus
  source 1..304: mol_type = other DNA
gctgaagtgacacttctgtcttcccgtgatgagtgaacacaatcaaattgttcccccaggcatggctccaggtaccttgtgagccctgcggccacagggaacctggcgccggtatgcacctggaccccgacctgagagtttggaaagctcggcgtggcctaggaatggcctggcccgggcggcttggggctcggcggaacccggggggccgcgcaggggagcgtacagctggtcgggggcgtgtccggggcgtgtccgcgcaggcccagcgttagggggcggggccgagcggccgggcggggct

SEQ ID NO: 41287 - DNA, 373 bp, Mus musculus
  source 1..373: mol_type = other DNA
tatttgagtccggaatatcattctttggcacccctactgggcaagcatgagaagcctggtctacattgtgtgttcaaggccagctagggatgtacagagaaacactatgttcctcccaaaatgataatgattttttttaaagcaaggattaaagcttgatggcccacagtgtgatcggctagcttcagctgtgtcgccagggaacgccagaccgttgttcaaagattctatttgagttcgaggccagcctggtcttcgcccacagtgtggcgccgaattaggcgccgaaccagggagagcacctctgcgcaggcgcccccaccgtagaaatacggtgaggccgtccgtcttgttccgtaggtaccgccctagc

SEQ ID NO: 41288 - DNA, 417 bp, Mus musculus
  source 1..417: mol_type = other DNA
gtctagacccctccctggctgtgggcaagagacaccatcatggccatgtggcctcatgagtaggcttggggaaccctaattattttccaggggccacaggtcactagcatggaatcctgtgtgtcacatggctagtgatttgtaaaatgtcacatctgggaccagtgagatgacacagttatggggagaggtgactcacctctgtgacaggcacacacctgtcaggtcagcctgggctacacagtgagaccctctgtggcagggactagcctaccggagaaggcatttaggccactacgtgtcttgagacttcaggagcacagttcaccccgtgggaaccccagagccccaagcagcccgtcattcctgcgatccgccggcaggggccgcgcgtgggccaggcactgctaacctggg

SEQ ID NO: 41289 - DNA, 411 bp, Mus musculus
  source 1..411: mol_type = other DNA
gagactcaggcctgttactgccacacttgggagacccaaaacaaagattaaaaaaattttttttcaccgagatcaagaaaaaaagggactctccaagggcacacctgccagctcccagccggaggaaccctggccggcgcccggcccccgaggggcgtgccttcggtgggcgtgacgcggggcgtgcctgggtttatgaggctccacaagagcctgcccggcaatccaagctgggcgtggtgacccggccaaaccgcgttccaacccacaatgcagcgcgttgttgtgccatgtagcgagcgtcgctcttggcaacagcggccgccaccaggcgagggcgtcccgctcccgcccctacgtcacctcgcgccaatggcgagcgggggcggtgagctcatcgcgggggccggt

SEQ ID NO: 41290 - DNA, 234 bp, Mus musculus
  source 1..234: mol_type = other DNA
gaagacatcgaggcctatctgagttttccagcaatcttcaaaacccggggaggaaggagctggctgcctcagctcagtctgggccgactttagggtgagacaggacccactcttcagtacaggtgagggtgtctccgaccacccacagcaggtcacctcaagatctcctaggcccaggccacaacagctttcctaaagccttggggtgaagtagtcccgagggtgcctcctggc

SEQ ID NO: 41291 - DNA, 318 bp, Mus musculus
  source 1..318: mol_type = other DNA
ggaagcaaggggttctctggggactcatcagaccctttttcaagctgactttaagacactatgtaaagagaacaggagcctggatcaacccaggtctttgtgaaaaaacagttctttcttttttttaaaaattatttatttatgagacaatcacgttgtagaccaggctggcctcgggtctttaatgagttttttgagccctaaaatgtacaagttcgagaccagcttgttacttgctcgggcttaccaggccctgcccctcttctgccggcgcaggccagtgtggtcccgcggctgtcagcttcgtttgcatagaaa

SEQ ID NO: 41292 - DNA, 358 bp, Mus musculus
  source 1..358: mol_type = other DNA
cctgtcactagtttagtgtagagtctatataacactgtaggaaataaataagactttcctggatgtttccagagtgacacaaagttgctgtgaagagatcaatacatgaattttgcataatgaactctgtatgagcataggtctcaaatagctgaggttagaccggtgtctatgaacttgcctgagcagcttcgctggcactgcttgcccctcgccccgcccattcccaggaagctttgtgggcgaggcggcgaccattggtcagctcggctcaggggtgggaggcccgcgagactcatgtgcgcttgcccattggtccgctgagcggcctgccgcaacgcttgaggcatgtgattgg

SEQ ID NO: 41293 - DNA, 219 bp, Mus musculus
  source 1..219: mol_type = other DNA
agagcctgggaagctgacttggttaacagaaaacccggttggcattcagtgtctggagtccaggcagttgctggaagcaagtacctcccaagccagggcccagaaccagagatgggaagttgccctgcctaagctagcttctgtgtcactcccccacctccgctgggctctggggaagaacatgagccccagcacctggcagtgggtggggcctccact

SEQ ID NO: 41294 - DNA, 442 bp, Mus musculus
  source 1..442: mol_type = other DNA
tccaaaacgctgggcgtcatagctcttgcttttaattccagtcggtcaagagcagtgagcatgctccagagtctgtccgtatttccggaaacaatctcgcttccggacgctgataagccgcattctcgcgcgtgttgggccggagacacttcgggcaggctgccgagctcgtccagtggaccttcggcaatttccggaagctatcggcggcctccgagtcaactcccaaggcctggagttgcgagtcggcttcggaccgaatgcgttagcctccgacggccgtgctcggctgtctccgaccagcctcggctgtctcgtggcaaagcttcccgcgggagcacactcggcagcttccggaggcttgcccgcgtgcctcggtcttcgggctccgcctcgtgtggggggaaaggcccgccctcccgacccgagtgcgctcggctat

SEQ ID NO: 41295 - DNA, 624 bp, Mus musculus
  source 1..624: mol_type = other DNA
ggtcctagcctgggtccccattccagcctgcagttgggtcatcctcctggacagaccggttcctgcaaaggcccgatagacgcccttcatccccagatctcggggacccggtgcaggtgtcctagaggggagggtcggagaggcctctcctaagacccgcccccgtgccgagcacgtctgcacaccatggggggagggtatcgcggaacccccatgcacgcatagtctgtgtgctcacacagagctggacgacggaagtggccggatccggggtcgtgtcccgctctccgccccgttgcgggcggggacctcccggccttagagaccctgtctctaccccgcaggctgcacagccccacgctcagctcggagcccggttttgtgctccggccgccgtcgccaccaccacgaccgccgccgccgtcgccgcagccgcgggatccctgcgtcagccaccgtcgccgcggttccaagccttcgggcccgcccccaggcggaaatagccgagcgcactcgggtcgggagggcgggcctttccccccacacgaggcggagcccgaagaccgaggcacgcgggcaagcctccggaagctgccgagtgtgctcccgcgggaagctttgcca

SEQ ID NO: 41296 - DNA, 390 bp, Mus musculus
  source 1..390: mol_type = other DNA
tataggatctgagcttcaaatccgagcaaggctctgatccggaaaaggacatattccttccatgcacactgcgttcacaccgcgcagtgccctagcaacggcgaaccatagcaaagccctgcctgggctgctgagtggtgcttagagctctagcaacaacctgcctgtgttgctgaggtccatagcaacgccccgcccttgctacctagagccctgcctgtgctgctagggggcctagcaacgcgccgcgccgatctgctcggggccctagcaacgccccgcgctgtccctcaaggccctggcaatgctgggcaccgacaggcgggggtacttagttggcgccccctcaggctccgccccgtgactgggcggggctcccagccgggcttc

SEQ ID NO: 41297 - DNA, 268 bp, Mus musculus
  source 1..268: mol_type = other DNA
ccccagaggcggagcctcgcgcggtggggcggggctgagcgcccagctctggagagcgtgcgcgctcggaaaagagaggccgcccagccacgggccgggaggggcctgggttctgtggcctgggatctcccacccgagatctcagagactctggccccgactttgccctcgaggtcggtgcactgcgcccctgttctcagaacccctgtctggaactgtccacacattgaccgtgttggagaggaccgccgtcggactcctcctgccc

SEQ ID NO: 41298 - DNA, 392 bp, Mus musculus
  source 1..392: mol_type = other DNA
cacacgggtggagtgtgccagggcagagacacagcctcattgtcccagagctgctgacggacacttgaccctgggccaggctgagccagctgaaaagattatcatctggggtttctctgtgtagccctggctgtcctggaattcactctgtagaccaggttggcttacatggccatcccttatctcaacctccctgtactagaaaatggactttaaaatgcaacctgcaggtgggggctcagtttctagagcctgcacagcatgcaggggagaggtgtgatacacacctgtcatctcagcactagggatgtgagggtcagccacagagtaaatttaagttcatcctgagctatccaagagatttctaggctttcaccccaaggtgggttgcc

SEQ ID NO: 41299 - DNA, 355 bp, Mus musculus
  source 1..355: mol_type = other DNA
cctgcgacgcagctgcgggtcccgagcccgctgcgttcgctcaccgcaaacggggcgcgcacgggcaccgagcccgtgttccacggaggccaggccgtggcaggccgggtactgttggagcttgcgggcgcggcacgcgtgggcgcgctcaggctgcgcgctcggggccgcgcgcgcgcgcactggacggagtcgcgcagcgcgggctccagcactgcttatactcagcgtcgtgaaccaccgcgccacgctgctcgcgccaggtacgggctggggatcccaggcctgtccgctgagccccgggtcttgttcctagactcgggggatatcgccacgcttcccgctggacgccacg

SEQ ID NO: 41300 - DNA, 240 bp, Mus musculus
  source 1..240: mol_type = other DNA
agaaatccgatttgaaggccagcctggtctacacagtgagttccagacgtgacagttgtcacgctgggtgactaagaccaggcggcagagccgcgctgcagcacctccccagtctggagcctcgtgaggccacgcccctaggcgaggctttctctaaccgcccttcacacgctattggcctggtcccttgtaggggggggagcttctatcaggccaccgccctcgtggaggcccctgcga

SEQ ID NO: 41301 - DNA, 293 bp, Mus musculus
  source 1..293: mol_type = other DNA
cccaacacctggactgtcactctgttggtggctctgctggggctcagtgctgtcactgctcaatcacgtgactgaaggggcggagactagactccttggtctctgggatgtcttagaagacacctgaaactcgccactcaaggctaacctggactccctggtaagttctagcgcagcctgtacttcacagtgagtttgacaaaacaaaaactttcgcaggttcgggggtctccccagccctgacaatgcaggatcacctgcaatagccagctgcctgtgcacagccaaggcgc

SEQ ID NO: 41302 - DNA, 272 bp, Mus musculus
  source 1..272: mol_type = other DNA
taatcgtgcttcagcaacaaggcgggggctgactcgggcagcagcggacgccgagcagagctgcctacagtcagtcgccccatagtgctggaatgaatgacaccatgacggccatgtcggttgcattcagacagggcaagggcccgcaccccgggtgggccactgacgccccctggtggcacagcaaccacatcccggccgtcgccacagggctggggccggcctccccatcttgttcaccaatatctgagatggattcttgaaaatacgca

SEQ ID NO: 41303 - DNA, 344 bp, Mus musculus
  source 1..344: mol_type = other DNA
cccaggtaagaagggagaaatgggtatccaatgaaccctcacttgtcatcccagcactagggaagccatggcaggaggactccataccagcctgcgcgtgcgtacacgcatgccctgtgcaggtaggagttccttctcccacgctgcggagaaaggcaggggcccggaagtccccgaaagtgaaccccagtcctgggttcctctgtgtgaacagagggcggaggtctgagctccacgctagtgtccccccaaggcccgctcgccccaggacggaaagggtgcgggtcgcgcccgcctcccaggctgggggcggggccgcgctgaccccggagcccaataaatcc

SEQ ID NO: 41304 - DNA, 349 bp, Mus musculus
  source 1..349: mol_type = other DNA
agcggagcacaagccttctgacttgcctcacactgggctcgagtgtatgagggactgaacaggccgggtggggcgctgcttgccaaccccaaccatgtggtgcaagtcccgcttctgtctggggccccacaggatgccggtcgcgtgcagtcacacagtgctgtgagttgcctgtagcggctgtcgcctttggggggctgtgcagtgccccccagagtgaagcccactccatccagatcatgaaggtggaagagattgcagctggcaagtgccgccggccagctgtcaagcagttccacgtgagtgaccccgagtgtggggctgacgcaacggacagtctctggacact

SEQ ID NO: 41305 - DNA, 204 bp, Mus musculus
  source 1..204: mol_type = other DNA
atattgtcgccttcaggtacaggacctggccaggaaaatgacacagctctgatacaattctggcaggtggcacactccagcatcccagctgacgccctctgcgggcctccgaggttacgcgtagactcccaggatccctcgcgcacgacgatggggcgtcccgggagaaacttgcaaaggcccgtcgcgctgctctctgggaac

SEQ ID NO: 41306 - DNA, 211 bp, Mus musculus
  source 1..211: mol_type = other DNA
ctcactcttgaggggagccagcgcatttcaaatacttctctgtgaatttgaggccagcctgatctagagaagtgggagccctagagacaacctgacttggtgtcagataggcttggtaactctcagtcctcttcgggctcccaaagcctagcgggcattggcttccggccggggtctccggtgcttccggtaagctccctgaaggggcgtg

SEQ ID NO: 41307 - DNA, 310 bp, Mus musculus
  source 1..310: mol_type = other DNA
ttctaaatgtctagagtcactttgactttggttacagcttactaatgtctgggttaagtcaagtgtttattactcaagtgtgtacaattgtatgcacccactggttggagacaagtcctttcctctgtggaaaattgtgcacataccttgtatgcattggataatagtattctcttccttttctttgctaaaattgaatagattcacagaaaattttggcaaaaagctggccataaagtcaactgactacagcccttctttttctccagggtcaaaaacagggtcagaagcctctatttaaatgtaatta

SEQ ID NO: 41308 - DNA, 471 bp, Mus musculus
  source 1..471: mol_type = other DNA
cgcagttcgggtgtcagaacccctcttttcttgagcagaaagtccagagggcgctgggactcgccctggcggatcacccagctgtcaaggcgggggcgagtctccagaggctgcaccccgtcagtgggattctctgagagcccggcgcctctctgacaccctagggctcagaccgcgagtgcagtgaggtccaaccccggctcgggtctccactcacggccgccgcgatacctggacctcgggccgctgcgcgccaccggtccccggccagcctgcccgctgctcccggccgccccgccccgaagcgaccagcctcgcccgccgctgcaccgtgcgattccggaggcgctgagtgggcgggcgccaactcgtcggagaggcggggcgactcgaggtcccgccccatctaaaggcgcgcagcgaacgccctctgcggaggggcgggcgctatgatagtcacgcccctcccca

SEQ ID NO: 41309 - DNA, 379 bp, Mus musculus
  source 1..379: mol_type = other DNA
gagctccctaggggactaaagtcgtgctaccatgtagggtcacgtttttcctttaaaaaaaggaagtgtgaattcacgcaccgaagcggctcagagcctgggctttggctcataagatcccagttctccagctccgctgcctgtgagcccaggatctggtctttgtcccgccttccactcaaaggcaagcgtctcagggtcccgcccgctaggaggcaggctcttcacgcgagccgcggggcgggctccaagcttgtggggaggggcgtgactatcatagcgcccgcccctccgcagagggcgttcgctgcgcgcctttagatggggcgggacctcgagtcgccccgcctctccgacgagttggcgcccgcccactcag

SEQ ID NO: 41310 - DNA, 300 bp, Mus musculus
  source 1..300: mol_type = other DNA
ggagtccatatctgaatcactatgggctcattttgattcaaaccacaaatttagagacagggtttctctgttcaccctgcccaggttaaaatgttatgtttaattgtcagatccccggagtcacaggcatcttttctaaaaacgtggacttgtctagcatttctaatgctcataagttacatgcgagattctcccttcggggcctcgatcatgtagccgactacatccatgatttattaaagctcaggatgctggcagccaggactggaaactagcaggtccggccagatcgggggagac

SEQ ID NO: 41311 - DNA, 404 bp, Mus musculus
  source 1..404: mol_type = other DNA
gacagggtttctctgttcaccctgcccaggttaaaatgttatgtttaattgtcagatccccggagtcacaggcatcttttctaaaaacgtggacttgtctagcatttctaatgctcataagttacatgcgagattctcccttcggggcctcgatcatgtagccgactacatccatgatttattaaagctcaggatgctggcagccaggactggaaactagcaggtccggccagatcgggggagacacgtgcactgcgcgcgcagaggcgggaatggcttttccagtcctttcataatcggctgttcagggcctacatggaatttatctttgaataaactgcggcttgaaataaaactctacttccgtcccaagcgtagcagggcggacctcggaggggaaggac

SEQ ID NO: 41312 - DNA, 305 bp, Mus musculus
  source 1..305: mol_type = other DNA
aactaataaatatatttgaaaaaccaaaaaaaaatatatatacatatatatgtgtgtgtgtgtgtatataaatatagatagataggctgatattctcatatacatgaaataaatctttaaaaataaatatattaactgtaatggtaatctacctggcccgctggccctgtattggtctctgagtatgtacaaggtcacacacacacaaaaaaaaaaaaactaccttattttcccaatagactggggtaaatacgcgccgcaggctccgcccaccctgagagccccgccctagcggccgagcgccc

SEQ ID NO: 41313 - DNA, 205 bp, Mus musculus
  source 1..205: mol_type = other DNA
acttgccaaaggccttctcagttacttataactacactgtggacaagcttattgttgccagtgcctccaaccgcctgatgcatgagacagttttggtttttttttggttttagaaacacacacacacacacacagcgggacaaaggtcctggtcctccatcctcctcccgttctggaggaagccggcatcctggttggctatcgc

SEQ ID NO: 41314 - DNA, 624 bp, Mus musculus
  source 1..624: mol_type = other DNA
ggcaccttgtccaggttggccgctatactggacccaggcctgcataggaggcagaacaggcctggccgtcagaactctgactcaggggtgaaaggtcaccccaagagggacttttccctctgttaacaggcctcaatcccatctaggcctcaaagaggggggctagacatctgtggcccagccggtcaccagcccgggactggcacgccttccggccggagaggcgactgacgcccagcctctcccacccttgaagcctgaaaggagagagggggaccccccccagactccggacaccaggtgttcaccggagcgggagggggccgctccagctggcagccgcgcagagcaaagcggggcgcgcgcctgagcggcgggggcgtgccccctgcagatgtccccggggggcgcggctgccgggagccgcgcggagctccccgatgccccgacaggactcgcaggggttaaggctgcgcggccgcgtgggggagggtcagctgcgcgccccgccccgccctctcgccggcccacggctccgggcggcgcgcggctaccccatgcccttataagggcggccgtcgccggggcaacgagcgcccgcccccggccgcgccgcgcgccccc

SEQ ID NO: 41315 - DNA, 227 bp, Mus musculus
  source 1..227: mol_type = other DNA
ccaggatgccggcttcctccagaacgggaggaggatggaggaccaggacctttgtcccgctgtgtgtgtgtgtgtgtgtttctaaaaccaaaaaaaaaccaaaactgtctcatgcatcaggcggttggaggcactggcaacaataagcttgtccacagtgtagttataagtaactgagaaggcctttggcaagttcccgagggccactgatttcccagaaggtgtct

SEQ ID NO: 41316 - DNA, 381 bp, Mus musculus
  source 1..381: mol_type = other DNA
ccttctcaagctgttcttgcggaacacccgggttcagctcccacacggggtcacacactttagttaatttaaaaagtaggtcagcttgaaagtactgtactcccatttgcaaataaggaaaatgaagctctttatattttttaattaattaatgtgtatgtgcacacgtgcgtgtgcttgtgcaggctcccggcccaggcacacgtgtttctgggtatcgaacccaggtcactagacttggcagcaagcatcttgacatcccagcactcggttggctgagacaggaagttttgaataccttgaggtccgtcaggttgttaaagacaaagagaggccccgctcttggcatcccagacttcggcgtagacagttgccgcgcga

SEQ ID NO: 41317 - DNA, 368 bp, Mus musculus
  source 1..368: mol_type = other DNA
ccctcattgaagacgggcagctggcacgcagcgggctggcagcttcttggcgcccgcagccaagacttctcttggcgcgcggcccggagttccagcaggctggcctgggggaattttcttcccgcagctcagatctgctgaagttcatggccatgaactgcaccttgagcccatgagcgaacagcgcgccagcctggggctcagtcttggtctgcagcagctctgacacttctgacacagcctctggttcaaccaggggtggggctgctgcttgcagaccgcgcgctgatcctgggaagagaagcctctaggccagacggctcgccgctgccataggccgagatgcctgcccatctgctccaggcccc

SEQ ID NO: 41318 - DNA, 384 bp, Mus musculus
  source 1..384: mol_type = other DNA
ttgaaccagaggctgtgtcagaagtgtcagagctgctgcagaccaagactgagccccaggctggcgcgctgttcgctcatgggctcaaggtgcagttcatggccatgaacttcagcagatctgagctgcgggaagaaaattcccccaggccagcctgctggaactccgggccgcgcgccaagagaagtcttggctgcgggcgccaagaagctgccagcccgctgcgtgccagctgcccgtcttcaatgagggcgggtgaaaaggccagcagccagttctccagactgctgccagagtcgtcaccaccactctggggcgccctctaccagtggccgaggcgcgcaggagcgtcacctgcaggtgtggaactacagctcccggaag

SEQ ID NO: 41319 - DNA, 345 bp, Mus musculus
  source 1..345: mol_type = other DNA
cataattcttaaaatgttatacaactttttctgagacagtcttgctctgtagaccaggcaggcctcaaagtatgcatgcagcgttctacctacatgtatgcctgctggataagtaccttacttctgccatcccaggaattcgggtggctgaggcaggagaactcattacaatgagccttcagcagctcctagaaggagcagagccctgccgcatcgctggcgacctgtgaactacaactcccaggacgcatcgcgcgggtcgccacccagccccgggcggggtcaccggtcggccaatgggagcgcgtcgggcgcggccgccgtgaagggcggggccaccacgcg

SEQ ID NO: 41320 - DNA, 54 bp, Mus musculus
  source 1..54: mol_type = other DNA
ggtgcaggatggcccacccttttttgacacagtgtcttggaagcccggccctca

SEQ ID NO: 41321 - DNA, 260 bp, Mus musculus
  source 1..260: mol_type = other DNA
agaattggcagtgcgagggcgctcgcgaagccccgcccgcccagaaccttcagtgctgtcccgggttaacccgaagttaactggaggccccaggatccctggaaccgccagaaaggcttccttgcctggggatggcgcctggctaaagatacttgcccaggagctgcagctggaagaaacttcccagaagtttggaccagattttctgcagtgtcagatacctgttgctctaggaaccgaaaacaataggaacacctcct

SEQ ID NO: 41322 - DNA, 291 bp, Mus musculus
  source 1..291: mol_type = other DNA
gccacacactattccctaactctacagctggtgggagcacctgccacagagtaaaagcctgggccacagagccagtctctctctctctctctctctactttgtagaccaggctggcctcgaactcacaccgcccggccagggagccattagataacgtcccgggggaccaggctggggaagccagttcagtcacccagtgagtgccccgccagactgtcagtcagttcctcaacagcctgggtgggagtgttgtgacagtccccatttcctcctggccaggaaggagactc

SEQ ID NO: 41323 - DNA, 315 bp, Mus musculus
  source 1..315: mol_type = other DNA
cctcagtaaagactccatagtgttttgtgccgaggccaagccctctctgagtgccgggaggcacactttgctacctggccaggcgattctcttggcctttggtcttcagtccacaactgaaccttgaagtcttagttccccttctatggggttaaaggcgtgcgccaccaccgcccggcggtgactggccagaaggccaagaatttgagttgaattccagaagtttctcttgcttctaggggcattccaggaaaatgaaactgaaaggctgcagtttctccactgcagtttgcaacccggcggctggttcctgag

SEQ ID NO: 41324 - DNA, 332 bp, Mus musculus
  source 1..332: mol_type = other DNA
aatagaaatgattaaggcatcactttcctgtcttggcaacagtctggggactatgtattaacgacaatgtttgtgttagctaaaacctaaacctaaaataataaataattgtcttgtgtctggaaaatactgcaatctctgcaaaatggttcttaagtgttttgcttttaaaagccttggctgtccctgtagaccaggctggccttgaagggattaaaggcttaattagactggttaatgccgcacagcattctggggaatgtcccgtccggacgccccctccgcacactggcacggttactttggactggtcagcagtgcttgcgcatgcg

SEQ ID NO: 41325 - DNA, 211 bp, Mus musculus
  source 1..211: mol_type = other DNA
aagcctggtgacctgagttcgaaagcagaacatgttcttgccctgacagtactagtgcactctgaattcaaggtcagcccgagtgagttccgggcaacaaaaataaaaacaaaagttctttaagttgtatgggagaaagtaaggggactgagccatgcctcctcctcactgggtaggcaggggccccagttgcagcagtggaaggttcaga

SEQ ID NO: 41326 - DNA, 337 bp, Mus musculus
  source 1..337: mol_type = other DNA
atacatacatgtaggcacaaatgatgatgatgatggtgatattttaataaacagctactagaagcttgaatgcctgtcttgggctttgtgaccctgcctgagtccaagttttttttaaagacagagtctctataggtagccctgactggcctagaactagctatggagaccaagttgggccccacttcctgaggcccgtcctcttaagtccgcccttcaggagccttcttaagcacctaggggctaggctccacccctctacaggggtggagccccctcgggatctcctagcatggccccccccagcacacccgggggaggcgccctcggccgacgc

SEQ ID NO: 41327 - DNA, 307 bp, Mus musculus
  source 1..307: mol_type = other DNA
agggcatcccatgcccttctgcatgcacctgtggggcagtttcacattcaaatgcagatgttccctctttctgccgcagacagctgtgagcagaagtgctgtggcactcgggccagcaaggcgtgtctcgcccagggaagcgccggggactgcccgcccactacccacctcaaagccctgcggagcactgcggtttcgggcggcgacgcttcttttgtgcaactgcacatgcgccacgaccttggctcaaagtgctcggacccatggcagcgcggccgtcgcgcaggcgcactggcgtactggcctc

SEQ ID NO: 41328 - DNA, 369 bp, Mus musculus
  source 1..369: mol_type = other DNA
cacgatcccgtgcatcttccaggctgtggcccggcgacaaccagagcgcctggcactggtggacgccagtagggccggccggagttcgtgggactgtggctgggcctggccaaggcccgggagcccctggccttctgcctgggcacatcagctgccaaggccccctgagcctctgtcaccacagcggtggcggaggtgagcgagcagctggggaagagcctcctcaagttctgctctggagatctggggcctgagagcatcctgcctgacacgccaccacacccctggcacaagccccaggcaagggcatggatggtaagtggaggggtccctgacatctaagcagggccctcccttcggtttacatcc

SEQ ID NO: 41329 - DNA, 237 bp, Mus musculus
  source 1..237: mol_type = other DNA
ccctgccagttccaaggcttgtctgagggaacatcccctcacccccatgtgtccctttctcaagggcttcaaggcagagataggacttcatgtagcccaggctggcctccatgggtgctgggatggcagagatgtgccccacccatccagggtctcccctggggctgcaccagtcttggtccagcctgtcccttgaggccaggaggaggcaggggtaccagatggccatatgtaccc

SEQ ID NO: 41330 - DNA, 329 bp, Mus musculus
  source 1..329: mol_type = other DNA
atcaggctggcctcaaactcagaatgcgccaccaatgcccgtcttggctacacagagaaactctgacctcaggtgtctgtacacacagacagacgtaatctctccttgcagtctctctgcaaggacagagacagtggctccaacaagatgaagaaaatcgatcctggaactcactctagaccaggctggcctcaaactcagatccagaccgggctctttcaggctgctgtcctgagagaatgaacagaggcctgaagggccaggagatcttgccctggaggagcccctgcgggtgctggaggagcccgtgagcttcgcgctcttcctcg

SEQ ID NO: 41331 - DNA, 287 bp, Mus musculus
  source 1..287: mol_type = other DNA
atttttttttttaagatttatttgttattataacaatagtacactgtagctgtcttcagacaggatctggaccaggctggccatatgacatggttctaaatagaagaagcttctgtaaagacagaacactctcagggcgtggtcaaagaactgtctgtggctaggggcggggcttccggaacctccccgcaagtgacgttttaaaggcgtaggggccacttccctttaaggagcgtgtcaggggtgggacctggatgtgtccttcccgcgccgactcctttaaggcg

SEQ ID NO: 41332 - DNA, 276 bp, Mus musculus
  source 1..276: mol_type = other DNA
tgaattctattcctggatatgtgtgtgcctcatttctacacacataaacaatgtaatgtataaaaaaaattttagatttattttgctttctggtctctggaagaccagctggtgctcttaacctctgggcagctctccagacccaataaacgtgtgttttttgtttgttttggtttagagatagaatctcactatcctcatacggggaagcataaggcgtctgcccggccccgccccgtcacgcgtctccggctccgcccacgccgcagcgtcaga

SEQ ID NO: 41333 - DNA, 225 bp, Mus musculus
  source 1..225: mol_type = other DNA
aggagctatgctggtggccagtaacaaccccccagcccctcactgggggattctaggtaggagctccaccctctgggtcccaggcacccaccaggaggggaagcacagctgagacactgccactggcacagtgatggaactcaagtcgagcttttgagcagcagcaagcaggtgggcttcccaggagaaggcccctctttaaacattacgcagtggccgcagcaa

SEQ ID NO: 41334 - DNA, 311 bp, Mus musculus
  source 1..311: mol_type = other DNA
ctctgggtcccaggcacccaccaggaggggaagcacagctgagacactgccactggcacagtgatggaactcaagtcgagcttttgagcagcagcaagcaggtgggcttcccaggagaaggcccctctttaaacattacgcagtggccgcagcaagtccctgcccgggctggctcaggttgttccaaggacatgcaaagacaggagcccggggagtgctctccaccccagaagggtggcctgcggcacagcccccagggcgccctgactttccgtaaatgacggcggccaggaagctcaggggccgcacag

SEQ ID NO: 41335 - DNA, 240 bp, Mus musculus
  source 1..240: mol_type = other DNA
agatttttttattttttaaaatacagtctcatgtcctggaactcactttgtagaccaggctggcctccaaaccccttgccctcagcagctctgaagggtgggaagtgtattttcacacaggccactgcatgtgcgcatatctacagatttggatggtcctgtgacctttagacctgtaggtctgcaggggtgcagacatgcacagacacctagtccccagcttggctgtcacttgggggc

SEQ ID NO: 41336 - DNA, 325 bp, Mus musculus
  source 1..325: mol_type = other DNA
cccagaatggggatattaaatatgggctgaattcaaagaggtcttggccagatcccaaggacaccccatcccctcctgctcagctgtggtccttggctcgccaggggaactggttccaaggctggagctagactgagccagccctgtgcaccccaggacagtgcctgcccttacaaaggggcgcttggcttgttttaaagttggggagcggctcctggcacagcgccgcacctgggagaggacttcaaggtcccaagctggacgcccctgaccgtgactcgagttcccgccaaggcccatgggcggcgcgaggcagttataagga

SEQ ID NO: 41337 - DNA, 189 bp, Mus musculus
  source 1..189: mol_type = other DNA
tatcccagtgcccgtgaatagctgcccactgtgtactggtccagggagccagtgtcaggaggaccctccagcaggctactaggagggcctaccaacaggttttaaggtcctgggatccctccaggctgtcctcagggggagctcctgctccctctcgtggcgtggaagaggagggagactttctccttg

SEQ ID NO: 41338 - DNA, 291 bp, Mus musculus
  source 1..291: mol_type = other DNA
gtgtcactagcaccccaaggacttgggtacacgtgggcacagccagcctgtcacctaagcctcaggttttaggtaaactgtcttaggctaaaacattttcagaggtggtgttttaacttctttccaaatcacacggtttaaaaactgtagtaaaacaaactttaatctgttgatcctaaagtaattgtaagaatatttgagtttccgcttcacctgtctgccctgtgactatggggaggtcccagggggttgggtggcaggcagggcgggccaggcttcctgtcctccccc

SEQ ID NO: 41339 - DNA, 370 bp, Mus musculus
  source 1..370: mol_type = other DNA
attgtttgaattgatgcataaattgattaattgattcattggtagtgcaggactctctcaaaaaatccacctcagtctgggatggacggtcccacttccttggtgcttctgagatggctcagtagtcctgaggatcatcatgctgccatgtgacccgcttaatgctggggcagcctggcttcatcaccatgtgttgcttttgtaaaatgaggctcaatattaaatgtcacctaattcgtgagagacttgacaggtgcagagatcaaggagcttctcctgtcacttgctcagccggtttatgaagcaccgcggggcggagctcctcctgaccacacccatggcggggccagcagcgcgctccgcagcgcgc

SEQ ID NO: 41340 - DNA, 350 bp, Mus musculus
  source 1..350: mol_type = other DNA
tcagccaaatgctactgtttaatttatactaaaaatcgttttaaactttagtcttgcttcatactgattcagcctaaaaattttctgcagcaactctgcttctccggaaaatacatttgttctctgaggtaaagggctgtctctgtgagacactctgtgagacatttctccagaagatttctggaacctagctgcggaagttcctcttccaccatcgtaggggtcgccaaccccgggagccttggtgaaggcgaccggcgggcgtagcggaagtccctcccctgtgctgtcacacccgcagagctgtacgagccgggacagcgcgtgcgtctgctgacccttcagaagct

SEQ ID NO: 41341 - DNA, 173 bp, Mus musculus
  source 1..173: mol_type = other DNA
cattcattcactcatttttattttaaactagacagttctggaaatactgtaatgctggcgaaacatagttttaacggtcaaaattcaaaggtaatgtaagggtcttttgacaacatacaacacctgtagtgctgtattgttctactgcagtgcagttatgagataagtgatcc

SEQ ID NO: 41342 - DNA, 408 bp, Mus musculus
  source 1..408: mol_type = other DNA
aggcgtgcgccctggctgtcctggaactcactttgtagaccaggctggcctcgaacttactgggactaaggtgtgaggcactttataataaacctcatttctaaaaagaatgtcctttgtggaagagcttaatgttgtcattagcgtgtattaattacacgaaaagtttcaatataacattttcattcatgtatcttgtttatattcataatgataaatttattctgtcacttaggcttcctggatctgtgggcccagcaggtagggtgccgagaggcagcgccttgtccgccatctcccttcgggagtcccggacggtttagcgtccttggctgtatgacgccataccctaggaaaggtcgggagccggagcagcgccggcgggaggagcggaagttcctcacccgc

SEQ ID NO: 41343 - DNA, 267 bp, Mus musculus
  source 1..267: mol_type = other DNA
aagacattctattggctagcaccagtcccaattgaacagggaaccttatcagttagccacaacaacttttatagtagccggcctgctgggatggcaggttgtgtgtgtcatcacacccaattttccgcgaatatggcttttcttgtgtcctttttggaaacaaggtctcctgcagcccaggttaacgtcagacctgagcctgctgtggggtgcctctgcgaaccccagacctgaacatcaggcagcgggaagcctctcggaggccgg

SEQ ID NO: 41344 - DNA, 303 bp, Mus musculus
  source 1..303: mol_type = other DNA
gtacactgtagttgtcttcagacacaccaacttagaaagtcacttcacctgtcttcagtatacttaccatacttatttttaagtatgataacatagccctaccggcgctgaagccctgggatcgctcacggcgaagcattaccacaggtacttcctgcgcttcgcctcagcgccggctgcggctacggctgctgctgcgcaggcagagaaggcgggaacacgaggcgttctctgcgcgcgtgcgctctctgccagagccaaccgcgcgcgctgtcgggggcagggcctggacgatgtgaccac

SEQ ID NO: 41345 - DNA, 397 bp, Mus musculus
  source 1..397: mol_type = other DNA
aaacagagatcacctgagagctgcattcagaaagtgagaatgcaaaatccaatttgtagtgtttcaaactagggactcttatgagtccaagaatggccagtcatgcacacttttgcatgcatgcatgcctatgctaaggggtcatggaaggctcccctggaacaggagcgaaagaccttgtctatatacactttgggcaatggaccattaggctgactcattatcttctgtgtccccaggtgaaagagcagcgcggccgctgggccaggcggggcgggcagtacccaccccccgcccggtgctgacgtcgcggccggcccgggtgacctcatgggcctgacagcagggccggggggcggggagaggcgggggcggccccggcgtggccaaggctggc

SEQ ID NO: 41346 - DNA, 403 bp, Mus musculus
  source 1..403: mol_type = other DNA
gcccaagtgggccttcttttctcagcctctcaagtgtttggatgacaggcatagcacctgacatcctggctgtctggctggagggatgtagagggagttatctcttactcatctctcttcaatacctacacaatctcatgccttgagatcccagcactgtcaatgcccctctcttgagagggaactgttctcagtagggctttgggctttagggtctgacaaacctaagattgtattctggtccagactgcttacaggctgtgtgaggatcctgtacacaaggggtgtgaagtcccgaggacctggtactcactctttgtgacccacatgatggccacctatccaggcagggagaggcagctgggcctgcaagggattggctggtctagcctagacttctcta

SEQ ID NO: 41347 - DNA, 359 bp, Mus musculus
  source 1..359: mol_type = other DNA
ggtgtcacctccgggggtctccccctgcagcctgcaccttggtctccggcgcccgccagggtcccggcctggactccctggcgggaggtggaggccgctgcggttcttccagccccgtgaccctcccggatcctcggccccataggggcgcgtccagccctggtcaccggccgcccaaggccccgctacgggaagtacggccggcgcctcgccactggtcgctgcaggcctacgcccgccacccggagccccgcctgtcgcagagagcccaggccggaagcagccgactgcacagccgtggtcacatcgtccaggccctgcccccgacagcgcgcgcggttggctctggcagagagcgc

SEQ ID NO: 41348 - DNA, 363 bp, Mus musculus
  source 1..363: mol_type = other DNA
gaaagtcacttcacctgtcttcagtatacttaccatacttatttttaagtatgataacatagccctaccggcgctgaagccctgggatcgctcacggcgaagcattaccacaggtacttcctgcgcttcgcctcagcgccggctgcggctacggctgctgctgcgcaggcagagaaggcgggaacacgaggcgttctctgcgcgcgtgcgctctctgccagagccaaccgcgcgcgctgtcgggggcagggcctggacgatgtgaccacggctgtgcagtcggctgcttccggcctgggctctctgcgacaggcggggctccgggtggcgggcgtaggcctgcagcgaccagtggcgaggcgc

SEQ ID NO: 41349 - DNA, 420 bp, Mus musculus
  source 1..420: mol_type = other DNA
ggattccaggccagccaggatgctgtgaatcctgtttttaagatagatggactctatggtttactcgaatgtccctatgttagcccaggctagcctggaaccaagccatcttgctttgatgttggcctagagggcaacatgactgtagaatgatatttcaatatgctgtatatgcattagctcagtaggtagagtgcttgtagctcagtaggtaaagtgattgtagctcacttagcaagcatgaagccctgggttccgcataatcttggcatgatggtaaaccctgaggtcgaggcaagagtctacttcagcaccccaattggggtgcataaagtgagcaaggcttggcaagaacaactccagcctcagactcaagccttgaggagaaacaggaactgacgggctcctggccctgcccct

SEQ ID NO: 41350 - DNA, 342 bp, Mus musculus
  source 1..342: mol_type = other DNA
taaagaagggacccttccaggccagcctggtctacagagtgagttccaggacagccagggctgaagcaagcataggaatcctccgcctcctgctccaatatgtctgtcaccctcagactgatcctatagatggtaatgtaatttcaatttcacaaggtgttccagacagaatggcttctctgtgacctctcacagacacctgtggacacattctgctcaaacattatgagcacgggtgctcccgaggagccacctgtaatttcagttattcaaggctgcagtctgcagcatgggcaacaagcagactgtgtttatcacgagcagcgatcctgccaggctggc

SEQ ID NO: 41351 - DNA, 359 bp, Mus musculus
  source 1..359: mol_type = other DNA
agttccagttttctgcatgctcagtcagaactgcagcaaagactcatttagtgtcatgacacttctgagagtactgcaaatccacgtgtgctctggcacgtgtgtacacacactcacatacacgtatacaggtaactaacttttaatgtaattttaaagatttattctttctttttttttttaagatttatttattattatatgtaagtacattgcactttagttctggctgacctgaagtcactacagctgaatccagagatccagagatcctcctgtctctgtctctgggtaattgtaattttctaaattggaaaaaaagtaattaagtaaaccaaatacgacgcgtgcgtcctagc

SEQ ID NO: 41352 - DNA, 366 bp, Mus musculus
  source 1..366: mol_type = other DNA
tcaaggccagcctggtctacaaagtgagtccaggacgagaatggcagaattaaaatttaatcagccttactttggttttagtcctggctgtcctggaattcactttgtagaccaagctggcctcgaactcagaaatccgcctgtctctgcttccagagtgctgggattaaaggcgtgcgctagctaccacgcccggctcagccttactgtgaattaggcacaggctaagttaaccctgggttcactggggcaagacgccacctaacggcgagtcacagtcagtgacgggttcaggtacaaggtggtcctccaggccccgctcttcaggaaggccacctgcgcacttgcggacataacggtccaccc

SEQ ID NO: 41353 - DNA, 445 bp, Mus musculus
  source 1..445: mol_type = other DNA
aggcttgtaagcagacactaagccatcatgcctgcctctagtgtttgcttcttttttaagacacggtctcttgtagccaaaggggccttaccatgccatggtcaaggtagcttaaacaaagatttcacagagcgttccctgggtgagcactgtgaccccagactccccatgcatcgtccaggggcttgaggctggggagataccgggaaagcctcgtcacccgtgttccccgcggagtcccaggtgccacgccgtcgccatagggacggtcgggggcggggcccggccgcgggggcggggcttgaggagcgcagtccgggctcccgcagtagccgccacagccacccgcggctaaatttaggctgagcccggagctcgtccccatccgggacgcgtttccgtcgacgctagcccggccctctgtgcctgccgcgcctataaggcc

SEQ ID NO: 41354 - DNA, 163 bp, Mus musculus
  source 1..163: mol_type = other DNA
aaaagtactgtataagtatacgtgtctgaaagacagctacagtgtacttacatataataaataaataaatctaaaaatatctgtacctgctctggaacctgtaaccaggatacactgtgaggtcacctgagccagtgtgcggttgcctcaggagacagcgcca

SEQ ID NO: 41355 - DNA, 347 bp, Mus musculus
  source 1..347: mol_type = other DNA
tttaacaagcatactgagtggtactaacactgcatatggcccaagttagacttgagcaccatggtactccatttccccgggaaaagttcagcaaaccctaggcattagtagaggctactaggcctgggtttagccaagctccgattcacagacccagacctggagtgcagcggtctggaagggagccctacctatcccttgggttccctgcctcacaggagcctccaaagccaggggctcgaggctccgggctatgcgacagagccttccccataaagaggacttggctgtgctgcgcgcgcatcgcatccctcgtactagtgcgcaggcacggccccgcccccgtt

SEQ ID NO: 41356 - DNA, 252 bp, Mus musculus
  source 1..252: mol_type = other DNA
tctaaaagactaaaccaaaacacacttcggtcaatttttttttttttttcagccctggctgaccaggctggcttcgaactcagaacagggtattgcagagcctgcatgtgccttgggagtcattggtggactgcacccagcggttcctccagcgctctgggtggacacatagtgccacgcgcagcacacagatggcccagagcaatgcacgagccgagaccatagctgcacgtgcgacccgtaccgcttgac

SEQ ID NO: 41357 - DNA, 304 bp, Mus musculus
  source 1..304: mol_type = other DNA
cccctggcccatctctttcctgctagtaatctgcaagcagcaggccccagagctggagcccacctagtggagtctccagcagcaggaacagcacctgctggccctgcgccaggtatgcctgcatgtactgtcagtgaccctggagtcaccttcattgtggatgccataccattcttaatgagtagggaggggcaatcatgcatggatgtttaccatcagtcagacagcagtgcaagggccctgctcataccacctgtcccttagccgtggcacatgcagtggaacagcaaatgcagaagctgct

SEQ ID NO: 41358 - DNA, 469 bp, Mus musculus
  source 1..469: mol_type = other DNA
cagtctaccttgaagaacgggtgagtaaataaacgcttgctgccagagttagtttcttttcctggatgcacaatgtgtatacacacgctcgtgcccgcctccataaatgaacacattttaaggagcgcgaacaattaaaacttgggaatcgagtttgaggggaaattgacacctaccgcacaccaggcacgcggcttccacagcctcaagtgggcgggcccgcgtcgcccggcacctcccacggagtcctgccagtcccggataacccacccgcgggccctacggcccgccttccgggcttagccccgccccctcccggaaagcgtttaagtgagggtagggccctcgccgacgacgtgtacgggcgcgtcggcggacgcgcgacgatgactggggcggtggccaatggcgagcggcgatgacgcaagggccaggggccaatggtgagcggcgtctgccggcgcgccct

SEQ ID NO: 41359 - DNA, 370 bp, Mus musculus
  source 1..370: mol_type = other DNA
aaacctttgttttcgagacagggtttctctgtatagtctatcctgaaactctttgtagaccaaattggttttgaactggcaaaatataaatctttttttctttcacacgcctgtcatctcagtacttaagagctagagatcagcttgggctctatgagacctaaggtgttgacgcagcttccgcttctccttccatagaacgtctatagtcgcttcagaagacgccggcgcagcttctcacgctccagcgcgtcggggaacagcggccgggccgccgcatgcgcaaagaggctcacgcgcatgcgtccagccgtaaatggcgcgcgaagcggcccgcgaggccgtcgtaaacgtcgcccttcgcgccact

SEQ ID NO: 41360 - DNA, 721 bp, Mus musculus
  source 1..721: mol_type = other DNA
cgtgagaatccgacgcaccttggcggcgtctcagtcagacggcccgcgcactcgtaccggtgtgcgcgtaggagaccggcaccttccagatgctgacgtgcgccgaagcgcggcggcagcagcgggccggacgccggatgcgggccgggtccggggcccgacacgggtggcgcgggcggcacgcgccaggcgcgcagcagcggcggcagccccgcgcacagcgctaggatgtggcacagcgacacggtgaccgggaacggaaggcgctcaaaatcaccttgttgaccacgttaccgcccgcgctcagcgcgtaccatacgcgcaccctcgcgcgccccgccgccgccacccgcgcccgggacccctgcgcccgcgccgggacccgcggttgccgccgccgccatcctgcccgagcggccgccccttcccgccggacgaccgccggacgcgggcagggggcgggacagccctggagggcgcgccggcagacgccgctcaccattggcccctggcccttgcgtcatcgccgctcgccattggccaccgccccagtcatcgtcgcgcgtccgccgacgcgcccgtacacgtcgtcggcgagggccctaccctcacttaaacgctttccgggagggggcggggctaagcccggaaggcgggccgtagggcccgcgggtgggttatccgggactggcaggactccgtgggaggtgccgggcgacgc

SEQ ID NO: 41361 - DNA, 535 bp, Mus musculus
  source 1..535: mol_type = other DNA
cggaggtgagatgcaaaggcggggtcgctccgtcccctcggaacgccaaggggaagatgctgggcgacggttccgcatcctgctgtcccgcacggatgcagacccgaggtgtcagcgtcgcgcaggccttgcagacttgcgtcctctgcagaggtggcagctcccagacgtgaccttaggtccccgcagcacgcgggtcacatggggacacgcactgccctgcagacccgcgcctggggcctctgcagcggagaaggctgtgcggagctcctccgagctcctcgaggcacgagtctaaacgcagggaaccgctgccgcaggaggccctcatcaagggtgcgcttccgttaggaagcccatccctccagtcccgagtgggcgtgaacggccctctgtgtcggacctcggaaccaggcggcaggacctgctaattgcgcctgcgcgcgcgtgcgcacaatcaataggaggggctcacgagccggaaacctcctcagcgtggcgccgacgctgcgtgcggcgcgggttacccagagtg

SEQ ID NO: 41362 - DNA, 299 bp, Mus musculus
  source 1..299: mol_type = other DNA
ccactgccaggcaccgccccccgcctgcccccacccctcgggagaggaggggtggtgggggactcctatattcctgaggatcctcaaccaaaccctcacgttctgtttggttttgtccaggggttactcgagtcagacctgggaggtccgtgggaggtacaactcaggcaggaggtcatcctgactctatgcactctgagccgggatcgcagttctccgtggggacccaagtggagtactgagcatgcgcgcgcgcaccccaagctccccaaccaatgctgattcagaattggtcagtt

SEQ ID NO: 41363 - DNA, 299 bp, Mus musculus
  source 1..299: mol_type = other DNA
aactgaccaattctgaatcagcattggttggggagcttggggtgcgcgcgcgcatgctcagtactccacttgggtccccacggagaactgcgatcccggctcagagtgcatagagtcaggatgacctcctgcctgagttgtacctcccacggacctcccaggtctgactcgagtaacccctggacaaaaccaaacagaacgtgagggtttggttgaggatcctcaggaatataggagtcccccaccacccctcctctcccgaggggtgggggcaggcggggggcggtgcctggcagtgg

SEQ ID NO: 41364 - DNA, 382 bp, Mus musculus
  source 1..382: mol_type = other DNA
ttccccgagtcacagatgcaagagccccaccacctcctgatcccagccagtggtgagagactatgctaatttagcaaagtggtggtagtagattcttttctaagatccctgaccttaaagtcaaattagacacgttccctcactgatggattggaggtacatccaagacaatccagcgctgaagcacatttcctgtgaccccgggatggcatgacagtcagccagatgtggaccagactgcatcatgcaccacctgcttggctgctgtgaactgtcaagcctggcacacaacagttaaccgccgggtctggccgggtgcccagcctgggctgcaacacagccagttcctttcttttatcccacttgctgggagaactcagcg

SEQ ID NO: 41365 - DNA, 463 bp, Mus musculus
  source 1..463: mol_type = other DNA
cacaggagtgagtttacctacacatatgtacacacacgtgcacacacaccacatggctgaattgaggtcttgggtcaacacagacatcatgttttccctgttttatttatttaatgtatttgagtacactacagtgaaggttgtgagccttcatgttacttatgattataaataagtaaactgtagctgtcttcagatgcaccagaagaagttctcagtggttgtcggaagagcagtcggtgctctccgttgagctgagccatctctccagagagtaggttagacctctcagtggtctcctctcagactccccggtactgagatcacaagcgagcctgcacactaaatgtgaagtttatagaattaatgcgttttgaaatattcttcaactttgctttactttctttccctccaacaaaacaaaccaccccctaggaggcggggcccgcgcaagcgcgaccag

SEQ ID NO: 41366 - DNA, 222 bp, Mus musculus
  source 1..222: mol_type = other DNA
caagttgaacaacaattgttaatagatgtgcttgtgtgtgtattcagatgccaagatgtacatatggagccagagagtgggagttcaccctctccctccaccatgtgggcctgcatatcgaatgcaggccatcaggcttggtggcaagcaccaagcctacagacctcctgagtgcacacagggaccttcgatgggctccaggcccaatggggggtgggagcc

SEQ ID NO: 41367 - DNA, 305 bp, Mus musculus
  source 1..305: mol_type = other DNA
actctgaggcttcgcaggacagtcccttccctgctctagcactggtaagccaaccatctgtgagggactacccctggctgagcctcacccgtagagtttctgtcttgaagacagagagcactggcctcagaccacaggcctgaggtaaaagtgagcctgaagatctgcagaggcacaggagccctggaagtctcattcctgagactgaagggcctctgagaagacctttcagccacaaagaggctcagggttcacttggccatctagggcccataggtggcagcctagcctcccagggactgcct

SEQ ID NO: 41368 - DNA, 413 bp, Mus musculus
  source 1..413: mol_type = other DNA
actctgggggaaggggcccccagaagccagctggatcgcagtttcggagctccgtcttccagtgggagtagaccgtccgggagggtattctcccaagggacatccctcaccttcctcatcaacatccggaggcttaggcatctatgcgtgtatatatggacacaaaaatgtagtttccagagtcttgcacaggattcttggatccagaatccagagtggcacggtgacccacccggagtccgggaaagaagggcggggagctccagctagcacccttttcccgagacccggcccgggctccgggctccgggtgtttcatccgcctgcgttccaatgaaccaaggacggggaggaggcgtggccccgaggcgggctccggtcccgcccccgctcggaacccagcccaggatcgc

SEQ ID NO: 41369 - DNA, 376 bp, Mus musculus
  source 1..376: mol_type = other DNA
tgttttctcctgtttcttagagaaagagtaacttatttataacttgcaagagatttggtgtaaaatattttaacccactgacacttaaacaaaaattggtgtgattacaagtgtagatgtaaatgctaaattacaaataaatacggctattaattgaaataaacagcataacattctgtcttaaatacaaaagatttgagaatacaaagctaattgtctaattttaagtctgtcatgaaattttcgaggtttgtttattcgcaatttctttacagaaagatatttttattgaagaataaacaggagacttttgaaattatttgtttagaccgagaagagatttctagacgccggcgcggtagccccgctgcagtag

SEQ ID NO: 41370 - DNA, 444 bp, Mus musculus
  source 1..444: mol_type = other DNA
gagaatgctcatctcttactgtagtatcacaaggtactttaagctaccctaaaaaatctttctaaaaaaattttatttatttcatgtatatgagtatactcacaccagaagagggcatcagatggttgtgagccaccatatggtacttctggaagagcagtcattgctcttaactactgagctattttgactttttaagaatgccacataattagaatcatttgtaggtggcattttccaggcaaaagtcctctgtcctctaagtagtgctctgttgtctgattaaaccacagttcatttgttcaccaactgcaggctgcccgggctgctctcaagcttgtgcagttgtgcaaaatcgagcttccatacacatccatatgtctaatttatgtggagagattataatgaagtgtatttagtttataagaacttgactgtcttcaa

SEQ ID NO: 41371 - DNA, 496 bp, Mus musculus
  source 1..496: mol_type = other DNA
tacagtcatcataattattcgtctgaatctgaataggtgagccacctggtcccaaagcgacagcactctggcacctcctgccgggctggagcaagagactgctttctcacagcagctccctagtgctagcacgtttccttttacttaaaaaaaaagtgtacttatgtacagatacatatatctttctctctctacatctaacatgtacgtggcccatagaggccaggagagctctggagcagttctgagcccctgactagggtactgagaacagagactgggtctttacttgggaaaggggctccctaagtcacccagagcggctgacagacctgcgccactgggctaggttttctccgaaggcctaaggtttaaacgcctttgctcggttagctgctagcgccaagaactttcgcgccaaaatgactcgtgacgtcaccaagacgccagagcagtccaatagctatccgcggcgctgaaccgcggtggacaaacg

SEQ ID NO: 41372 - DNA, 585 bp, Mus musculus
  source 1..585: mol_type = other DNA
aataataataatctgcagcaccgggtttcagtgtggcaaagtcctagtacttgtttaatctcagattaaatgtggtgagagaatcgattcctccacatgcaccatggaacacacacatatagagttaaaaaaaaatttaaaagtttaaaacataatgagcaaccattacggaatgccttatgagtgattaatacttgaaagcattacatgcttaaagcatttgccacaggacaggcagttcattctctgtctcaagagagcaaaaacccaggcccttgccttgtcatcctcagggcttggtccccaggactaaaggctaagacactaatactaatacctgtctgagtatgcgtaacctgacccaggtctttccctggccagagacccagtttcgacttccaggctccacagtggcgcgcactgaagcttcaggggcgtggcttagaagccggccctcccaggccccgccctggtgtggcgtcagccacggcccaggggcagcctagtagggggcggggcctcgtggctgcgctccagagcccccgcctgccggcaccaccccgcgggctggccaacgggtcacgt

SEQ ID NO: 41373 - DNA, 298 bp, Mus musculus
  source 1..298: mol_type = other DNA
tctggggaaaaaaaaatagataatttaggtttgatttgatttcctgagattacaggtgggtatacctgtaatatttgctggggattaagcctcaagctaaacaagtgcctgctcccacatgtgtgagcagtcggatctgagcactgttctgctgctcagcccataaagttattttcattgataattcataactgtaattatgctactgttatgaattataacgggttgagaaccactgctctagcaggtgatacaggcagggaggaccagcttcctactgctctcgggcagtagtcgg

SEQ ID NO: 41374 - DNA, 363 bp, Mus musculus
  source 1..363: mol_type = other DNA
tagtaaatactttttaaagaaatattttaagaagtaaatacttttaacaacatctgttctgtactgaagagtccagctcatcaggaattcagaatagatgtgtcagagctatgtgtcctgacttcttctgtacctgggcatcaggaagtcatggtgtggacccgggtgctgcatggagccatctatgtccccaccatgatatataggaggtagtgtgggtcaatccctgggtttgcgtcttatagttctgaaaccttcaagattcctgaaggcagggcccgcctccgggctggatgttgcaacagcagcgagaacgccggctcagctgggcggccaccacgtgacccgcgtacttaagggctg

SEQ ID NO: 41375 - DNA, 460 bp, Mus musculus
  source 1..460: mol_type = other DNA
ttatttagtgtacagagccataacaaaacatgttttttttttttttaataacctactaagtacaatttgcactatccatatgctcacaggaatatggttgacagaccttgtttatttagtgaaaagtgatgctacaaaatttaactttcattcacaagctttcatggtaccaaaattttggtttaccacaaaatagcatttgctctgactttataaaaactaattaagaataaatatttagaataaagttagagatttctattgtgatgtagaagttctagggaacctatggatataagaaattctcaaataataaaaatagattattttaaaagttcaaaacccttcagagcgggagcgccctctctgtacacaaccagagtagaatctcccattctaggctcactgtgctgtgcagaacagagaacgtacacagggatatccaagggaaccttctggc

SEQ ID NO: 41376 - DNA, 536 bp, Mus musculus
  source 1..536: mol_type = other DNA
aagacagaaaatagaaaagaatttaaatatttttctttagagctgaataaaaacaaagttacaaccttacgtaagaactctgaagagaacttataagaaatcatatctaaaataaagtgtcaatgaaacaaaagcttttcatttgtgtatccttgaggtttctgttaaaagttatgcacaatttttaattaaaaattaagcttttttatttttattttatgtgttgcctacatatttgatgtgtgtgcagtgcccaaagatgccaaataaacctgggtcttctggaagaacagccagtgattgtcattttttaaaattagtaagtattctttgaatattttgaatagctatcagagagacatttaaattttgtttcagtctgtggctagtcttcttgttctcttgaaaaaaatttttatagggagagaatatttaattttaatgaaggccatttatctaattattccttttcatagataaagagccagtatccaaataatgtgatttgggtttttttcttatctaaaaggaaattt

SEQ ID NO: 41377 - DNA, 616 bp, Mus musculus
  source 1..616: mol_type = other DNA
tggctgggagtcagcaccagtcccctggcccttggcgacccgcaggccgccggcggcagctgtgcagcttcaggctcaccctcactcgccaggagctgaagccccagaaggaggagggcatcttgtgcccaaaggcccctcctttccttatcaggatcccggatccaaggagactggaactggttgggactccagtgcccatcagtcgccagcgtagagctggtgtcccaactttcccgggagggtagctgtcacgcgcgctgggagagcactctcagcatcgatcacgcccggggccgcgcgcgggtggcgagctggagctaggggagttccggacccggcggcccgggctcgccaagcagcagtggctgcaactcagccagtgtttcattattaaagaaatggaccgggctctttttactacggagcagcctccgcgcgctcgccagcctcccagcacccgtgtcccgggccggcctggcgggcacctggtctactgccggcagcccacctccttgagccctggcaccccggggcctaaagtgacagttgctgcactcaccttttctagagactggggcgggggagggggccagcgagactcccgccgcctccg

SEQ ID NO: 41378 - DNA, 364 bp, Mus musculus
  source 1..364: mol_type = other DNA
tcctggtactattaccatcattaaacctttacatgtaaacatgtgttgtgagtttgtgaaaaatgtatgccatgtgtgcacctggcacatgttaattgcttaaaaattgctagttgataaagtggcgcactgacacgaattcaagacacccggcgtgcgagcccttgcacgtcgtctgatctcggggaccgaggccgtcacctggaccttgtgagccgagggcacagactacgttctccatcgccgctgcctcggcgcccgggcgggagagcaggggcgtgcgggcgggggcggggcggggcgggcgcgcccgaggcggggcggggccgggcggcggcctctgctgctgccgggggctgccggg

SEQ ID NO: 41379 - DNA, 362 bp, Mus musculus
  source 1..362: mol_type = other DNA
gctctattacttaataggtactattaatcacttgacacttttctcatctgtgaaacagaaaaatttcagaaaatgacaatatatgcataagaatttaagatcccatcattgatctgtaaagctatacagctaaaagctttaggtgtatagaacatcagaataccaaccttttaaatcttaaataagattttgttttttttttaactcaagtttgaaacgtgaacatttcatattggcggttactttcaaaaaagctattcttagaatgattcttctgtctagaaattatgttctgaaactttgcgttgcgaggtttagctcagcttgaaactcagagcaaatcatttgctgcaagcatctga

SEQ ID NO: 41380 - DNA, 530 bp, Mus musculus
  source 1..530: mol_type = other DNA
atactgtatagttaaatcctacattgcttaatacacaaagcatcaaacacaagtgcaagatatattaaaattgtcgttctgtacatattcaaataattgtgattagttcctgtcttcgaagacctttcttaggtacataggtatctgcttacaagaattttagcttaatatccaaaatggtgtatccccatttcacattgttaaccactgtcaaaatgggaacaaaaaatagctttcgctataatttctatacattgctttaaaagtttggatttatatcttagtgcatgtcatcaggaaacctcactgagttttgtgagaatacttaatactaggagagtacacagtgattaatttacagaatcgcagccgcactctccaggaggcagagagagggtggaaacctttggttgcagtctgccagtgggccgcggggcgctccctggtgtgacgtcatcacagcgcttcgccgcaggatgcgcgcgcagccctgtccgccgctgggaaggcggggcttcctgctgtgtgca

SEQ ID NO: 41381 - DNA, 643 bp, Mus musculus
  source 1..643: mol_type = other DNA
catttccaaaaaaaattacttggaaatgttaggagacaaaactatcaaactgattgatgtctctattttgactccggagcagagcctccattcgctccggccggcgccaaagcgtgctcagctgggccaggcgggagccccggggcagctcccacgcacagctcctcgctcccgcgccaccgagggccaggatcggaggaatgccctggagcttatcttatcccctaaggaatcgcctattggccggggaagacgatcctcccgccttcctcgccacgccgcagcccgaacgcgaacaggaccgcttcgtgcgcgcggatcctctcccggaaccacgggctgtcgaggtagcagtcgctaaactccaggggctgcagccccatgactgcggcggtgcgcgcgggcgcaggccgagctgggctcccaggcggcggcagcgagcggctagcagggctgagcgcgcggcgagcgcagcacggtcatgtccagcccagcccagcgaccctggagagtacgcggcgcagctccccaatcccggcagcccccggcagcagcagaggccgccgcccggccccgccccgcctcgggcgcgcccgccccgccccgcccccgcccgcacgcccctgctctcccgcccgggcgc

SEQ ID NO: 41382 - DNA, 262 bp, Mus musculus
  source 1..262: mol_type = other DNA
caagtcagctaacgtggacatatcctgagcaagaccctatctttagaaaaaaattttttttttcaatatcctttcctgataaaagttctaaagaaattagtaatagactatatctcaatgtaataaaggctgtatgtagtaaagttcaaatttatctttggctgagcaacccttcacaggctcgaagctttgagccgtactcaaaagcccaattagttacacatgaggtcacaatctggtttacaagtaaggtggcaaccaa

SEQ ID NO: 41383 - DNA, 365 bp, Mus musculus
  source 1..365: mol_type = other DNA
agttggtagattttccatcatagataagcttgaaggccaaaaaggaaaaaatctttggaattctctctattgctctttagagttggcattactgctcttaatttaatttctcccaggcataaacacatttgatagatggaggcctgcttcctcagggcttgcaaaggcaaacatagttatttgtcctttattttgatgtttttctcagtttttattatagaaataaaaagtcacaggttgtttttgttactaagtagatcagaagcacttccaaatggaggatttcttaaaaaccactggggatttttaaaataggaactgtttcaagtgtgacataaaatcaggaagggctaggggcctcgcag

SEQ ID NO: 41384 - DNA, 227 bp, Mus musculus
  source 1..227: mol_type = other DNA
caaaatgggtgactgacagaattaagactatgaggaagctgttgctaaaattctttcccaggggctagatataagtcctgtctctcccttctcctagaggaccaatgaggtcctagggcatccgtacatgccttgggctaaggcttagtgcagggcacaaccttggatccctgcccttcagggcctggcgggggcagcagctttgcagcttggtggctgctccctgg

SEQ ID NO: 41385 - DNA, 408 bp, Mus musculus
  source 1..408: mol_type = other DNA
aattggaggaatttctgtcttccctgtcaatcattcatttaattaaaaatcctgtgtgaatttcctgtccccatgctattacaggacaagagaaaggaaataaagtgagattaattttatgttgtccttaagtcctcagtactttcagaagggtccaagagcaacattcacttggaggaaactgtttccagtatctctaaggaacctcatgttcagcacaagatcgagttttctagacctctaactcagagatctttacctgtgagagttactttaaagctacaaaatgaattccctttggctataggtagtcacaataatcaattgcatattcacaagaaataattgaatgcatggagcattcagaaggcccttgaggaaccccccctcacttgaagagtcttggag

SEQ ID NO: 41386 - DNA, 298 bp, Mus musculus
  source 1..298: mol_type = other DNA
atcctcccaagtcccagctcaccctgtactggacattccaatccgcaggaagccctgcagccgggcagacccacgtctttctgcactaggcacccgccgggcggtgggatgcaaagcccggggctgacctcagcacgcatcaaggcgggagctcagagcagagcagaggacccgggtcgccgcagcgtctatcagggtcgtaaggtgcaccgcttccaagattggcttggaacgcaacgactggcactgcgcccgaagcaccgacctggctagttgcctgccggggcagggaagtcca

SEQ ID NO: 41387 - DNA, 485 bp, Mus musculus
  source 1..485: mol_type = other DNA
agcaagtgaagcccccctctctcccgctgcgagacagagggctgtgccgcagccagggcggccgctcctcccggggactcgccgacgagttcagaagtgggagccggcgcgctgcagccggcggaggtgcggcacttacccccgttcactccgaccgacggctcgagcttagcggcgccgatcgccaccactgggcggctccgaggcgggctgagcgccgccgtgcatacacggccaagcttgggatgaggcgccccagacgcccagcctcatcatgggtgtcgctgcagtaaagctatattgacggcggcccgcgagacatgccttgcagagagcgtctctcactctgccctgagcccgagagacccgcggcgtgcgctgggccggtaccgggctgcgccgtggcggcggctgcgcgcgccaatgcctgctctatgcgcgtatactcgagacattacggcgacgaccgacgtcgcgttgacgtt

SEQ ID NO: 41388 - DNA, 649 bp, Mus musculus
  source 1..649: mol_type = other DNA
gttgggggagggggcggacatcagaccctccaccctccgcaccacgcggcctccggaatcgcccgcccacgcgcggcacacgggtggggaggagcctgggtcgctctctcaccgccccccccgtcctccccactcccgaggcgggttttggccgcggaggcggtcgggcagaaaggcccgggcaggccaccgacctggcgggaaggcccagcccgccttccccgccttcccgccgccgccgctgcgggaaggcggggggcctgccgtcccggacgtctgctcggcgcttccctaactaggaagccgctttcccgcgccggtcgccacacgcgtctgccgccgccgctcccgccgagaaccagaggccgcgaatggccccccgcgcaacgtcaacgcgacgtcggtcgtcgccgtaatgtctcgagtatacgcgcatagagcaggcattggcgcgcgcagccgccgccacggcgcagcccggtaccggcccagcgcacgccgcgggtctctcgggctcagggcagagtgagagacgctctctgcaaggcatgtctcgcgggccgccgtcaatatagctttactgcagcgacacccatgatgaggctgggcgtctggggcgcctcatcccaagcttggccgtgtatgcacg

SEQ ID NO: 41389 - DNA, 576 bp, Mus musculus
  source 1..576: mol_type = other DNA
acatcaactggaattttacagacagacagaaggatgttcctggggtatactttgtgtttcagaaaacaattctgcatcttagatcctgtaaaaggtattataactttgttgaatgttaaacaacagaaacagaattaaaatttaaaatataaatataaaatataagttaaaatataaagagaagaaattgtcttcctgtgactttttttcttccataaataaaaagcatgcattaagaattcatgaagtatccctaactacactacttaaatagtatctgcatgcagtttccaattaaactaatttgtaacgttttctaattgatgccgttataattcagagttgcttgaattattcattcccatggaaacaatctcttcatacatttaatttatatgcagaagttagtttatttgttttaaattatttaaggcaagtttccgtttcttaatattttaaggttctttactgtaaacacacacacacaagatcacttctagctcttggttggttgttttgctttcgtattctattttctggcaaaagagagaatatcagaatatcgaaagccgctgc

SEQ ID NO: 41390 - DNA, 332 bp, Mus musculus
  source 1..332: mol_type = other DNA
atgagctcacctgtaattttagttttggctgaattttcaagtgttaactctttcattttttttttttttaaaaaagatttatttccattagtgagagtctgtaacgtccagactcaaggtggagatcagtctttcagttacattttatacagtttaatacacaaaagaaagtggttagtgcaacctatttccttaaaaaaaaatctgtaaaataatgtttcaagagcgggggggggcacttttccaccaccccccttgatttgcgcgcgcgcgtgtgtctcgctctcgcgagctgcgagctgtgctgccgccgccgctgcccacaccgccgc

SEQ ID NO: 41391 - DNA, 334 bp, Mus musculus
  source 1..334: mol_type = other DNA
ttccagaaaggtagaaatatcttcattgaattgaccctgtttaacctttcttgtctttaaagaccgggaagacattactatattaataaaatcttatctgattcactaaaactgacagctctaatctgtttgactaggcagccaggctgttcttggtgaccttgggcaggccaagtaagttctcaggctgtcaagtttctgtgcaccagcttcatagagattagaagctgagttgccgcgaaacatctcggggtagagcatgtgcaccccttgcatgcactgggccccgggttcaagtctgctcacccacccgcttgcagcggaaagctacaag

SEQ ID NO: 41392 - DNA, 357 bp, Mus musculus
  source 1..357: mol_type = other DNA
agtcagtattctgctagcagccttcagatgaagtaagcgagtcccaattaaatgttgtctttataagactaaaccctttcggaaggactcctgagttctgagttctcagcctcagagttcaaattggctttttaataaccctccaagctaattacatcacaatgccatcagccagcaggcataccactgctctgtgacacacaaaaactgttcactaacctgttgttagcatcacaaacagctatatgtcaataccaataggcaaataattttgcctagtgtcttcttgccataattatgaagcagtatttttcttagatcaatggctcaaagttttatagcttacaaattagcgac

SEQ ID NO: 41393 - DNA, 362 bp, Mus musculus
  source 1..362: mol_type = other DNA
gcttttaaacatttaaaacttacggtggacgagttaaaggagcactgctacagtgtggcggtggggcccaccgctttcaagggagagcctgcccacgcctggcgaacctccccgggcactgctgaggtggagcggctcaggtggcccaggcgcggaaggagtgggcctgggcaccgcggccgctgagggttgggccgggccagccgaagccaggacgaggtggggaacgctgagcccagagcggccctcaccaccccacccgcgcctgcgcccgccgcgggacagccttcgctaagcgactgcgcctgcgcggggcgtcgcgttacgcctgcgtgccgccggcggcggaaggagcgagcagg

SEQ ID NO: 41394 - DNA, 496 bp, Mus musculus
  source 1..496: mol_type = other DNA
gatgattatataactttccatgtttatagtctctaataggaaacaaagccttaaaagaaccatcctaataaaaatactatttccttgaatatatttacttcgtcaaagaactttcgagacattgtagatatttgttcttaagaaaggcgacagtaagaaacccttttcttaggctctccttcatttttcaaatgagaaacatatctgaaccggcgcggtcgcgacggtgtttggcaacccagacaccgctcaggcggagctccgcctggctccttccgcgctgcccgagagcgacgcctttcttatgtaaggaaacctcggctgccccccgcgagcctccagggggcgcccccgacagcggggctgaccccgggcggaggacgcaccgcggccccgactcctggcctccgcgcgcaccgggcccctcaccctcgcgaggccgcgcagcagagcaccctgctcgctccttccgccgccggcggcacgcaggcgtaac

SEQ ID NO: 41395 - DNA, 424 bp, Mus musculus
  source 1..424: mol_type = other DNA
agaatagttcttctctaaacataactcaacattatgataagtgttcaagatacttccaaccaagaaaaaaagttgattgtttcaagaaggtgtttttactgttatctaaaagattgcacccccaagccagtctggtctgtagagagagatctcatttccaggcaaacaagactgttcccagaaccttatgaagttcaaggccttttcccgtacatactggaaataaatgtatctacctagtagttaacaggtcccaatttgaggctctaaatcactgagtcagtgattgagggcctttaaaaatgcgtttttaggaccgagaacttttcagaaaataacacaggctttggaatctaagcggcagcgggcgcgcgcggtgcgcgtgtgagcgaggggcgggctgtggaggctgggcggttccgac

SEQ ID NO: 41396 - DNA, 674 bp, Mus musculus
  source 1..674: mol_type = other DNA
agcgcagctgctgtgacagaatgagcaggcatgcccttggcaaagccagatcttgtccaatttcaatcaactgtcaacgcttcattgagggtcaaagggccggcggcaccgccactgccctagcaactgcacgcaagctgcgctcgcgcgctttccgccgccccacggcgctcagggcgggaggctcgccgggagggcggggcagcgcgcgcaggtcagcggcgtaagcgacagacaccctcgggcctgctcgcggacgcggcctgggaagcgcgaagtccgcgagcccgtggggcacctcccctccgggtaggccgacccaggcgtccccgcccctgcacgaggacttcctgccgcggctaactcccgtcgtccgctgcgccgagggcccgctccccgcccctcaggcgccctccggcgaggtggggagacgagcggccgtggctttctctccgcgtggggtgcgtgcgggagacgcaggcctcgcttaatctcagccgggcgcgccgccggggcttttctcgcctcacaccggtcgagacccggaaacttgtgggggcggcgacccccgggctgcccgcgggcgcgtgtccctccgcggaggcggccgcgtgcggatggccatgcactaggctgggctcacctatgctccgggagagcgccggccaccgcct

SEQ ID NO: 41397 - DNA, 332 bp, Mus musculus
  source 1..332: mol_type = other DNA
tttaatatactctaatctggcttaaactggtgacaaataatggcaaaataatcactcatataccttttgttaatcctagtaaatctatgaaaagtatgaaaaaaaaggctactttacactattgtaaattatacttataataaattccataaagttctgctacaacaataataatttataatttacataaggccttaaacagtaatactgaaggagctgaggggagaagggctctacctgcgcccgctagcacgagccgctgtcttacacacctttggcgtcgcggcgcaatgacgtcaccaacgtcagggcgccgactctgcgctctgtcg

SEQ ID NO: 41398 - DNA, 350 bp, Mus musculus
  source 1..350: mol_type = other DNA
gaaggacttcatggcggccaacatagccgtctgactgtgagggcatctgcgaccgttctcgtggcagcgggccgtgtctggaatacagacgcccgccgaacggacgcgcgcggaacgctccggcgtcccagatgtgcagctggagccggttgccacgcgctacggtctccgctacgtggcagccggccgcctgcttacagcggggcggcacacagcgtgttcttaccgccaccggcaaagatggcggtgcacagccgccgcctcgcgcaaggcatgagggagtgcgcgtgcgcgacagagcgcagagtcggcgccctgacgttggtgacgtcattgcgccgcgacgccaa

SEQ ID NO: 41399 - DNA, 493 bp, Mus musculus
  source 1..493: mol_type = other DNA
cttatgattaaattcttcctcttccatgtactttataaatgcacacagtacagccttgagatatctacaggtgtcttccagacgacttagtcctgcagtacctccaagaacttcagtgaggacctgtgggtggccctttgcaaaagtcttgtctatgcctgccagagagggaagtccatccctccctgggctgagggaaccagacctggtgggcaaagccaggcaagcaacgtactttcctcccaggctgggcatcaatggccaggccacccccaccccggaggttccgagccccagaggctggctcggagggctccctcgtccgtgtccccccccctcctccgtccccgccccgtcgcagccggaggccaccctgggccccggcgagcgctagctcctgggccgccccctcctctctcccccatcccaggcgggggcgcgcgagcggcggtgacgtcaaggggcgcgcggtggcagcacctccccgcgcgct

SEQ ID NO: 41400 - DNA, 335 bp, Mus musculus
  source 1..335: mol_type = other DNA
ctattagctggtggtcagctcccgctccgcagcttaataagggctgatttccaaagactttcgaatcactgagcaacagagcattttaaagcattgtaaagcacgtaactgcttttatcactgcagttcagttcgaattccactttcctggatcacgagcttgacagcctttcaaacctcagagttcgcaaacattgtgtaaagttttcaatgcatgcacttcgtttacatgaagtaaatttaacacagcagttctttggaacaaagattttaattttatctttattaacagacactaaataatgttgcatcatttaaatgctaggtaggcaagg

SEQ ID NO: 41401 - DNA, 325 bp, Mus musculus
  source 1..325: mol_type = other DNA
tattttctctagtgttgatcccacacccaattgctttgtgtgagacccattcactgggaacagattaaaagctcttcaagtttgccagcctggaaattgttcacacacacacacacacagagagagagagagagagagacagacagacagacagacagacagacagacaggaaattcttttttgcaaaatgtccaacgtgaaactcaattttggcgaaagagagactggctctgcactcaatcagagacactattcctccaatcctcttgtggctcccagagactggggcacatcctgacaccactgttagttgctgcagctcct

SEQ ID NO: 41402 - DNA, 441 bp, Mus musculus
  source 1..441: mol_type = other DNA
ttttagttaacgattattcgactggttaaaacatttgaaattatatatgaatattatctattccaagaagtttgaaatggaaaagactttttattcaacatctaaataatgggattaattaggattcagtagcctccctgtagaccaggctggcctcaagacaaatgtgtatttgtttcatgctaggcgtccaacgtcacttaacgtcacgcccgtgagcgaaggacgaaggccagcccaggcctttggccgttacgggagcgccgacccagctcgcgtcactcggaggagcggaggcgcaaagcaccgccgacgcgcttcctcgaggccccgcccactcggctccacagcccgctagaggcctggaggaggcggggccaaggaggagcatgcgcacgcgccctcgcgagccggccttctaagggggaacgagcgatctcg

SEQ ID NO: 41403 - DNA, 370 bp, Mus musculus
  source 1..370: mol_type = other DNA
taggattcagtagcctccctgtagaccaggctggcctcaagacaaatgtgtatttgtttcatgctaggcgtccaacgtcacttaacgtcacgcccgtgagcgaaggacgaaggccagcccaggcctttggccgttacgggagcgccgacccagctcgcgtcactcggaggagcggaggcgcaaagcaccgccgacgcgcttcctcgaggccccgcccactcggctccacagcccgctagaggcctggaggaggcggggccaaggaggagcatgcgcacgcgccctcgcgagccggccttctaagggggaacgagcgatctcgaatccactcccggagaggagaaggcgccgggaggcctctgagaacctt

SEQ ID NO: 41404 - DNA, 735 bp, Mus musculus
  source 1..735: mol_type = other DNA
gcaaactcagtcggagctggcgagagtgcccggcactcccgctctcacactggggtggcgctgcgttcccggagaccgccgccttccatagcgcgcgggcccggggcggcggggcggcgaggaccccagcgcgcctgctgacgaagcgctccggaggagtttcataggaggaggagggccggggcccaggccgcgcctccccgaacccgccgcgcgcccccggggtgggggaggagcgcaggggacaggacagaggggtccctccccgaagcagagccgccctgcgcctcgtccctgtgctgatccccgccctcatccgaggctggagcgcagacccaccctcccaccgcggacccgcgacctccccgacgcccggcgacgccctgaccctcgctgctggtccgcgaactccctaggctgatcaggacctgcccctgtgccggctgccacccggacgccgcacgccgctctcagtgtgcgccaaggcgagcggagcggagcggacaccgcgcgcgggcattgtgtgtgcgcgtgcagcgtggggtccgcagcggggagcacccgcgggaggtcccgtttccaaggggcggagcgcagggcttccagttctgggctccctgtccggacagagtcccagcggagcccgaccgctgcctaggcggcgggacggcgcgcctggcggccaggagggcgcactgaaagaaggtcggcgagccctggtccccgcggttcccg

SEQ ID NO: 41405 - DNA, 435 bp, Mus musculus
  source 1..435: mol_type = other DNA
tttttgagacagggcctctttttgtggacaaaaactctttaaaatttttgtctttattgccttctaaaatttgttccaaggctttgtttcaaacacacccgtaaagaagagtctgttacaagactgtgtcaaactcagcgtacctttaaacagctcctgggtcaggccctaggcacccaggaggtcccccacccccttggtctctgggtgcacagtgagggtcctagcgcgctcctggtccgggagacgcagtccttcagtctctcgagcagccaggacccgcttgagtgatgcaaactcagtcggagctggcgagagtgcccggcactcccgctctcacactggggtggcgctgcgttcccggagaccgccgccttccatagcgcgcgggcccggggcggcggggcggcgaggaccccagcgcgcctgctgacg

SEQ ID NO: 41406 - DNA, 375 bp, Mus musculus
  source 1..375: mol_type = other DNA
gaaagattcaaagcttttccaaaattttctcagacacaagattttaaacaattaatgtctcagactatgacatagtaaaagtttctcaggtggagccatctttggtttacccggaaactgacaccttgcttactttatttccctgccaacggcaaacaaggaagtagtggctgctctgagagaagggtttccccccggcagtcgccggcggctcagagactcaacctcagagctcagagtaggctccctgagcagcgcctccggaagtccgccagtgacgtaccacacgtgagagtggccgcgtgactcactccgtgcctctgcgcctgcgcgccagggaagggggcgcggcctatggacctatccgctgtacct

SEQ ID NO: 41407 - DNA, 195 bp, Mus musculus
  source 1..195: mol_type = other DNA
agaagaattacctctgagcaccaggtggcacctgtaaggcgcagatggagagagtcgggggagttaaccaggctgcctgctgcccctgtgcccaggtctgctcagtccccagggacagtcagtggggactagtgaccccagagacagcagagtctgagtggggaggcgagctgcaccagttgcgagactgctgct

SEQ ID NO: 41408 - DNA, 312 bp, Mus musculus
  source 1..312: mol_type = other DNA
gggggagttaaccaggctgcctgctgcccctgtgcccaggtctgctcagtccccagggacagtcagtggggactagtgaccccagagacagcagagtctgagtggggaggcgagctgcaccagttgcgagactgctgctgctgcgggcgaggagcaacttctcccgggcgcgcgctgcggggcggcgggcggagcgtgagctgccagcccagagcagggagcggggagcggggaggctcggcccgcgccctgcacgctaccatcctccgggttcccagccccgggtgctgagctcgccgctataaatagcag

SEQ ID NO: 41409 - DNA, 426 bp, Mus musculus
  source 1..426: mol_type = other DNA
attagagttgtctacaatttcaaagccaagttgtgttttcggactttgcacagggcctggtcttggtccccagcacaagaaaaaatataacctggatttcaatttttcagcacacacacacagcctctttttatatgtagaatgatttttttttaattttcttatggaaacatatcaatggctaggtgatgataaggcttgataattttatgtttagccattgccctcaagaaaagtgagaaatacaccttatggtatttatgccataacgagtttacagttttactctttatatagagttgaagagttgtgagatgtttaaaaactaattttagaaaatataacagagttaagcaaagcttctaaatgcttctgtgatggagagaaatattgtctttctatttataactttcacagagcccggtg

SEQ ID NO: 41410 - DNA, 533 bp, Mus musculus
  source 1..533: mol_type = other DNA
cagatttttatgtttctttaaatataatttataatggtagtaaaattttaaatggttgtaaaatacacattttcacgatttttattataagtaaattttggtgtgattgttaccaaaacatgcattattgtttcaaatataaaccttgaagggatacaagataacttcccattacaatgattttatgtggaatgccacacacagttaataattagtcgttcaaatattctagtttttaccattttttaatgtaatacacaaaaacacagaacatagttgtgtttaactagtcctggctttctcaaaagctttgggaaccgcaagccactgagtcttttcaatgattcatctgaatgccaaagctgggaccccgggctctcggactgtctggggggtcaatttagtggaagtttactgttcccaaacaggcttccctcttccagactctgcagcaggtcaagggttgtgcctccctgcaaggccagttggctgtggccaactgcccagggggaggagactgctctctgctctca

SEQ ID NO: 41411 - DNA, 577 bp, Mus musculus
  source 1..577: mol_type = other DNA
cctgtacaaaaagaatattgattttaaaaatgtatttgtatccaatgctgttggatcctctggagcaggagttacagctagctcttgaactgctgagcaatctctccagtcagatttttatgtttctttaaatataatttataatggtagtaaaattttaaatggttgtaaaatacacattttcacgatttttattataagtaaattttggtgtgattgttaccaaaacatgcattattgtttcaaatataaaccttgaagggatacaagataacttcccattacaatgattttatgtggaatgccacacacagttaataattagtcgttcaaatattctagtttttaccattttttaatgtaatacacaaaaacacagaacatagttgtgtttaactagtcctggctttctcaaaagctttgggaaccgcaagccactgagtcttttcaatgattcatctgaatgccaaagctgggaccccgggctctcggactgtctggggggtcaatttagtggaagtttactgttcccaaacaggcttccctcttccagactctgcagcaggtcaagggttgt

SEQ ID NO: 41412 - DNA, 282 bp, Mus musculus
  source 1..282: mol_type = other DNA
atactcacatgcagtactgggagtaatgtcaagaacttcctccatttaccttcagtgttatttccgaactcagtgttgtgcagcacgcctataatccttggagtcgtggcttcaaggccagcaaaaaattgctagcaaagttcttgttctcctctcaaaatttttgactttttagctctctgagttaaataataaaatcagaatgacatagcagaggccttgagatgcggcagctcgcaagtccacttccgggaaggcgggtcctccccgaggagggggcgg

SEQ ID NO: 41413 - DNA, 418 bp, Mus musculus
  source 1..418: mol_type = other DNA
caaaactgggcttctcagtgcttctcgagaggcaatgtaaatcattaagcactaccatatttgtgtatgtataaataagtagacattttatattactggtttctgaaactacagaaacccagatatctaattgttaaagaattctgctattagaacacgactctaggaaactgttctccactggtttcttttaatctctgtcacaactggcaaaatgtctcaatcttaaagtatgaggagaggtccattttctaagaaaactaacgccatgccatgagctggcttccaatgtgaaattctcctgaattcatgctgatcagtcctggtttaaaactggaattctgacagccactgtcctaaatatgctgggataaataccagagaactctcaaggcctgaaggtcctttttaccttttg

SEQ ID NO: 41414 - DNA, 355 bp, Mus musculus
  source 1..355: mol_type = other DNA
gccctggctgtcctggaactacaccaggcacctggcaagatgagtaactcttaaaggaaagactttagagttgagctgatggataaactaacccaactacagattaatgctgtcacagtgactgaatttggggttggaaggacacatttaaatcataggtacacacataaaaaatgtgtttgaatggtttgaaaaggaaaacctctttggctgaaaacatttctcgtgaatgcatttagtcgcgtacgatacgcagtgcctctggtttaattttcataaacaaacaaacaaacaatctatagcttacgctaggtcaaggagcatttagctgggccactttaattacaaatggcca

SEQ ID NO: 41415 - DNA, 413 bp, Mus musculus
  source 1..413: mol_type = other DNA
tgagtaactcttaaaggaaagactttagagttgagctgatggataaactaacccaactacagattaatgctgtcacagtgactgaatttggggttggaaggacacatttaaatcataggtacacacataaaaaatgtgtttgaatggtttgaaaaggaaaacctctttggctgaaaacatttctcgtgaatgcatttagtcgcgtacgatacgcagtgcctctggtttaattttcataaacaaacaaacaaacaatctatagcttacgctaggtcaaggagcatttagctgggccactttaattacaaatggccatttggactcctggctctagagccaggtctggaacctgggaacacacgtttccggggcaggggtggcgctgtcccgccgagcgtcagccttgaatacac

SEQ ID NO: 41416 - DNA, 395 bp, Mus musculus
  source 1..395: mol_type = other DNA
tagtattttttttaaagcttttcaaatacaaatctttgctcaaagatagataacaagagttcaaatctgggactatatttgacacaatcatcagatggcttggttgcatctgcagccaaccaacccttcagggctcctgctaagaactattcaaaggagcaacactttctcgaaaaagtttaggaacttccagcccctgctctgcgccctggtccaaggctgtcacgctgcggggacgcgggtgaagcccctctgtgtgtccttgccaaattgacgcgcggctgggaggcttgcgcacccaaggcacgcccctgccaagtcccactagcagctctttggagacctgggccggctcagccacttcccccccctcctccggcaaggggctatataga

SEQ ID NO: 41417 - DNA, 309 bp, Mus musculus
  source 1..309: mol_type = other DNA
ccagctggcatgtaattacaggcatgcatgagcgtgcccagttaaaaaccatacttttgaggtttaaaaatgaacgtttgatgaattaagtgttccatgtttgttttcagaggaaaaactcggccgagtccacagggaactcgttggcgctgggctgggagtgcggccgccgccgttgccatgggaaccgtccagcgtctggcgcgcctgcccgcgggcccctccttccgcgccggcgataggaggcggggcgcggagccaagagacaccccgcccccgcagcctccgtgcggacttccgggtcgcggt

SEQ ID NO: 41418 - DNA, 295 bp, Mus musculus
  source 1..295: mol_type = other DNA
gcactaggaaaatcatcttattggatgaattgtgggcatttcagaaggacctgatgccctttagttggtccaaatcttttaaagctttcaaaggggccagaaagctgtgtcatgtgtttcacacctttgaatcaattctcgcaggaaattaccctaagatgataatgtctggtcatggccaggcagcgcagggctgacccacagtttttcacagccttgccaaaggattgtaaagtgtggtcaaggggacctgaggaccgtagcaacggccccttgggagggcgagcaagcacgc

SEQ ID NO: 41419 - DNA, 332 bp, Mus musculus
  source 1..332: mol_type = other DNA
cacagtgactgtttaaaaagaatgaagacagttagttaaaattactgtattgaaaccacagtaaagttgagactcaaagtttggtccattatgtgtctgtggcaaattattaacattaatactgacaaaatgaaaatgtacagtttcatttataatgtaatgcttcccggttgatagggaaatttcagcgtatgaatttttaaaagtctgcagagccagcagcctgagctcggaccgcatccccccaggcgcgcggccgctgggtcccgagcggcggttgagcgggccgcttgcgcactggggctgcccgcatcctgcatcctcccgcgcgg

SEQ ID NO: 41420 - DNA, 400 bp, Mus musculus
  source 1..400: mol_type = other DNA
ttctggcatctgcaggcaccttgcacaggcacaagcaatggcctctacagctcagaggttttgataaagtcaaagcaagaatgctttgcactgaccgctaacagcaagatacttgtttgttaggttatacatgtacacttgaataagaaacacaattttaattaagccttgggttttctgagactgagatcaggagatttgtgcgttatctaattttagaagtgcgctgcactgttctgctcagacaaaagatgctcagcgaggaaggacacgcccaaaaatcctgattggtcgtcatgcccttttgttagggcaaaggtggaccccggtgctctgccacaggcctgtcgaggcgtccagcagcaggacgcctcctcgctcggcgcacgctccgtgggcg

SEQ ID NO: 41421 - DNA, 404 bp, Mus musculus
  source 1..404: mol_type = other DNA
tttgaaattctaaaatatgctttttaaagcaccctaaaaggtgctgatctttggccggcacatgcaagttatgtacacaggaatgctccaacctacaattctgtgtatcaacacacataatgccatgtataaacatacataatgccatgtatcaatttcacactatgtgtcactctcacctgtagattaagtgattttcccttcaggtcaggcaaatttcttgtttcaacctaaagctttactgtgggactgaagcctcggcaccattgtctgccaggctacggtagcagtgcccggcgttgagaatacaatgctggggtacttattaatgattcagcaagggcgagcggcagctgccactcctcaagggcgagcacacggggcaggcgccagtcctcaagggt

SEQ ID NO: 41422 - DNA, 347 bp, Mus musculus
  source 1..347: mol_type = other DNA
actaccttactggaaggagggctcagtcattactgtgattgctttaccaacataaagaactactcctggtgtgggggcacaggtgcccggttaaatctctcgggccttctagacagccagcctcacctacttgaagggttcaaagccagtgggagacagtgtctcaaacaagttggaccctacgtatgtgcactcacaccgaacttatctaccatatccacagtacccatgtatacacatgtatacagcaggcttggttgggcagagcacaggggaccctgccacctccccgctggccagcctggcgccgctctgtctcctccacaccgccagggggtgtcagcgag

SEQ ID NO: 41423 - DNA, 318 bp, Mus musculus
  source 1..318: mol_type = other DNA
tttttttaagatttatttattctatatatatgagtacacactgtagttgtacagacaaagatttatttattaaaataagttcactgtagctgtcttcaaacgcaccagaagagggcatcagatctcattatgggtggttgtagttggtgctccagcacctgtctcagtagctacatgtggccagtagtaagctcaactgacaggagctgttttaagaggtctcatctcttagatgagcttagccagagggcgcgcggcgcccaggcttcctcgctgcgctctgtggcgcgagcagtgggtgcaccccacgctgatggg

SEQ ID NO: 41424 - DNA, 432 bp, Mus musculus
  source 1..432: mol_type = other DNA
gaaagtgctaggatgagagtcagtctttcatgcactttcaggcagtcccattccctgcaagaacaagctatactatatcaaagtatttggaaatatttacgaagcacccagtggatctttaaaaaaatccgctttacagtattatccctgagcaggaaagcttagaggtacttgtcaggtagctaccacaagggggaaagggtgcggcctttcggagaggcccgtctctgtagccccgcccctcttcgcgcctccacctgtccgcagagagagagaggggatccgctacggaggcggaaccccagcagccggcgcgcgcgcccgagggcgtggccccgcgcggaaagccgttggcagccgggtcccaccccggatgtgctgcgtcacggagcgggccgcagcgattggccggtgtcgtgcggcgcatggaag

SEQ ID NO: 41425 - DNA, 216 bp, Mus musculus
  source 1..216: mol_type = other DNA
tggggtcagcacaccatgaggaagggcccctctgtggggctggacatgcctccgagtgagtgaggcccggctgactgggcaggctgcccctgtgggtaggctgagccttgccagattaggtgatgcaacccctgaccttctcctggcaggacttctctctgtagaggggaagtccctgagatgaagatgtcttacagaagcttcctgtgggcacta

SEQ ID NO: 41426 - DNA, 440 bp, Mus musculus
  source 1..440: mol_type = other DNA
acttgaaggtagattgtcagcctagcatgcacttgacccaatagctgatcctccaagaggaggaggaactgggcctacgttcaaccttagcgtacagtaggtgctcaattgacaagtcgagtgttctactgttctgcgaagtgctctgcagctctctgtgtgtatactccatccttgtgtctatagagacaggaccgagcctggtacaagcggagacacgcgggaccctccggagggaagaggggcttggggctgccctccagcctctcgctgggatatttagagcgagtaaggttggaccactgctcgcacaatggggggagcccgaggcgcggcggagggatccctctggagcgttccgacgggaggcgcccattggtccggccgcgattagtccgcccgggacgccggccccgcccaagtcccggaggcccagggag

SEQ ID NO: 41427 - DNA, 190 bp, Mus musculus
  source 1..190: mol_type = other DNA
agcccaggtcctatacagacttacagtgacagtgagatttacacccagtgctgaggtcagcaatggtgagtgctatccagtgtttactgccctatgaattgcctacctccccataaggcaggatacagatgatagcctggctcccccccacctactttagctcctgccccgctgagaggaggggggtcac

SEQ ID NO: 41428 - DNA, 489 bp, Mus musculus
  source 1..489: mol_type = other DNA
tgtacacatatatacacatgcaagaaattaaatatgagtcttttctagcaaatagtataagattagtcttttggacagtaattaaaatcattatctctcctaccttataggacttttaaggagatgttttggaaattgatcgcttggagcaattttctcagactagaatagaaaccatatgcacttcctgtcttctctttgctagcgcactgtcttgatgaagagaatcaaaataaagtctttaaaaaaatgagctaaaagtgacaactgctggcatttattgtcctgaggggtattgtgttcccccaaggcccaggacactgggatttgaagtcaggctctccctgtgtttgcctcccgggaaacgggagggaggggcgggggacaaggcctctgaggctcgcggtcgcttaggcccgctcagagcgctttccccgctgcaagccccgggggccgccgggagccccgcccccgccccgcctcctcccc

SEQ ID NO: 41429 - DNA, 297 bp, Mus musculus
  source 1..297: mol_type = other DNA
cagatatctggggtcaggcagctgcttttcttctgcaatccccaaagttaagaacgctgactgttctttcagtggtaatttgccaggcctgaatcccagcactcgaggccagcctggtctacagagtgtccagggcttcacagagaaaccctgtctcgaaaaccaaaaataaataaatctttttaaaaagcgcttttaatcacagcactcaccccacgcgcaattaacgtgcggatgccagctaaaagtggcagtatccactgtggccggcgggaaccgcctcgagtgggctccagg

SEQ ID NO: 41430 - DNA, 303 bp, Mus musculus
  source 1..303: mol_type = other DNA
gaggacaacttccaggatcctccttcgtaggcctggctggcctgcaactcttaagtgagccatgccatgacccctgtgcgacaagttcctggacagtcagcccggcaggacgagggtcgcccaggacatcgttcgggtgggagctccacccagctctgtccgatgtgcctgggaaccacaccacccagctccccgcgggggcgggtgtcggagccgcgcgcgggggggggccagacgcgggcgcgcggcgcgccctgggtttccagcggggaggacagttccggggagggccctgctcacgcc

SEQ ID NO: 41431 - DNA, 356 bp, Mus musculus
  source 1..356: mol_type = other DNA
tgaggcgtttatcagcctggtcagctccaggaccctgtccggttggaggggggctgttctcatcccattttaattaatttatttatttatttttttaggatccagaccggctctgttgcagccagcgcgcgtcgctgttaggaagatgggggacagcctacgctcttgtcagtcaccctccggccctcctgcaatcccgggtgggagatccggaccaggttttgcgcagtccttgcacagggccctcggtggcaggccaggtttccgggcccttcctcggggcgcacgggagggctgcggagactagtccccggcgggtagtccaggccagcttgtccgccgcccccctcccggag

SEQ ID NO: 41432 - DNA, 722 bp, Mus musculus
  source 1..722: mol_type = other DNA
tccggaccaggttttgcgcagtccttgcacagggccctcggtggcaggccaggtttccgggcccttcctcggggcgcacgggagggctgcggagactagtccccggcgggtagtccaggccagcttgtccgccgcccccctcccggagccggcgggcccggcagcgccgagagcaggcggcttgtcattgctggtgccccgcgcccgctcgctccgcgagtcctgcggtgcccacgggcccagccccgcgccccctgctccggccaccccgggggcgcaacgccgccgcgcctgcttccagctgtgtagctccggccccctgcgggcagcgcgagcggtcggcgcgggagcagtcggcgctgcgacgcccccgccccgccgtctgccggagacgccccggcggatggggccgcgcgggcccaggagcggcgccgccgggcggcgggggcctgcgcggccgcccgggcagccgcgttaacccttcgcccgctgccgtccgggggcgctgggaagtcgcctgggcacacacgtgccgcctccgtcggggccgcggagctgcgggggagatgcgggcagccggcgccgcctcggggggctccgcctcgccccagccccccgagctctgacgccgcccccgcccctccgcctccacgcctcgctccccgggaggggcgcagacccgcgcgcccggggccggggccgcctccggagcgccgcgatcc

SEQ ID NO: 41433 - DNA, 384 bp, Mus musculus
  source 1..384: mol_type = other DNA
gacaatgtacactggacagagccggctccaccgagagaccggagctggccccgattgggggtggcgaaaccccgagggcaggagggtctggggtccccggctcaggcccggcctcaccgtcagacagggcctcactggctgtggaaagggctcgggttctccagcaccatcaccgcgcccgggagccgcagctgctgtggagacttcttcacagaggacggaaacctccctgcgtccagcgtaaggaccgatgacggcgcgagccatcagccaatctcgaggcgtcttcaggcgcgcgcctggaccctcttcacgggccccaggaggcggagctcgctccacagagagcagcgccaccaacggccgaacggtggcgcgcgactc

SEQ ID NO: 41434 - DNA, 279 bp, Mus musculus
  source 1..279: mol_type = other DNA
gccctggctgtcctagaacttgctctgcagaccaggctggcctcgaactcacacccggggagtgcagaggcaggattcaaaccctggtctgtccagactcgatccttctctaaagtcactgtgagggtgtgcgatgagtcgcgcgccaccgttcggccgttggtggcgctgctctctgtggagcgagctccgcctcctggggcccgtgaagagggtccaggcgcgcgcctgaagacgcctcgagattggctgatggctcgcgccgtcatcggtccttac

SEQ ID NO: 41435 - DNA, 549 bp, Mus musculus
  source 1..549: mol_type = other DNA
aaggaaggagaacggctctcttcctgcccaaaaggggctagcaaagagtgtagatactctgagtctcctcccgtcgcgagcaaaccaaagcggaccccgaagtgtcgggcctccttatgaatgacaccgaacggcgcccggcgacccttgaccctcggcgccagcccgcccctccccccctggcaggtggacagccgctgcgccggcccgccgtggcgtcaacctctggcccgtggccgctgccgcactgggcaggggcgggagactgcagcgcgcacattgccgcacgggcgtccgccgggccgcctcccgcacctcgcagccagccgccgcagcctccgccccgcccgctgcccgggccgcagcctgagccgctgccccgccctctcaccccgggactgacactagccggggccgcctgtctccgccaatcgacggcttcgcaggggcagccccaagccctctcgggcttctcggccaatcacgtgcgttcgcccgcccgactgcggcctcacgagcccgtgagtggcggagagtctgcaactcgcc

SEQ ID NO: 41436 - DNA, 629 bp, Mus musculus
  source 1..629: mol_type = other DNA
cagcgatcagcgcggcgctccgcccctgggtagtgagttcagggaagccctttccgaagaagccaccccttcagtcaacccgtgtgttcaggtggcgtggaggcgccctggcccatagggcgggtccagggccactcgaatccagctggcaggtgacgggggcggtgcccagtcctgcccccaggggatgttcctggaggccagacttgaacctcgggcggcggctgtaactacaggtactgcacagggcaccgtggctctgagaactaaaatttcctcgggtgtccgagagtggagtcctggggtcgcctgaaggctacgtgttccgggagccgcagagccagggcaccgagggctgccagactctggagccagagagccaggtcccgcaggtgccagttgagcaccggaccgagcgcccgggcggtccacagctgggccgcctggcactagtaacggaggtactggggcagttgtgcccctgtctcggctcagaggtctaccgaagcccgcggcatccaaaccggcgccggcggaattgcagatggagacgcccatccagcgcgaaatccgccgcagctgcgagcgggaggaaagcctgcgccggagccggggtctgagtcccggtc

SEQ ID NO: 41437 - DNA, 613 bp, Mus musculus
  source 1..613: mol_type = other DNA
cttcggtctagtccgggacagagagggcactggagagggccactcggaccggttcgaggggagccccgcgcgcccccaagccctcatgtaggcgcggcagggccgctggtgaggtctccgcggcttcccaggagcgaggcgcgtccggccgcggcgcggctagttcccggtaagtgcggtcccgagagcgctgagcgcggagagggagagggggctgggcgccgaggacgtctgggtcccgcgcccaatggctggagggcggccgaacgccgcccgcgcgccccgcccgcccctgtccccccgctccggcgccaactccgcggcgcctccttaaaaagcgcgcgggagttgtgggtacacggggcgggcgggggcccgggctccaccttaaaagcgggcgcgtgcggagtgtcccgggcgcagggcgcgcgtgcggcggcggcggggaggggccggccgcgccgcgctcccctcctccctcctcgcatccccggccccgcgcgcgcccagcagaagcggggctgttgtgtgtttttgcgaagaaacagcagcgccgccgccgctccgccgaggcgctgcgccccccggggggaggcggaggaggcgggcgggg

SEQ ID NO: 41438 - DNA, 416 bp, Mus musculus
  source 1..416: mol_type = other DNA
aacctaggtgcccattaattgatattttaaaaaactgctttagaatattatcttgatgattaatttctctgaggcccggagcggcggggagcactggggataaacgccgctgacctttgcttaaatgtctgctggccagagaccttttcactgccagtggccgagatagcggcgcggccaggctgtgacctttccggggctccgactagaatcgtaccagccggaattccgagttcggcctccgccgctgacgtcacagaagggcagcacagagtcgctgcgttccttgggggacagttttcatcggtacgtaggacccttttggacgagattgatctctcgttagtccaagtccgagcatgctggaagcgcccagcgccgtccaatcgctgccctggaggtccgccctggctgcc

SEQ ID NO: 41439 - DNA, 255 bp, Mus musculus
  source 1..255: mol_type = other DNA
agggagcctagctcccaaatgcatattttcatctacgccagactggagatgtaagtgggctaacctggccagcgagctggatgaagcggtgggctccagcgagtggctggccctccagctggcaagctccagcagttgctgcgagtggggctgtagcaagagccaaattagcagcttgtgagcgggccgtgcctgcaagctgctgtcagaaacttgtttttcatggccagttctgagcatttgcacgcacttccc

SEQ ID NO: 41440 - DNA, 380 bp, Mus musculus
  source 1..380: mol_type = other DNA
tagattcttaagagtctgtactagactgtggaacatagtatggtggagcctgtgcttccaggagagacactcaactttacgtggcccattccttgctcagagcaaggtcctctgaagcacctagctgagacagacaagggctgatctctttcaagacaaagatcaaacctggtctggttgtggaggctgacctgcaggccaattgaatttcccatgaggcaaattgtccacagtgacccacatcttcttggttgccatggactcacgcaggcgcgtgttccccagcggccgcgggtcagtgcttggctgctgtcccccacctgctggagcaccggcgtggctgcgtgggaggcagcctacgggccgcgccagctgaggcc

SEQ ID NO: 41441 - DNA, 367 bp, Mus musculus
  source 1..367: mol_type = other DNA
taagtgtaaccctggctggccgatccacctgtccaagaataagatttttaaaagcaaaatgtgatgtttcacacctgaaaaggatgtaaaataaacaaatacatttatttatttatttaaaaaaattttttaaaattgttatttatgtctgtatatgtgcacatatgtatatgcatgtgcatgcggagttgcgctcaggaaatccttatctactcatctctccattctcctataatcccaaagatgacagagagctgagccatgtcaccctgtctgcgtgaaaggttatctcttagcaaggagatggtaaaggtcaggttgccaactgcctcccccaggtcagcgggcggcgctgggagccagcctg

SEQ ID NO: 41442 - DNA, 334 bp, Mus musculus
  source 1..334: mol_type = other DNA
gatgcctgctgtctgactggcctgtaggccagggctacctgcctgaagctgggaactgaactcatgtcctttgggagagcagccagtgctctgaaccacctctcccaccctaggtgtttgagttgacagaccttgaggaagaggcctctttcatgtacatttgacaccctgagattgcaggtctgtgcctacaacatgaggttcctggatgggcagtggctgccagccaggcatgtctgtggtcagctcggctcagggctagatgagccctcggcctgccctcttcagggaggggaaagggacagtcatcttctcaggccccgcggggtgtgtg

SEQ ID NO: 41443 - DNA, 376 bp, Mus musculus
  source 1..376: mol_type = other DNA
gagcagccagcactcacaagtgccatgtcttcaatgtcccgtaatatttattaccattattaattagtatgataggctcatggaaattaatttttttaaaaacagcatgatatctgtctgatgctatcatcgaaccatcacgcccggcctggaagatgtagctgcccagggatgctcctcaggcctcggccctcccagcctgagccagagccagggctggagattctggcccttatggaccacaggttcccatagccccgcccacaggccgctggacggccagtggtttccacggaaacccactcaggggcgtgacaatgtcaagcctgacagatcttcgccagttgaagtttcggctgtcacccaaccggccggc

SEQ ID NO: 41444 - DNA, 396 bp, Mus musculus
  source 1..396: mol_type = other DNA
tcctccactgggcccatctggcagcctgatgaggggagtcagctggtcttcagcaggatagccaccttggaccatggccaggtagccattctctctgggttggagacaactacgtttctcccccacctggaagcttcagagaggtctctggagacccaccaaagtcacacaagactttaggagggctaccccgcgtcaggagtggcccactagtcgggacgaggtcaacctggaacggggaccgggaaggcctgaggcctgacactgtgcagaacgatgtgcggcggtgtggagccacagacgtcacactgccgcggtagttcccacgaatccagccgccgcgctcctgaaggccaaggcggaagctgggcggcccaatcccggggggccgggcgc

SEQ ID NO: 41445 - DNA, 396 bp, Mus musculus
  source 1..396: mol_type = other DNA
aggtcagggggaacctgagcacagagccctgggatccctggttccacaggccctgaatctgggagtatggctctgggccacagctctggactgacatttctgtctggccagtgctgcagcaacaggttggatggcccaacccagtaggccatacacctcacctcgggggcggggcggagaccagggggcactccccgaggtacccctcggtgggtagaggggcacacactcacctggcgggcagtgacagcacctcggcccgggggtgcctgggcgaagcccgtctcagagctcgcgctgttcctgagccctgagcgcgcccggccccccgggattgggccgcccagcttccgccttggccttcaggagcgcggcggctggattcgtgggaactac

SEQ ID NO: 41446 - DNA, 367 bp, Mus musculus
  source 1..367: mol_type = other DNA
tgctgcagcaacaggttggatggcccaacccagtaggccatacacctcacctcgggggcggggcggagaccagggggcactccccgaggtacccctcggtgggtagaggggcacacactcacctggcgggcagtgacagcacctcggcccgggggtgcctgggcgaagcccgtctcagagctcgcgctgttcctgagccctgagcgcgcccggccccccgggattgggccgcccagcttccgccttggccttcaggagcgcggcggctggattcgtgggaactaccgcggcagtgtgacgtctgtggctccacaccgccgcacatcgttctgcacagtgtcaggcctcaggccttcccggtccccgt

SEQ ID NO: 41447 - DNA, 261 bp, Mus musculus
  source 1..261: mol_type = other DNA
caagttccaggacatgaaagtctgttagtgaaaccagagctttgagacacctaacaagaaactcttgtttcttgttcttgggacagatcaaggccagcctggtctacagagtccaggacagccagggctggagagagaagaattagtaaatctgttagtgtcctcacaggggttaacctcccacaggaagggggaggagacccgggcggtcagtagcttcagtctgcatctggctacagtgacaatgagggacccccccag

SEQ ID NO: 41448 - DNA, 314 bp, Mus musculus
  source 1..314: mol_type = other DNA
tcctcctgccgaagtggcgccagctggggtgaggtcacttcctcccgaaggctctgcagcccctttggccttagggcttcaggcaggcactgctgggtgcccagcatccagcactgagtttagattctgtccccagcaccacttaaactgtgtgtggtggggatgggatttgatgccagtcacaaatcacattgccagggattcaaggatgtctgtcttgggtactgggtaacagagaagcctatcgttcacactctgcctcctggctggcagggctctgccctgagctgaaacagttgattccagtgcactgg

SEQ ID NO: 41449 - DNA, 219 bp, Mus musculus
  source 1..219: mol_type = other DNA
ggagctcagagttcagagcatctaatcctggactagatgacatgcattaagtccaatctaatgaaactgaaggactgtgctggcccgggtcggctcttagagcatccaaactgtaccagtggcccagccggccgggaggcggccggaagcgaccctcgtgtaggcgcagccccagccgccaggctagagggccggcccaaaggtgcgtctgaggaggca

SEQ ID NO: 41450 - DNA, 342 bp, Mus musculus
  source 1..342: mol_type = other DNA
ctagactccaggggtctgtgtgcaccagcgaacaggtgcatattttaaatcttttaaaattaaaaagaacacagttgctgctgtccccagcacagctgtaaaattaatgcattaatgtgagggatttcagttcgctgcctaccaatgattactgaacgtttttgacacactccaagctttatttgaagttttatgtataaaaaagagcactgactgcttgtgcttggagaggtagagtgtctgaagacagactacagtgtactcatataaatgaaataaataaatcatttttttaaaacgcgcatgttttacaatacacgaaaatggtaattaattttcctt

SEQ ID NO: 41451 - DNA, 336 bp, Mus musculus
  source 1..336: mol_type = other DNA
taagcagatgctgctgcatcgttgtgacggcagtgtggccccacaaagcgtccccttatgaggtccaaactccatgtcatgggctggtgtgggtcactcatagtggccagccagtagggatgtttgtgaaacaacctcctgtaactattgtggagccagattcacaaatatatctctacctcctgaatgctggaattaaaatctgaggtttagccttgaatcctttaaaacgagcctcatggtgcttgcttttttttaaaaaaatggagacaaaagtaggataggcagagcggagctcctaggagcgcgtgcgcatgcgcacgcggcaggacgcaa

SEQ ID NO: 41452 - DNA, 265 bp, Mus musculus
  source 1..265: mol_type = other DNA
tctgtagattcagagatccacctgcctctgcctctgaacaggtgttttggctgcatatatgtatgcaccacatacttgcccaactcacccacacacatacatatgtatttttttgagacagtggtgttggccaccacgtctggtcataaacataattttttaaaatccataaataaatatcaattggaccactcccggagtgcctcgctccagcttgcgcaggcgcttttgggccgcagaggcgggcgctctgcgggttcctggc

SEQ ID NO: 41453 - DNA, 264 bp, Mus musculus
  source 1..264: mol_type = other DNA
gaggggggaaaagggcccctaatgcatcttctccgaggcagcgaggactcgccaagggggtaagaaaagatgcttctccccattggctccagccgctgctcctctgggccgtggggtgaggtcagctcggcagggcagggcagggcagggtgcccggtgagtcccaggacagatgcatttctggccccgagcgtaacatgccctcggacgcataggcctgcgtgtgcttgttgggagaaataaaaaccatctcgatttttttcc

SEQ ID NO: 41454 - DNA, 585 bp, Mus musculus
  source 1..585: mol_type = other DNA
gctctagggcgcagggccgcgatctagccccggctcccggccgggcagctccctcgcaccccgcacctcttctttcagcggagctggggggaagggagggaggcacccgggggtgggatgctgccaggctctgccgcagcccgaacctctgccgagcggcgcgcaccgccctcccgtggggaattttcaagactgcgctgctgcaatttccccccggccgaggctgcgccgcgcctggctgcgcgcacacacgcttccgcgcgcagaggagccggcggctgctgaatcaggaggaaaacagatcggctttttttcaaagccggggaccagcggctccctgaagcctccgagccccgccgcgcccctgcgccccgctttctattctttccaggtctaggaaagtcagagtctctgcgtccaagggaggggggacgtccttcgtttagacttcgcgttttaaaggggggttgctttaaaaaaaaaaaaagctgatctttttacactattttttttaactgatttttttttaactgaaaaaaattttttttcttcttctcggggatcgcctggatcgcgtccccggcg

SEQ ID NO: 41455 - DNA, 429 bp, Mus musculus
  source 1..429: mol_type = other DNA
gacaagggaagatcgcaggccctatggacattgggacttccatgtacagtgtccgtgcccactttccacccatgtccagaaaggtggagatagaagggctgttagttgatcctttcgccatagtataatcatataatcattcgtttagtaaatattcaacactgtagtaactggcgtgtagtaactgcttaataagtagcagcgtttttactgttcaaaaaatattaattagcatgccctcggggaatgtaccccggtcccgggtttcccactatccgtctcgttggtgggcctcatcctctggcccgttggtgactctgagaacccagaacctgtcttaaggtgcagtggggaagttcttccttgcagtagttaaccgaggcgtaaatttatccctattgctttaaggactcgctagccactgtcact

SEQ ID NO: 41456 - DNA, 223 bp, Mus musculus
  source 1..223: mol_type = other DNA
tggcgccgcgaaccacttccggatgccggagagggcttccggggcggggccccttccatcggcgagcacgcccctccaacacgctgcggcaccgtcatgcgggatgacaaagtactcagttaattttttttttttgaaacaagatatcacctttatcgaacctgtgttctctgagaacagcaatcatattttgtttgttttgagccgctgagctagctaatta

SEQ ID NO: 41457 - DNA, 362 bp, Mus musculus
  source 1..362: mol_type = other DNA
ttaatccaggttgtcctggagttatatagcccagggcagattagttctagaactgtagccatctgacatgactgctgggaactgagcagtacacactcttaatttttttgagacagggtttctctgtgtagccctggctgtcctggaactcactctgtagaccaggctggcctcgaactctctaacattagttataagacgtataattatctgagttagtgcaaaatgctaacagaacttcacatcgtaacttgaacctaagtttaaatctagcctaaactgttcctggaacaacagttgttctcattttacaagaagctaagcttgcctaaggggcggggccgaggcagttttcctccctg

SEQ ID NO: 41458 - DNA, 517 bp, Mus musculus
  source 1..517: mol_type = other DNA
gctaagcttgcctaaggggcggggccgaggcagttttcctccctgccggcagcgccgtgcgcttcctcggcgctcggctggggcggcctggcccacaatgaatggccgccgcggctaccactgctgctgaggcggaggccgcggaggccgcagaggcggaggccgaggccgaggcgcagggaggcgcgccccgggcccaggcccggccccagctgccgctgcggagcccgccgggaggccccggagcgcggccacagcgcaggtgagatggcccgccccaggcccaattccggcctcctcccgcccggggcggcccgaggacatcagaggttccggcggagggccgagaggcgaggcctccgggcgccctgctgcgaaccagaagccgagcccgcggcgctgacagcggcgggagggatctcagctggcggcctacagcgtccagcccgcgggcccggcccgcagggcttgaaggccgctcgggggaggcgcgggggcggagggctgcgccgcccga

SEQ ID NO: 41459 - DNA, 361 bp, Mus musculus
  source 1..361: mol_type = other DNA
agagttcgaggccagcctggtctacagagtgagttccaggacagccagggctacacagagaaaccctgtctcaaaaaaattaagagtgtgtactgctcagttcccagcagtcatgtcagatggctacagttctagaactaatctgccctgggctatataactccaggacaacctggattaacattaggccaacactcagtctgagtgtgcccttgacagctaagattcctatttaacaggtaagggaaataggagccttacattttaattaacagattcaaagacagtgaatactatttaaaggtgcagagtgcctccgctttttgaattaaactagtgaaactcccttgtagaagagttt

SEQ ID NO: 41460 - DNA, 327 bp, Mus musculus
  source 1..327: mol_type = other DNA
tttgggaggaggcagagtctctacatagacccgatatttagaccaggctagccttgaactcaagttatgcatgtatgtgcaagtctggtgccctcagagttaagatgtcacatttcttagagtgtctgaagacagtgtacttacatataataaatcgggttagttatggttgtgagccataacaacagaattcagaagacagaatacctggcactgggaaactcagatatggcttacaggttcgggacacctgcacctcggtgtccatggggcctcagaggaccggaaaggggccccttccacccccatcagcatagggggtggggt

SEQ ID NO: 41461 - DNA, 292 bp, Mus musculus
  source 1..292: mol_type = other DNA
gtgtctgaagacagtgtacttacatataataaatcgggttagttatggttgtgagccataacaacagaattcagaagacagaatacctggcactgggaaactcagatatggcttacaggttcgggacacctgcacctcggtgtccatggggcctcagaggaccggaaaggggccccttccacccccatcagcatagggggtggggtgtgcgcgctccgtgatccctgcccgccgcggccaggcagccaaggcccagcatcctctggcctctgcgccagcgggtaagagggag

SEQ ID NO: 41462 - DNA, 283 bp, Mus musculus
  source 1..283: mol_type = other DNA
caactgtttttactgtttagaaacaacacactaatatgttacttattgctggtctctggacaagcagaccctgcctgtgcaggatcggcacgtagttggccctgccgctgtgaactcacagttcctacccatggagcgcagcagggtggagcctgcctccctcctgccgcctgcacaaggcctgggctccctgcccccaccttgtggccaccacaccctgccccagtgctggctgcctctgggctctaagccaggaggccccaaggaggaagccgggaggtaa

SEQ ID NO: 41463 - DNA, 185 bp, Mus musculus
  source 1..185: mol_type = other DNA
taactgacttggcacacataaatggctccccctcttcctctggtcgggtggagggagcagctcttgtgccgctgccaaagccgaaagccttttttattttaaactgcagaagaaattgaaacaatttgttagcttttgtttggggcggagggggaagggtttgagaatccacccaagcccggccc

SEQ ID NO: 41464 - DNA, 268 bp, Mus musculus
  source 1..268: mol_type = other DNA
gggattgcagacagatgccatatgccaacccaccccacctcattcccatctgcagtggaaatggggaatccgaaatgttcctaagtcccaggacatgtggtgtgtgtgcgcgcgcatgcatgcgcctgccagctgtttaggaacatgtgtggcacgtgcatgtcagcgtgtgtcggcgcccgaacgccggccagcacgtgtcggggcggccgcgtcggtgttgcatgtgtgtgcgcgccggccgcgctcacccgccccgcccgcccct

SEQ ID NO: 41465 - DNA, 409 bp, Mus musculus
  source 1..409: mol_type = other DNA
ccttgcagagtaactagggatgctatttagaaccagggcttctgctttgcagcaaagttaacatgtaatcctggcttggcgccttgcctccaaggcctgctgctgcaagcgcagcgactcttgcatggtcgctaagctcgggtacccgcagctgctctggggtgggccacagggaggccgggggcaccccggagatggcgccatgtcgtccgaactgcttggccacatagcggggcgttagctgccatcgcggggtcagcaggttctccgggtctggcgagtggggcccgggacggcggcgcgggggcgggggcgcacggtagctgcgggacctgggacccagagccacagagagccgccactccgcattgcgagcgccgccatcttggctgtgggtcctcgcggcagc

SEQ ID NO: 41466 - DNA, 390 bp, Mus musculus
  source 1..390: mol_type = other DNA
ctaaatctttttaaagatttaaaaggtaacataagcctaaatattaaagtagaaatatttaatatattagagaaatttaaaagtaaagcagacatatttaaagcattaatatttcaaaattaaaaatcaaaatgtcaaatacagtaatttaaataatactggcacaccagtttttttaaacgagactgatttagaaatcgatgccatcctgaattatgcatgatatcctaaaggcatttgccaccagttggtggaaggagaaacaataaataaactgcagaaatcctttctttttttctttttccgtacggactaaagcagcgcggcgctcctccgctccccggccggaggcccccggtgtttccgccgcgcaggcagcgccgtagccag

SEQ ID NO: 41467 - DNA, 398 bp, Mus musculus
  source 1..398: mol_type = other DNA
aagagactcattgttgagtctcaaggctgccttttatactctagtgtattcttcacaagaaagttgtgatctagctttcaattctggagtctagactcaagtgaaggttagttctgtttgagagtcccttaaatcaccctgataaatgtaggtaccttaagagtttacatatttaatataaaagaaccttgaaaagaactagaagtgtaaatttattccaaaaattaattttattttgaccagatccaaattgggtcacttgaaatcaaacaccttaaaaactttaaaagtccttaggagccattttgtgggtataatgacatcactgttagcagaaatgatgtcaccaggagggtgtcaccggcgctgacgatcggcgggcgctgcacacttgcccc

SEQ ID NO: 41468 - DNA, 431 bp, Mus musculus
  source 1..431: mol_type = other DNA
ggcaccccttgccttctgccgtttattgcaaaagccaagtcgtttgtgggagaccacaagaagtgactcctttcattctccagcttaagagaaagagaaaaagccctaaaaggtttaaaagcatttcgcgaaatgacttgtatcatgtcacacacctcaggatcctggctggcccttgaccttatcctgaataggaaacgctcgccaggccggaacgtgaaagttgcaaataatccttacttcttccctctgaccagagaggatgggaaagggccgaagctaaggacccgtctcggtccgcgagccagagactctcagcaggttcagtcatgaccgtgcctgagtgggctagcggcccccaccccaccagggggcgtcccccacaacgcgtggtcgaccctcattggcccgggcgggctcagcggctgagc

SEQ ID NO: 41469 - DNA, 502 bp, Mus musculus
  source 1..502: mol_type = other DNA
ctccaggaatccccgtaaaatttgccagaactgaggacaaatttgccaaaatcggacttatgtttggattcgacccagcggttgggcggggccgtccgacccccgcccccataaccaacgtctgtcaggaagcaggtgggggtggggaaggggattcccatcccaacctcaaacttgaggggcgggaaacggctgagccttcctagtcccacacgcccgcggccctagtccctctggggccacagtgttggcccgaggtctcggggcccagcagtcgctaagcggcctcgagtttgcagggtctgcggcggccaggccgaggaggccggggcggcggcacacaggccttttatggcagcggctctgcggtattgacggacgcggccaccgccgctcagccgctgagcccgcccgggccaatgagggtcgaccacgcgttgtgggggacgccccctggtggggtgggggccgctagcccactcaggcacggtcatgactgaac

SEQ ID NO: 41470 - DNA, 422 bp, Mus musculus
  source 1..422: mol_type = other DNA
ccttttgaaaatgtaaaaaaagttaacatctgtagagtggggccctggaaagatggctcagctcttaagagcgcttgttaaatattaagtattaagctgttaagggttcacaaacttccaaagcttcagttccatgtgatctgatggccatcttctgacctctgagtctaggtaagagagatttttaaaaaaattttttttttggtttttcctctgtagaccaggctggcctcgaactcagaaatctgcctgccctgagaattcttgaaattattgggggaaaccaatagaatttcagtcaagccttagagtgattgtctgtaatcctagcacgaaaactacttttgcccttcaagtcatcaaattgacttcactagttaactaaaagacatgcagcatcctgaccttgtgaggctagcttc

SEQ ID NO: 41471 - DNA, 451 bp, Mus musculus
  source 1..451: mol_type = other DNA
gtgtattaaaaaaccacctctgacttccacactcccggagtggatgctcatcgatgaagagcatcaggacaggaattaggttttcaaaatccatgcgtagtttaaatcatatataacatgtaaataaaataaaatgaaggttgttcctaggtggtgcctgccttcaattccaaggcgagttctaggtcagcctggtttacagagtcctaggctgggacatagtggaaccctgttccaaaagaatttgatctgggcactagccgcagaggcaggtctaggacagtcagggaaacactgagaaaccctgtcttaaatgtgaattcctctcttgagggccagttcggagggccttcgagttcgccgcccccgggggggggggggcgggggcggggccagggcgcgtttcattcagcacgtgctcggggcggggcgtgcagggggcgtggcgtgc

SEQ ID NO: 41472 - DNA, 306 bp, Mus musculus
  source 1..306: mol_type = other DNA
aggagaaacctactgttggtctgagcaattgcacagatgggtttctataacatttatagttataacattattgctaagccaataatcttcattgctttgtcaggataaccagttactatttctcagtaacatattctagattaacaagttgggatggggctcaccaccaaatacagttggccaatcgggtttgcacacttgtttcctgtttaaaggagagacctgcctgggcatggaagaacccgcttgcaaaaccaggcagctgccttggctcttttaaaaggcagagccaaggcctagtgtgct

SEQ ID NO: 41473 - DNA, 250 bp, Mus musculus
  source 1..250: mol_type = other DNA
gtctgtacaccaggctggccaagtactgggataggagaaacctactgttggtctgagcaattgcacagatgggtttctataacatttatagttataacattattgctaagccaataatcttcattgctttgtcaggataaccagttactatttctcagtaacatattctagattaacaagttgggatggggctcaccaccaaatacagttggccaatcgggtttgcacacttgtttcctgtttaaaggag

SEQ ID NO: 41474 - DNA, 269 bp, Mus musculus
  source 1..269: mol_type = other DNA
ctgagtagccagtgagggtcctcagagccccagagtgggctgatttgatcaaggaggaacagagctatggttgttctgggccccctacctgatagcggcctgaaagtgccaaggcccgccactagcaccgttgctgctgttactgcagtggtctccatgggggtcagggaccagtttgaaaacaggccaggtgtctgtgagttctaggccagcctggtctacataagccagtccaggacagccagggctcggtcttatcagggaagaca

SEQ ID NO: 41475 - DNA, 426 bp, Mus musculus
  source 1..426: mol_type = other DNA
cactggacttagcgctgccttggccagggccctggccaccccacctgggcctggtgccttgtgcaacccgagtcacgctccagggtccggctcccaggggttgtcgcgcgaggtggggtgcaagcctctgtaccaccagcccaagcttaggggtgattcctggcgacccaggcgtcgcacggcgacctgccgggtcgccccaggagctatgcagggccagctcaccagtttctccgctgactgcacgcgcttgagcaacggcgaggggcgcgggcgcacgacccaccgtgtggcctggcagcggcggcggcgacgcctgcgtcggggatggtgacagcgcgctgagcgcctgcaggccagagaaggtgcaaacattctgagcacctcagtgtcctagtcccctaccccgcgcaggcgcacaaccta

SEQ ID NO: 41476 - DNA, 364 bp, Mus musculus
  source 1..364: mol_type = other DNA
tgctcgtgcatttacacgtacgtacgacgtgcatgagcacgaaaaattgttgcattgttgcaagctttaaaattgctgcattctttaaaattgctgcataagagcacccgactgctcttccgaaggtctgaagttcacaacaatgagatctgatgccctcttctggtgtatctgaagacaactacagtgtacttacatataataaataaataaatctttaaaaacaaattgctgcatgcttttaaaaagccttccagatttgttcctaattcagaaccccttagaagtcacgtgacagccaacttcataggaagccccgcctccgtattgggcctggcgggcttcgtctccaccctcgcgaagc

SEQ ID NO: 41477 - DNA, 301 bp, Mus musculus
  source 1..301: mol_type = other DNA
agaatcagatgatcaaggttacccctcagctagccagcctggacttcctgagaccctgtccggaacaaaggacaatgttttacaaacacatatatgagattctgtcttgtcaaaaaaaaaaaaagccaagtaaaactttatttgcatgaacttgtttttaatcgtgggcagtggccactgtccacgtgccccggaaaacccccaggtagggcatcaggcgtgcacacgggcggggcctcgcgcggcgacaccccgcagcgccccctcgcgactggctgcagcaacagctggccgctgctgc

SEQ ID NO: 41478 - DNA, 199 bp, Mus musculus
  source 1..199: mol_type = other DNA
aaaacatatgtatatagttgtgaatatattcacatagtatatatatacataggcacatatacatatatacatataccctacaataatataaacatatactccatgaaagtgcatgcataccctgtttaataaatgtcttttgaattcatggacagaatgttaaacttgtagatataaacccatggaggtggggctttgg

SEQ ID NO: 41479 - DNA, 418 bp, Mus musculus
  source 1..418: mol_type = other DNA
cctgcagcctccggcggcggatcaggccagaatcgtccatggcggcggcgatttcgagcctcggggaccgcggcggcggccggcgagggggggcccggaggggcggagcgaagcggggcgggcccggcgccgtcactgcgtctgggagccggagccgggttttggccaccgctgcccgcgctgggggtccggtgggagggaagggaggcatgctggagacagaccctatcaagatagtctctttcaatccctaggggagttattctcacagatgaattcctggagacacattctcacaagcgtgtgatttaatcactcctaatagagataatgtctgaaagatgacgtttcataagaggctgagtctcagcctcatgatcaggatgggggcagatgaagcgattcttactccgccccc

SEQ ID NO: 41480 - DNA, 207 bp, Mus musculus
  source 1..207: mol_type = other DNA
agaagaaacaggaagcagctggggcccggcatctccttcaggaaatgtgagtcagaaggcctcagccttgtggaactagagagacacagtgagactctttcttgtaaacctccaaaaaatatcctttattagttgtctcgaaagaaacaaaccaaactcactgagggccaggcagcttgcaaagtgaccctcgaccacgccggaggg

SEQ ID NO: 41481 - DNA, 309 bp, Mus musculus
  source 1..309: mol_type = other DNA
tctcacagtccctgtgactttaactgtgcggttgtttattagacaggcagtgtttaatataattatcagacccagcctgcactgagctgggcagggatctcgctgcagcgtcagcagctcggagccaagtggctccgggccatgcccggattccaaccgaccccaacgcgccccgtggccgaggctcgcgaggagctgaaagcgtgtggaccgggccacgcggcgccttcccctcacccccccggcagccgcaatggatccgaccgcggcgctgtcccgcccacctccccgcgcactgcctggtgtggt

SEQ ID NO: 41482 - DNA, 279 bp, Mus musculus
  source 1..279: mol_type = other DNA
caggaggatcctccgagtcatcttctcaggaagatctcagataccctcctgtcattgccttcatagctcggaaggaagctatgttctctgccagagtgtacaataggtacctgctaggccaaatgttaacaattggatagcagccgcgcagagccacccggctcgtggccgctgtttacaaggacacgcgcttcctgacagtgacgcgagccgcctcctccccttccccacgctctaggagggggccgcgggggcctggctcccgcgtcggccaatcct

SEQ ID NO: 41483 - DNA, 408 bp, Mus musculus
  source 1..408: mol_type = other DNA
tacccctggcgtcaaagcccgtgttttgtagccgctgtttactcatttgcaaagcggcggattaaaaaaaaattaaataaaaaaattaaataatacagtttctaaaattaagaacattcaattgtctgtagatatatagcttattgtaaaacagtaagcactccacaaatgatgtcttgagactttattgtcaaaaaattcaaccggtggacgcacccagaaggatgcgcgccccctggtgggcttcagatcacccgcaggggctgggcaagtgctatgtcctttactctataattattctctgcgcccacattaagaaaggctcagatcataacgcggctaaaccgggccttaaaaggatctttgagccagactgacacctagcggagcggggcggcgctctaggcc

SEQ ID NO: 41484 - DNA, 278 bp, Mus musculus
  source 1..278: mol_type = other DNA
agtctagaactggggttttagacacttgaaagtatgcacttgggtacaggtgcccttgggtcccctgcagctggaggtatgcctttagctgccagcattcctggctgaccttgaaagtctctgtgacagtgtagattgccactgtggtgtgtgtgtgtgtgtgagagagagagagagaccttctccttcccgctttttcaggttccagataccttggaccttctccctaggaggtggggatggacttgggaggggctgcccacgcccactccccagct

SEQ ID NO: 41485 - DNA, 225 bp, Mus musculus
  source 1..225: mol_type = other DNA
gctggctgcgtgcagctagacactgcggctgagaacctaagacttaatgttttgagctgcgtttcagaaattaaagttctttctacaaggacgacttgttgcaggaatcattccttgcatactctgcaaataaccagttcgttcgtaattggtttgcgacagaaaccatgtggctcacaaccaacttcacgcaaaaagcttggccaggatgttgtgagcctgtac

SEQ ID NO: 41486 - DNA, 313 bp, Mus musculus
  source 1..313: mol_type = other DNA
cagaacaaaaaatggccacgtgttatttttcagtcccatgtaaaaagtgtttaaacagcattgaacaaaatccagcaccgccagctgcctgccctgctctttacgtcggtgctgtttaggggagcgaaagagaaagttacattttaaccccctccagttctgaggcacgccggactgcggaacagtttaaattggattcctactgtgggctctcgtagaggacccagtcacgtgactcaacttggccagggccactctgtgccagatcacgtttgaacggcgtacggaagccgaaattgttcatttcggccgc

SEQ ID NO: 41487 - DNA, 315 bp, Mus musculus
  source 1..315: mol_type = other DNA
aggaatgattcctgcaacaagtcgtccttgtagaaagaactttaatttctgaaacgcagctcaaaacattaagtcttaggttctcagccgcagtgtctagctgcacgcagccagctggctgtcctggactcactttgtagaccaggctggcctcgaactcagaaatccgcctgcctctcaagctaagagattaacttcagagacagatgtcaaagacctagttagggggcctgggtcccaaacgatggtcccaggaccggcttctgggctccatcgcctggtggccaggtcagccagtcccgcgccaagcgcgcg

SEQ ID NO: 41488 - DNA, 383 bp, Mus musculus
  source 1..383: mol_type = other DNA
agttctgaggcacgccggactgcggaacagtttaaattggattcctactgtgggctctcgtagaggacccagtcacgtgactcaacttggccagggccactctgtgccagatcacgtttgaacggcgtacggaagccgaaattgttcatttcggccgcgcgcgagcctctggagaagctgcagcacttaggcgccgccgctgcctcccggggcctggtaggtgggcctcgctcggccggggccccttccctgggttctgggcctgcgccgcgcgccgcccaggcgtcggggtcgcgcccggctgagaggcggggtaccgggttgggccagctctcgaggccggcagaacgggccgggcgggcctcggcgcccgggcaggttcg

SEQ ID NO: 41489 - DNA, 233 bp, Mus musculus
  source 1..233: mol_type = other DNA
tccagaacctatgtaaaggtgtgacctgtggtgcacgggagctaagagcactttaagtgagcgagataggtgcctttcatttccgaggccagcctggtctacaaagtgagttccaagacagccagggcgcctgagttcgaggccagcctggcctacaaagtgaattccaggacagccagggctatacagagaaaccctcatctaatgggcgccggaagtgatctcgcgctgcc

SEQ ID NO: 41490 - DNA, 379 bp, Mus musculus
  source 1..379: mol_type = other DNA
ggtccaagcacctgttttatcaaagctgtttgttacctagcatagccaaagccctgagttctgcaaaatcatcgatttcaagttgtctcttcctccagaaaccaatgacctcgattactggtattaatgatcccaatcgggagtctagaaattcagaacctcttaacgatcctggatccaagttgtttccaaagcttgggaattcttgggctagggcctttgtgctaacaaagcgcaaacccggaaatctttggattttaagtttagaaatcccaggtccagagcacttcctgaggaaaccaagtggccttgtggtcgacaaggattcaccactgggtagggtgcgcgtacgcggcgctgagcgcgtagcctccaggtg

SEQ ID NO: 41491 - DNA, 240 bp, Mus musculus
  source 1..240: mol_type = other DNA
agactctaaaacaaggggacattctcttcattttcttgacagggtccctgtgtggcccagcatttccagctctgcttctggagtagctttgcatatgtttgacatagagctacccagtactgtactggttcagaccagtggatctcagagccccattagaattttaaaatgaacactgggcctcctggggaacagaccccttctgtcacagcagctgccactgttgttactggtgactcc

SEQ ID NO: 41492 - DNA, 304 bp, Mus musculus
  source 1..304: mol_type = other DNA
ggaatccagactcttcttctatggaattactggtattgtcaacccccatgagctgtcccttttgttaagacagggctggtttaatcactaaaccattttctgtttcatcatactatgactatttctagtctagactacacaaaccagaagaaggggtgcccctgtcctaagaggatgcatgatagattctcagatgatccagttaaaattgagctatgcatttgacaaaaggctgcaactctccaagtatgcttgaagctcagtgcgctgcccaaggtcacgagaccaagtgacttccggtttc

SEQ ID NO: 41493 - DNA, 265 bp, Mus musculus
  source 1..265: mol_type = other DNA
ggaccttgttcccgaagcagcaggcttctgatgccgtcgtctgtaacttgcctaagttaggctccctacgtttggggcggcatgagtacctgcgacatgttcaaggatcaggagcgatcaagtcccacctgggcagcacctttcacagctagaagagcaacacaccagtagccagcgcttctgttcccaatagcagtgagagggacaaaggacttttcagtatcccgcgctgaaattttgcacggaagtgcaaagcaataaatcc

SEQ ID NO: 41494 - DNA, 331 bp, Mus musculus
  source 1..331: mol_type = other DNA
aaggatcttcctcgtaccagtccgcagcagcgtcccacgcagcgggttcctgccgcacgtcaggcagtagttgccgtccactggggaacaaagggcaggggttacgggaccgccggtctcgtcgcacggctcgcaccgcgccctggctgcagtccctgcggcagctccggtgcccgcggctttggctcgggaaagtccgccgagtgtaacattattattgtcccccaggatttattgctttgcacttccgtgcaaaatttcagcgcgggatactgaaaagtcctttgtccctctcactgctattgggaacagaagcgctggctactggtgt

SEQ ID NO: 41495 - DNA, 409 bp, Mus musculus
  source 1..409: mol_type = other DNA
tctgcccagtgaagactgccctgtgctggactttttgaaaaaatgagttaatgttaatatttcacaagcctagggttaggcatcagggccctgataacctaaccaatctaggttttgagtgctatgtatgaaattcagggctttatataggttacacaagtattctacagaggtatatttctgggttttatttgtgtatccttacatggccatggcaggcctggtattcatatcaacatgctgacattaatgttgaggggagttgggaagggttctctcttcccaagctcacaggcagctcagtccagcctgggatgggtgcctctatcagaactgttagagagttggtcttagtgctaaggtctcctgcaggtccttgatgacccaggccctgcccccttcctcaccg

SEQ ID NO: 41496 - DNA, 561 bp, Mus musculus
  source 1..561: mol_type = other DNA
tgcaattacatatcaagaaggtaatggtatcatagaaatgtatgcatgcttgtaagctctaatttacaagaagttagatttaataatgatgaggaagatgcatttttaaaaaacttgctggtcaagagatgaaaatcattatgctgctaagtaaaatgcaggttgattacttgtgccatactgataataattagcaggtagcattagcatgttatttgggatctatagataatcattatccaagagatccccctttaaaatttttttgaagatacctcatgggtcttgcttgctcttaatgattttacagggctcttcaaaagaacaggagcatatgttttatgtacaaattccacacatttgtacagttgttgtacagttcaacagtttgaactcatcaatcagatgttattagatatttcccaaccattgaatattttaactgttcaaactgtttctcttttagaagctgcaagacttgaacgcagtagcactagtaggtccattcacattcgccagtgctcagggatgtgcctgagccactgaaaaacatatcatgat

SEQ ID NO: 41497 - DNA, 313 bp, Mus musculus
  source 1..313: mol_type = other DNA
caggctcgcctcggacgactatatgttgggcccgagtctcgcccagatccgacgctgccttgggaggacccagggccgcagtctgggacgtctctcggctccgcaaggccgagacgcggggcgaggcggcgtaccagctccgactccatcggcgcgccaagagcaatgcgcgcgcagatccacccccggcgcgtccagattggttgcgaccagaggttgagaccttctacgcatgtgcacacgatgaggcgcgggcccaggcgaagtggacgcgcacccttcctcggaaaagccgcttctggctagagagggc

SEQ ID NO: 41498 - DNA, 463 bp, Mus musculus
  source 1..463: mol_type = other DNA
atccgaattttgcggaagttcctgtttataagacatgctacctgtctcctatctgattcacgtgagcaggtccctagaagggctctgcggccacggaaggccgggagaccactgcgctctgggcgcgacccagctacggcgccagctcagaagctcgggggctcccaactccgcacagacccgggagtccgactctcagagggaaggtggcagcccgcgacacccctaagggaggctcctggtctcggggcgcagcctaacgcggccttcctcagcccgtgccaagcccgcaggcccagcctggaccggaccggcctcgatcgaaaagcgactcggcaacccaggcccaccgcttccccctcaccatggcgactccggggaccagcctaccccgccggagccgcccgccgtcaggtgaccgagccttgcgagccccgccctctctagccagaagcggcttttc

SEQ ID NO: 41499 - DNA, 494 bp, Mus musculus
  source 1..494: mol_type = other DNA
ctctgcggccacggaaggccgggagaccactgcgctctgggcgcgacccagctacggcgccagctcagaagctcgggggctcccaactccgcacagacccgggagtccgactctcagagggaaggtggcagcccgcgacacccctaagggaggctcctggtctcggggcgcagcctaacgcggccttcctcagcccgtgccaagcccgcaggcccagcctggaccggaccggcctcgatcgaaaagcgactcggcaacccaggcccaccgcttccccctcaccatggcgactccggggaccagcctaccccgccggagccgcccgccgtcaggtgaccgagccttgcgagccccgccctctctagccagaagcggcttttccgaggaagggtgcgcgtccacttcgcctgggcccgcgcctcatcgtgtgcacatgcgtagaaggtctcaacctctggtcgcaaccaatctggacgcgccgggggtggatctgc

SEQ ID NO: 41500 - DNA, 438 bp, Mus musculus
  source 1..438: mol_type = other DNA
gagttctgaaaaccaggagtttactttaagacagtttgttagtatgcatacttttatccttttttagagatcaaagtgaatttgtatgtaaatgaggacatgtttttccaggtatagccctggctgtctctagaccaggctagcctagcctgttatttttcttttaaattaaattgcaattatataatttccctgttttctttattgttattattatatgtataaaaacacataaatctataaatacaatttactggtttatttagcgttataaccaattagggctcatccctggggaagactaattaaaagacatttttcttagactcttaaaatatctgcagtcagcagcctcttaaagaggaatgttaattgttaccatagggcctgggccaaactcagcctgtcactctctcagtggctgagtgcgagatagac

SEQ ID NO: 41501 - DNA, 350 bp, Mus musculus
  source 1..350: mol_type = other DNA
ttttgtttttcctgtgaaaaaattagcaactgagatgagtgttaaaggcaagcctgcatcccacaggctgccggtccagctgcccctgaggttagatttttttccattggaaaacaaagggaggctacccataccttctgaagtttctcttgttgagccactgcctcttctgagctgcagagttcttatggaatctgtacttagttccagaggtgatcaactagttaggagcttctgagatctgaaagtctgaagatttcacaattagacactttgctaagagccgctggatgcttctggggcctggacagggccaggcttatcgctaagcccgctctgaatagttgggc

SEQ ID NO: 41502 - DNA, 375 bp, Mus musculus
  source 1..375: mol_type = other DNA
cttacttgcaatcatctttgatccaaagtggcacctttcctatagtacagagtgaggagtctctgtaggtttcacttttcaaataatttgcttttaattttaaactactcagtatcagtgataccaattatttaatgaatagtgaagtttatacccctgacgctggaagcctaggggtttcagagccagtaaccatggttctggggccgacgagggggcgtgcccagcaccagggctcggcccacctgtgcgttggttggtggagtctcgtcggagccacgcccccgagcggtccaccgccttagagggcgtggcgatgggacttccctggaagggccgcggcgcccccctcctccaacccgcacgcagccccgc

SEQ ID NO: 41503 - DNA, 378 bp, Mus musculus
  source 1..378: mol_type = other DNA
agtatgtatgccatcaacaaattcctttactatatagagacaactatatagctgttgtttactgtatagttctgtacttatgtgcaaaatgttttgcccaaatgtgtagtcaacaaatatttactaagtgcctatatagtaacaaaacaaaacaaaataaaaacattgtttttatccttctgagtcctctagaagtatctaaatgaggtaaattttagatgcttttttgctaacaagaacgttgattctgagaagcctaaccagctgcccctgatggcgcatcccacgtcactgtaggtgtcccgaggtggaaaggacagtcgctgccttaaagtagggcccgcccagcccagtctggcctgcgccaggctttagtgt

SEQ ID NO: 41504 - DNA, 553 bp, Mus musculus
  source 1..553: mol_type = other DNA
aacaactttatgctaataggtgttaattggttttatttataaacttgttaattgcttatacttctgtgactttcttagagcgatccaagaaaagaaagaatgtgacacccttggaatattttgtttctaattagccataatttgctagataaacatttatatatcagatcaattacgcttaatattggaataccagtcattgttatatgcacataactcaaaccaataaatgactgtagcccgcctgcattcaagtcatttctatttagtctgcattcagtcgcgccttcctcaagcagcgctgtgcctggcaactgttggagaaggttcagtaggtgcaacaacccttactgctggccgggggaactcacccgggcacctccagggcccccgcgggggtctcccttttcaagcacctgagcttgaggtcctcgtgggccgcgcgcgaggcccgggaagcgagtggcgggcggggcacgcgggagggcggggctgcgcgtgcgcagtggccccgcggccggcacgcggcgctgcgctcgctgcttaaatgagc

SEQ ID NO: 41505 - DNA, 454 bp, Mus musculus
  source 1..454: mol_type = other DNA
agaaggagcatctaacttctcatgagactcttctgagcgttcaggttaaatttcagaagtcttagcacgtgttgtttcccagttcaggttttcaactgaccagaagtgttttactatccctttggcgttagctaattttaaagctgtcaagtgagacacttgaacacatgatcccggtggaacagggtgactttggtttatctggatgccccgaaacccctttaaaacctcgtctgctaggtataaatctgatttgatgaaatcacatcacgtttcaccgtggccccggggggaccaccccgtgaggattccacgccggcttcctccactccgcggtcgctcgcgcgtcacggagcggcgacaggaaagggccccaccagccgctctcgggcgcccaccgcccaaccccgccccgcccggccccggaggcggggccttgtggcgacgtcatggc

SEQ ID NO: 41506 - DNA, 518 bp, Mus musculus
  source 1..518: mol_type = other DNA
gactttgcaattttgggaaccacaactagaagcactaacttaacttgtggcacaaaccgtcttcctcaatttctgacacatttaggacctcactaaaaatggaggtctacttttcggcaaagtttctggagaagtcagcttatcacaagagaaacctattgctttctggagccaacttaaggaagcaagttgatccccccctgctccctccaggggacttgcggaggagcaccaccccctgtacccaggagggggaaggttgtgcctgagcgcttggcccgggctcttcgttccaagccagctgccagtcagcgaggccggcccggccccgccccctcgcgcgacactgtcgggaggcacgacagccggaagtgagttcccgggcagacgccgccctagctcctcggcgtcttggtcgtcggagaaacagccccagggcgagtgcagcgaggggctgcccgtgaggccgcaccccgagtcttttctcggtcggccggtcagtcgcacggtgctttgcg

SEQ ID NO: 41507 - DNA, 791 bp, Mus musculus
  source 1..791: mol_type = other DNA
caatccaagcacctccgcggagaggcagcctctcagtggcagctcgccggccgctgccgacccgtgcatcctccgcacaggactcatgaggcagcgggactcggcgatcccgggaaggcagcgcggggcgcggggcgcggggggcatgcagggccgccgcgcagccccgagcccgcagtggtgccgcagcctcccggccgcagcaggtgggacccgcgggaggcgcggacattgggggcttctccgaaaccgctgcggcgcgtcggagttggtggcaacctggggccaccggccttcgcttcgcacactttgcaaggcgcggagtcgccggcgtcccccggagcgagctcgcagcggcggcgggcggcctggcccagacaaagggcgcgaaggcggcggcggagcggagcggagcgcggcctggcccgcaagggggcgctgcccgcacccgcgcttacctttgaggaccgcgcagagctgctccaggcctcagcgtcggcgctccgagagcgcccgaggcggcggcgcggtggtcacggcccggcggggtagcttcgctccgtccccatcgccggccgccgccgcttcctagcagcgggcgcagcgcctcggcccgccgtgccgggtccccgacggccgccgcctctcggcgggctgaggaaagccagcggcggacgctcccgcggcgggctcccttgaagtggcgcgcgccgggagccccggctcatttaagcagcgagcgcagcgccgcgtgccggccgcggggccactgcgcacgcgcagccccgccc

SEQ ID NO: 41508 - DNA, 462 bp, Mus musculus
  source 1..462: mol_type = other DNA
ttgacaagggaaagaaatttcaaaagtggcagtttcactgctggctctctggaaagttattaatcaggagtactaacttttaaaacgccagtgtgactttgcaatttgaatgggaaccacaactagaagcactaacttaacttgtggcacaaaccgtcttcctcaatttctgacacatttaggacctcactaaaaatggaggtctacttttcggcaaagtttctggagaagtcagcttatcacaagagaaacctattgctttctggagccaacttaaggaagcaagttgatccccccctgctccctccaggggacttgcggaggagcaccaccccctgtacccaggagggggaaggttgtgcctgagcgcttggcccgggctcttcgttccaagccagctgccagtcagcgaggccggcccggccccgccccctcgcgcgacactgtcgggaggcacgacag

SEQ ID NO: 41509 - DNA, 456 bp, Mus musculus
  source 1..456: mol_type = other DNA
ctgtcagcttgcatgtttcaaggttcttagaaatctgtcgcactgactttccggtcaccgaaggccgccagggtgccccaggcctcagccctcggccgtgacgttgtgcagagcccgcgccggggcaggcccaacgctcagcagcgcgagcccccagcggggccagcaccgccctggcgctaggaagccggcctgccgccatggcgccttcggcccggccggcctccgccgcgcttgacggcagccgcaaagcaccgtgcgactgaccggccgaccgagaaaagactcggggtgcggcctcacgggcagcccctcgctgcactcgccctggggctgtttctccgacgaccaagacgccgaggagctagggcggcgtctgcccgggaactcacttccggctgtcgtgcctcccgacagtgtcgcgcgagggggcggggccgggccggcctcgctgac

SEQ ID NO: 41510 - DNA, 243 bp, Mus musculus
  source 1..243: mol_type = other DNA
ggctgacagagtccacactcttcagaatggtaaaacaaagtgtgaagcgtttgcttctagagtcttccacctaatattttctgttgactgcagctctttgcctccaggtatgtagtgctcactgtagagtcctatatacaagagtaagctgctaattatagtcagctaactcaacttgtcccttgatttctgttaaatgagtgaatgaacaagtgaacaaatgagaggctccctcagagtccc

SEQ ID NO: 41511 - DNA, 406 bp, Mus musculus
  source 1..406: mol_type = other DNA
ctatctcaagatatctacacaatgcatacttgatgagtgtgtccttctacaaataattgaatgccccttttttaaaagtatctgtttaaaatactaataaaataaagctaatggtaatactaatttcctgggttaaccatggttatataggatacttgttaaaatataaaatctattcaataaaaaggtttaaaaatgtctaattgggtatctctgggccagaagccgctgcttagccgctgcggcctccggaagggttgtgcgggcccggaaacggcccgggggcgagtccgaagcgtccggcggggccggaagcggcggcaggcctggggaccggagcctggggaaggggcggtgccggaagcggcggcactcaggcctgggggcgggccgtcgagtgacggct

SEQ ID NO: 41512 - DNA, 641 bp, Mus musculus
  source 1..641: mol_type = other DNA
tactaacccggttttatataacccgatttcaaacagccaaaataacttaagcgaattttatgaggcactttagcagtaatcatttactgtaatagcttagcacttactaagagctgagtctccatcagacccattttgcagattagcaaaatgaacaccaaaatcgtgcccaaggtcacaaacccaggattggagcccatgctccaagccttttacaagttaacatttcaccctggacaatagcctagcaaggactttgacaaatcagctacatggcctcatttaccgaatgcacaaatgtaactcttatgccagggcaaacaaattctgtatctttccaggaacagacggtccgcagcggcccagggcgtacacactaagttgcatctgggagcttggagggaccccgaaggcttaggcttaaaggctggagctgcccaggcgggcgtccgcgcgctcgctcgtggcgacataaacaagggaggaggctgcgttcttccccgcacaataaaggcgcgggtccgggggaggccgccctcccggagccgccgaggcaaggcccgaccgcggcccgcgaagcgcgcggctgacctccgccatgttggccgtacaccgggagcgagggcgcgggccgtagtctc

SEQ ID NO: 41513 - DNA, 715 bp, Mus musculus
  source 1..715: mol_type = other DNA
tggggactgagtctcagcaaaaggtctccccgggaagtcccagaaaactctgtataaaccagactggccccaaacttgcaacatcagcttcccagatgagtgggaaagtggacttaaaggcgtgcttcttactggccagctttcaacgagcctaccgggaggcgcggccctcttctcctccaggagtggggtcgtggaggccgctacagaccggcccgagacagcgcagccgcctcgtggggatgctcgggacgctgctccggtaaccgaagcgtctcgacgccaaccgccaccgagtgcgggcagcagccgccagccgcttctgcgcgtgcgtggccgtgggaagccccgcccagccgggttcggtgcgcgctcccgctcatggcggccgccgcagtgtgtggtacttagcgggcgcgcgcggcgagctcgagagcgcgcggggcggcggcggcggcggcagggaagccgggctgccgggcgggcgcgctctcgagggcggcggcccagggtgtcccgtcggtctcggtgccgggagaggtggaggcgcggcccgcggtggcggcggtgacggtggcggtggcggtggcggcggcggcagctggcgaccgggcgcgttagacggggccggggtccgcggcgcgctctccgcccacaggtaagcgggcggcctggagggaggagctggccgcggcccggggagggccggcgggtc

SEQ ID NO: 41514 - DNA, 514 bp, Mus musculus
  source 1..514: mol_type = other DNA
gacttttcttcctttcttgaaaccccatagaaaaagtacttttctcacagcattgcatttctcagcagaggccctgccatggggactgagtctcagcaaaaggtctccccgggaagtcccagaaaactctgtataaaccagactggccccaaacttgcaacatcagcttcccagatgagtgggaaagtggacttaaaggcgtgcttcttactggccagctttcaacgagcctaccgggaggcgcggccctcttctcctccaggagtggggtcgtggaggccgctacagaccggcccgagacagcgcagccgcctcgtggggatgctcgggacgctgctccggtaaccgaagcgtctcgacgccaaccgccaccgagtgcgggcagcagccgccagccgcttctgcgcgtgcgtggccgtgggaagccccgcccagccgggttcggtgcgcgctcccgctcatggcggccgccgcagtgtgtggtacttagcgggcgcgcgcggcgagctcgaga

SEQ ID NO: 41515 - DNA, 300 bp, Mus musculus
  source 1..300: mol_type = other DNA
gaggtacagtaacaatcatgcccaactttttaaaaaatagatttattttagagttatgcatatacttgtggaaacagctcttgtttggtttttgagacaaggtttcactttatagctcaaactgccaccccagtgggatgacacgatttttcttttttttctgaagtaagtaaaaaggggaaaggcccaaaggcatcaggcccttatggccgcccaggcctcgcctgccgacgcttgcccacggtcaacatggtgacagcgtgtggcgtcgaccttcgcgacggggcggcgagtttccac

SEQ ID NO: 41516 - DNA, 589 bp, Mus musculus
  source 1..589: mol_type = other DNA
cttggtctggattccatgcaagcggcctccctgccgtgaggtgcgggaccggcccacccccgcagctcctcaccggcgcatagctcctaccagccggcgcttgcgatgccggacgcgaggctcgcctggccggtctgcacacctaccctcgcgcgaaagagtccacgcgtgactacacgtgcgccccgagccccacgcaggccccgccccgcacgtagctgtcgctgccccgcgcgctcgtgtccacgggggggcgctcctgcccgccccccacatccacgccgcgcccctcggtcggcgcgatgctgcactcccgacccgccgcgcgccgccgagcggctgcggagaactgtccgggagcgcgcgcgcgctccctcgtctgactcccggccggagcccagccccgctgccccgcgcctcccgcctcgccgccaacggcgccctaggtcaggtggccgcgcgcggacagggcaaccattggctcggcggggagcgcggtgcggccgctcaggggaggggcgggggcggggccaggcttgatccgcgcctttgtgcccggcgcgcgctctccgcccgctccggctgcagc

SEQ ID NO: 41517 - DNA, 545 bp, Mus musculus
  source 1..545: mol_type = other DNA
gaccggagtccgcccgagcgtggcctcgcgcttctgcagaccttggcgctgccggagcgcacagagatgccggttggagtcacacaccaccagtgtctcattctgcccgcgggctgggcctgccagccacgcagtccccacgcctccggcgcccaccccgccccccaccccgggggctgccagcgccagccgcccccctccccctcctcagctctgtgcgcagctctgccgacgcccccgcgtgccgtgtgcccgaagccccgcccgggcctcaggggtgccgcggccgcccagccgcacttggatgcatagcctctgctgccgcctcctgtccgcactcgccgctgctgctgccgccgccgctctgaattattgatgcagcgggcgctgcagccggagcgggcggagagcgcgcgccgggcacaaaggcgcggatcaagcctggccccgcccccgcccctcccctgagcggccgcaccgcgctccccgccgagccaatggttgccctgtccgcgcgcggccacctgacctagggcgccgttggc

SEQ ID NO: 41518 - DNA, 661 bp, Mus musculus
  source 1..661: mol_type = other DNA
cgcctccggcgcccaccccgccccccaccccgggggctgccagcgccagccgcccccctccccctcctcagctctgtgcgcagctctgccgacgcccccgcgtgccgtgtgcccgaagccccgcccgggcctcaggggtgccgcggccgcccagccgcacttggatgcatagcctctgctgccgcctcctgtccgcactcgccgctgctgctgccgccgccgctctgaattattgatgcagcgggcgctgcagccggagcgggcggagagcgcgcgccgggcacaaaggcgcggatcaagcctggccccgcccccgcccctcccctgagcggccgcaccgcgctccccgccgagccaatggttgccctgtccgcgcgcggccacctgacctagggcgccgttggcggcgaggcgggaggcgcggggcagcggggctgggctccggccgggagtcagacgagggagcgcgcgcgcgctcccggacagttctccgcagccgctcggcggcgcgcggcgggtcgggagtgcagcatcgcgccgaccgaggggcgcggcgtggatgtggggggcgggcaggagcgcccccccgtggacacgagcgcgcggggcagcgacagctacgtgcggggcggggcctgcgtggggctcggggcgcacgtgt

SEQ ID NO: 41519 - DNA, 522 bp, Mus musculus
  source 1..522: mol_type = other DNA
gccccagcaggcgagggaggctggcgggcgggccggcgccggctggagcgcggaggagccggggcgcagccgccgccgccgctgcccgggaggacgggagcccggccgccgccgcctgctcttcccccttcccagcccttggtccatggaggcagctagcggggccggcgacttggcaccggcctggggatcgactgcgcgtcgcgcgctgagcaccgcagcccgagggcaggcagcggcggcccggcacatcggctgagcaatgcccgtgccacgggcgcccctgcccgcctccgcctgagcgcccccgcgctcccggggcgtgagccggggacccccagccgcggcttacaagccactgcggccgtttcgagcccccctctaagtaggctgagttgagggatttgagccattaatatttattattattattttttgagctcctgcgctccggaccgcctccggtctcctcgccccctgagaccctacgggctccacaactttgcaggggccgggggccgg

SEQ ID NO: 41520 - DNA, 478 bp, Mus musculus
  source 1..478: mol_type = other DNA
tcatcttccccagggaagagtacaccaattggttattcaatatcaaatggtcagcccaagtaacattaaatacagtgaactggctgaatttttatatttgtgtatacacacacacatatacatatatatatgtatatatatatgtatatgtgggtgtgggtgggtatggatatatatatgtatatatattagtatatataatacataaatatacataatttaggaaaatgttacatacataataatagctattaaaaagagactgtaaatgattaactattttatctttaaaattttttaaaaatcttaaaaatagagcaattcccgctggcctgtcaacaacctgccaggggttgagcaatcacaacatttaaactttggtacaattgtttgtatatgatctcatggaggtagcttacatcctacctctactctgacctctgacctagaggccagttgctaagtcagcagtgacctc

SEQ ID NO: 41521 - DNA, 399 bp, Mus musculus
  source 1..399: mol_type = other DNA
ctacttttagaagcttgaaattctgtggaaccaagaacttcctgttgaaacatcaaaatccagaggtctaattgacttaattgatggctatgtagtatgggcttactagacttccatacgggtcgccggtgaacgtccggccagcagcagcgcctacgcagaggtgttttttaaaaaatcaaaataaaacaaaactttgggctcgtcactgagacgggggggcccccgagcccctgcggggggggaaggcggcacccctcggcggccgtgcgccccgcgtccccgccacgccgccctcgcgacctcctcagcctcgggacgggacccggcggaagacacaggcagctccggtcaccgccacggcccggtcctcatcgcagcccgcccctcaactaaact

SEQ ID NO: 41522 - DNA, 294 bp, Mus musculus
  source 1..294: mol_type = other DNA
gacaaatacaatgcgtagcatgtcatgcaataaatacctcttgaatgaatcaaaacagaaataacaggtcattttaatcaaatgttaattttgctaaccctgtacatatttttgttatacttacaaagacatactttgactctgtcaggctaaaccaagaaagaaatccttccttaaggaattggatatctaaagaatggtggtctctccttagcaaccaaaatactgcccagaagttagtgggcgctcaatcattgttttaagaactaagaaagcaaccaaagtttagttgag

SEQ ID NO: 41523 - DNA, 362 bp, Mus musculus
  source 1..362: mol_type = other DNA
gttcaaggaacgctaaacttaagctatcctttgcccaggcctaagactagttcagcagaatgccatgatgtcgatgctcagcagttaagagtgccgactgctgaacacagctacagtgtacttacatataataaataaacactccaccaaaagtttttagaaaatatacttaagagtctcttttaggaaggctatatttcaaacagatgtttgaaaaaaaatagtaacctttaaaatttgccataaaaatcagagtttgattcctggaaaattcctcagaggagtccatataccacacattttaaaaaaaattattagacaaatattttatgagaaacttttttatgttgtctccccagggt

SEQ ID NO: 41524 - DNA, 395 bp, Mus musculus
  source 1..395: mol_type = other DNA
ccaaaagtttttagaaaatatacttaagagtctcttttaggaaggctatatttcaaacagatgtttgaaaaaaaatagtaacctttaaaatttgccataaaaatcagagtttgattcctggaaaattcctcagaggagtccatataccacacattttaaaaaaaattattagacaaatattttatgagaaacttttttatgttgtctccccagggtgcgcagggaggggagacgccaagtaacgtcgagcctggaagtcgccacgggcccggtgggccccaacgacggctgctgcagtcgtcctcttctggtctctgcagcgctgtcaggccgaggcggcggccgcgtcgaacgggactggacgagggcatggccaggctcgggcggcgggcggc

SEQ ID NO: 41525 - DNA, 390 bp, Mus musculus
  source 1..390: mol_type = other DNA
agtgtcaccttggccatgtcactgtggcatgccagaagcaatgcctgggcaatctgagccttagctgggacctcaggtcacctggaatggaagttgattccaatagagccatctctgagttgggtcgcagtctcttctataagaagggtgcctggtcccaggagaccagacaggctccgcccctctcagatccatcagtgtgaaaagcctttcacagacacaaacccagacttgatggtggctcagaagagtagattttcttctctttccaactctggtgccccaccccaggttagagggtcgcctcaaacggtcctaggaggttgcagccttcactctctggtctcctcggaggtaccacgtgcgggcgtggctccctcctgcagcctc

SEQ ID NO: 41526 - DNA, 483 bp, Mus musculus
  source 1..483: mol_type = other DNA
tgacatttgcagaaaagtgcaaaataactgaatgtcttgtattttgacatgtaaatggaaacatttaatagtgtgtcttcactcatgaatcctctaatagagttacaattagctcagccagtggtcattgtattctttttttttttttccccctaagaaaaaacgtagagcaatgattcattctgtgacaaacagatttttaatcctttgcaaaataagtaaatcttagcttttggttatttttcgcgccagaagaaagctacacaaaaacagccgcgctgtgtggccctccagccgggcagcggtgccagcactcgcgacccagaggccgctgagaccgctccggaaccgagatgcgcgtgcagccgcgtgctaacccggcccttgagcggaagcccgcccttctcgtgctcgcgcggcgcgcggccaggagccccggggccgcgccgggaccgaggggcggagccggcggtccggagcggg

SEQ ID NO: 41527 - DNA, 430 bp, Mus musculus
  source 1..430: mol_type = other DNA
ccaatagagccatctctgagttgggtcgcagtctcttctataagaagggtgcctggtcccaggagaccagacaggctccgcccctctcagatccatcagtgtgaaaagcctttcacagacacaaacccagacttgatggtggctcagaagagtagattttcttctctttccaactctggtgccccaccccaggttagagggtcgcctcaaacggtcctaggaggttgcagccttcactctctggtctcctcggaggtaccacgtgcgggcgtggctccctcctgcagcctcagggacaccggagatggcccagtgccgcaggtaacagggtcggaggcggctacgcggggaccgtgtggggacgttcccgagatccccagcccgcgccccgcacggtcagtgtgaccagctgggggcgccccggctctcg

SEQ ID NO: 41528 - DNA, 427 bp, Mus musculus
  source 1..427: mol_type = other DNA
gtggttaaacagcagattctggtacttggtagctgcctgtgaccaggaatgtcccacattgtgaggaggacagacagtgaatgctctctgtctgtctgctgacttcctctgtgaccacaggaaaaagggggcatcctgggttcatgatggccatggtcggccatgaatcagaatcataaggctgagcctggaccttactcttacccgagtcccgactgggccaggccaccacctcactatgctgggagtggctgagcctgaggctcaggcttgtgcccaaccgtcggaagttttcacttcttgttttataatttaaaaaaaaaattgttccagcttcaagcttcaaatttccatgaagtcattggagctgggagcctggcctggcagctcccccactcctgtggctggcttgcagtctggaagggtg

SEQ ID NO: 41529 - DNA, 258 bp, Mus musculus
  source 1..258: mol_type = other DNA
ctggggggcagaatggggcacggctgcatccctttccctgccaggggagtcagggctagcattgtctgagctcagaacttcacgtgggtcccctgtccccacatgtgttgcacaggaaccctgtgcccactgggtgctggtattgcaatgtggcaatctgcacgcctgccctgcaagatgctgagcagtgctcagcctgtgaggaggtaccttacacccccgcagtaacaggctagggcagccctggggaagccaggt

SEQ ID NO: 41530 - DNA, 385 bp, Mus musculus
  source 1..385: mol_type = other DNA
actttagcatataaattgttttttaaaccacaaagaaaagcataagcagtacttttctgtatgcatttatttatttgtgcaagaatatatataaatgtaaacattagaggacaggcttggcaggacccatattcttgggtcccgcctctgagccgccgcagccccgccctccaccacaggctgcagcgccgcctccggccgccaggggccgccacgcgccgcagaccgcatcccgtccgctcggcggccgtgagggacctcgcgccgccgggcgcgtgccgtccccctgcctcgcggcgcgggctctcgcgggccccgctcccgccctccgctcgcctggcccggaccggaagcggcgccgcacggcctgggcctggcgcggggg

SEQ ID NO: 41531 - DNA, 357 bp, Mus musculus
  source 1..357: mol_type = other DNA
ctcaacctgagggccgggataggccagcacagccatgcatgcatgcaccaggtagacaaaattgtcagtgagccactgcccgcagcctgtgcctccctggggagccaatactttagcatataaattgttttttaaaccacaaagaaaagcataagcagtacttttctgtatgcatttatttatttgtgcaagaatatatataaatgtaaacattagaggacaggcttggcaggacccatattcttgggtcccgcctctgagccgccgcagccccgccctccaccacaggctgcagcgccgcctccggccgccaggggccgccacgcgccgcagaccgcatcccgtccgctcggcggc

SEQ ID NO: 41532 - DNA, 335 bp, Mus musculus
  source 1..335: mol_type = other DNA
tagtggaagcctttaccttggggtctgcagaactgcaagttgggcaccaggagcccacctgtacacttgttgttaacaggagtgggcctgaactccctctagccagcaaggtgtccagttgatttctactggactcgccaaagcctccgcccggtcccgactcaggccccgaggttcgcacggggggcttggggcccagcacacccaaagccccgccctctgtggtcccgcccatcggccagcccctacccgcaggccgtccgcctcgcctttgatgggccgctgccggccaatgggcgctcagggaggcgcggggccgcggcggcgggcagggg

SEQ ID NO: 41533 - DNA, 326 bp, Mus musculus
  source 1..326: mol_type = other DNA
cagtgttgtaagctatgaggtgacacccctgcccacactgccatcatagctaggataataactattaagatccctaacataatgagagttgactgtcataaggacagtcttcataaaggcatgtcacatgcggcaggacagccctcacagacactaccagtgtgctcttgcatgtaaactaaataaactttcgtgtgtgtgatgtcttctgtcattgccacagaaaaggactaaaaaatacgtatcaagctgcttaaagctgctagtgtctaggaggttcaatgtacatctgcccatttcctgttttcaaaaggagaactcaggat

SEQ ID NO: 41534 - DNA, 297 bp, Mus musculus
  source 1..297: mol_type = other DNA
gcctgtggtggcctccaggctcccaccttggaagtggtttatacacaatttcatgtctctcaaatgagagttcatgtacaagtctttttagaagtaacattaagaatgggagcccagcctaggagtctttcctcagcttgcatgggactgacaaccaaggggttctgggatctggttcccttgtgattgaaaccggtccccaggcaggcctgttccggacctgtctcaccagtccgggaaatcaggaggggtgtggccgcccttcccagcctgccagagtgggcggggtctctggct

SEQ ID NO: 41535 - DNA, 485 bp, Mus musculus
  source 1..485: mol_type = other DNA
cataattagtagttaatgattataaaaagagtttctttaaatattttgaacacttttgggagtcagaatccttccgtctaattgaaagatccttaggagactctctccacccttggagaggatggccacaggtgtcccagacgccatctgaggacttcagtttgtacagagtctactgttaggagatactatatagcatttcacaagtactaacacctccgtttacatgttgacaaactgagaaagaaaacattgactctaggtgtaattctaagctttgttctttcaatggaattctgaaaattattctcagttcttctctggcccctagttttgacagctagtggagctaagagcacagcgccccgcccaggcgtgacatgacacccgagcggaaagtcccttcagccagcctgccagcagccacagagcgcacgcagggtcggatcctccgctcctccctccccgcgggcagttcggaggcg

SEQ ID NO: 41536 - DNA, 718 bp, Mus musculus
  source 1..718: mol_type = other DNA
cgctcccaggcagggagaggatggggtggcgagaaaactgcccctccccccaaccgcacccccgcgagcccgggatcctgagagtggagaactctgggcgaaggatctccgagccaggcggcgggcaggcgggagggaggcccggcagcgagcgggaggcggactggcgtggggctggctcttccccactcgctccccgtcccgccacgggactccctccccctcgcgggccagtacgcagcgcgggagttaggaagttcgccgctcgcccgcagcctgggtccccagcccccgccgccccacgcggccctgctccgctaggctcccgggcgagcatgctaattcgggtcggcccagcccgggatggagggcggaacgagcggggggcgccggccggggcgctgggcgcgcagtggcgaggaggcaggcccccggcggccgggccgcggagtccccggcggtcgccaagagcaagagtcgggcggcgcggcgcgcagagccagccccgcggccggcttattgggccagcgcgcggacgagcgggtttgaatagcgctggcccggtgccaatcgccttactctatgattaatcgcaatgcattattgataatcataattatagcaggacacatgcgcgctgtgcccggggccggggagccggggagggggcgggcgggccggcgggcggggggagccgccgccgccgccgctcgatttc

SEQ ID NO: 41537 - DNA, 269 bp, Mus musculus
  source 1..269: mol_type = other DNA
atctccctggagcttcccgcggagcacaccccgagaagggcttgtaggtccactgggtttctggccactggattgcccggaggccaggactttcgtgcgcctggaagcttcggtgcaccctgaggggtgcacgttctttgccgagagatctctttaaatattcagtgagaaataatgttttatcaaaatctacagtactgtgaaggcgctccagaattggggcgtccttatgagccctctcctctcctgatcgcgagatagggcaagga

SEQ ID NO: 41538 - DNA, 308 bp, Mus musculus
  source 1..308: mol_type = other DNA
tccttcttggtcaggcctacaggttccggctcctggctcaggagccacctgcacagggggctgagtctataccggggatatccccagcgcgcggtggccggggctgcacggggcgcggggcggggcgcgagcccggaggcggtcggcggcggagcgcaccggcggggcgggcggcgcgccagctgcccgcggtgggaggggcggagcggcagcggcgcggggagcggcaggggaggggccgggccccttgtctccgcggctcctcggctcagtccgcccggggaggaggagcggggccagccgccgcc

SEQ ID NO: 41539 - DNA, 299 bp, Mus musculus
  source 1..299: mol_type = other DNA
ttatgtgatagctaatatacattttaagttattcttgaaaacacattcatgattatttgtgtgaagtgagatcaattcttagctcaatatacctttgcagtcagtaagcagcgtcctgctttaaccccgtgaactgtaaaggtccgtgtttatctcagcaacagagactagaaagggcaggcaaactattatctttagggcttatatactaaatcctccttctgaatggtctcactattgagagatgctttttaaaatcccagcaggccgtgctcagacctacgggtgcccgcatggga

SEQ ID NO: 41540 - DNA, 328 bp, Mus musculus
  source 1..328: mol_type = other DNA
ctctaccgagcccggaatagaaattcatggggcacttgtcaattttcatgatcctgaaatgtcaaagttaacgccactggccgctgcttatcaggaccagctggatcagccagtgattccgtgtcggtgacgccgtgtgggtacgccgacacaggtccccatggggtggtgcaggccctggttttgacatggatcagcagtggaatcacgtgaataaaagattttatgctagctgcagtaacgccattttgcaaggctccgatggtacccacctgggccccggctcaaggccaagaacagatgatacccacctgggccccggctcagg

SEQ ID NO: 41541 - DNA, 416 bp, Mus musculus
  source 1..416: mol_type = other DNA
ttcatggagataataaaaagagttttatttctcaatttaaaaagtaacagttgtttggttatcttaattgtgaactagtcacttgtgaagtggtcatttgcatgaccttagtttaaatgttttattataattttgtgaagaaaagtatttttctctgctaaaaactgcattggattaaaaaaaaatatgtcttagttcccagatgttttaaaaagaaagaaaagaaaaaaaaaccatactttcatgggtatttttaacctacttccgcagaaggagtcagtattaacgacatctctaatattctattgaggcaagagctcgtaggagggcttgcagcctttatcctagctaaatgtgttgataaatcaaaaaataggctattttccttgagcactgcctggggtggtgaaaaaggg

SEQ ID NO: 41542 - DNA, 428 bp, Mus musculus
  source 1..428: mol_type = other DNA
ctggctgtcctggaactctgtagaccaggctggcctagaactcgagtgctggggaattatttcttaagtacatcagtgttgccactgggcagaattatgcttttctccagagaaacggggctttatgtcgaagaaacatttacagaattctttctaacaagcctgataactttggatttattgtaaagggagctgcagacctccctctccagccagtggctcagagtccaggcctggataccggctgacgcttggcggagccaagagctagcagcaatcactgccggagactggctatagtggctgcccatggtgactgacacacgccacggcgctgttacgtaagggggaggtacgagcgcggccccacccgagcggaagcgcccagtctagggcgtgtccagggcgtgtcccgctgagggcagggc

SEQ ID NO: 41543 - DNA, 397 bp, Mus musculus
  source 1..397: mol_type = other DNA
tgcatttaatgtaggtgtctgatacaaaaaaaaaaacagaagctatgtaaagcgtatctgatgtgctgctcagcctcgacagggacatagatgtctatcttttcatttctgaccaagactaactgtatccagatctgcatccagagcaatatgaacgtgcgcgcgcacactcacaccacgtctgccgggtctgcgggtcccctgccgcctggagccatttgctctaataccgagactcccgagtactccttgggctccggagctgaacagtcagctagcagggctagcgtagtccgctacgcgacccgccgacggcccgcaccctacggagaactacatttcccagtgggtaacgggactcactgttttcccgtgctcctctgggcctgcagaggct

SEQ ID NO: 41544 - DNA, 247 bp, Mus musculus
  source 1..247: mol_type = other DNA
acaagcgggaagccccggaagcctgccttggtccagggtcctgtcccaacccggaactacagcttcgcgtggtctcggctctcccctccgagtgcgggcaggagggggcgggaagagactgagtccagtcccgccccgccccgcccggcgctctgtactcgcgggggagggccgcctcgcccagaaggctcccgggtgattggcgactccagggtcttcaactttaagccgccttagctcagggact

SEQ ID NO: 41545 - DNA, 423 bp, Mus musculus
  source 1..423: mol_type = other DNA
acattaacgctatcatttattgaatgaatgaatgaatgaatgaatgccaggcactgagtttaaacaaagtctctgccctgtaatggctttaacagaatctaaaaaggctagtttaaggccagcctaggatgcataggcacagcccaggtctatcctgggcttcgaacagactccaggctcagttgtgaggccgctcagctagctaccggttgctatagcgcccagggcgcgagcctctgcaggcccagaggagcacgggaaaacagtgagtcccgttacccactgggaaatgtagttctccgtagggtgcgggccgtcggcgggtcgcgtagcggactacgctagccctgctagctgactgttcagctccggagcccaaggagtactcgggagtctcggtattagagcaaatggctccaggcg

SEQ ID NO: 41546 - DNA, 367 bp, Mus musculus
  source 1..367: mol_type = other DNA
gtggctagacatgagaagcaggcatcgctacttgggatggcagagtctcctctctagcctctgtggaaggaagggctagcggggccccttctactcctggctcttgcccacctgctgcagttgctggcgcagaaaggcggtcatctcggcctcgctgtgccctgagcgccgggatctgaattccaggtctccagctcaacctagacctcacttcgctattcgcactggcgaggagggcgcagagcgttctcccgagcgcagcccgctgcttgtcatcctggggccggcgctcgcgagacgcgcctggcggccgggttggctgccgccggccagaggctcctgccagtcccccaggaggagcttcgcg

SEQ ID NO: 41547 - DNA, 343 bp, Mus musculus
  source 1..343: mol_type = other DNA
gactctgccatcccaagtagcgatgcctgcttctcatgtctagccacgcactgcaaacactgggcagtgaacagtgtccaacccaaccgctgtttgttcagcgaggcgctggcccggcaagcgctggtaaaccaggaccgccggcggcagtggagcgtaacaatacacaaagtttcctgtaatgattctcactagccagcaagcagtttgctcgggcggatcgcacagggacccgcaccgcggcgcgcattcacgcacgcgcgcagactgccccctcccgagaggttggaccccgcggactacattaatccgcttccctcggagttccagcgccagggggcgt

SEQ ID NO: 41548 - DNA, 276 bp, Mus musculus
  source 1..276: mol_type = other DNA
ctggcccctggggcaggataaccttacttttaagacagggggaatcttccaggaacatcgtccaagaagcttttctagaatgtcagttgtctttcctaagagagggaacatttctcaagttggagtgcactgtattgtgttctattgaggaccacaaaggttggactcctgtgcccaggagctcagcgctttaaataagagtcttcaggactcgcgtggggaggagaggggcgggtcggacctcacttccccaccctcccctctgctgcgccggcc

SEQ ID NO: 41549 - DNA, 358 bp, Mus musculus
  source 1..358: mol_type = other DNA
cttgaagctccttcttgcaagacacaggctattccaagagtctctaggctctgtgcattacacttactgtacagccctgtgaggtagcagttaccctctcactcctagaggaggcaactacctgatgcagcaggaagcattctccctgtcctccactgcctgctgggaggagaggtagccagggatgactggttcactgtctctccattcttcaactgcagctaggcagagtccctggcatctacagtagaagccagttgcttttgccttttctatacaaataattactgtgaaagacagatttatggggcggggccagagcccggggtgcgtcccggagggcggggcagctagtggc

SEQ ID NO: 41550 - DNA, 271 bp, Mus musculus
  source 1..271: mol_type = other DNA
attgtggttcacagagtttatttgacataaaaacaatggagtatttgagtaagaacttagagaatttaaagctttcttgtttctagttcactctctgctgtgagcttacatttaaatattatgaagtctgtttaaacatccctgctgagattagaaatcttccaaacttgagagcatcttttctaggaaacccatggcagctgagttcaaagtgcactgagtttttatttcaaacagaagtttggaggtcctaacaaacacccagggagct

SEQ ID NO: 41551 - DNA, 513 bp, Mus musculus
  source 1..513: mol_type = other DNA
gagattgtgagtcacccaatatgaataaagagaagcacatgctctaagaatataagtttggacctaaatctgtaacttctttataaagagaggacatttaaataagcttaccacctaattgttctgcaaagaatgaattctcctgcctgtgacatctatagagacatatgcatatagaatatttttttcctgtaagtgctaacctcaggcctcagaacttctcatggtccaagtttttcttaagaattggattctggaaaccttcctaaaggaatggaaatatctgtttcaatacccaagaattcttcaattctacccttaccataaatattccttggtaaaggagatgttgacttttatctcctgagaggaaaattcatgtcctgttttgggtgctaataaaaataagaaagcaatgccatagaaatgtatagttttccattctatttaaggtaacggaactctgcaacttcagttggaggtgaaacatctcggtacagaaattccacatgt

SEQ ID NO: 41552 - DNA, 500 bp, Mus musculus
  source 1..500: mol_type = other DNA
cgaattctgggaatgccaggtccccgcgagtccctgggagtccggctcccgccaccccggagcccatgggagctgcgcccccgcctctgccagagctccagaccgagcgggctgggcgcggggctaatgcaataggcgcgttacctggggcacaggctacattaccaggtcggcctcctcctggcgcggccagagccatccagcccgcgtcctgccggccaccccgtgcccgcagcgctcccagggccccgcctgagtgccacgcggcggagcccagccggggctggagcccgggatccccgtgctgtccgccacgtgagtgcgctctgcgcgcgggaccggtaagtgtgcggaccggctccgagtggctgcaccctctagagtgtcctcctagtgctgtcggagggcgccccccggagctgggagggcccttgagtcaactctggtccctcagggcccgcaggggctctttagcccgacccacagggcggcccgaggag

SEQ ID NO: 41553 - DNA, 407 bp, Mus musculus
  source 1..407: mol_type = other DNA
acacatgctgcatagatatataaaagaattcatagatagatgcatatgtggatgattagacaaaggattgtggttcacaaagtttatttgacttaaggacaatgttgtagaatttaaagtctctcatcatttctagttcactctctactgtgagcttacatttaagtattatgatcagctcttcgtgtttcatcacagcaagcagaagcaggttacctttagaaaacttccaaacttgagaccatctcttctagcatggcagctgggaagtgtgcaatgttcccagccgagcaacacgcatgcatctgcttgctggtacctgccttgagaagttcaaggtgcactgagcttttcagtcctaacaaataccttgggagctccacagcaaagaggctctctatttgagc

SEQ ID NO: 41554 - DNA, 305 bp, Mus musculus
  source 1..305: mol_type = other DNA
ataccacattttctctcatacatagttttagatattaatgtttatatttttgtatgtatattgtcatgaaaaaatctgctttaaagttcataataaaacccattactatggaaactaacttaaaaactattaaaacaaaaatacattgttcatttatataagaatgcctggcaaaaataaaatgatgaaatttaagattgttaccaaaataagttctaaaactctccagcaaagagaatctgggaggtgtgctaacctctctatgtcctgctgagagatatttatgtaagaagtttagagtccaa

SEQ ID NO: 41555 - DNA, 504 bp, Mus musculus
  source 1..504: mol_type = other DNA
cgtcaactatttttttccaaaatggatctgtcaaagagatttgatcttaaagaaattaaagatttctaaaatcaaacaaataacttagtaatgcatcctgagaacttaaaaataaattagggtcagcaattgcatagatgcactgacccatcagtgtgtacgtgtatgcatggatggttagaagcaaggattgttgcacattatgtccaaaggttctttctctggtaaacttccttgaacctaagtatgcaccgtgcccagccaggtcacttggcaggaatactacaaacttaatttaggaatcctctacctaactcgagagtatggattctaagacatgctccaggaaggctgtgaaatgtgtccgtcctcacatcccagctgagcagagcttccactacctgcaggcacctggctgctgctgtctgctcttgagaggtcgtaatctgagtactgggcactgactgttccccagagagctctttttaagcttagattacataa

SEQ ID NO: 41556 - DNA, 397 bp, Mus musculus
  source 1..397: mol_type = other DNA
agcttccttcaatagcaccttgtgaaagaccctattattataagaaagatctatacctaaagttcaaacttggggcccaagatagggccacttggcaagatgataatctaaacttctccaaggagggtagttgaagcttaaacatgtgccctgatctccctggtgaacagctgtggagctgtgaatttctctaaaaaatttcagcctgttataagaataaagcttttcactgcctggaggtattttctttgagatctcctggcactctgaagctagcatttgaaatgtaaatgaagaaaatatctaataaaaagtttttttttttaaaagaagctgttgatctgtcatctgagagtttcatactaattgtttatatataagacaggatgtgggcagg

SEQ ID NO: 41557 - DNA, 275 bp, Mus musculus
  source 1..275: mol_type = other DNA
taaatttaaggcatatttatgaaagtgccacaatactgcctacaaatgattttaaagaagatactgtagaccgtttagtctctcactgaagaaaactacattcacagatataaggaactctctgaccttagagtgatcaagagatgtattcagatcatggatcaaaatttatcattgtttactggagatgtcaaatcaaagcctgcctttgggaggccgacagagtttatggacctctgttatctgagagctgtccaatggagcgcccagagagc

SEQ ID NO: 41558 - DNA, 561 bp, Mus musculus
  source 1..561: mol_type = other DNA
tatgtaattcacatagatatttatagtgtacaattcagtgactttgagtgtattcatagttgtataacagcaacttagaaatcagcgtggtcacacagaatttagatatctgtgtgtggcttgattcagacatcgtcaacattctctgatattgtagcattatacggtttaccttttaggaacaggtattttccaagaaactaagcagcatttgacattcttacttgtagctaagaggatttctggttaaatcatgtcgcttctttaggacaccaaggaagcctctagtctagtggccaggggcaggggtcccgcaccctcaccctgccgcctgaccacgcaggcctgccgtcattgcctacgggccaggctcaccccagagcccggctcgggtgcgctcgtggcttcagtgggcccagggtcgccaaggatgctgcagggggccgggacgcggggccccaggccgggtcctgtgctctcggggttgcagagcgccggctgtgggcgggggacgaaggccgcgcccccgcgcccgtcccgcccgcgtcccgctaggggcgg

SEQ ID NO: 41559 - DNA, 660 bp, Mus musculus
  source 1..660: mol_type = other DNA
caaaaactcctgcggagcaggccttgcctctgagcaggttattatggagtgagcgggtttatcctgacccactacctcctcacggaccaggaagctggaggctcaggcccagggctggggaccacctgaccgccgcgctggggttgacaggaggcgggccgggcgcgcgagacccgccggggtggggcggggtggggcgcaggcgcgcgcccggccccaggccccgccctccccagcccggcacgctccgggagccgcggggggagggggacccgagagtgggcggcgccgcgcgcgcgcgcccgcttgtctgacgcgtcccgcgggcatgcgcgccgcccccgcccgcgccgtccccggggcccccggcgcgcggccctgctgacgtcagcgggcggctggcggagcgctgcgcaggaccaggcgcactcgagagctgcgctcgcctcgccccccccctccccgcccgccccggcgcgcgcgcgcgtgccctgccctccctgccgctccgccgagcgatgcgagttctgggccccggcgacgccgcctcccgctagagagagctgcaccccccacccccggcccggccctctgcccagccctgccccgcgcgcgggggtcggagaaggcgccgcggacgcatcgacggccgaggagcgg

SEQ ID NO: 41560 - DNA, 249 bp, Mus musculus
  source 1..249: mol_type = other DNA
atactgtatgttgtcccggaagggacaacccgcatccggcgtggggcatcaacggccgaggccgcgccgcccgaactggttgaccccccggggccagcccgtctgcgagcgattgggcggcaccacagaatgctgaacagctccgacgccggggacgtaagcgggggcccggggagacgtccgcggggcgggcagcggttatctgcgtcccgctcagcagcgcgaccatttgaccaattgctggcggcg

SEQ ID NO: 41561 - DNA, 260 bp, Mus musculus
  source 1..260: mol_type = other DNA
gaatgatcgttcctttttcaacaccagcgtgggttagacagtccagagagtgaccctcgcttgctagctcaaggaaacgtttatgaatgtctacaaacattagtttgtcaatcttgccaaattcagcgcccgggtcggaggtggctgcgatcctgtccggcagctccaggcctcagccacctgcttcctcggctgggccaggatccgccggccgcttcccgttcatcttctccgccgccagcaattggtcaaatggtcgc

SEQ ID NO: 41562 - DNA, 323 bp, Mus musculus
  source 1..323: mol_type = other DNA
atgtgtgtacacatattatctatgaaaggtaggtagctgccttaccaaagcctgggatagaagttggggctggttaaggagccccaccaagtcttctcttctctagaaggaaaggttcccagtccaggtgggcacattcccctgtgcagctggatgtgtgctgctatcatgagtgccacgggaacctcacctggcttccttaacactatggcagggaagcagctagccctttgtgaaagcctctgagcgtctcactgggccgtgtgcagggcgtctggccccagggagaggtggggtgagttgtagtccacacctagagggtg

SEQ ID NO: 41563 - DNA, 224 bp, Mus musculus
  source 1..224: mol_type = other DNA
tcagctcagatttggaatcggtggtgtgcacctttgatcccagcagctggcaggtggatacagaagggacttccttggcaaaacaatttgtataattccttggtaaaaaaccaaaggtgtcaggtaggatctgctttgctgctgctgctgctgctgctgctgctgctgctgagatgatcagcagcaggctcactgctcagcatcccgtttggaccaaactgatc

SEQ ID NO: 41564 - DNA, 291 bp, Mus musculus
  source 1..291: mol_type = other DNA
tcggtggtgtgcacctttgatcccagcagctggcaggtggatacagaagggacttccttggcaaaacaatttgtataattccttggtaaaaaaccaaaggtgtcaggtaggatctgctttgctgctgctgctgctgctgctgctgctgctgctgagatgatcagcagcaggctcactgctcagcatcccgtttggaccaaactgatccagtgcacacacacggagagcaggcgctgtgcgtgcataggggcgggcgccaagtcgctgcttgcgcgcccccgcctggggcta

SEQ ID NO: 41565 - DNA, 418 bp, Mus musculus
  source 1..418: mol_type = other DNA
aagggccctggtcaagtcttagcacaaggcttgtgtctatggtctctagtctcttgacaactggcgtgcgcggaaactgtgtccccgtggcgtgatctgggcggccagaggtctcgtcgctcagcatcgcctctgcacccggcccctcgggccccggggcaccgcaaagggcgcgcgcgggagcaagcaggtgtcctggaaccggttcccaccggatcgcagaccctttgcgctcagctcctttgctctcagtccctgagcccagagaaagggggtgtgagggcgtgtgcaggctctgtcccacgatcgggtcgtgcgcaggcccaggggcgtgtgctggccatatcccttgagccagaaaaagggcgtgtgcaggcggcgggggcgcgtgcatggtgccttccacccgggcggagct

SEQ ID NO: 41566 - DNA, 284 bp, Mus musculus
  source 1..284: mol_type = other DNA
agcttttgactacacaaggcctgttaagtaaaaaaaggacttagaatggtttagaagtgctcagtagttgaacatggttactttaagaatgtggaaatgaccatgtttttcataattaaacgtttttctaatccagctagctcccaaaatgatttactcagcaagctttaagcacaataactgagtagatattcctaaccttttatgctgtagccacaaggtgaaagctgcactgatctaggagattcttcaacattcatgtgtatttagtctacagccaaggc

SEQ ID NO: 41567 - DNA, 462 bp, Mus musculus
  source 1..462: mol_type = other DNA
tggttccagagacagggcaggatgccaggcttttgtgccccacagccatggattactagtaccccagggcaatgcccctgcaatggcttaggagcctttgcttcatgggaacaatgcaaggctgagtttgtcagtcaagaggtggctgcaggtctggcttgaggccactaatcacacggaaggcagacttcctttttttttatatgcatgtcctaagatgacatccattcaaactagtaaataaactgcagtgtaggtaggcaccttgcagcaggagctgcagaacctctgctaccctaggcttagaagggctactgcaggactcagggatgtggccctggctctagcccagccctcctgcttggcccctgtgtcaatgatcagataaatgggggcaggacagcagttgctatggctccgccccccaccctggcagagaccctgctcgccatgggcggtctg

SEQ ID NO: 41568 - DNA, 403 bp, Mus musculus
  source 1..403: mol_type = other DNA
agaatttgcatctctataggtataaaatggtggttctaccacaacagtgtagctgttctcttgcccaggacacaaggcctgcctgacagcaactctaatgttattaaaaaaaaaagaaagaaagaaatagctgactttattttttttatctaatgcagtccccacctaaaatgatctctctggagggagggtaccttggtttttaaaaccattgagatgagttctgttggctaaaataatcaaggctagtctttataaagactcggagctggtcgctgctcagatgatgttccacacgtcacatgggtcgtcggcggtcccgctgtgcacactggcgctccagggagctctgcactccgcccgaaaagtgcgctcggctctgccaaggacgcggggcgcgtga

SEQ ID NO: 41569 - DNA, 514 bp, Mus musculus
  source 1..514: mol_type = other DNA
tctgttgctcgagcctccagtttacgacactttcttatggttgtgtgacaaactcacataaccgttttgtttttcaaactcagaggaaacactggagcactgcctctggtcagatttcaggtatctgagaccactgctgtaaaagcagcagatgttgttagttcataaatgatgaacttagcatcgttaaatttgctgcaggcacattggaaactcagagcaacacaggcctgtaaggcttccctggatgccaggctgcgcagccaccagggcggacagacgtatgcccaggcgcctggggtcatcttgggagtcaggcaggccgccaggctcaggcaccggcagggcaccctgacatggccgccgaagacccgctcccgcgccgctgtcgggactcaggataaccacggcgggttgcatcagcccgccgcgcactgacctctgtctcagccaatggatggcagccacagagagcgctatctgcggagccctggcacggggcgcccataaaagg

SEQ ID NO: 41570 - DNA, 540 bp, Mus musculus
  source 1..540: mol_type = other DNA
cccttccctgtgctcagaggtggagggagctcagagctgcagcgtgagtctcccgtacaccagggcccagggctttggccatgcttattaagacctctggacagcccttaagaactggtgcctggggaggcctcaactattaaaaaatatataataataaaatggcaagtcctgggcgtctccccgaggattccgtgctgagccctgcgcgctttagggtgagagccgcgggcggcgccccgggggtctagcggaccaggagatcgcacccccgggtccccgcatcttgaactggagcgcaacgcggggagctcggcggtgcctgacgcccagagcggcgggcccggcgctgggtgcgaattcgcggcatcgctcggagtggcagcctgctgcatccaggtcctcgcgggccaccagccgggagcgggacaggctccggcttagcccggagagccgcccctccaggaagcgcccgcctcgcgcccgcttcccgcccacatcctccctcgactggagggaggagcccgcgccgcagccggg

SEQ ID NO: 41571 - DNA, 489 bp, Mus musculus
  source 1..489: mol_type = other DNA
tcccaggggaagtcggcttcccactgcaacgacgacgtgcgcccctcggccccttcggttccgaggagcccgaacgagggtctctccgcgtccggagcctccccaggaggtacctgcttcctcctcgggagggtgaccccaggacctccttcagtcaagatcccctaaaggggactcttccaggaaccgctttcaggcgcctccagcgcgggcctcggaggagagtgtgccggctgcccctgcccggagacggccacggccccagtccagtccggccacgtccccaaggggcttcccagagcagcgcggtcgggctgtggcactagctcctgggcccaccggagggaggggacagcctttgtgaccacggcactgccattacgcgcaggggcccacccccgcctaggaaacgccccttcctcagtgggcgggtcggcccgccagcccatacggtcttggagcaccggatttccacgaggcgctcgggga

SEQ ID NO: 41572 - DNA, 416 bp, Mus musculus
  source 1..416: mol_type = other DNA
tgtgttctaataaaataagcacacagccttgtttcctactagaagagaaaggagctgctccgaatggaaccgaggcagcagctcactttaggcctgatggctccagctaaccgccgtcccgcagactcccgcggctccgctccggagtgggcaccgcaaactcccaagccggacaaacctgggctctaatcctaactctggcttggagtcctctccacggccgagaagcctggtttcgcctcccggcgcggacccaggccgcactcacctacgagagcgcgggaggcgagccgccctcacctccgcggcgcctaccgtaaaccgtcgcctccccgagcgcctcgtggaaatccggtgctccaagaccgtatgggctggcgggccgacccgcccactgaggaaggggcgtttcctag

SEQ ID NO: 41573 - DNA, 593 bp, Mus musculus
  source 1..593: mol_type = other DNA
aatttgccaaatgtatttctgtagagataagaactacatacatgttttttaaacattgattagaactcctatggcttataaggctatggtttagcaatcaactttataatgtaatgactgatagtctggtgacctgaattcagtgcccaggacccacatgattaggagagaattgacttctgaacattttcctatggcctcctactgaacaatctttttttttttaatctaaaaggaaatgttgttgttagttctgttatccaaagatatctttacattggggacctataaggatttcactgtaatctgaatgccattgaaaccacactagcaatttgagtgattgagtagtcaattcccagtgccttctccagcattcagttgttaaaaatgaatagaatgcaagttcagttccacattatgaaaacagtactcggaaaattgaaaactatctagatgattgtttggtcagggtctgctgctgactcttgaggagcacatagcccactacaggtgccactgcatctgctgagaacagtacagtccctactgctgatagtaggagccactcgggaccctgtccggcctccaag

SEQ ID NO: 41574 - DNA, 414 bp, Mus musculus
  source 1..414: mol_type = other DNA
ctgtcaggatactctgatcttccactttgaaatcatatagatccatggatacacattttatgtccattccaaaatgattcagattggcaattcataccataaattttctagttatgtactacacatttggctaaaaggtaaaccacttactgcctaataattgtttacgggtttggtgcgagtaagctggcagcaaactcatgatttgaagatcacaaattaagttacaagtcatccacttaaggctatttctagcgctcttaaaacacggtttcaactacctgatctttacaattcctaaattgaaaatgaagaaaccgaggctcttggctccaattctttcatccagaaaaaaaaaaaaaaagtctactgccaccattttttgcagtcttaaccgcgggtaaccataggaca

SEQ ID NO: 41575 - DNA, 628 bp, Mus musculus
  source 1..628: mol_type = other DNA
cctaataattgtttacgggtttggtgcgagtaagctggcagcaaactcatgatttgaagatcacaaattaagttacaagtcatccacttaaggctatttctagcgctcttaaaacacggtttcaactacctgatctttacaattcctaaattgaaaatgaagaaaccgaggctcttggctccaattctttcatccagaaaaaaaaaaaaaaagtctactgccaccattttttgcagtcttaaccgcgggtaaccataggacagaggcggggctgcgagctccgtctgccctaacacaccggcggggtagccccgcgagaggccggcgggcgctgggcccagccaggagccgcagccccgtcctcgcgcgatcgccgggcggggcgtgggtgcggcggccgcgcgggtcagagaggatcccggcccggcggcgggcgcggtaggaagcggcagggccccgggcccgggccggtgactgcggcgcccctactcgcgctgtccttgtaagtgaagcggccagggtctgctcgacctcggcctgcggacgtcctctgggttgcgggctggccggtcgaggctccgctctagcggggcgtttttcccgtggccaccacgggcatatgtcacag

SEQ ID NO: 41576 - DNA, 212 bp, Mus musculus
  source 1..212: mol_type = other DNA
agcttgtgataagttgtcacacccactgggggtcagtgtcaccaccacttctgacggctctaggcaagccctgtagagaattttctcagggcccagtccattgtgagcggtgccatccctgggtcctgggtgtaatagagagattcagtcacagcagcagtaggggcggggcctcgggcggagcggggctgggcttcgcgggtacccaagca

SEQ ID NO: 41577 - DNA, 366 bp, Mus musculus
  source 1..366: mol_type = other DNA
gtaggtaggcttaccaggccatagatctctttggaggccctagtcaggagcctgggtttcatcctcgagagggccacgtggagctttgagtttgcacactcactctggtacaggctctgggcatgcgcaggagcagcccgctctgagctgggtgaggctgtaggttatggggccaagagcctgccccaaaggactctgggcctccacccgatgcccggcttggtgccagtggccactgaggtgggcagtgaacccttgcccagcttccatgacccctagtgatatggctgaggtgttgggagagtggcagtcccctcccgctgggggaagtgggactcttctttcagggagagcgtttaaatatca

SEQ ID NO: 41578 - DNA, 508 bp, Mus musculus
  source 1..508: mol_type = other DNA
attcactcccagcccgaggctggggaggctctgacttttcagactcccaggattgtactccctgtcttccgggaagtcaggttgtgtgcagtacccaagctgagaaagcttctggaagatccgagccagaagctgggttagccagactctacagtggcagagctaccctaggacctctctaaggctctgcattagggtccaagaggagccaagagacccttagctccgaagacaagttcgtggctgtgctgtttcgggagctagcagaaggcacagccagccctggacagatcgagcttggcagatccggcctggcggggaccagcgctctgcatgtccctggctcagtagggaaggtaaccctgctaacccaccaggttcccatcgcgccgctcccgcagcggagcccagcgcaggattgcaactggttccctggcaacctgggaggaatccagcctctcccctcccaccgcctcctactgcgggcgccgggggcggaggctgccag

SEQ ID NO: 41579 - DNA, 178 bp, Mus musculus
  source 1..178: mol_type = other DNA
ccccagtagctgggatgttgttaacagtctgggtatgctgaaaattcacacagatttcttaacagtcttctagggcagcccaggctcagcttcagctgaacctctgggttcccccccagagccctgaggaaccatgttccctttgaaaagagaagaaattctttgaatttctctagtc

SEQ ID NO: 41580 - DNA, 528 bp, Mus musculus
  source 1..528: mol_type = other DNA
tttgttaaacatatttcgtctggtcactgtgtcagtgcagaaagattctatatacggacagcgatttttgcttttccacttaatgacaatgtacaaagtttctaaaagtaaatgtctactattactgtgatgtcaccagcttagtgacgctgtggctgtcggtttctccagcgaggctggcacagcgcctacggcgacggagaacgctttggaacggacgagctctgtgaccttgggcacaccgaacctctggggaaccggggtgacaggactgccccgcggcttttgcccttaagtggtccagcccggctcggctggctgtcacctcaccgggcaggcaccgcagctgcaggagcctccagcccaagcggccgaggacaccagacacggctgctgtcgccgccatcttggaagtgggcacgcacgcacgctgagggcggcgacgcgccgggcagcgtcacgcgtcagtggggccgcgtccgctcactgtgcggcgtcttctcgcgagagaccaggacgagaagccgg

SEQ ID NO: 41581 - DNA, 318 bp, Mus musculus
  source 1..318: mol_type = other DNA
ctgtcccagagttggctatctctgcagaagtcagagtgttcagtgggaacctcctatttcttgaagctagaaacttggtagcatttaattaaaacataggtttggattctaatcccagtttttgttttacatcacataatgtgtgtacagtgtctgctgacacagttctacctaatatcagactgttctgagggtcagtggttactacagattcagtcgagttgaatttttataagtaatgaaaaagaagtgtttggtttgcaaattaaagccaattttaaaaagagctcacaccgagcttcctccctagagggaggt

SEQ ID NO: 41582 - DNA, 376 bp, Mus musculus
  source 1..376: mol_type = other DNA
cctgaactttccagcccagaggctgggctgccttcttaaggccagtgaactcacctgaatatattctaatagttcatgtatagatgtacaactttttatttcattgtattcctatgtattttaaaaattatttttatgtataaggatgttttgcatatttgtgcaccatgtgaatacctggtgccctcagcctcagaaactgaagcttatcttacataagaacagccctaatgcgttatttttagcagttataaataacggttagaaaacacaggccaggagagttccggcctccggtcagcaggtggcgctgcgcccgcgactagccggaagcgccgattgccccgccgacaaactgctggtggccgcgcaggcg

SEQ ID NO: 41583 - DNA, 497 bp, Mus musculus
  source 1..497: mol_type = other DNA
acatgcatacacatacatatatatacatacacatatatgtgtacatacatataagtatatatgtatgtgtgtgtatatatatttcaaaagcttcaggccaactagaacatgcgtatgcacctatacatacatctagtgatcgctaggggcctgggtggctccttctataaacaagcatcctaggacaccaagtgccctggaggagactcaagggctccgggtttccacgcggaaaaaggcggcggacgagccccggcgtccagcacgccgcgtgcagggccccggccgccgcggcccctcaccccggcttccgcccctaggagggccgttaagcccgctcagatgctcgagcgaccccgagcgtcctcaccttcctcgtagcctgaaaacccgctccgcggacgccggcttctcgtcctggtctctcgcgagaagacgccgcacagtgagcggacgcggccccactgacgcgtgacgctgcccggcgcgtcgccgcc

SEQ ID NO: 41584 - DNA, 270 bp, Mus musculus
  source 1..270: mol_type = other DNA
agacaagtactactaggccaggctaagaggccctgagaagaagaaagccatttcctacagaaaatggctcattaggctaatctctcacagagtgcagcagcgcggaaatttctgtcctagtaataagactttggcaggactccgggacgaggcgtggctccgagaaggggcgtggcacgatgccgggcgtggcggtggggcgtggcgcggcgccagggcggcgcggggcgtggcctcaaggggcgtggcgtcgcggatcagcagaaccag

SEQ ID NO: 41585 - DNA, 260 bp, Mus musculus
  source 1..260: mol_type = other DNA
ccagtgggtgtacaggggccctgcaaaacctttgatggcatctggggtggggccccccccactaccgcaggagcagaagaggttcgagaaggcgatgacacttgcaggtctgattgctgttatacatgaggaaatatatatatattaaaaatataaattttccctttctataaatggggaaactgagacttaggcccaagggtgcagagctggaccgtcctgaacccctggggaggctgagcccagtctccccccctcca

SEQ ID NO: 41586 - DNA, 406 bp, Mus musculus
  source 1..406: mol_type = other DNA
ctgtgaggcagacatctgcctgcctctgtctctgcctccctaatgcattagtattttggtaaaacaaaacgaattaaaacactcttaaccaagaagtatgtgattcgtttatcttctgtcggcaagacagataccatcttgaccttcttctggctttgtacaaaaaaggcccagtgaggacatggactctggcccaagtccagtcggtgtcagcgctagcactggaagttcctggatcacctagagccgaggacgcggatcctgcctgggcgaccccatgcttgggcgggccaggggggtccggctgcctggccccaacccgcagcaaaccgcgccccacgaggggcccccgcccgctccccttcccctcccctggcaggaggaggagacttggcggccctccccc

SEQ ID NO: 41587 - DNA, 296 bp, Mus musculus
  source 1..296: mol_type = other DNA
aggggactgacaaccccatgggcctggcccacaacagtgttgagctaggtgtgtgcatcaggactcacacacataccaagatacctggggcagctgccacctgtatccagcctgtggctggtgtgaatggcgctgcagacaggatgcaggtgtgtgtgggcgtggcggcctgcctcccacagcctgaaaagggtctctgaagcccagagacagcgtgatcccggcctccccccaaagtccatggagtctgaagactctgtcaagcctcgctaggaaacctaggagttttagagttc

SEQ ID NO: 41588 - DNA, 270 bp, Mus musculus
  source 1..270: mol_type = other DNA
tggatagatttcatatttattgctcattaaatttatgatctgtatcccctgcacagtgcctggatcacagcaatccaggggactgacaaccccatgggcctggcccacaacagtgttgagctaggtgtgtgcatcaggactcacacacataccaagatacctggggcagctgccacctgtatccagcctgtggctggtgtgaatggcgctgcagacaggatgcaggtgtgtgtgggcgtggcggcctgcctcccacagcctgaaaagggt

SEQ ID NO: 41589 - DNA, 288 bp, Mus musculus
  source 1..288: mol_type = other DNA
ctgtcacttcacagaactgataactagtacatactagtgctggttaactaagtacctcggccacggatattatggctacagggcccgggagaggctcaaggcctgaatccagacactgacaatcagcctgtgtatgctctgcacatgatagtaatcacttctgtgaagtgacagtcatcactgctggtccaggcaggagtctcagacacccttgctggctgctgggctcctactccagcatccactcatacagtggtggtctcaggagcatttgagatccagagctcc

SEQ ID NO: 41590 - DNA, 424 bp, Mus musculus
  source 1..424: mol_type = other DNA
ctcacacagtctggagggccattcaaattgctccctgagcctcagtttgacagactcaaaaaaaggctcccatggcctccagccaggcggcctgacatgccagtcagcaccggctctgcctgctgccacagagcctaggggcagcagcagctgagtagcctgttgccatggcaaactggttgctttgaaagaactgagccccggcggggtatgtgaggagacacactcatcccagctcatacccatttttgaaactggcaccagggtctgggatgatgagaggagagacccaggtccccacttgccaggcctgagtcacgggcatcccttagggtccccctccctctgagaaagccatgactcacagttagccagtcatctcatctctagcctgaagggaggagctgagcaggagggtgtcccg

SEQ ID NO: 41591 - DNA, 321 bp, Mus musculus
  source 1..321: mol_type = other DNA
aagaagcacaccaccagaagggttttttggtgcgtttctctctatagagtctccttcatcttcagtgtaagtacttcatgcagtggtttcatatattcgaatgtttggtggtcccccattggtggaatggtgcctgtagattgggatgtaaattttcagcttatgctccggcaccataccagccagtctgctgccatgcttgctgacatgatgatcatggtttaatcatttaataatgctgcatttgacaactggttcacaataattgctaaaagcttggtgactctaccatccagcacactatggtggtggtggtggtgg

SEQ ID NO: 41592 - DNA, 336 bp, Mus musculus
  source 1..336: mol_type = other DNA
tcagtagttctgaaccttcctaatgctgagttcctgatgttgtgatgagccagcccctcaaccacaaaaaatattttcattgctgcttcataactgtaattttgctgctgttcttcaaaggagttgctacgcatacgttgagaacctcttcaatagctgactcaacatgttgaagcatctacccctcccctcctgagctcacagcctcaggtcaggggtgtgtgcatcctgccttctggcattcgggaagcagagcctcctgacagcaggctctacctgccctagcccaggtgcagctggtcctcaggagccaacgaggagctggcaggctctcgc

SEQ ID NO: 41593 - DNA, 267 bp, Mus musculus
  source 1..267: mol_type = other DNA
cttacttccgcacgcaggcgagggctcgacatcgaccccactgtaactaagctctgtttccctcgaggtcagcccactacgcgggcgacactcacagtctgagggcggggtccttcaatatggaaataacactaacgtttattggtcaatccagagctgttgctgaagtgattggcgcagccgccatcgggtgcagctcgcggattttttaaacacaaccgggttccaggcctagcttaatcggcggaagcgcttgcttccattggt

SEQ ID NO: 41594 - DNA, 454 bp, Mus musculus
  source 1..454: mol_type = other DNA
aggaggcagcaaggccctccctaggtctctcctaggccatttctggcaagcctgaaggggtagaccctcaccctcctcaggttatctggggaccatcagcctctgcgggacaggctcctgtggcacattctccttccgcactccggagtgggcatgtttgggagacaaagaacagagtggctcctttgggtcagcattcagtggctcctagacgccccaggaaggagcgaatgcgttaccttcctgctgctcaagaaaatatttattggttgggggggcaaggcaggatgccaggctgggtgtgctcgatctcgcgtgcaagagttaagcaggcaaggtgcgcctgggctcgtgcaccagtgggtgtgcgcacaaggcgcctggggtgggcgcgtgcgcgagagtgcgcgtgcccccctcccgagcccgttaccatgggaacgcgccgcggcct

SEQ ID NO: 41595 - DNA, 407 bp, Mus musculus
  source 1..407: mol_type = other DNA
gcaaactcatcatgataattagacggcgcttgcagctcgctaaccaagccttgtgtccacacctgtctctgagagtgagggagatggaaaaggttgttaagcccttaccaaggcataattatcagccggacggacgctggtcggctcaccacccaactgttcatcagccagaaactgagctccttgtgttccaactttacaagtttaaaaataaaatactttggttgtcccaggtcacatgttctgcttctctggaaatgtagattaatacagattttggctaaaggtcttgtccctttaagctgagagcaggtgggttcctgtcaccttgaggaggctcccagaagcacactctgtgggaagacagatcctggcttggagcaggaagggccctatgtctaggacac

SEQ ID NO: 41596 - DNA, 358 bp, Mus musculus
  source 1..358: mol_type = other DNA
ccctgagactcatggggacaaggtcccctccaggctcccaggcagccctgctgcagagcctggggtctttgcctaaagtagctagtacagggtcactgttctggtgatgaaacatcatgaccaaacttccatggtatcgtccacaatgggctgggccctcccccactaattaagaaagccccctgcaggcttgcctatgactaattttatggaggcatttccaacacagtgaaacaggctggggtgaacccagcagttatccctaccgtcttatgtggctgccatagagacccagggaatagatgtccagtgcctagggatcctggcagcctgtgttgcccagggttaccaggagctt

SEQ ID NO: 41597 - DNA, 516 bp, Mus musculus
  source 1..516: mol_type = other DNA
aagatttaagcctcttggcgcatgagatttagacgaacgaaaagcttttattgcataggaaccctcttggttccccgggaggctcgggtcccacgagagagaaaacggtttgctccgccccgcggcgacagcctccgcctctgaaccgctgctgctgtagcccaccaggggcgccgagctcatggggccgcccggagttcctctgagccggaagtgctctgtggggggcgggacctagagtagctccacctcggggcggggcctggcgacccggggggcgaagcccagtggagacggacggcggccaccgcctgtgcggtaaaggctgtaggaggcggccttcacccccagtgtgggttccacaggtctgcgggtctgtttgccagacttgcaaaactcttgagagcgagctgagccgcaggtcagctgcagaagaccggagagtcaggtggggctgcggcgagccggggatgaggatcccggctcctccgcgaccgtaggctccggcgagcggat

SEQ ID NO: 41598 - DNA, 812 bp, Mus musculus
  source 1..812: mol_type = other DNA
tccggatggcccagccactgcgtcccgaaaagggggtggaacggtgcccgggaagcaactgtacttccaggcccagcctggatcgcctcggagctcaggaggctctccctgggtgcaggggctactggagtggcccccagatgcagtcccgggtgccctgccactcacctgctccaggggtcaggcgcgggacaagcgaagcgccgcggcgcggcctacgcgtcctgccaatccccgggcctcgcgtagcagaggcaggcagcgcggaccggaaccgacgaatcgacccgcgcactcgggttagcgggaccggggcagcggacggacgggcgagcggacagaccgacgggtcttgcagagaccggcggacagagggtcggcggggccgggggaggagcggcagccggggcggcggctgccgagaagcccgcggcgcggagcgaggccgccccctgtcggggacccgcggccccgctggcccgagcctgtgggtacggaggggcggggctggagcctcgggatccgctcgccggagcctacggtcgcggaggagccgggatcctcatccccggctcgccgcagccccacctgactctccggtcttctgcagctgacctgcggctcagctcgctctcaagagttttgcaagtctggcaaacagacccgcagacctgtggaacccacactgggggtgaaggccgcctcctacagcctttaccgcacaggcggtggccgccgtccgtctccactgggcttcgccccccgggtcgccaggccccgccccgaggtggagctactctaggtcccgcccc

SEQ ID NO: 41599 - DNA, 277 bp, Mus musculus
  source 1..277: mol_type = other DNA
tgtagcacggagacgttgagtcattggttcaaatctgcagaagactgttcagatatttacattcttgggctctggtttaagcaagtggcccaaaggatggctcagtgggctctcagggtggcctgcagttgggcaggcagccggccacattgcttggagggtggcgagctcgctgagggggcgggcgccggccatagtccccccgcactgtagggggcgctgtgggccggggcgggccggggctgggcggcggccgctcctggcgagtgcggcccct

SEQ ID NO: 41600 - DNA, 588 bp, Mus musculus
  source 1..588: mol_type = other DNA
cacatagtaaatgtgtaaactttgcaactatgatcgttaaaattgctaaagtgtgcgccagaacacaggcgctcagcgactggtggaagtcttccacactttctacttgaaatacacagcgtatgtctttcctacaatattccagaaattgacacactttttttaaaaaaatcagctgtactattccacttttaagattttattaatttttgtttatatcttaaaatcaatgcatttaaagagatacggtattgcttttacagcagctcattcactgtaacttgataattaaaggtgatacgttctcctgggccaaccaatatttgtggagctcgatatgtagacctcaaattcagagatctttctgatttaatccggtactaggattatcccgcccttcgggggaggggtctggcatgactccacccctccacgcgccaacacgtgaggtaaacttaaagtctcctctgggccccggcggggaggggcggggaatagtcccttggcaaccaagttccgcgcccgagggggcaggaagggtgcgcctccgaggggcgggcccaagcgtgcggagggatccgtggcggg

SEQ ID NO: 41601 - DNA, 337 bp, Mus musculus
  source 1..337: mol_type = other DNA
ttaaggacactagggctgacctggggcgggagttgctcttatagggagtaaggatgcagactcacacgccttgtaagcgtgcgctctaggttgcattgcactagaggcgccccagaggcgccctaatccagacttctccactggggaaatttactaaacggtggcacaggttctatcggttcccaagtaggtcctgacaatttaaaagcttaaagcagtacttcaggtcctggggtcatggtcgtagggtcacccacctgccgggtcaccgcaggcggcacctgctactgagaagcctcgggttaggtcccgcccccagcctccgcctggcgaaccg

SEQ ID NO: 41602 - DNA, 375 bp, Mus musculus
  source 1..375: mol_type = other DNA
tatctcattaaagggcccaaaagtgtctgaatgtacttacatataataaataaataaataaataaataaaacttttttaaaaaagggcaggaacttgtcttgatacctattttaaaaacttagtcagatggctcagactgctcttccgaaggtcaggagttcaaatcctagcaaccacatggtgtggagtgtctgaagacgctacagtgtacttacatataataaataaataaataaataaataaaatcttaaaaaaaaactagtcagtttctctttctcttcgagtaatgcagttcgagttgcagtaaatgaaatgcagtaaatgaaaaaacggtccatgcaaagatttgcgtgaaataagcttaatctcagaa

SEQ ID NO: 41603 - DNA, 112 bp, Mus musculus
  source 1..112: mol_type = other DNA
tctctgcttctaccccagataaaaacatcgccaggtgggaagcagttgtgcggaaccaaggctgctggagagcagatccaacctggccacatggtttcttagagtctggtgg

SEQ ID NO: 41604 - DNA, 520 bp, Mus musculus
  source 1..520: mol_type = other DNA
tggactccatacgctcgggggggggaatgcaagcttgccagcttctctccttccctcctataggagtgtgaggttagggagggccccgcccgcctgctccttagccctgggcatccctataggtagggtgggcaatgcccaaggaggccagtagcctgccttcaaggacagtaagtgacttgggtcctccagatcctggggcaagggccctcccaagatcttggtacttccaagggaatgtgccggggcaggtctgcacacccggtctagccctgcatcggtatacatcggtatatgtatacatcggtatacatatcggtgagaggggcgcctctgtgtgcattagctgttgctccccggaagccacatacagctgtggtgccagggtgctaagcacccttgagcggcagaagctggggaccctcaggatgctgggagccaggtttgtctcctaacagccgcgagggctccgggtgagcaagtggctgcgcagaccagcctgggcagggccaggatctgt

SEQ ID NO: 41605 - DNA, 525 bp, Mus musculus
  source 1..525: mol_type = other DNA
aagtgactattgcttagcatatgtaaagttctagtccatattctattgcttaaatgtagtgaattatgtaaatacattaacaaattatttcattcaaaacatgaaaggcatgctcgccccctttcctgtcctcaggaatgccctcctacagtaggtaaattcggtagcaaaaagcaaccaagcaaccgtggtctttcctttgttctgtgatcgcaaagactaggaaactggtctagtttcctctttcagaaggccctgaacttcagatctactacaaataatttgtaacttagcacacagttaaacatttggactagttttagtttcttctgttgttttcaaagacaataattaacctgtaaaatgatattacttgaatccccaaagatgtttttaaattctatgtgtgtatttaaaggctgcatgaacatctgcaggaggacttccggccgactcatccagccgcattgggcggggacactggacccggccgcaggctcgccgaaatcgactgctcgggtctgg

SEQ ID NO: 41606 - DNA, 319 bp, Mus musculus
  source 1..319: mol_type = other DNA
ctcaactgtttaggctgcctggctgccccaggtagcccaggctgtgaatacttaattttttttttcctcttagggtgataagagattgaaccaggtttatacatgatggtgagatataattttaccagtcctgatactaactctatctggcttgccagaaacgtaaacggactaatcaatcagtcagtgaaatgatggttaatcactaacgaggaagaaactgttttgtccctgcacgccgctctccgggacacggccagaactagggtggaggccggtgcgcacgcgcacgcgcgattcctaaaccggagcggtcgcc

SEQ ID NO: 41607 - DNA, 270 bp, Mus musculus
  source 1..270: mol_type = other DNA
acttttccaaagatggtacacccactcaattattggctgatggttccccccctctccattgtaatcacaagggaccctcaagtactgttactcggttttgtaaattccaattttcttgaaaagcacttcttttcaaagagcacaggtgggtgagctccctcccggacctggagccttaggcttaacctaagatgctcactggtgggcatctgggggcgttgggacaggcagaaccaacactaccaacagaaagtgcgagcgccggggcgc

SEQ ID NO: 41608 - DNA, 299 bp, Mus musculus
  source 1..299: mol_type = other DNA
gtttcaagccttttatccaagaagcaaaaggcattggcagactacattctccagcatgcattgctgctctaggcgttcaatgcaaggcttatgtcttcgagtgtgcgcaggcgcccagactcggacccagtcccagggctgatgagcggcaattggcctgagccccgcaaactaggagtctggattggtggttgctagcaggagcctggtttccccatcggcgattggaccgccgttgcggtcagcgcgcggccattggctgggcgctagggccatccctccgccaaagacgtgagcgc

SEQ ID NO: 41609 - DNA, 391 bp, Mus musculus
  source 1..391: mol_type = other DNA
cgggagagctggccaggccacctccccctccccccaacctcccaccacctgcaggagctgggagagccggccctggggcttgagagcaggagagctagccccaaccccttctatgacagtagcactagagagagtaggtcctggagccagcccctcacaggctgtagcagtacccagcctccagcagaggaagagtcagcctcagctactactcgagaaagggccagttctgctgatccaaagctgcaggttagggtttctctgtgtagccctggctgtcctggaactcactctgtagaccaggctggtctcgaactcagagatgtgcaccaccacgcccggctgaagccagagatcttgaaccgatgtactgtgggacacactacagctt

SEQ ID NO: 41610 - DNA, 212 bp, Mus musculus
  source 1..212: mol_type = other DNA
tggactccccgtgcatactgtgaatgcacagagaacgctgtatacataataaataaataaatcttttaaaagaataataattaaactagactgtgaatataattgaacaagttctagaaacttcctttataaacggtgaggccaaatagctttggcccgtggctcctgaggacaaagagtgtttaatttggccaagggaccaagtcatgtga

SEQ ID NO: 41611 - DNA, 398 bp, Mus musculus
  source 1..398: mol_type = other DNA
ttcgagacagggtttctctgtgtagaccaggctggcctctgggcctggtttgcagcacatgctgtggcccccaattagactggcaatctatacagatttctgcaaggcatccctgggaaataatggcccatgttcagagtgaattcggtcaacttgtggacttgtctaagcttattcatttcttccaaacataattatgaagacttgatgtgcggcataatctgctaataacagggaaaaaaaaaaaatacttcctcgggtcagtttacatttttttcctacgctaggcagctgcctctagcgtagcggatgataactggaagcagagcgctgagcactgtggactgcgcatcctcccgcaaggggccgctgcgacatgtcgctccaggcgcagggcc

SEQ ID NO: 41612 - DNA, 306 bp, Mus musculus
  source 1..306: mol_type = other DNA
gacctgggtctatgggtctgtggccccggattttgatttgttttgtttaaaaaaaaaacaaaacaactgagtggacagtactctccccctgaggggggagggagggcagcatgtcagagccactctgacacagctttcccacccccatgaaaccagtagttttatcaggcagtggtcttttccttatgcaatgagagagcttggcggcgcggcgggctgcgcgcaaagcttggcttcacccggtgactccggcggcggaggcgcgctgggcgtgctcgtgagcgaccagcgactgccctgagctct

SEQ ID NO: 41613 - DNA, 393 bp, Mus musculus
  source 1..393: mol_type = other DNA
ctgcctcctctgggcaggaggcgagcaccgcaccgaccccgcagtgaaggcgcaccgctgcagcagcgcctgcctgcgtctcccagtttgcaaaacaggattctagctcctccatcccccgcgtgggaattcctaaaggaagcaatcccctcggctcttccccgcccggaggcgtacgcggataggggacttactcaggtcgggctccccgcgcgcagggtaatctcctccgggtcgcgttcatgcctctcagagctgtggagcctggtgcggggatgcgaagccggcgcgctgggctctgcgtccacagcctaaaagtacagctccggattccaaatccaccccgagcgctccggcttgcgagcccgcctgcctgccaagagctcagggcag

SEQ ID NO: 41614 - DNA, 265 bp, Mus musculus
  source 1..265: mol_type = other DNA
tgtaaagtggacaggaagtgaaactgttgctagagactctgtcctgcattgaggaaaaactctattcttcctaattccggattgcctcccctacttgggccatcctccggcgggccggttgaggccctagcttgtccagctggagactgtgtctgagcccccacaggagacggagcgctgcgacccagggcaggaggggcggccaggccacctattcctgggtttggcatctctcggggccccagggggggaggagcgccgacag

SEQ ID NO: 41615 - DNA, 356 bp, Mus musculus
  source 1..356: mol_type = other DNA
cagggtttctctgtatagccctggctatcctggaacacactctgtagaccaggctggcctcggccaggcaagaatctgacaggcaaaatctgctgctgaaagtgattgtctgtcacgagagtcgccacggaaagccggctctgtggagaagctgggttactctgtccagcgaggaaacaagtacccctgcctcccagggatggctgaatgctctggcagaagcttagagcccccacagggtccaaggcttccacgggcccaggctgaccaagctgaggccgcccaccgtagggcttgcctatctggaagtgggccagggccagttggaaaacctgcctccctcccagcctgggtgt

SEQ ID NO: 41616 - DNA, 314 bp, Mus musculus
  source 1..314: mol_type = other DNA
gcagcttcaacatgttcaacatcaataaagtaagggcttggagagggttggcaacaactcaatttatggattccctggtcccctgcagtctcactaagatgtatcagccctgagggactctccctgatgagtaaatgtttatttgctgcggcatgccaggaaggagctggagcccaggtccctcccctgagccagggccagcagcagcctgtgtcccttctgctgcccgccctgccccgcccgcccgcctgcccgctgcccgacgctgtgtgggtgtcgggctggctgtgcgcagaggggcgcggctcgccgct

SEQ ID NO: 41617 - DNA, 310 bp, Mus musculus
  source 1..310: mol_type = other DNA
cccactgggagcaagactcttgctctgagctccttgactctgaagagcatggtgtattgtgtcacacaaaatgatggatggctgtcatgattgattagtaatgcctgtcaccggcatagacatgaaacgcacaatttaaaatgatctctttggaattttcgctttttatctgtgtgtcacagaaaaaaaaaaacaaaaacaagaagttggcacttcacctaaaatccaagctgttagatatttaatgagcatctattatgtgcctgatacgctgtatataatgtcaggtaaacaagtctgccttgtttga

SEQ ID NO: 41618 - DNA, 319 bp, Mus musculus
  source 1..319: mol_type = other DNA
tctcagctaagaatagactcaggcccacagcagacagcactgtgtctgctggaacccggcaggattatgtggccaagctgtgagatggattgtcagccatcttttagtataacagagtttctagaagagaactcaaggcttgatatcaagtaagaaagggtagttttagatgtctgaccatcatcagatagactgctgcttgtgacagttactggctcaccacgctggctccgtgatgcagaaagtcgcctgtttccgcagtcaaaagcctttagttctcagtgctgagcaccgcgtcctgtcacatgcctggaccacc

SEQ ID NO: 41619 - DNA, 341 bp, Mus musculus
  source 1..341: mol_type = other DNA
tgttcatttggctgaatctgatcaacagttaaactgtcgactttgaatttgaagattttatttgcctttactaggtgcctagcaaataaacaggaagccctgttagggtgatggcttttttgttacagatctaaaagagtaaaacaaaacccagaaaatgtctttcttcattttgctgccagcatcttgccacctggaagaagtggaaatcttctttattgtaactgcccatatacagttccaaacgttgaaaatgtcaaagactgtaacatttgcccaaggacaagcttggaaaatgttcccaagtttgacaaggtctacttgcagagtattttcccggc

SEQ ID NO: 41620 - DNA, 450 bp, Mus musculus
  source 1..450: mol_type = other DNA
gttctccaaaagaaatcatgagacttaattcacataatggaagtgacatattcttcctgtgtctatcatcatgaaatgctccaagagccataagttcaggctatatattctatagctattgatgactttatagaatttatattttttattttaactgatacataattgtatttatttacaagataccattggatgttttattacatgtgcacattgtgtgatattcatatcaggataagtctgtctcttttagtttttaaataaaactatacattttcaactaacagaacatcggaacttctcttgcctaagtctaacttactaccagtgaatcaattatacttgtaatctgcttctccacaggaaagctccagggcagaggagcagtggtgggccagtgggcggcccgcgctagtgcgcaggcgcgcccggacttggcctgagcgcggt

SEQ ID NO: 41621 - DNA, 334 bp, Mus musculus
  source 1..334: mol_type = other DNA
ttaaaaaaaaaaagagtttaagtccctgaagttcattttatagttggtgactatttgtcaaccccactggattgtgccaagctcgagttgggttcttggaacagagccctttcccctgagaaactcactcagccctgcctccggtttcttggaaagactggagggacccagggcctttgcaactcctgccctcgtaccccacccgcgttgtgtctgacagatcctgtgcctctcttccctggcgagggaaactacgtacgtgagtgccggcgctccacaagctgcccctggaggtacaaacctgggactcctttttgagggcggccctccaggg

SEQ ID NO: 41622 - DNA, 268 bp, Mus musculus
  source 1..268: mol_type = other DNA
ataattgtaattttgctactgttacaaattgtaatatgactatctgatctaagtccggtttcttggaaagagaacaagaggaaccaggggcctttgcagctcctgccctaccccacccgcgttgtgtctgacagatcctgtgcctctcaaaatttccctggcgagggaaacttatgctgacagcacttctgctttctcccgtggccttctgcaaaagtcacgccaaacctgggactcctttttgaggacggccctccagggctcgcgc

SEQ ID NO: 41623 - DNA, 229 bp, Mus musculus
  source 1..229: mol_type = other DNA
agcaagctccctacccgggaaccagaagtcaaccttatcagaaaaggtctactgatgacatagatgacagagaataattttgtactcatttttactagttattaaactaatccaactctcatgtcaagtcgacacaagctagaagtattcctgggtctgctgcactcgaccagcaggcctcactgcatatggcttggggctggaatctggccagccccgcgggatagac

SEQ ID NO: 41624 - DNA, 94 bp, Mus musculus
  source 1..94: mol_type = other DNA
atctcgcctggttagagccaagcctggagcagtaagttacttcgagcttaatacagaatctgtgtcaccccgggggaggatgagtccccggcct

SEQ ID NO: 41625 - DNA, 619 bp, Mus musculus
  source 1..619: mol_type = other DNA
aaaatatttagtaagtcaaataatataaatattgaagctggtatcctttcaaccttgattgtctccacttgtgtaaaatagtaatgattataacacttcatttggtgccttcctcaaggaccggaacagatctgtattcaggtgaaaggttcagtgtcaaagtgacaattcttagaaagttagtgttttacttaagcttaaaattagtcttcacacttgaatgacaaattggtctataattaatgcctccagggcaaaatttgaggcctagcttgatgcttagaggtagcaaaagggaactgatattagttgccaagcacctactgtggggttgtgtggattctgcgggctccattaaccccggttgtctcagtgtgcccagcgtgggaacacacatctaaagcaggctctaaggctgcgggcagagaaaacagctttgtcctttccttgcaagggccgccggcgaccaccccggagtctgggccagacgcccagcaggtgagggcgtggtgggggcgtgactaaggctcctcaccggccccgccccccgcccctccccgcgccggccgcagtctccgccccctccgggccggcgcgcggctcccgcctccttccctcg

SEQ ID NO: 41626 - DNA, 535 bp, Mus musculus
  source 1..535: mol_type = other DNA
ttgggaaggaaagagtttatttcatcttacccttccagatcaggccatggggtgctgcttactggcttgctcagccagcccaggcatggcaccgggtctcactatgtagccctggctaccctcgattaaaggcgtgacaccatgtgcaaccattttaaaattaatttttttgaagtaggctctcaatgctcaacttaaactggtatgacaggacatgcaaatatctatgtccagtcattttcacttattaagaattaaacaagattcaatgagatcgctttataaatatggctgccctgcaggggtcgccagcgcgctctcggtctggtggcgtccgcggctccacctcccgcgtaaggctgtccggctggctgcctgacccagcaacgtccctagctgcggcgatcccacgtcccgcagacgcacgaggacaccgcgggcccgtcgggacgcgctggataacggagcttctgcggcgttgcgggcgggcagcgcggcccggccggggtccttgcgggtcctcggcgggcccggg

SEQ ID NO: 41627 - DNA, 360 bp, Mus musculus
  source 1..360: mol_type = other DNA
atttaataaaagataccacctctagaactgggagttgggaaggaaagagtttatttcatcttacccttccagatcaggccatggggtgctgcttactggcttgctcagccagcccaggcatggcaccgggtctcactatgtagccctggctaccctcgattaaaggcgtgacaccatgtgcaaccattttaaaattaatttttttgaagtaggctctcaatgctcaacttaaactggtatgacaggacatgcaaatatctatgtccagtcattttcacttattaagaattaaacaagattcaatgagatcgctttataaatatggctgccctgcaggggtcgccagcgcgctctcggtct

SEQ ID NO: 41628 - DNA, 395 bp, Mus musculus
  source 1..395: mol_type = other DNA
gaacttaagatgtattttagctgtggacattttaagatcattacttatttaaagtagaacttttaaagaagcatgttcattcattatatatacctaaaggttcatccctaaatttctttttattgaataatatattggaataatagcatttatgctatagaacagttctcaaaggcagtctcctatgtgagaacctgggttgactttgtcagagcaggaactgccctctgacagtacttccatctcccaacactcccatgggaagagttctgttgggacgagagctctgggctcttttggccagaaccaaaaactaaggattttggcgaagggctaagcccagtgggacaggtgtgcggccggaagtcccgcccagcggatgtgagcctggctgg

SEQ ID NO: 41629 - DNA, 456 bp, Mus musculus
  source 1..456: mol_type = other DNA
ctcccatcagttgggttaggggttgggggagggaggtcacagcagggtgtcccctcaccttgtgtcctaacactgtgcccaggggaagtgcatttgttagcactgcaatattactgtggatgtacactcatcatgtgctgggataataatctcaggacgtgcaatagaggaaagcaattcttacttgtcagcaagcgtgtcacatgaatcgatgatagctacggggtggggcccgcttctctatatagaatactatatacaagtatgctggtgtattcctcttggaggagtctcacggtgaacagtgataaggattatcactcgattttcaggtagagagagagaaacattctgtggaactcaacctcaggtccagtgacgcgtgcgcagtgcagcgtcggcgccccctactggctgcgcgctggaggagggcgcttagtgcgcctgcgtgaggcc

SEQ ID NO: 41630 - DNA, 620 bp, Mus musculus
  source 1..620: mol_type = other DNA
aaaaacttatttttgagtctggctgggcagtgagcatcttcaatctcagcacttgagacctgggacgtaggcgcttgagttcaagagcgagaactagtagcaaaacttattttcctgaactttatttgaaaggtgcctactatgtattggccagcgcgggcgtagaccaatacctgccggggcgcagcgctcggcggtcgggcaggatggggtgctcccacccccctcgtttagcgaacgagtagggagggcctgccgagactgtgcagcccagtgggttggcggagacaccgcgcaccgcaaaccgcggacagccagccgtgcgggaaggggcgagccggccttcgccgaacactcgggccagtggccggatcccagagcgccggctccccacgccctgcacggccggccgcagccgcaggcccgtgggaggccggcctacccggcctaggcacttaggccccgcgggtgtcaggagagcccgccagcctggccggcttgctcacttccctggctgcgccatggccgcgcctggcccgcgaacagcaaagccgcctaaggaggccgccacccactcggcctcacgcaggcgcactaagcgccctcctccagcgcgcagc

SEQ ID NO: 41631 - DNA, 263 bp, Mus musculus
  source 1..263: mol_type = other DNA
tccactagaatgtctttagtgagtctagcctccttccactcgggccaagggtttaagattgccaagtgttatacagcagcagtatagaacaggctaagcttcagttctggccacttgctggtcagtggagcagggaacctggggacccaacatccaggtcttcaccggccagtgggcgggtgggggcagggcaggaccagccttggggggtgggggcgggtccctggggaaccgctcctcccgcccgccgccactttaagagg

SEQ ID NO: 41632 - DNA, 539 bp, Mus musculus
  source 1..539: mol_type = other DNA
acaggctaagcttcagttctggccacttgctggtcagtggagcagggaacctggggacccaacatccaggtcttcaccggccagtgggcgggtgggggcagggcaggaccagccttggggggtgggggcgggtccctggggaaccgctcctcccgcccgccgccactttaagaggctgctccaccgcggcaagccgggccgtagccggacggggacagcagcggcatgaccggccaccactgttggggctacggccaggacgacggtaggcgcagacccctggttctcacccagctggactcactgcgacccgcgcgtcggaccagcttctgggcgcaaagtccgtgctgcgccccgggccctcccgcgaaccactgggtagctgagcgcgtcctgccgccgcctccgcgcagcgcgggactgcagcgctggctcccacccggccccgcactccccggcgtgcgcagcgcttgcacagcgccgtgcgcgtctttgcggggagcgcgcacaacggatatgcagggacctccctggagctg

SEQ ID NO: 41633 - DNA, 437 bp, Mus musculus
  source 1..437: mol_type = other DNA
cttccatctggaatgctgaccagatataccatgagcagtcctcggggaggagggagaccagggtcttcatactctgtaccctcatctgagtcaggccttacagggggaggtgaggaggccctggtcagccccttctcttttctgcttagagacatgagacaggtcagagcctcacccttatctgtgttcaggtgaggctaggagagcttcagggggacctctaggcttctgtcagctccacgggccacttggggcaggacaaggtaagcgtaagcaggtacttacacaatatctggagagatctggctacagatgccactgcacagtcattgggctgtgtcaagggggcagtgacagaccaagagctgcccacctcctcagatctggctctccaaaagtaacttggggggactaggcggggccaggcctgctcctgt

SEQ ID NO: 41634 - DNA, 122 bp, Mus musculus
  source 1..122: mol_type = other DNA
agggaaagctctggacctctcttcacttgtcgcactctttctgcacagccacgggtaaccccagggggtagagtgcagggtggcccctcccggccccgcccctctgtcctcgactgggggcc

SEQ ID NO: 41635 - DNA, 160 bp, Mus musculus
  source 1..160: mol_type = other DNA
tggagtcccccactgttaggccggatctccccaacccttcaacctgaagggcagtcccgttgggagactctgtaccctctaaattctggttaggtccatacctggattccagctacctgccccgcccctggcgggtttgcggtgcctttgcagcagcccg

SEQ ID NO: 41636 - DNA, 362 bp, Mus musculus
  source 1..362: mol_type = other DNA
tactctttgttttcaaacactgtttttactcactgagggacctctggacctgctgccatcattcagtcctgcgagcagtcagccatgggccacgtgtgctggtcccaatggcacaagtcgtgggaattatatgtgcaatttcccattctttgacatgacatccccatgccaagaatgatatttctgcctgctaaggcattcgtggcctccatagcctggctgacagcaagaggtcaccaccaatggcttcctgcgatccagctcccaacaggatccggcgaggagtgtggcgtgtcccttgcacgacccccacaccacgccctctcctcgttcccaggaagtgcgcggaaggagcggaaaca

SEQ ID NO: 41637 - DNA, 259 bp, Mus musculus
  source 1..259: mol_type = other DNA
gtctgtctgtctgtctgtctgtctgtctgtctgtcggtctgtgctcagaacatcgccctctctgagattggttgcttgtgactattaatttattgatgtctatcttcccagggatgactaaaatgatgattcttgtaatgtcaatcttagagtcaggaatcatgattccatattggaggtcagggatcctggcattgcagaaggacttcagatgccctgctgtgtctgtccaagaggccagggaaggaagagaaattcc

SEQ ID NO: 41638 - DNA, 352 bp, Mus musculus
  source 1..352: mol_type = other DNA
cacaaaacttcctctagagagtcaggctggactattgaccataatgttagagatattaaggtcccattaaatactgggattccatcttgagatttaccagtggaaggagaagatgcacttggagtaaatgcaaacaattaaaattattggttaaatggttgatctggtcagaagctgatcactactgtggactctaaaaccaccagaatgtcagtgtgttttgttgaaacacccccttgagaatgagctcacactcagagctccgtgtgcccttctcacagaagcactcaaacactgggatagatgagctccagaattcattctgtgcctttccaggacttgtgcctgggca

SEQ ID NO: 41639 - DNA, 331 bp, Mus musculus
  source 1..331: mol_type = other DNA
ttatgtgacctcgcataactatcataaattttacatccttgttgattcaatgaagaactcattcctagattcattaaactagcaaggtttgcagtatgatggttcacgcagcagtaagaaggcctattcctgttgcagatgacttggacattgtagaactatgtcttttctattttatagattaaaaaaaaatgttttaaaacaggcttgttaaaacaagctcagtaaactgagtcttcaaagcacaggagtcttgaagctgaggttacactcagctcacagaagcaagacagggttcctggtatcccagtcatgctgtgcctttccagga

SEQ ID NO: 41640 - DNA, 161 bp, Mus musculus
  source 1..161: mol_type = other DNA
acattatcatagactctgagagctcagacactgagagttcagtgttagactagcagggtggaaaggcatttcacatgtgtggcatggcattcacacatgcatataaacgtctctgttacagattgcctgtgttacagaaggacttcagatggcatgatata

SEQ ID NO: 41641 - DNA, 376 bp, Mus musculus
  source 1..376: mol_type = other DNA
aagattctgaaactgtttagaagcctgtgtctccagcttcttcataggctctgagagcccagactctcatcactactggagccatgaaatgtcacttgttgtcaaaacatgatggaatgccttcacgttcatgtcatggcatgtgagtactcacgcacctacatacacacatgaaaatggtttaaaaagtgtttgtgtttcaatgacatagccaggatttctgggagcagtccatggaagtcctaagatcactgtaatggtcatggttctgcaacagcactgacctctgccagtgagcacaagaacagtggtcatggttctgtgaagacagagctcctgatatctcagaagaactgcagagcacagaagccatctg

SEQ ID NO: 41642 - DNA, 283 bp, Mus musculus
  source 1..283: mol_type = other DNA
gaggggacagcatttctggtatcccagatgatctctagaatccatgatatgcctttctgggaggccaaagagggaacagaaacagcagaggcaaccctgatggctattcttgctatcaacttgactacatctagaatctgggtttgaagtagacaaatttactttttcctgtaaaggttctatgccccagtataggggtcccaccttgctagcaagtccagtgtaagttgttctaataaatccagtttctatatatttatgtagagagattcattctatagaa

SEQ ID NO: 41643 - DNA, 199 bp, Mus musculus
  source 1..199: mol_type = other DNA
ggactattcacactagtcaactctctctctctctctctgtgtgtgtgtgtgtgtgtgtgtgtgtgtgtgcatgcatgcacacatacagaaatgtccggccattctctaatgtgggtcactatggtgtgtctcttcagagaagcactgtcatgtccttacacttagtggttgcaagttgcaggtgcagcccagtctgctc

SEQ ID NO: 41644 - DNA, 234 bp, Mus musculus
  source 1..234: mol_type = other DNA
ccttatgaaacatcaagatgcttcctaggcttgtaaagttgcagacctctatatataagtctatgaaaaatgttaacggacttgggccagtcattgggccatttcatagccaagacaaattgtggctcaaagatctggctacaggaggtggccacttcagtctcagagtctgactgacatgcaattcagccactgaagactctgctggtcctgctctgagaacaggcagagcgt

SEQ ID NO: 41645 - DNA, 200 bp, Mus musculus
  source 1..200: mol_type = other DNA
accccaatatataagtctatgaactcatcacagataagacttagagatgtctacttgggccagtcattggtgggacaaattgtgtccgctacaggaagtggccacttcagtctccatccagatgctcagagtctcagctagttaaatcatcagacctctccagaagacactgctgatctgagagcacggccaggctgaac

SEQ ID NO: 41646 - DNA, 212 bp, Mus musculus
  source 1..212: mol_type = other DNA
caacataccaaatggttcccatatcaatggcgattggtaaaggacatttctgagaactcagatctacagagctatgccaagactctaggttccctggggaagttgcctttagatctagactccagtgggaatgtatgatgatcctggctccagggtgaagcttgaagcaaactgggcagggattgcaggcaagccagtttggttgaagagcc

SEQ ID NO: 41647 - DNA, 187 bp, Mus musculus
  source 1..187: mol_type = other DNA
aggctgcctaggatcaaggaagcttgggtaaagtttgtcatcaaaagaggcctcagctgccttttaattttagggtgccctagagcaagcaagccgaaaattctggagaggagcccctcttctaaggaggcagccaatgagagggaccctgctcagagaccactgggtcgggacctctggaatgtga

SEQ ID NO: 41648 - DNA, 396 bp, Mus musculus
  source 1..396: mol_type = other DNA
ctggccagctgctgccaagagttggcacttacctgcttttaacaaactgcgatttttaaggatcagaattgagggtcagctttagctcaagctctgctgcaaaccccgagtctagaacgattgcacatttgggtaaaaatatggactggcaaccggttacatataattaagatagttttcctttaaatgatgtaaacaacttatgagtgtgcattttagaaattactaatctgagactttctaagatttaggtttccttgaacttctagttgctaagagaggggcggatcccttctgggcgggttgttcgcagagaagcccgcggacgcaacccagcggccccgcaagcgggtgggtggcgcatgcgcggcgcggggcggccgcagccgggggagg

SEQ ID NO: 41649 - DNA, 212 bp, Mus musculus
  source 1..212: mol_type = other DNA
ctatgcagggtacataatacctgggctcaatgggctcttctagaagccttccatttcctgtatccagtggatgaactttctgaagccagaagagctgttgagcttagaaactcggagttccagcgtcctatggctttctcagcaagagtctcccgtgagaggccctctcagggaccagcccagcggagctgagctccaacgtgacggcctca

SEQ ID NO: 41650 - DNA, 292 bp, Mus musculus
  source 1..292: mol_type = other DNA
caggatcacaggccaatcaggaaaggactttctgtgacagggccggaccgcctcgggaccccagactcgtggaatttacctcaagtatacactagagttcccggatactccaagctaggcttgtccttgtgtgatttcctcagaaaaaattcttcaggagatgccctctgattgaaccccggaactaacttaaatttgggtgccctttcggcttcaaacgctttacccggagacaggggactggccacggaaggcgggacgcgcgggcggacccggcgactctgctagggca

SEQ ID NO: 41651 - DNA, 485 bp, Mus musculus
  source 1..485: mol_type = other DNA
gggaaccgatgccctcttctgtgtgtgtcttttaaaaaaaaaaattcgtttccaaaccgagtgaggaagcagagacaggcagatctctgtgagttcgaggccagcctggcactacagagtgcgtccaggattctggctaggtggaacagaacacgccccctgctcgggtgcgcagtaagcgacctggcctaggaaggttcccagtctgcccactaccccaccttcaaactgggggttcgcgaaggtggaggtccgaagtccctcgtacctcccatgccactaactggccagcaatcgcgtgtcaccaccgcgcggtgctcgccctcgggaagccagatctctcgctttgctggggctgcaccgagggagcccacccaccctcgccgcacactcgcctggctctgctgcgcgcggcttccgggtgtgcgcggagacgcaggggcggtgccctagcagagtcgccgggtccgcccgcgcgtcccgcc

SEQ ID NO: 41652 - DNA, 366 bp, Mus musculus
  source 1..366: mol_type = other DNA
cgagcgggcagacgctcaagctaaagcgtgagccgcatccctggcggcccacactggtgcggtgattgggcaatctagcccccccagggccgcgcgaaccccaagcctcgggaaggcctaagcaagttgaaggcgcactcgcactagctctagctcaggtccagagctgggggtgtaaagtaaataaatcctttaatattgggggatcgggatccgggcaccctatacctcgctccgccggtggctgggccgctgtccgagccccgcctcttgggttcgcacgcggcccccgcctgacccggcgcccaggggcggagtagggcggggcgggcggcaaacgcagcactttcgcggctttgacaagcc

SEQ ID NO: 41653 - DNA, 223 bp, Mus musculus
  source 1..223: mol_type = other DNA
ccttagcctagtccccccccccgccccccggcccccgccccaggaggtgagcgaagaacataaactgcacaaagatccctagacgactgcgtttctacgtcaggtgttggccactgtaacctccaggaagaacttacctgtgacaggcagatgccaccccctgactcacagggaagggtaccacccctgcagccctggccgccccgcccctgttgcagctgct

SEQ ID NO: 41654 - DNA, 319 bp, Mus musculus
  source 1..319: mol_type = other DNA
ctcaccgtccactggccgccgggcgctcttcagccctataatcctggctgaatcctagtattctggcctcatctactaccggcaagcagccaggggcgcagggtggcagcgaatcccgcccctcttcgcacgtttggctccgcccacagcgagcttaagcacgccccctacggcggagacggacgtggtcgtgtgagcgtgcgcgcgcccgagtgcgcgtgtctttggcgcgggcttccatggtctcggcggccaatcaggtgggggcgcggcacgcggaccgaacccctacccctgatttggaaagtcagggactcca

SEQ ID NO: 41655 - DNA, 387 bp, Mus musculus
  source 1..387: mol_type = other DNA
gagcgcccgctggaaaccctgttcccatgtgttcagggcctggaagagagcgctcactgcgcgcccgtcctgctcgcgctgagggaaggcctcgaggtggcagctctgccctcttggacctgcgcggagacgtgtcccgagagcatcgtcaggcagcactcagttcgctgcaggcgggtccaccgccctcaccgtccactggccgccgggcgctcttcagccctataatcctggctgaatcctagtattctggcctcatctactaccggcaagcagccaggggcgcagggtggcagcgaatcccgcccctcttcgcacgtttggctccgcccacagcgagcttaagcacgccccctacggcggagacggacgtggtcgtgtgagcgt

SEQ ID NO: 41656 - DNA, 350 bp, Mus musculus
  source 1..350: mol_type = other DNA
ttaaaggtttatattattattatcatcatcatcattattattattgtgtgtgtatctctgggagctagagttaacaggcagttattattagctgagaggagcaagtgctctgagcctctgagccattaacagtgttatcactacggtcagtcgacacaaattgccttccccaaattgattgatgattcacacttgtgagaaagcagacttcggaagctctagttacccttctgacagtaatagggggtcatccttcaaaccagcttgaggccaaatcagctttaaatatgcatatgtgttaagacttggtgctcaccgggggagtccacagctgccccccttccttccgg

SEQ ID NO: 41657 - DNA, 321 bp, Mus musculus
  source 1..321: mol_type = other DNA
agtgataacactgttaatggctcagaggctcagagcacttgctcctctcagctaataataactgcctgttaactctagctcccagagatacacacacaataataataatgatgatgatgataataataatataaacctttaaaaacttgcaaacacacagttctatgtgtcagaaaatgccttaaaggctttgcttaagctatttattgttagtgcttgctgttttggcaggaagtaacaggaacagccctttagaataagttttaagcaaataggctaagcttgtggcttactccggtggcccggcgactaggaacggaa

SEQ ID NO: 41658 - DNA, 396 bp, Mus musculus
  source 1..396: mol_type = other DNA
ctgactgacagggacatgtcctgtgcagctgcaacccagactgtctgggcctgctgtgctagcatagctgggcagagagcttagccctctcgccaggctcagctgcccctcagtggcacctctgcctcactatgaagggtggtgctgggtggttgcctaccatcactctcggatgctccctgagagtcctgggatctctgggagaaagatttacagtaacgaatgaattcctatataaagattatttttatacttttttcaacaaaaggaaatgtaatatttaggaagcctgctgccacagcctctacctgctgcaccttggtgtggggcggggccaggcaggcctctacggggcggagcagggcagggcaggcggggtcttaccctcctacccct

SEQ ID NO: 41659 - DNA, 255 bp, Mus musculus
  source 1..255: mol_type = other DNA
cttacgttggctccatgatccgaaggtaaaacttgaaaacaattcaaattacgttagtatcttctttggacagcggaacttcgccctagcctccaacactagtcctggtgtagtcctgcacggcaacatcgggaaagctttgccggtgcagaccacgccttgtcccttaccgccatagtaactggaactgcagtcgcacttccggtaaagagcgcacgttcgctcctgggcggaagtggatttccttccgaagcg

SEQ ID NO: 41660 - DNA, 326 bp, Mus musculus
  source 1..326: mol_type = other DNA
gagtggtcatcccatgagagcaccccaaaagattactactactggtaacccatggggtttacagggatgaatagataccttctggggccaaacaagacacaaagcctgcatctgtatctccttgccccccagaactaggggccctcctcggatccgccgggcggctcgtttccgcctggcgggaggtgccgggcgagctgtcagatagcctcccgaaggcggggcctgtccccgaccaggcgcttcctctcacctccagaggcagcgagtccgccatcgcagttctgccgtctcccgcttcggaaggaaatccacttccgcccagg

SEQ ID NO: 41661 - DNA, 319 bp, Mus musculus
  source 1..319: mol_type = other DNA
ccgcagggggcggtgcgctggcgcactacctcaaggccgggacggacccggctctttccaggctgaaaagctggctattcctcaccttcaaactacagggaactgtttgagaaagagcgggactgaatttcaaatataaaatctatttccacttattccccaaatgagagaaatgctttcatttgtcccgccctctgctctgaggcggagcgggagctcgggttttcccgccctcctctggcccaagcgccgcctccggcggtggttaaccccgagcgcgcgctcgccgctcagtcgcccctcgagccgcgagcgtccg

SEQ ID NO: 41662 - DNA, 376 bp, Mus musculus
  source 1..376: mol_type = other DNA
cagcgctggggccccgcccccgactacctggagcaggtggaagtctgcacctcttcaggagggcctattaggcagagccccggccggagacttttctggaggcgagcacccgcccgtgaccagcgcccctcaccttaagaggcgcccccaggagtcggtgcagagcagggatctgcgcactcaggggcagagccccgtccaggctgcaggtgggggcccggcgtggctgttagggccgggccaggctgggccggacgctcgcggctcgaggggcgactgagcggcgagcgcgcgctcggggttaaccaccgccggaggcggcgcttgggccagaggagggcgggaaaacccgagctcccgctccgcctcagagcag

SEQ ID NO: 41663 - DNA, 467 bp, Mus musculus
  source 1..467: mol_type = other DNA
ctcacagcccatccaacctgttccgtggtgggttatccacacagggcatagggagtctctctggagacggcccctaatcatggactcacatgtgtgtgtgtgtgagtgtgtctgaggaccacgagggcttgagtggtcctcatcttgacatgggcaagtattcccatgtcccatcacgggaatggtaaaggagccttgccctcctcttccagctctgagcacagtgagcacagtggaatgaatggtctccgaggcactgagagtaggaacccagcggccggcgggcgcggatgcggcagggggcagtaggcgtggtcccagctctcctccgcaccctcggccttgcagagcggcgccttccggaagaacctgagagcgccgcgtccacagcggccttgcggcccttcgagccaccagaaggtggcgcccttggaatctgggcagcctcgctgtacccatcctcgagg

SEQ ID NO: 41664 - DNA, 356 bp, Mus musculus
  source 1..356: mol_type = other DNA
cagatatacaaggatttgatttttgatctgatttctttaaaggtatatcacccatgggaggaaagttaggaatgtaactgttattgccagagctttcttccccaaagattgttcaggaacttattagtgcacaactattgcctccagccatcaacagcttgggaaacctgtagtagttgagggtcatccattccatagaacattatagtgattctctgaccttttcagatagagcatggcatggtccgcccttctcagggacgggccgtgaccggtccctctaacggtccctagagaaccaaggcccgcggccagtgggaggggcggggcccgagtcgggggcggggcctggcacg

SEQ ID NO: 41665 - DNA, 356 bp, Mus musculus
  source 1..356: mol_type = other DNA
catcactaacttcctagggagctaagagttttattaggaatactgagaagcaagcttgtcagccctgtcagaggttagctctcttggagcttttaaaagattgatcaaagaaaggctttgggtgtcctttcccaatgccaacttgaaaagtcctcctaggcgggaagtttaagaaactgcccaagttaacccggctgctccagggtcagcgcccccaggcggcggaggcactcctcgtccgcgcccgccgctcacctgccgcggctcgcgagaccgccccctgctcgccaggccccgccccgcgtgccaggccccgcccccgactcgggccccgcccctcccactggccgcgggcc

SEQ ID NO: 41666 - DNA, 366 bp, Mus musculus
  source 1..366: mol_type = other DNA
atttatgaggatcagcaatgcatagttcctaatccaagagctgaacttatattataacaacattccttcattagtggaggaactagatttgagactcaatcctgttgtaaattataggctctttgccgtgtacacgctgcaaacgctggaaaaactgggtgagaccctagacaaactgtgcaccggcacattctattaaccataatagtaataggagcccagtataattcactgggaactaaatatatattttaagttaaaaattgtttcaggggaaaaaaaatgtgaccctgagcctgacaatgctccacttccctgaaggagcaggtgaaccagtggcagtggttgctgtgacaactgagttac

SEQ ID NO: 41667 - DNA, 441 bp, Mus musculus
  source 1..441: mol_type = other DNA
ccagagccctggcatgcatgttaggcacaggttgccagacacgggggtggcgcagggtgccagtggggactcagtgtagcagatcagggtctcgtcttcccattaactggttcctggggagaaaaggagaccttgatgccttcattgactccatccccagttctagactatggaagaatacccaggtgagagtgcacatttgggcgtgtgtaccagggacctaaggccatgcctggcactgcatgcgggggcgggtgtggctggcagcagactctggctgcttccatgcagtgttctggaagtcatggcagtcacagccacagcaatggagcaggatgtgcactcctgagctcggaggctcagagtcccacagggttgggcagactggccctttcccgggcgaagctggcgaaccccgcccccagggcgctttataagctg

SEQ ID NO: 41668 - DNA, 411 bp, Mus musculus
  source 1..411: mol_type = other DNA
caaaaacatggggtcttgttcaagaacgggtagcctcgaaaatttgaatctactgcttcagtctcccgaatccccagattgcaggcttgtgctacagcaaggtttattaattaattaattaatcaattaatatttagtatttttatttagttttttatttagtatttgcagttggaaactgacattctccgaaatttaggaattgctgccacaaaagcctgcgtgatccactgattgtctcagtcttctggccatgggagttcctatcttaggacatccaggactgcagagggcagctctgaccgctctgcaattctgcgggcccagcgcccacagagcacaagcgtgaccttggtcactctcccgccgagacagcctagggggtgggactcactgtctctatggtgaccg

SEQ ID NO: 41669 - DNA, 455 bp, Mus musculus
  source 1..455: mol_type = other DNA
aaaaccagcgctgagttatttccaaaacaccttgcattcactcagctagcagagtgcagaatccctgttgttcaacaaggtgtctgtgtaccagctatgatccaagttgactaactaaaccccccaaagagatggcacacctgtgagggctttctgcttaatttgaagtgagaagatctacttctccagatctaatctgggccatacaggacatggaagaaggaagcctttgctctttgccattccagtgtttactgaagaccagcagagacagtctcatggactgagcaactatcagcttctcagacttttggattatttgtaccactgcctataagccattataataaatcatacacacacacacacacacacgagagagagagagagagagagaggagattctataaattcttttgctatagagagaatctggtccagttctgagactatcg

SEQ ID NO: 41670 - DNA, 210 bp, Mus musculus
  source 1..210: mol_type = other DNA
cagtccactgccaccctactggggtcggggtttagtctcgttcgctgtgtaaggctgcacgagtcctgcttgggacagcaggtaccttgctgcgacggccacgaagtttaaccttaaggccgcctttccttagtgcgcaggcgccgggagggcagttatagccggtcgggcactccagagtaacgcatgcgtgccagggtgctcacgtga

SEQ ID NO: 41671 - DNA, 232 bp, Mus musculus
  source 1..232: mol_type = other DNA
ccaggccacaagccagaaagcagtacccgctgagtggttacagctcttcaacccatccaagaacctgggaggggttccctagcgccccctactgcatgcagttcccaggaagctgtccggttcccgcagacaccttgacacggtaggcagaccactctgccgggtaactcgcgaaggcggagcgagctgtgggcgccccttcggggtgcgggagccggaggggaggagggag

SEQ ID NO: 41672 - DNA, 516 bp, Mus musculus
  source 1..516: mol_type = other DNA
attcaggaaaaggagtcagtgctcttaactgctgagggtttctctgtgtagccctggctgtcctggaactcactctgtagaccaggctggcctcgaattcagaaatccgcctgctgagtgctgggcatgtacatgccaccacacctggctttgaggcaaagttttgctgtgttgcctagactgtggtcttaaaatgctaggtttagccaatcctccacatcaccacaaccagtagattttcttgtgtgtgtgtggtatgtagtatgtatgtagtgtgcatgtatatagtatgtatgcatgatgtatatatgtatgcatgcatgcatgcatgtagtgtgtatgtatgatgtatgtttgtatgcatgtatgcatatatttagtgtgagtatgtgtcagagaagagctctgggagcctgttctctcctgccagaattcactctgtagatcagactggccttcagcttgcccctgagtactgggattacagggctgaacttgtcgatcccagtacgggaa

SEQ ID NO: 41673 - DNA, 163 bp, Mus musculus
  source 1..163: mol_type = other DNA
ccataggaacacatagttcatgctggatgttcaagtaagagatgtttatcttccgcggtaataggacctgatccttttcccttggtccaagggaaaggaggctttagggatagcccccagtcccgccccatcccggcgggctgagtcaggaggcaggaaccag

SEQ ID NO: 41674 - DNA, 346 bp, Mus musculus
  source 1..346: mol_type = other DNA
ctgccaggtgcataactgggactacaatcccgagtcacattacagctaaacacgactgctgtggtgtggtctgcttgaggtgaccgggcagggtagaaccctggcgcttcctcaaccccccgcccttcgcagcttggagggaggcggagacccgatcgcccagaagccgcccaggccgcctccgcgccgccggcagagcccacgcgcgacccggcgagggcgcgggagggcgcgtgcggcgtgacgccgcgcctcgcggcgcatccccgtgacgccatcgcgccggcttttgaaagttggcgcccggggccgcctcccatgctgcctcgccgccggccggccagca

SEQ ID NO: 41675 - DNA, 380 bp, Mus musculus
  source 1..380: mol_type = other DNA
caggcggattctgagttcgaggccagcctggtctacaaagtgattttaaacaaagattaggataaataccctgtttaatttggaattttagctttcttagttgatctaaactccaaaaaagtattaagtctctttgctaatgtttacttaatgctaaattttgcacgatctctagagaggggctgaatcttagcctagccctagagtgagtttatcacatcacttgagatgagagtgaaattaagtttcagtccccgcgcaccattgggggccgcaccggtcgggtcccgcgcgatgccctggcgtgattgggggcgcagcggggcccggcgggggcggcgagcgcgcgttcccccgcccgctcgggcggcgtcgaggcg

SEQ ID NO: 41676 - DNA, 284 bp, Mus musculus
  source 1..284: mol_type = other DNA
tctggtttttgagaaaggactatagaccaggaggccagcctggtctatacaaaggaaaaaaaaaaaaaagggtgcagcccagcctcttttcttcctgcctgtttttacagtgctgggattacaaataggtgttactccaacctacccaacctgtgtcttgggatagatcctctcccccacccggggcgaactcagccaacgaagccggggcggggaggggccgggccgggggcggcctggcaggaagaagcgcgtaccttccgctgcaggaggagcaggtggct

SEQ ID NO: 41677 - DNA, 367 bp, Mus musculus
  source 1..367: mol_type = other DNA
gctgcagccttaggcttaaacctcagctccagtacaagggacactgtccaaggtccacagagggactctggaaggactgcgcgccggagtcctctgcggcctggccattgcagggcctggcgggcgggggacagtgccccacagcagcccgccgaggcgcaggtgcacagcccggcccgctggcccgagccgccccgcccctggcggtagcactccgtggagtctacgtttcctaggaaacggagacggaggcagagagggctttctttgtccgtgctgtcattttcattttgtaaaggaaactacggcaacatgctctagagttgtactgaggaacagctcacgggcttaggatccgcctggcggt

SEQ ID NO: 41678 - DNA, 493 bp, Mus musculus
  source 1..493: mol_type = other DNA
gaagccctcaggacttcacacctgtatccggggctgctccgtgggcagcaggttaaagcgatccacctggaggtagaactccgcaggcgcggagcccgcaggcctgcagtagcaggagccggccctcggtcccgcggaatccgagctccttctcctccccaaacccccatacgcctggggaatgagctttctgacaagtagcacttcttcggagaccacgcatgggttccgtctgacacaagtaacacggccccggtgtcaggtgtgtcagccgggagtctccgagtcctggagaacagtagtggctagtgtcaattcactcccgcgctgagcgacctgctagcagctgcgtttctgaacctaggatcagctctcgaatccagggctggcagggcggcaccctgggcgacccccaggaaagggtcttcccgcgagcaccgccgctccgcctctagcgggagaggaagcacgtgaccgccaggcggatcctaag

SEQ ID NO: 41679 - DNA, 428 bp, Mus musculus
  source 1..428: mol_type = other DNA
accacgcatgggttccgtctgacacaagtaacacggccccggtgtcaggtgtgtcagccgggagtctccgagtcctggagaacagtagtggctagtgtcaattcactcccgcgctgagcgacctgctagcagctgcgtttctgaacctaggatcagctctcgaatccagggctggcagggcggcaccctgggcgacccccaggaaagggtcttcccgcgagcaccgccgctccgcctctagcgggagaggaagcacgtgaccgccaggcggatcctaagcccgtgagctgttcctcagtacaactctagagcatgttgccgtagtttcctttacaaaatgaaaatgacagcacggacaaagaaagccctctctgcctccgtctccgtttcctaggaaacgtagactccacggagtgctaccgccaggg

SEQ ID NO: 41680 - DNA, 295 bp, Mus musculus
  source 1..295: mol_type = other DNA
caaccccccagcccccaagttctagagttgggagtgaggggtattggtcaaagacaagaatctctgccttgaaggattgggcccatgagctggtgctctaagctgtgccccacgggacacttgtcttcgcctgggctcctgcaggtctcatgtgccggcaccagacactcttctgttcctcccaaagctgctgcaattggagtacatacatattggccacaaaattggccccttctgaggccataggctatgaggaaacctcaggcccagagcggggctggactggtaccgagac

SEQ ID NO: 41681 - DNA, 411 bp, Mus musculus
  source 1..411: mol_type = other DNA
ttttctgcagaaggatagactctgatcctgccttcttttatgctagagaaactaagacagggagatgcaccccagttgcagcagcacgtcccccatctcgggcttcaggcctgatgcgagggccacgaggaggactggagtccaggtcccgacctgaagtcagcaggtcctcaggggtggggcggggtactcgccccgccgaggcaccccgcaactcacccgaggccggccgccggtagtagtccgggccagagatgcgggacgggccctcgcacatgatcctaccgcagccctgcaacagtgcaccagggcctgttgcgctgcgcaactaggcggaggggttcgccgcccctcccccgccaagccccagcgagggctctcactggagcagtcgccaactgttgcatgttg

SEQ ID NO: 41682 - DNA, 190 bp, Mus musculus
  source 1..190: mol_type = other DNA
gggagcctccctttttgcaactaagaagtatcacactgaagtcaaccggcttcactgtaaaactagaaagccaatctttcctgtcaagaaatctgactcgaggctagcctggtctacaagtgagttccaggacagccagggctatacattccaggaaacactctaggcgcgagcatgcgcagctcttcat

SEQ ID NO: 41683 - DNA, 340 bp, Mus musculus
  source 1..340: mol_type = other DNA
aaaacacctgtattcggcttagaagttcaaggtcatcttggactacctagggattttgagagtatatacgcacgtgcgcgcacatgaaattaatggtgaccctacatgtatgtctggtgtctgaagagacagagcagcaagtaggccttgccgctgagccattagttctttaagattattataagcctttaaaaaaaaaaactttttttttttttttaaatgaagaaaccatgaagtcttaactggttgcatgctttcccctcagggttcggttccccagctgttggactacagttcccgtggggccatgtggcagcatcgcgagacttgaccgaacgcg

SEQ ID NO: 41684 - DNA, 473 bp, Mus musculus
  source 1..473: mol_type = other DNA
cagtaaacttgtctcccagcggccagacccgctgatacctttgtaatggacacggaggtttccctgggagaggccgatgtagttgtacttgtccttggggctccaggagcgcggcagcggcccgcagggtacaagcgctgcaggcgccgactcagttcctgctctccaggtgacggtagcccgcccccggagtccccaccggaggagtccccagcctgcgggttcccagctcccgggtctgccgtcgccgccgccatcttggagggagctggccccagggtcgtagggaaactgagtccgagtcccggcaacctttctctacttcgccagatttagactacatatcccacaacctggagaacttcggaagatgtagtacatggccaagtggccaggagtgctcacgggggcgggggctggaggcgtggctcaactgtgagcccgccctcaacgcagaggctgctggggtctgg

SEQ ID NO: 41685 - DNA, 397 bp, Mus musculus
  source 1..397: mol_type = other DNA
cacatgatatatgtataaacatatctcccattactttgaatgtttttaaaattaataaatgtgaaaaatattatacgatatttatatattggtttgttcccgctggccgcgaactcagaaatctctggcacaccaatataagaaattgactccagaagttcttctgggaggacagctgcagaacctcattcaaatcctggtctgcaggaactccacctctcctttaggaggcgctgcagcccgcggccgcaccaaaacagcgcttgcgctcaccaggcacgcgcccggtaccatcaggattccggatccttgtgaagggtagcacgttccaggatatcgcggtgtccaggaaagccgccggaataagcccgccccatcccggaagtgagaggcttct

SEQ ID NO: 41686 - DNA, 368 bp, Mus musculus
  source 1..368: mol_type = other DNA
ccatttaggaaaattacgtttcgccagttatctttcaataaaaattaaagttggaaggtgatctgatttcaaagaaaaccctcacgattctgtttttaaaaagttaacctctccaactatgggcccaccttagatgagtgtttagagtttcaataaaaacctagtgtggcttcctctgagacacagctaactcattgaacaagagggaggggctgctgggacaagccagccagctccaagctaaaccaggctcccatggaggcggggtcaggctccagggccaagccagctgggacccagctatgttccagaggcttccgctagaccctcccgcgctgcgagccgtggctgcgcctctgcgaatggca

SEQ ID NO: 41687 - DNA, 322 bp, Mus musculus
  source 1..322: mol_type = other DNA
agaaccaagcccaggatttggggtttaggattcttctccctgctctcctgcattgtgaggggagagtaaagatttccacatactccacaatagtcctggacgagagaggtagatgccagctgcctcttaatccatacagttcttccatctctttattcctaacgtgaagttaccgtaaactatctatctcctggggctaatgacctcgaagatgtcttgcagttcatcaaatggcctaggaccatgctgagtacatttactctttctcagtctttgggctagccaggagcaagcagcctacggaggctgcctctgataggaa

SEQ ID NO: 41688 - DNA, 410 bp, Mus musculus
  source 1..410: mol_type = other DNA
gaaagattcttcattgttcctctgggtgccaccagggggccagctacttggaagaagctgtgatgcacctggaccacagcgatccctcactcgagaccacatgggctctgtcatggctcaggtgcgccagaagctcctagcctcccttagccatttaaagagggatggcagggccatgtccctgctcaggccttcctcgagggaggtatgcaggcagtgctctactgattgtggtaaccagcagggtcaggcgggcccagggcacgtagtgtgccttcttgggtccaatttggatctttttgtttttgaaaaacattgagaaatgcaattaaaggcttttggaataatgctggaggcggggctgacagctgggatgatgctccgcctccaggcccctctgtgggctgggt

SEQ ID NO: 41689 - DNA, 501 bp, Mus musculus
  source 1..501: mol_type = other DNA
tgaatttttttattgagataggaccttaataaatacaccaggctagcctcaaactaaagtctttcttgaacgatgttttgtcttttttaaaaaagtaaaagttgtttcaaaacctagtgtgttagtacaaaaaaaaaaatctttatttttttaattaattaattttttgtttttttgccttggctgtcctggaagtcactttgtagatcaggctggcctcgaactcagaaatctgcctgcctctgcctcccgagtggaagaacaggtttctctgtaatacacactggcttggaactcagagatcctcctgcctgagtgctgagattaaaggaatgtgcccaccatgtcaagcttggtaacaataaatctcgtgattcatttgtgtttgcatcaatacattaacaatcttttttactttttattttatgttataaatctcgtgattcatttgtttttgcatcaatacattaaaaaaaattaagaagaatggagggcgtcagg

SEQ ID NO: 41690 - DNA, 418 bp, Mus musculus
  source 1..418: mol_type = other DNA
agggtttctctgtatagccctggctgtcctggaactactttgtagaccaggttggccagagtgtattcttgagcctgtcaaagcctttgatgaaaattagccactgagagctcacacttaccagtaacataggtctcagagagtcagacgtatgtccaagatgctgtctgttaggattcacaacctgctggctacaactccagtattcccaatagccctgggaatttcataggtcccaaccaccaaccaggttgacactttagacctagttcagccgtatgtccttggtacccagaacctcacacctgggtacttgataattccaaggactttggtctgagaagtcctctccttaaagcaggtgtggggctatgccaagaccacacagctggcctagtctcaggcccaagacttctgc

SEQ ID NO: 41691 - DNA, 241 bp, Mus musculus
  source 1..241: mol_type = other DNA
gtctgttgaaagaagctgtttttccagaggaccctggttcaactccagttttaggggagctgacagccacgtggtcttattccagggcagacagggctacactcaactacactgaaaaacagttttttaagaggttcccaacgcccacgtggtggcacgcccacatggtggctcatgatcatccagggaatctgatgccctctgaccttggtgggcatgtggcatgcacatacccctctta

SEQ ID NO: 41692 - DNA, 346 bp, Mus musculus
  source 1..346: mol_type = other DNA
cctggatggaattccttgaagtcgtggcggcggccgggaagtcatcacgcccttaaatggatccgagggcccaggggaccctggtggatttagggaaggcctatcctgactttgaattcccagatgggcccacaagtgctatagctgggcctgcctgcaggaagacctggcccaggctgctgtgggcagaggccctcatcaagccaagtggaatggagccggccaagctgagcctgacttttttcaataaaatcttttttccctggcgccaagggaagaaagacggggccgtctgtccctcccactggccccgggggcccctcccacccccggtccagataaggcc

SEQ ID NO: 41693 - DNA, 370 bp, Mus musculus
  source 1..370: mol_type = other DNA
tgctcaggaagcttgctctgtggccaggacaatattcagatctgggtattgaagtcgacttttgagttctgtttccttcacaaggcaggcagatctctgtaggccactctgatacacaaacaaataaatagaatttaagatattgggtctgttgaaagaagctgtttttccagaggaccctggttcaactccagttttaggggagctgacagccacgtggtcttattccagggcagacagggctacactcaactacactgaaaaacagttttttaagaggttcccaacgcccacgtggtggcacgcccacatggtggctcatgatcatccagggaatctgatgccctctgaccttggtgggcatgtggca

SEQ ID NO: 41694 - DNA, 290 bp, Mus musculus
  source 1..290: mol_type = other DNA
cgcgaggagggagcggactcctctagcactgtgacattgaccaggtcctcactgtgacattgaccaggtcctgcttcccgctaaataacaaaaagtgactgagagctaattagattcagggaacagagccagtgcaccctgcgcttattaaggcagctagagtactgttcccggggtcctctcatcccccctcggggaggagccgacccgagcccctcctgctccccgcccccgaggggcggcccggggggcgggtggaggaagagcgggcggggcgggccagcctgggg

SEQ ID NO: 41695 - DNA, 232 bp, Mus musculus
  source 1..232: mol_type = other DNA
ggagacaagcttttcctccatatagttcacactggaactcgtgtagcccagtggcccaagttggctacaaactagtagcagtgcatctctagataacagcagtactgctgatacagcacttgggaagcaggcgtttcgttcaaggccagccagcctggtctacaaagtcaggacagccagggggccaagagacccgccaggcccaagggggcgcccttctacttgggggagc

SEQ ID NO: 41696 - DNA, 394 bp, Mus musculus
  source 1..394: mol_type = other DNA
agtgggcctaccaatgaaacctacttactagctatagcaggcaaggacttacttactagctatagcaggcaaggacttacttactagctatagcaggcaaggacttggctacttttagcatagcactactcttcttaaattcaaaatatatttattcatttgagaattatgtagaccaggctagccttgacacagagatacacttgcttatgtctttcaagacaaatgttaactccatttcctttttgaaagagggtttatgcctcctgaggaaggttggatcctctccagtgggggttttgagtataagcatagaccctgtctacaaaaacatacatggccagtgtgtgtgtgtgtgtgtgtgtgcatgcatgaacttgaggtttctgggaga

SEQ ID NO: 41697 - DNA, 316 bp, Mus musculus
  source 1..316: mol_type = other DNA
gagtccccagactccaagggatggtgtcttgggcaagaggtacttgtgaggcctagctagaatgcatggcatcctctccgggccgcacagccactgagacggggccccaccccagaagggtggctctgaatcgtccactctaaactcagcccgatgagggggcctctaattagacagcgggagcagggctctggcgcttcttgctcaccttcctcctcgcagaggactcacgcggtgaggaggcggggcccgtggctgtcagcggggccagcggcctatgggctgccccgtcgggcgggagcgcggcgaggggcgg

SEQ ID NO: 41698 - DNA, 288 bp, Mus musculus
  source 1..288: mol_type = other DNA
atgcccattttttcagatatgttcaaaaagtatgaagtaaaaaaaaaaaattaaacgtttaataaccaaattcatgtcaatgcttgaccggtgcttgtgagataagcatcactccaggagggtaatgggttctaaactaaagaactgggttgagcttaaacccaggtggattatatctacgaaaacatcgtcgaactaggccatcctcactcgattccttgagccagggacccatggcccggtgctgcagcgcccaccgtactccagactacggtggcgtgcttgacg

SEQ ID NO: 41699 - DNA, 366 bp, Mus musculus
  source 1..366: mol_type = other DNA
cccaagtggggttgaccttggcaccaaggcctgagccttcaggtccacagtaacgtgcgccttgcactgccggcactacgccgaccctccagtggataccatgggtttgcagaatggaaagaggcctctgatctcccaggagtctcgccggactgcagcaagaggtgggactccagccggcgagcgcacgcctcagcagaagtgagctcttgcctcctgggcagggttttggccctcccgcggggttccctgggccgtcctgatcacgtggcctctccgggccgcaggggcagccgcaccgcccagccccaaagggcaccgcgggcgggtctctgcagctcccactacacccggccgcaggtgccg

SEQ ID NO: 41700 - DNA, 297 bp, Mus musculus
  source 1..297: mol_type = other DNA
atacatgtacctacaggtcccctgtctacattccaggggccttgggaacccaaccgtacccatgtgccctcggaggcctcaggatgctcgcaacagctgctgcccatcagggcacataggggcccccccccgctcaccagctgtgagattcatcaggatgacactccaggagtctggagtcgggcccctgtcctggaccaggcaccaccctcagacaggtgggggaggttcacacctgcccgagggccaaaaggcccatggtcaatggcagccccgccccttggtccgaccaaccca

SEQ ID NO: 41701 - DNA, 306 bp, Mus musculus
  source 1..306: mol_type = other DNA
ctctcgccagagtactaacccaagtggggttgaccttggcaccaaggcctgagccttcaggtccacagtaacgtgcgccttgcactgccggcactacgccgaccctccagtggataccatgggtttgcagaatggaaagaggcctctgatctcccaggagtctcgccggactgcagcaagaggtgggactccagccggcgagcgcacgcctcagcagaagtgagctcttgcctcctgggcagggttttggccctcccgcggggttccctgggccgtcctgatcacgtggcctctccgggccgcagg

SEQ ID NO: 41702 - DNA, 451 bp, Mus musculus
  source 1..451: mol_type = other DNA
ggatcccttagccgctattgtcaacttcctcggcaggagtggatgcaagaccttgtcctactggccgtgccactgggtcgctgagtccactcgcctcgcggcattgtggataaccccatgagccgctgtgcctcaacaggctctgaagccggtctcgtccgagcctaggtccggccccagcgcaccggcagtggccccgaacaaaaccaccagcgactgaggttcgggacaagggtctgtggccgagtctactgcgggatctgggcccgggggtgggggcggcggcggcggcggagtcatggccgcagcggcacctgcggccgggtgtagtgggagctgcagagacccgcccgcggtgccctttggggctgggcggtgcggctgcccctgcggcccggagaggccacgtgatcaggacggcccagggaaccccgcgggagggccaaaaccc

SEQ ID NO: 41703 - DNA, 272 bp, Mus musculus
  source 1..272: mol_type = other DNA
ttcagacacttacagagtgacagaccgtttgaaacaggctggttcaaggccagcctggtctacaaagtgagttccaggacagccaggactgcaaaaagaaaagaaagaaaggctgttttagcttcttctcctgcatttctaccggcagaaacggccaaacctagatgcccctggggatgccagtgtaaaggccgtataaaggtcctggacagctgctgtttttagcaaatgggctcccatcggttggtcgatcgatgcgttcggcgcgcagc

SEQ ID NO: 41704 - DNA, 346 bp, Mus musculus
  source 1..346: mol_type = other DNA
agcactagaaaagcagaggctggaagtttcgccacttttcagaaattcctacataattaaaaagataaaaatgcactgagggccactccagtgttttaatcatgaatggttcccaaactgctcagaacgcccgaacggtcccgggaccgaaccgttcccggctgggttaggggcggagtgactggggcgaggcttctgacacaagtcctgcgcccggcgacagtcacgcggaccgctgcggcagacctgctcagggtgcttgaacctctcccactgtgggtggggcgtcgaggcgtagcgtgacgttccgtgaggccccgcccgctgaactggatggacatcccgt

SEQ ID NO: 41705 - DNA, 426 bp, Mus musculus
  source 1..426: mol_type = other DNA
caaacaaactcccaagtctgtttctttcaaggtatctgacaagttgtaaatatttagccaggagatatgtttttgtttttaaagtctgatagcctacgagaaaagcacaactggccttccgtcccgggagtgtatttcttcctgggttcccgggcgggtcccactgggcggctccaagcagcagcatcctcacgtggagccccagaggcttcaagtgaggagtgtccatcccaggtgagggtgaccgcaccccagtcacagcccgcggggagagtccgggcgcggcctgctggaggctgctccgtaacggtacgcggatcgcccagggccccggcgtgctccagtgcccggaagcaacgccgcctggggcccccgctccgagccgggtcccctggcggcgcgcgctgtcgcgatccggtgcgagtg

SEQ ID NO: 41706 - DNA, 540 bp, Mus musculus
  source 1..540: mol_type = other DNA
gcagaactgctgtgcttgggctccatagcccgtactataactcttagagatggatcatccattcttaagcttacagtgtgtatgctcttcattactgcctttgggagcagagcagacatgggttttcctcctcgtggaccaggtccaacaactggacacactgaggctccaaactgtggccctctttacggacctcgcgcaccgaggcacgaagatcgcggcggatacgcagctggctgctccgggacgggcgcaaggcagcccgcacaagctgctggattggctcctcctgaggggcggtggccgccgccgcctcctggccctctggcgtctcccgagccgccgactcgacctcgctgctccgggggcgtttacaggccagcacgagcgcctcggcgggctccgcgttgcgcttccgcttcacgcgcaacaccgcagtcctgccggcctccatagcggcgatcgcggagtactgtggggcgcggggcgcgacgggatgtccatccagttcagcgggcggggcctcacggaacgtcacgc

SEQ ID NO: 41707 - DNA, 427 bp, Mus musculus
  source 1..427: mol_type = other DNA
gaggccagcctggtctacagaaaaagaaaggaaagagatttccttaattgtccttaagtgtaggatccagttagatactatgtattatatttgaaaaaacaaggtttcccttggcaactaggtcagctttggttgtgaagagatccttccaatgactagcatgtcaacttgacacaggctagcgtgggaaatttcttagggcctagccattgtataacccctgggctggcagtcctgggctctgtatgattatcagagtgtggaagcatagcagtagtgaccgtagctaagacagtgctgctctgtgaggagagcagaaactgcacttgttctaagttacctcagaagaccactgccctcagtgatgtggaagtttccagaaagcttttgggtaggcacttagagtctgtgccatgtctctgtgcag

SEQ ID NO: 41708 - DNA, 470 bp, Mus musculus
  source 1..470: mol_type = other DNA
taacaagttaatcggctgtcctggaactcactctgtagaccaggctggcctcgaactcagaaatatgcctgcctctggttagtattttctaattcaaatttttcctatcaaggaagactttgtatgtgtgacttcaagtatttattaacaaatttacttgtacttttaagggtagaaattttaccagcataaaataataaatgaactattgctttgtcataattctgcagtagactcagttccccacagagttctccagacactgctgaggcgtgaaggacgggctgccagtgcttgagttagagttacctttgtttcagaaaagtataacccttcaactccagttggtttgcatccaggaacctgaccgcacttggagcctccagggaccgtagtctcacttggagctacaaatccaaagggtcacctcaggtaccggtctgtggtctgagcaggcgcatggataagct

SEQ ID NO: 41709 - DNA, 258 bp, Mus musculus
  source 1..258: mol_type = other DNA
ccaaagttcagaacgacagctttgctgtgaactcactctaccagaaagtactcgctctcgattggctccaccgccgctcgttacctcttcctagacagggaaactgaggccacatgtggtcttgcaagggtcacttgggcggtctctgggggcgaggtcccaacggagggaccggaacctcccaataggcaacctcctgggcggatcctgcgtctccattggccagagcagctcgcgggagagcggaatgaggcgcgg

SEQ ID NO: 41710 - DNA, 299 bp, Mus musculus
  source 1..299: mol_type = other DNA
gtgcgatgggccattcatacatgacaataataaataacgcaaaaatctccattgtttgcatttaacataaaattaaggaaacaattatatttggctttgaagttagggagccccccgcccccgcccctgcccctccccggcctagtgtgggaggtagagacacgccctgccttcatcaaagctttgaacacagcgccccagcaatggaataatcgaagccagagacttcgagagtgccttcggcaggctggcctcgaccccacctgcgagggggcgggacctggcctcctcccgcgggc

SEQ ID NO: 41711 - DNA, 303 bp, Mus musculus
  source 1..303: mol_type = other DNA
gtgtactgtaatgttgctttgaagataaaagcatgatctttcattcagcattaaaaaagataaaacttcatattgcctgatcttatgagatacttcttttgtggctaattaaaatgttcaaagaggagactacaacgatggttgtgcaactctttttatgtactaaagtctattgaattatacactttagtcattcgtgcatgcattgtttattagcccaggctggtcttgaaccacagtttaggataaccttgaaagaatttctagaagctccgcagccccccactaggaggcagggcgcga

SEQ ID NO: 41712 - DNA, 331 bp, Mus musculus
  source 1..331: mol_type = other DNA
gtcccaagctgggttacctagtcctgagaactggaacaatgatgagtttaaagccatgctgggctacatagcaaggctatgtctcaaaaggtagaaaattagattagcctggtctggtaccccacttgtgcaatcccagcattcgggagagaagcacgtgcgtttgcgagcacaggatcgcgctctcgcccgcgcacgcaccgagcacagctaggctaggattcgaacgacgaggaagttgagggccctgcagttccttggctgccacctgcaggtgcgtccccagccaatcagcggcgccgggggcggtgcctgcgggctcacctggcgg

SEQ ID NO: 41713 - DNA, 372 bp, Mus musculus
  source 1..372: mol_type = other DNA
ttctttcagtacttgaaaatttacatactaaaatgtgtattatttttacgagaaactaccccctgggttgaagtactgaggacgtgtgtgttattactggataacattgacctttggttctaagtactagacttaaagatacatttttttttaaagattttatttatttattatatgtaagtacactgtagctgttttcagacacacccccctatattttcttttaaaaaatattttgtaagttatgcttgtgcatgcgtgtgtatgcgcatgggagaacacaagaaactgtatcttgttttttttttttttcccggggggcgttccagacagagtaggccccgccccaggtcttgggccccgccctccagc

SEQ ID NO: 41714 - DNA, 375 bp, Mus musculus
  source 1..375: mol_type = other DNA
aaattcatttttaaaactagtctttaattacaatttctcttcaggtgagatgtaaaacctcgagatctccagctggttctagagtttctacgtttgggctttaagaccggaacctcctagcttttgcaaaacgattttgtaggtccccactccgctggcccggaggtcggcgtggagcagctgagccttgggctgcactgggcagaggttgcgactctcgattcggaggggctaggtccacgacagaccccgagtctggcgagcgccagccggtggccgggcaccgggcgctcccgcgggctccgggagccctcccagccctggtgccggaggagggcgcctttcccagtgggtcgcgcgcgatacttaaggcgg

SEQ ID NO: 41715 - DNA, 371 bp, Mus musculus
  source 1..371: mol_type = other DNA
aataatgctggtgtgccccaattcctccatctttttggaggaagagggtttgagaccgtcccagcactccggaggctgagacaggcggatttctaagttcgaggccagcctggtctacaaagtgagtttcaggacagccagggctatacagagaaaccatttactgagtctgcaaattacagacccactatctagcagctacctgacacacacctactgggagtggaaaaagcgcgcggggtgtccgccagccctgctctcccaggtccacggagcggagtagcttcggtccgcgggcctccgaccccaggtgaaccccggccccacgtgcgcgcttgcgcactcgacagcgccgtcccggaagtactccg

SEQ ID NO: 41716 - DNA, 336 bp, Mus musculus
  source 1..336: mol_type = other DNA
gatccggcccgcgcctccccaagcgcccctggctggcggcgggctagcctcggcccgcgcggccctcactctcccgggcccagcacgcgccattcttctcgccgagccgcgcgccccgcccggccccggctgcctagctggcccgccgcggtccccgcctccggcctcgttccccgcggcctcccgcgcccctccgcccgcggcctgacctgcaatggcggccgccgagcgcggcgccgcgcggccaacgggcgacaaccgaacctcccgccgccgtcgccgccgccgcgagcattgcctgcgcacttccggcctcgcgccgcggagtacttccgg

SEQ ID NO: 41717 - DNA, 534 bp, Mus musculus
  source 1..534: mol_type = other DNA
agcatgctgcaagtggtgcttaagaaggctcagtgggtaagagcacccgactgtccttcttctggtgtgtctgaagacagctacagtgtacttacatataataaataaatctttaaaaaaaacccctctaattacaggccagcagacaggtgattttaagtcttggatccacacctttgatcccatgtcaccaagactaaccaccacagagaatcacacctagctggttgcctctgttcttaaaaggagcccagcacacctctgagcgctcagggctgcttttttttttttttttttttttttttgcaatgaaccaatcaatgcaagaatgactgcaggatcgcaaagagcctctctacaagctgactttgctctccctgcccgggcagctctcgtagaagagaggacggcggggtgcctcgctgcacgaggcgctgcccaccttcccggaagcggcctcgccggccttccccccgcccctccggaaagtgggcgtggcatcgccggggggaggggaggggtccgcccccctcg

SEQ ID NO: 41718 - DNA, 425 bp, Mus musculus
  source 1..425: mol_type = other DNA
ctctgagacaactataagaagtctgctctcttcttgggatattagctcatttgtcttgtgcacaagtgcttttacctgctgagccatctcgctggcccagaaaagttaacagttaactagcacaaaggtggtacaagcctactcagacgaatcattctcttatacccacagtgtgacattcactatgtatacattagttcattcatcaggcaaggtaaatactaattaacataacctattaaatattggtcggccccgcccacctgggcttaccggccttcgggctggccctttaccggtatcccaccagaccccgcccccggcaggccccgcccctcttagaggagcggtgtctgcagttgcaggccatggccacagggcggcagccgcgtgactcgggctgggccgctctgggccgcgctcct

SEQ ID NO: 41719 - DNA, 378 bp, Mus musculus
  source 1..378: mol_type = other DNA
tccagtatttacttcctggttgtattaccagcctggtctatagagttcaaaaaacaaaaaacccaaaaagatgttcttgttgtattgaaatatgtaaagagagaaacagttttctgtttagatgagcaggagctggggccggacctcgtggccccagctccagagctccctgcggagcagcggagcatcaggggagccgctgcctcaggagcccatggagggggagccgctgccagccgagccaccgaggagccataggcagtgtcccctgcccgcagcctggggagcagccctgagggtacgcgcttctgcagcgtttaataaaaccgacaactgtcgccactcgcctgctgttcccgacgatgggcgtccgtggcg

SEQ ID NO: 41720 - DNA, 412 bp, Mus musculus
  source 1..412: mol_type = other DNA
gaccagcgcacggtggaggcctgttttcctgtagacaactaggctatgcagctccatggccataagaaactcgttggaaagaatgccgtcacccgggacttcatcccggatggcaacctggagaccaggcccccaccaaaacacgtccccagcgacacgagcttgtctccggagatgttggcggccagcttcagcatcatcccagggatggatgcacgcctccagcccgccacgcagtgggcagcacgtctgagccgggaccgtcccgccccggagccgcatgcttggctcccgggaatcctcgtgcctggagagccggaagcggaagtcacttccgcctaccgtggcggacttccggggaccgaaagccggagagacgggaaatgtttcccccaatcgtttccgtttccca

SEQ ID NO: 41721 - DNA, 667 bp, Mus musculus
  source 1..667: mol_type = other DNA
tcaatactcagacttgctcaagtgtcaataagactggctgaatgtttattatttaaacaacagcctatgagtggactcctagcttccaattcttgacctacctagatgccctgtacactacgcttgggtcatgacgatagcgtcctggcagatacaatgacgcgcccgtccccatcaggccagccgcacctgcagctctgctggaagcggggcagacggtcgagcaggcgcccgagggacgcctccacgtcgccgaagagccggtggatgcgctcggtgcactcggccccgcgcaggtcgcgcgtctgctgcagccgctgggcccgctcttccgccaagcgctcgggttcgcgccgcagccggtccagcccggagccgctcagctcccggaggtagcggcccacgtcgggccggggaagcggtcccggaatagcgacgccaggaggccctcatcttccacctcccccagcgcgacggccgtggctgtcgtcgtggccgaagcggtcggagggctggagagggagagcggccgccatctctcaagcacggtaccgtcacttcctcttcagagccggtttcgctcctgggaaacggaaacgattgggggaaacatttcccgtctctccggctttcggtccccggaagtccgccacggtaggcggaagtg

SEQ ID NO: 41722 - DNA, 359 bp, Mus musculus
  source 1..359: mol_type = other DNA
gggtggaccaccttgttcacccttagcttgggtttctatcaatgcaggacgtggacctgcaatgtggagcactgctgctgctgtcttcttatagagaccaggaccagcagcctgtgagtggccccacccacagcgcagtgggtggaccagcagcctgtgagtggccccacccacagcgcagtgggccctcgcgttttctcaaatgaggctccctcatctcagatgagtatagcttgtatcaagttgacataaaagccttcttcgtacactaaaagatctcagcacccagaggcaggatttctgagtcctgcactgcaccaagtggtgcatggcacctgtattacagaagatctacaatg

SEQ ID NO: 41723 - DNA, 443 bp, Mus musculus
  source 1..443: mol_type = other DNA
aaccaacttctaaaagttatccttggatctctgtgtatacacacacacacacacacacacaccagaaatagtaactcagtgcagacctgtcaggatatcaaggcagatagtttagctcctgttaagtacaggctgcagtggctccaaagccatgtgagttcaaaactagcctgggtaactttgcagggcctgtgattcccagaacaaacctatgttttaaaaactgcaacacagaggcagagttacacagtgagactctgtgtcaaaacaaaacaaagtaatttctttctactgtactgcttttcacaatttgcgaaatgtctaacattatgcacgcgcttcaagtctgcagcgtagtcttcaaaatagcgcgcctggctgggctgtgtggactccaatccccagcaagcattgatgccgaggaggtgggtagaccccccgcc

SEQ ID NO: 41724 - DNA, 366 bp, Mus musculus
  source 1..366: mol_type = other DNA
atgggaggcagaggcctctgagttcaacaccgtgaaacattttaggatgatcagcctcttagttttaaagagaaagaccttgcacattaacttagaattccaaattacctagacttttagcaagggtcatttgaagtattttaggccatttaactaaaacagtgatcctgatcactgaagaattcagttaaagagccatggagtccaacgccacttgcttgtaaccccgggggctgccattcggggacccagggttcttttcttttagggccgggcctgcccatgggccgagcagagagaatgctctcctgtggtgacacttgtccgccgattggccagtcggacgtcggaccaggtttacccggt

SEQ ID NO: 41725 - DNA, 310 bp, Mus musculus
  source 1..310: mol_type = other DNA
aggtgcccacagaagccccctggctgtcttagatctcactctgtaaaccaggctagcctagaactctgagatctgtgtatactaccactacttggttcaagtatctgttgttaacaatttaatatctgacattttctcctctatccaagaacaatatgttgtgcagttctggactgcacccgccgcatatttgcggcagagttgagaaattttttcttgagtggataaatgaataaactgtaatatatcccaaacaatacagtagtgccaggactcaatgacgcattgtgcgaatttgagttttatgtga

SEQ ID NO: 41726 - DNA, 502 bp, Mus musculus
  source 1..502: mol_type = other DNA
gaaaatattttcattaaaaagaatcaataaggccagcctgaccacaaacaaaacttggtaactcgtgatggtgctttcttaattaaaaagtgagtgtggaactccattccccagtgctgagctccagcgagcgggcctcgatcgctgcaagtccctggagggcttttcccctcctggctgacatccccaggtacaccacggagcagggccggccgcctcaggctcgccgccaccaggtaaaaaaaaaaaaaaatcttttcccttctcagggccccagaagccaggccgcctccctccaccctccctgctggctggcggggccctttcccagcccgggatcagcagcggccgcagcagcgacggcaggaagcgaagcccttgttgatgccgcctgtccgccctccgccggccgccaggctcttccgggctcccggacctccccccctccgcgcgtgcgcagtgccccacgagggggcggggctcagattcctgtcagcggcgc

SEQ ID NO: 41727 - DNA, 321 bp, Mus musculus
  source 1..321: mol_type = other DNA
acacatacatgtaggtggcctaaactcagaggaggccagcctggtctacagagtgagttccaggagaaacaccccgttacctggtcaccgggggcaaagttgagtctctgaactttcagtctagagtcacagtgagtcggcaaaatttgagcccagtgcaaaggtgacttcccacggctgagtgaggactaatctacaaaatttcgggacagggagcagatgaatttattcaatatgtccccatatttcccaagatgcctctgggttctggagtccagccccgccctcgctggctgctctgcacagtgggctgggcgggca

SEQ ID NO: 41728 - DNA, 415 bp, Mus musculus
  source 1..415: mol_type = other DNA
ctctgtgtagccctggctgtcctggacctcactttgtagaccaggctggcctcgaactcgggctcctatttaagatgtttggggatgcagaaaatatttaagtcataggctcagatcagcgtcattaatagtcattactaccccttcttcccacacaacggattttaaaaagtggtttatctggccaagtcagcttggcttccttgcttgtaaaatcggttcaatatctacaggtttttcctttaaaagtaaagaaagttctatgaattccgaggacgattacttaaggagtccctctgcacatagccccccaggcagggcaagcggcgcggctgtgtatgcgggggtggccggtggccgctagggggcgccgcgaaatcgcagcagctgttcctccggtctgaggcgcagcata

SEQ ID NO: 41729 - DNA, 251 bp, Mus musculus
  source 1..251: mol_type = other DNA
cagtgtttgtcacatcccctgcgctgtgggaaacattcacctctcagctcaaggactgctaatgctctgagcagacatgggtgggaagacaagcaggtgcgcagcgcaagctggagtgcttgctcctggcagtgcgtgacgtagctctctggaaggtaccacatagaactaaaacctaaatattatattattttatggtctcattaagttattataccttattagaaattaaatgaagatactggtaggtt

SEQ ID NO: 41730 - DNA, 362 bp, Mus musculus
  source 1..362: mol_type = other DNA
atgctgtcatttccatgctagtcaatgtcatggtgtgatggcatatgactttaaagcagggctgtgacttaaagtgttaagtaggagcacctgactgctcttccgaagtccgagttcggatcccagcaaccacatggtggctcacaaccatccatctgactccctcttctggtgtgtctgaagacagctacagtgtacttacatataatagataagtaaatctttgaaaaaaaaaaaagaaagttaaatatatgtcgttaattatttgattagtagaagtacacgctgttactacttatgttctttctcaagatggcgcccctggcgacagggcgggcacgagcgcaaagcgctctgggagc

SEQ ID NO: 41731 - DNA, 295 bp, Mus musculus
  source 1..295: mol_type = other DNA
ttcgctgggttccaggtcagccagggttacttacatacccatggaatgccttacaaaggccagggcatttatacaccaaaacatcctttgcaaattcaagacttgatccatggcgggaaaacaaagaccccggggcccggtgagcccttattttgctcgggcacagcccgggtgatccttgcaatcccggccctgagcgggtcaaacgctcgccgcccgggtcctaggtggtccgcacctgcgcgccccggccagcctcttccgggtcaggtgaccgcgcacgcccacgtgaccc

SEQ ID NO: 41732 - DNA, 193 bp, Mus musculus
  source 1..193: mol_type = other DNA
tgtattttttttttttaaatatagcaagacagggttttactatgtagcccatgaggatcgaggcaccatgcctccctcctcctgcagttaacatgcctaggaaaagaaaaccacagaagttcactgcattcgtttgtatctgattgtagtgttcctctcagaggaaactcagattttaaaaatggtcatccct

SEQ ID NO: 41733 - DNA, 412 bp, Mus musculus
  source 1..412: mol_type = other DNA
ccttccattttaaatttggagcagaaattcttctggagaagaattaagtctcttagctttctggatgacaagaaattaacagtgactttcatgatttgtttcaggatgttcttttaaaaccaagattttattgcaacagcaactttaaaaaaaagtttcctttctttcgtataagtgataaacttgatagacaattaactacctgataagaggagaaccggggagactcagctgaatcggtttgattctggaaatggtttggctcaaacaaacaatctaactctttgtcccttagtcagacagaattctacgggaagttttgtgtgtttgacaaagtggatcactcgtaaccttctataaaggtatatggccatatgcttaccttagggaaacccttcgcagagtctgctga

SEQ ID NO: 41734 - DNA, 465 bp, Mus musculus
  source 1..465: mol_type = other DNA
tacttttgagaatatgaacatagacacaaagacctatgttcatgtctgtcaacgtagtagtcttgcgaactatcttatacagctactaagaaaagattcggaagcagtatgtaaagtctgattcttcttttttgtaaacgtgtaatgctttcataggataatggaaataagcatcctaagatataaccaaaggacatatctgaacatgaacttattttcaaacttgtggcaatctttatgcctaaacctcacaactgctgggattacagcggtataatctacgtcagggctgacgtctacaaaacacccaacgcatgtttttgataagaacctggtggttgggttccggttcacaggtgccatggaggacacttcggtcacatgtcagcactggccgccagcgacaggaagtgacgtcatttccgctgttcgcggggttgcactctggcgtcccggaaccctgga

SEQ ID NO: 41735 - DNA, 314 bp, Mus musculus
  source 1..314: mol_type = other DNA
gtatatttcataggaataatgaaaccaatgccttctaatttcccttcgaaatactctttggaatgaaggcaatctagaaaatgatgtggattttcctggagagaaatctcactctcaagaacacatctgtagtgtgtgatgttcactaatatcccctttggagatcaaaggaagttaggtgcgattgtataatttctttgaacccagtaaacaatgagcagaaatgaagtgcttcacttccgttagggtttgttggtgtgaaatcacccaacctagccttaccaggtaagatggagcgatgtcatccatgatgc

SEQ ID NO: 41736 - DNA, 335 bp, Mus musculus
  source 1..335: mol_type = other DNA
aaaaacaagtttcctcttagggttaatactctacttatagattatccgccagatctagtggagactcttcgggtaccaggttcgcgtactgccctaaacgagggcacagggaggacccctgaatctccgtggggccgccgacaccggccgcctggagccgccatggctgccgaggccttcggttcctgatctggagacgccagcgcggccaccgctcgatccgagcgctgtttgaaagcggcataatgccctgcgcggatccagggttccgggacgccagagtgcaaccccgcgaacagcggaaatgacgtcacttcctgtcgctggcggccagt

SEQ ID NO: 41737 - DNA, 255 bp, Mus musculus
  source 1..255: mol_type = other DNA
aacgagtgaagccatttagattgagttgctatcagctggtgaagctacgatgtctacactggatttgaaaatggttctgagataaacttttctcagcactgaaaactccagataactatagctttagacactctgagattaaagaacaatggatcaagtttgcaagttccagagctggaaaaaaggaaaacactttctttacaattcctccaccattgtgggctagatttcttcatgatttgtaaaaataacaca

SEQ ID NO: 41738 - DNA, 548 bp, Mus musculus
  source 1..548: mol_type = other DNA
agcccaataaactaatttgtgcttcaggggaaattttgttagccacaaatgtcatgatctcattgcagaactacaatttttctatgcaaatattttgctgggggaacgatctgaacattttatgggaaccaaatattgtgtaattctaaggtcctagtatcctggagctttgaacagctgtggcctcatagggccaagagccagagaacaggaaggctctttctcgctttcaagcccagggaaagtcggctccacagcgcccctccgaggtcggagtcccaggaccgaccgaccgaccgaccgaccgaccggtgagctaagtccagactccgctcggatccgcggcagtctgcagccggtttttccaggggctggaagaatctggccacccgccccgccgcgcccggggcaaattgcaaggcgcgcccttagcaaatgactcaacccactgcgtgacgttaagtgtcacaagtcaggtccgcagccaatccctgctaggtagggcgtggctaacaccctgttcctccgctcgagtccgcggtggggag

SEQ ID NO: 41739 - DNA, 494 bp, Mus musculus
  source 1..494: mol_type = other DNA
gagatcatgttacatgaagcaagccaatctcagactgctaaatatgctttttttcttgtatgcaggatacagaccttaaaaggacttatttttagaatttatgtgtacacacacacacatctacctgttggtatgtcctcgccaagaacatcagctgaccagaggattcaatgcctcctctggcctctgtaaacgcttggcacagaggcagtgctgaggcaggattggtttttagaaaaacctggcctacaccataagattatcttaaaaataaaaccatatttacttatcaacacctcagagtttacttttaaagtagagacagggtttctccatgttgtagcctaggctctcctggaactcattctgtagaccaggctggccagagatatgcttgcctttgcctgccaagcgctgggattaaaggctaaaacagaattcttaggatttctgtttcagaaatttgtttccttcccagggacagggaagcatta

SEQ ID NO: 41740 - DNA, 259 bp, Mus musculus
  source 1..259: mol_type = other DNA
gtaagaatgctttatgcaaacacttcgactagtcattttatcagcaagagtcagcactcttgtttgttctgcctcgtgaagccgcaaatactctacagggctcctctttttacagatcgcgggcggggcccctctggaacgcccgcgattcgaggccccgcccacagcgccaggcgcgcgcctcgggagccgggaggggtcggggcggcggcgggaggagaggtgaggctccggcacgcgccccactcgctgcgagagc

SEQ ID NO: 41741 - DNA, 390 bp, Mus musculus
  source 1..390: mol_type = other DNA
ctggcagttgccttgattgtgtcttatcccagcaacagaaaagttcaagttcaccctaaactacacagtgagttcaaaaccactctgagctacttgtgaccctgtctctaaatcagccattcatttttgtgtctgcttaagccaatcaaactttcattcaagtatttagtatgaactggcaactttacaaggctcttgacccttgaaaaggtctgggcccagtaaattctggggcatcataaacaagtggacttctagtgacagcttgtgaaaacttctccggaacatcacctactccctggacccattcagtgggacaggcgtggcggccagtttcctcctggcgctcccaggccagggtgacgtcatctctccgcgtcgggggggggg

SEQ ID NO: 41742 - DNA, 475 bp, Mus musculus
  source 1..475: mol_type = other DNA
caatctatcggaaagattttattctaggtaagttagtaattatttatcgtcattagttcattcaatcatagatggaaaagctattctggaagagttttagggtttcatctttttacctgttttcgcaaaaaaaaaaaaaaaaaaaaaaaattggagcatgtttctaatgttgaccagaaacctctggccgtgcgacggctccagggccgggccggagcgtgctagctcagactcctcgcagcggtgactcggcagcggcgtcgagcgtcatcagtgacagccccgacccttgcgcccggcgcagtcgcctcctcctcggcaaatagtcctcggcgggggccgagtcctcgggtcatccgggcggggcggccggcgagagggagccggggagcggcgtctcccggggaagcgcgaggcgtgaggtagaggcgccctcctcgcccgggatccctccgcctgcagtcgcggtgctgag

SEQ ID NO: 41743 - DNA, 415 bp, Mus musculus
  source 1..415: mol_type = other DNA
agaaattcaaggtcaaaattgtatggctagactattttgaaatccttgcatgaaaaacgaatgtctaaaagatgcaacttcctgtttatgacactcaaatttgaaactcaggatttttttgtcaatctatcggaaagattttattctaggtaagttagtaattatttatcgtcattagttcattcaatcatagatggaaaagctattctggaagagttttagggtttcatctttttacctgttttcgcaaaaaaaaaaaaaaaaaaaaaaaattggagcatgtttctaatgttgaccagaaacctctggccgtgcgacggctccagggccgggccggagcgtgctagctcagactcctcgcagcggtgactcggcagcggcgtcgagcgtcatcagtgacagccccgacccttgc

SEQ ID NO: 41744 - DNA, 752 bp, Mus musculus
  source 1..752: mol_type = other DNA
gattgtcagccaagcaggagtgccccttcgggcgtccacaggcagcagatcctccgggactgtcccccgagcgggaagcgcggggtgttgcgtcttggagccgagagccggttcggaactcccgcagccagtcccgagggcagcgtggccgctcccgccggcgcagcccgcgcacaccgcggcgcctggccaatcgccgccgccatcctccagctggggtgatgtcttcaggtgtccgccgagtcctgcgtactcgccgcctgactcccgccaggcgcggccggccctcggagccccccggaatccgtcccggggccccgggctaggcccagcgaggagactggcagcggctgcccgaaggcgtgggcctgccgggcggcggtcagggatggacagcgccggggaccagggcggcggaggccagggcgggggcgcggcccggaggccccacagcaggcccgcggcggcccggccaagtgcaagcggcccagggacgcagggcggggggcgcccgccgcctcgggcagcttagcgaaggcggccacagccctcttgacccgaatccctccgggccggcgaggcgccgccgcttcaggtggctccgggggctccagcgggcccgcgggcacgggctccacctcccccattggcggccaaggatttacagagacgcccggcccggcgcgacagcgcgagcctcggaggcgcgcgcgagcagcgggaggcctcgcccctccgcctagaccagtcgt

SEQ ID NO: 41745 - DNA, 347 bp, Mus musculus
  source 1..347: mol_type = other DNA
tgaaaaagcatatatactgtatttttttctgttcgaggccagcctggtctacagagtgagttccaggacagccagggctatacagagaaacccagatgtgtgcatctcctcatctgttggacagcttattcagacagagggaaaacttccttgagttttacattttagcttatttattatgaaacattgttctttgctctgacatctctgttgaagactgtgcagacagatcataacgctgtacaggaaagagagtctctctccagcctggctaccaatttgatagtttgttgaaattttgagagccaagcacaagtgttttcccactgtgctgacactcacattgc

SEQ ID NO: 41746 - DNA, 398 bp, Mus musculus
  source 1..398: mol_type = other DNA
ctaccactagtgttgttagttgttttgtgatcaaatacaagctgctctgagaatttcctattctttaaagaaaaaattaaaaacttcagacttctgaacagttttgtaccctaatgaaaattaagctgcagagaatttgggacgacgacgacaatggcaatgataaatgcccactgtcaaacgtgattctatctgtgctttgaaaatttattaaatcacgtattcatttatctctgcatctatttatctatccttatactaacctatttgaattcccattgtccatagcaaacattttaatgcatttctgtactgttaacacaatagttttcataacaaaataaggacaatacgtgatgtgtggaccataagggcttcaggcccaacgcccattggct

SEQ ID NO: 41747 - DNA, 370 bp, Mus musculus
  source 1..370: mol_type = other DNA
attttctgtctcaaaaaaaaaaaaaatccaaagaattagatcaagtaatttgtacatgtatagaatgtatagatctaataatgagtatagaattcgaggccagcctggtctacattggaattggaattaggcagacttataatttggcccactttttaaaggacactgaactgtgcctgcagttctttcacccccagtgggtgccaggggacaaccgcttcttggaggatccagaaagtaccaaattgctctccctgcgccctggtcctaggagctcagggtggagccggcctcgccaggctgacgactggtctaggcggaggggcgaggcctcccgctgctcgcgcgcgcctccgaggctcgcgctgtc

SEQ ID NO: 41748 - DNA, 245 bp, Mus musculus
  source 1..245: mol_type = other DNA
ccttattattgcataaaattggacaggggctctgtgcacactaatcccaatatttataatatgtaagataggcactgtcatgcctattttattggtttagttggatacattgtatccactctggacaatatgattaagaagttgtaattttctataatttgctttttgtcataaaaggcaaattcttccccctttaatcatctttgtaagggatccacctggaggcagagccttctgagcctggc

SEQ ID NO: 41749 - DNA, 212 bp, Mus musculus
  source 1..212: mol_type = other DNA
acgtgtctggtttttaaaaaatgttcttggcaaaattaaaggctactaataacgagtagaacagttcttttcttttcttttgggggaactcgtcatagctgctaggagtgaggtcaccccacccaaggccctgggagcaccacgactgccccctggcggccagtggcaggtgcgccctctccgggccgctggagggcaagtgcgcgtgcgca

SEQ ID NO: 41750 - DNA, 296 bp, Mus musculus
  source 1..296: mol_type = other DNA
atgttgggatcttgtaacaggccattgatctctgtgcagccctggctgtcctggaactcactctgtagaccaggctggcctcgaactcagaaattatatcttaaactttgatttaggacttttttgatctgtaaaactataaaactgacttaaatttggtttgagaataaactatctcttatcccctttaaggtaagagttgtttaggcctgcatgacattacataacatttatttttaaatggctctactccaggagtaagggtcctaagacccatggccgcactcctagagggg

SEQ ID NO: 41751 - DNA, 374 bp, Mus musculus
  source 1..374: mol_type = other DNA
ggttagctccgagctcagctcagctaacactcattagcacatgttaatgagcagaccccacggtgtgctgtgcttgctgtctgttttctttaacagaagttcagcagggaggctccagtctgctactacctctgcaggatacagtggagtagtcaatcctggtacccctcgagggaggtcaaatcttagctttggagggaagggaaggcaggagctgcctctccccatttccctgcggtgtccccggagggcacccagacctggcagagaagagcccccgcccgtgcagcgccgcgccctgcgcgattccctgagtgtgcgcgcccccttccggcggcccgacgcggcgcagctccgggctgcatataaaggca

SEQ ID NO: 41752 - DNA, 306 bp, Mus musculus
  source 1..306: mol_type = other DNA
ggaggggccagttctgcaaagagccatctccctgtcttctcaaaagagcgtgtgcatacctcttttagtgcctagaatattcccttggtgactaatatttggccaataatcactgatcattagctatttttaatttttaaattttttttccgaatgagtaaagaaagatcactagtaaaaatctttgggaggtgttttaagggctgatttaactcctaaaagaaagacgggggaattgctttcagttccttcagcacttaactgaagggcactgtggaaatggggatcccactagagtgtgagcca

SEQ ID NO: 41753 - DNA, 523 bp, Mus musculus
  source 1..523: mol_type = other DNA
ctcatctctgtcaaagttctgagaagtgactgacagctcagccagcgctttcctctaaagctgttacaataaacgcacagcagctgtggctaccccacagctggggaggtggagacaggtggataccagtgactagctggacagtctaacctaactagagagtcccaggcctgagagtccatcctctggtatccctggctgacatggaactctctatgtagaccagagtgacttagaactcagagatctgtttccctcgctttttccttggtttattaatatgtaaacacaccaagtgatgatacttccgtttctttaatttatccattgagcttcaattttaatgtcgcgtcgatgcgcgtgacgataggcctcccggaaggcgcctgtgcagtgtggctgtcagagcctcgcagccggtggctccagttgcgcgtgcgcaggtccgggcggtcttccaggcgctccctcctctttgtccgcgacccggttgccaagtacgcagaggagacgccacccccgg

SEQ ID NO: 41754 - DNA, 417 bp, Mus musculus
  source 1..417: mol_type = other DNA
tcaaggccagcctggtcttccaggacagccggggctacacagagcctcggatctccatacatatgtacacacacatctgagtagcacatgtgtattaaatacaatgggtttgactcgtgacgcttgcctgatccctgcactcagcagataaaggcatgagaatcgagatttcaaggctatcctcagctatagagagagtttgagaccctgtctctaaaataataattggattagaggggtggggacccccacatggtgagtgggtggggagatccgactccctcccaagttgccctataaggcgctcgttggtgcaaaagtgactgttaagtgaccaaagaattaatgcataaattaaatttgagttaggctcccgctctgcgcaaagctctggcagtgagcttcggtcggcggaag

SEQ ID NO: 41755 - DNA, 392 bp, Mus musculus
  source 1..392: mol_type = other DNA
attcccatatgaatccagggaccaattcttcccaggactctttgacttagctcaaagaaccgcgtctgtgccccatgagaataggttcacctggagtctcctggacgacaggaagttgggccgggaccggtaattcatcaggccgggatgcactaaggactgcatccttggcgggtcgagcccaaggccttgaaggtgcaaacccgggtccgctcccgctggagggtggggggctggcccggccccgcccctgcgccgccccgacccgcggcggcgcccgctcccgccggcccctcttgccggaccagtctggcagcgccagagctcggatttcaaagccctgtggcgtccctccgccgcgcccacgtgacgcccgagcttcggcggctcgg

SEQ ID NO: 41756 - DNA, 494 bp, Mus musculus
  source 1..494: mol_type = other DNA
ttgaagacaatatggatttcttccaagagaaaaagtcttagaccttcaagctaaatagaaaggaacttctcctttaaatgagtcgagaagaaactttcgtaacttttcacttaattcggtatacacatatgtatgtgtgcatgtaatacatacatgtacgcgcacacacacaggtcaaataagcttgagtagaactgacacccaactacattaaagcctcttgggaagctgctttctcgttttccctggtaaagaggttcctgcagctctgtcagagagcgaatgagctcggtggagatttcggagcagtgtcctcctcccaccccctccggtggcggaggagctcctgacaatttcagcggagactccacctccgcccggtgggcggcggtgacctttggggctgcccacagatatgtggaagtctatttttaaaactaaccttctattttacagaaaacttaccgtaacgtataaattttagataactcata

SEQ ID NO: 41757 - DNA, 220 bp, Mus musculus
  source 1..220: mol_type = other DNA
gacctaagggagggcaaatcacacggtgagaagtctttaagctggctctccctcaatctgctgggccttggggagagacaggcaatattgggtgcctacaatattgcacatcaaatatcgtttatctggaattcagtccctggctggggacggctgccaggctgacttgggagactcactcactccttggctccaggcagccaccgaggtgccttggagt

SEQ ID NO: 41758 - DNA, 403 bp, Mus musculus
  source 1..403: mol_type = other DNA
gaagtgcagtgagtgctcttaactagtggagctatctctccagtccctaaaataataactttttaaaaatccttcttaagctcgaggccagcctggtctacagcatgagttccaggacagccagggctatacagagaaaccttgtcccatcctttttaaaaggtcaaaataaagggattgtggctcacaaccatcatgggattcgatgccctcttctggtgtgcatgaagacagctacagtgtactcatattcaatcaatcaatcaatcaatcattcaattaatcaatagttaagaaagacttagctttaataaaaagtattttaaaaggtcaaatcaaaatatacttttaccttgaaacagttggccagtgtctttaagacacctgttccagggtgcgccgc

SEQ ID NO: 41759 - DNA, 378 bp, Mus musculus
  source 1..378: mol_type = other DNA
ttccaggcgggcctgccccagaagtgtcagagacatttggagactgaatgtgtcatcaataaatatttaaaatgtgtgctggactagtgccctcactgcagttgcagcttgctgggccagggcatgaacccagctggctcaggtcgtggctcttggcaagagcaagtacaaacagttcccgaagcccggctggggtaccgcagactgcacctcccaggcttcagcagcccagagtcgcgtggctgccagatatgggagtgcattgctttctgggagatgctggcgggtcctgccaggctggactacatatcccagcatgaggatgtgaatggggagggggcacccgcccccttcccccacccttccctttagcttggg

SEQ ID NO: 41760 - DNA, 385 bp, Mus musculus
  source 1..385: mol_type = other DNA
ttttctttcttttacagtaaacagaggttcagaggagaaatgacattttgaacaaacaacctcccccgcgtggtggaaatacacgagtgagacacaagtgggcgaagagtccacgaggccatttgcccacggcaaactgcccctgcggctccggccgaggtgccgggcagctctctcctatgagcgctctccacttcctccgcgacagagaagctgggaggccagcttcggtacccgacggatgctgaatccgccactgccgatccgccggcgtccgctatgagttatctaaaatttatacgttacggtaagttttctgtaaaatagaaggttagttttaaaaatagacttccacatatctgtgggcagccccaaaggtcaccgc

SEQ ID NO: 41761 - DNA, 264 bp, Mus musculus
  source 1..264: mol_type = other DNA
acacaggccacagcatgcacagctctgtcttgttcacatgcgagaactaaagttggtcctctatcttcttcttcttcttcttcatagcaagcaggagataatatagctgaagatggtcgtgaacacctgattctcttgcctctgccgcaggggttctagggtcactggtgtgcaccctgatgccgagctgtgcactcatctgcccagtccttggcatatagtaggtgtagaccaggctgttaaaggtgtttgtttttattttta

SEQ ID NO: 41762 - DNA, 374 bp, Mus musculus
  source 1..374: mol_type = other DNA
agggaaagtacttctcttatcccagtatttgacatatccacacacataggatgtaactctgttttgttcaaattctgagattaaaggcctgtgccaccgagagcgttctatttttttaaaaaatatttattatttatatgtaactacactgtagctgtcttcagacacaccagctcgagccatctcgagagagagcgttcgatcccttgtaatctagagttcaaggtagccttgttttaaaacaagatacctagtttcaaaaccaaaaaatgggtaagtattttgagggtttctctgtgtggccctggccgctcaggaccttaaagtgctaagctccgcatgcttatctacgcgcggggcaggaactgacgtca

SEQ ID NO: 41763 - DNA, 364 bp, Mus musculus
  source 1..364: mol_type = other DNA
aggacagccaaggcttgcatagtacctgggttccattccaggtagccacattgtaacacacataaaattaaatgactaaatctttaaagtattcatccaaaagtaattaaatataacgccagaggtcatgtattttgttattaaactgcttttaccatttccttcaggaactgaattgatttgattgagcaaaccgcttgctgtcaatgcttagacatcttattaaattgaaaagaacagatactattttgaccttagctaagcattttaaatatcctgaaaaggtaaaacacttgcttatgtattctggctgtaatagttataccagggccatctatccttaggggcgcggaacaccgtggcg

SEQ ID NO: 41764 - DNA, 291 bp, Mus musculus
  source 1..291: mol_type = other DNA
gtttaaaaattaaacggtgtgtgaactttttagtgcccaaggcccaagggtagccttaagctttgttttctaaagcaaacagagggacagatgtcctttaacttgggttacgtcatttcttccaggaatttcttcttattgggacctgaaggacaaatattctcaatcagtgccaaagcgcttcggcgtggttgaacaaaaggccgaaaaacgaacctttgaggtacgtgtatcactttgcagttaaacagttctattgccaatccgaatgattggcatgccagtggacca

SEQ ID NO: 41765 - DNA, 340 bp, Mus musculus
  source 1..340: mol_type = other DNA
tacatacacatgaggtagcacctgtattcatatatatatgtaatagcaattttttttacaaataaaaatgcagctgttactttcgagacagaggatcctgagactctgggtattgtacaaacatccatgatgacctgtgccctagcagaatctccaaagaggtgacatctgagatagcactgactctagggtcaaagtattagcttgtaaggcgactatgcaagttgccgccatggggcatgatggaggtggaaaggagagaactcccctggggtcctgcccaggtcaagtcccagcctcctccccatgactggggctgaggagtggagaggacactgtc

SEQ ID NO: 41766 - DNA, 479 bp, Mus musculus
  source 1..479: mol_type = other DNA
gagattcttgaagccttcttgttcctagtcagagcgctcagcacctgagtaaggttaggtcctcaagatatctgagggccacgtccatgctttccctctgggcagccgcaagagcactgaaaggccttaagcgctgggctgcggacccctcgcgcaggatcggagctcaggcctggcggcagacctgcccacacaccgaggccggcgggagacccggagcggggacggaggacgttggcaggtccccgcacactcgtcgtcaaccaggcggaggcggaggggaggggcggggcctggcgagacccaaacaagcgcacgtgcgggccggtccgccgcggtgacgtcacggcgcgtcggcgcgcgcgcccgccttacccttgccgcgggccgtaaagcgcggaaggtcgcaggccccccgcggtcccggaactctgcgctccgcgtcccgccccgtccctccggccggcgcagaccctctt

SEQ ID NO: 41767 - DNA, 729 bp, Mus musculus
  source 1..729: mol_type = other DNA
cacagtctgagatcctgctgcctgcacctctgtgagtgacatcacgctgggtgtgggcagtgctgggaaccaaccccaggaattttaagcccataatttgtaaacttatgaattaaacaaccatcacaataatgtagttttagaacattttacaaagcctgggctcaagccagcctatctcagcccatatttcttttacttaaaacattatttttggggctggaaaatggatcagtgattaagaggacttattgactattcttcccaaagacacacatgtgattcctagcacccacatggcttactgcatgtatgttagacacagatgcctggcggcagcactgggtcgaggctctggcccggatccgatgcccgggctctaggcacacacggaggccggcctgaggccggtggcggctctcctcactctcgtcgccatccaggcagaggcggaggcggaggcggccacgggttctgggctgcggacccctcgcgcaggatcggagctcaggcctggcggcagacgatcacccgaactgccgacacacggaggccggcgggagacccggagcggggacggagggcggtggccgctccctgcacactcgccgtcatccaggcggaggcggagcgggaggggcggggcctggcgagacccaaacaagcgcacgtgcgggccggcccgccgcggtgacgtcacggcgcgtcggcgcgcgcgcccgccttacc

SEQ ID NO: 41768 - DNA, 348 bp, Mus musculus
  source 1..348: mol_type = other DNA
gaagagggcatcagatctcagcatatagttgtgagccaccaattgactataacttttgggacttcaagttacaggccaggtaaagggtatcaaatccatgtctttgtataaaagttcacagttttactttacatttgagcgatcatcttgaaggcccatgacaaggattataacctaatacattcggttttgaagttcattcttccgtgtcaacaatcgagagattcccgccagccgggtccagggcgtgggcccttcactccgccgcggactcccgagtctaccgcccgctggggaggagccacgccagcccacgcccgcggctccgccccctcaaaatacacgtcg

SEQ ID NO: 41769 - DNA, 218 bp, Mus musculus
  source 1..218: mol_type = other DNA
gtcagaggacaaggccttttgcctcgagagaggaaaatgactcaggacatccgcctcacttgtaactatttaagccgcggcttccggagcggacttggcccaaatttgactttaggcgggaaccgcggctggtgcggatcccaggacaccggggacctgctccgacctggcgtgcattgtcccgcggtccggacgcccctccagaatcacagattctt

SEQ ID NO: 41770 - DNA, 537 bp, Mus musculus
  source 1..537: mol_type = other DNA
gtttaaagacctttaagtaagatttccttcttcagaaacatgtttggaaaatcttacgtgacaatttatatttccaagccatttatcatagtagttttcaagttgaagacattgtgcaagatttaaaaaaaaaatttttttttccgaccattaatgagagactctacaggctcttttaatatcacttttaaagaattatttatttattttatgtatatgagtacactgttgctgtcttcagacacaccagaagagggcatctgatccctgaaagagcagtcagtgctcttaggtttctctgtatagccctggctgtcctggaactcactttgtagaccaggctggcctctaacatttttcactctcagtagaagaggaaggggaaaattcccgccgaacagttcaaaggaagccactatttcagctggcggcgaccgacggaagaagaatcgccgtccgcagtggctggccaataggagctcgccgagccgcggctccagcgggggcgcctcagggtccagaagagctgctgggcgc

SEQ ID NO: 41771 - DNA, 192 bp, Mus musculus
  source 1..192: mol_type = other DNA
tagttttatttttgagatatatatctcaacatatatctgaactcacagagatcctgagtgctgggactcaaggtctgctaaaggttatttcttatactagctaactgggggtataactggtcagaggacaaggccttttgcctcgagagaggaaaatgactcaggacatccgcctcacttgtaactatttaa

SEQ ID NO: 41772 - DNA, 370 bp, Mus musculus
  source 1..370: mol_type = other DNA
ccattatggttaaatggcaactaccattaacattaattacacatcttcagtgaaaaaaaataacacttttcaaaaccaaaatgatgttatcgaggcaggcagatttctgagttcgaggccagcctggtctagaaggaaaaaagtcatgtcgtttaatattcagtttaaacttcctctcagagtaaattcacagtgatgttagtaagattataaaattgtttttacctttaccaaagtgttgttcgtggagaacctcaggaactacttcagaggcacatgaaacaaaaaattgtgcactcagatttttcaaagccttgatcccagcagagctcacggcagggggcgtgtcggcagccgcggggtgcccagg

SEQ ID NO: 41773 - DNA, 619 bp, Mus musculus
  source 1..619: mol_type = other DNA
actaataatggcttttatttccatacaatataatttataaaaacatctggaaactggctgctctttcagggatggcatgcgcatatgcatacacacactcatacacaaagtaaaataaatccttttttaaagtctttttttgtttcatttttatttaaaattgtaataaaatgtgtacaatatacgtttcagaaataaatattcagcatttagatgcgcattcgtaagtttttaaacattaaatataactatatataatatttaattatataatatataatatttaattatttaaatatataatagatactatataataattatatataattatatgtgattaaatattaaatataattaatttccaaatattaaatatattgtggctgagtttatatatttcgaggtggtcctgacagtcaccttctggcatccaccagcagccgggcacacctggtgggcacgccctctacctgcccagggctacctggcgggccgcgctcagcgtcttgctctcggggctcgggtccctgcgggccaatggggaggcggctccgggcagcagccgcgtcccaccgagtggccaagcaggtgcggtggcggccggcccgttgcggct

SEQ ID NO: 41774 - DNA, 535 bp, Mus musculus
  source 1..535: mol_type = other DNA
tcagagctgagcacttgaaaaattatttgctcaaagaataagcatggcaaggtgagtctctgttgcaaaatgcaatttggtcaacaaatatttattgaatatggcaaacagctgaggattatattcttaaggaatcgattcagacccaaatagttggttctgatctaaggcgccactggtcccaaatgtgtttgggtcccccccatgctaaacttcctaaggttggctggggtccttggatggagaacctccaaacgaaggtctgtggcgggaggggagctcccccagtgacccttcaacgactccagcagagctgtgatccagaggaagtctgacctctgtcgcagacgcccggcggctggagacgtcctgtccctggaccgcccggggcgcaggcggtaggtgggtggggacctccaaggccgcagctcgctgctgcgccgcaggggccgcgaaggggttaacccggcgggggggaggagggagggggcgcgggccgcgcgtgcgctctgccgccctccattgtctccacggc

SEQ ID NO: 41775 - DNA, 199 bp, Mus musculus
  source 1..199: mol_type = other DNA
ggcggcggtcaccatagagacgggatgctgtacctgggctcccgagcctcgctggaagggagggcgcgccggggcgcccgaaacccctactaggcgtgcagcatggtacctacctttctggttaaggaggtagtttgctgtatcaattgtttaaaatggaaggtattgccccacagctggtgaactcattctgtcccag

SEQ ID NO: 41776 - DNA, 364 bp, Mus musculus
  source 1..364: mol_type = other DNA
aatggatataaaaagggggttttgccattatcccattatctaactaaggcatgcaaatagtaagtgtatttatttcctgtcgtgatttaacggactacgtgtgtttgggggacggttcagatccagaactggctgccccatacagaaaatgaagctttcattttgaagcttttgtatctgaagtacttagcttcctcccctctccagaacccagtaagcagggagcttgaagccagcctaggcttgacaagaccctgtctcaaaccaactggggttatttgtctggactgagactttctaagtcttccactttaacgcacatttgttgttgaaagttttaatccctagcagcgcggctcagagg

SEQ ID NO: 41777 - DNA, 565 bp, Mus musculus
  source 1..565: mol_type = other DNA
ctttggtatggttgctgcaggcctcagccataaaatggggctctagcgggctgcctcgggcctagagacctaggcatcaacctgacccatatggaccagatcacggagctgaatacagaagacttctccgtggtggtggagcctggtaggccttggactaaccacagagtacgggccccatctttcccacaagagggaaagggcctctgcagttgccctctcgcgcagatgcttctctgtgtggcatggcagccaccggggcctcgggcaccaatgctgtggtagtgctgcctgacggcaggctgcttcacaccgcaggccggggccgccattacaggtgagcactgcctgacccagcaggagcaccctgcaactctggaggctcagctggagttggctctcccggcctctctgggtcattaaaccacaaactctgtgatgacaatctggggcgctcacacggcctgggcgctcacctaccttgtatgttcctgggcccaggaagagtgcagctggctacaatctcacaggactgacctgcaccctgcgccggaagcaacggtgg

SEQ ID NO: 41778 - DNA, 241 bp, Mus musculus
  source 1..241: mol_type = other DNA
aactaaatttgtcattttctcagaaggcctggctggcatgattttctctttttacatattcatccaaatgtggttggtgaattaagagagaaccaccaactccacgaagttccataaaaaaactaaataaattaggagtttgtattcctgaccaacaggatggtcttggaattaatctcgctctgcctgacagggacttgaaagcaccggctccaccttaagcagggaggcaggctggcaa

SEQ ID NO: 41779 - DNA, 208 bp, Mus musculus
  source 1..208: mol_type = other DNA
gtgcgctggtgcctgcagaggccagaagagggcatcatgtcccctgaggaggagcaggactccatttttttatcattttaaaaaagtttatgtgatgaattctggtccactggaagagcagaaaataacacctgcagcaatgtactggctggttttgtgtcaacagtatggacaagcaactataataatgtgtcctggatcattctag

SEQ ID NO: 41780 - DNA, 338 bp, Mus musculus
  source 1..338: mol_type = other DNA
cactattttgcttttcatttataaaaagatgaaaagcaaaagggtagctaggctacagagctaacctatagtcctagcgacagatgtcccttacagaaacagggtctcttttaggctaggatgccaggcatgtctcgagcagttctccaacttcagctttaacagctgggactataaagcaaactttgttaagaatgataaaggcttacacaaatgcgccccatatttatatcagagtgtggtagatccagccacatcgccatggagagccagctcgtctcttcatccctcggggaataaccagcggggtccgggttggctgtgacaacatgactacc

SEQ ID NO: 41781 - DNA, 396 bp, Mus musculus
  source 1..396: mol_type = other DNA
ctgattcattacttgagtgcagtaaataaactaaagctttatacaaagacaaaaactttctcctcttttggctctcatgtagcctaagctagcctagaactcactatgattatagtgtatactagaccacagcagcctcacaggggttactgtcctattgctatagtaaccctttgttttaaatgagtgaaacatttaaaacattaaagcatttgtggtcatagaccatcatggccagggcttggcagcccgtgtgctcctgtgccagaagggctcttgcccacagagccctggggatgctggccactaccaatgttcatgggcactgttaatcagagcagctgtccttttcccatgggttgggcaatgcccccacttccacggaccctaggggac

SEQ ID NO: 41782 - DNA, 386 bp, Mus musculus
  source 1..386: mol_type = other DNA
gtatatatatatatatataaagcttgctgcactgtactacatacatgcctgtgcctttgaggtcagaaccagggcggtatgggatgctaggaaccaaacctagttttgctgcagaagcaacaagtatcggattgttgattcattaatgctgaacttactgccaacagtacttgtaactcaggcctgaatgaattcgattctagttcaaaagttgatgggaactttagcatctatcgacattttaatctctgattttagagttagaaaaaatattagcttgtgagcaaatttcaaaaagagaaagtactatttccgcagattcgcttctgagaggtgggggtccggaatcccacaagggcccggtgagtgtagactgaccaatcgca

SEQ ID NO: 41783 - DNA, 342 bp, Mus musculus
  source 1..342: mol_type = other DNA
ctgagatggaactcaggtcacagctcctaaaagtttcaacttctgtgacttagagaattggtttctctgtatagccctggctgtcctggaactcactttgtagaccaggctggcttcgaactcagagagcaggctggcctcgaactcagaaagctgcctgcctgagtttctggttctctgtcaatacatgaaaatccttgtatactattttaaaatgtatgtgagtcgtaaaaagacaaccatgggagttggttctcacctttcatcctacttaaaggtggtgccgtgggtttctccgcagcgccagggggcgggaacaaccgttaccccgccccctccatc

SEQ ID NO: 41784 - DNA, 366 bp, Mus musculus
  source 1..366: mol_type = other DNA
agggaaggccttttcggaacaggttcccttaggaaagccctcagagcctcagcagtcggaagaccgtgtgcccactgcttgaaaggaagacctgaaggcctgcttgtcttccagccttgggcaggagggcccattatgggtccctccctaaaagccactctagattttattttcagggggatccaggctaagctcattctcagctgggctcggatctaagatcgccttcagccagtctaaactgctcccaaagagggttgtaggagccccgacagaaaaaatcccggggtcccgggtccttgcctttaacgcggcccgcggcggagcaggcgggagggggaggggcggtgcgggcagcgcatgcgc

SEQ ID NO: 41785 - DNA, 496 bp, Mus musculus
  source 1..496: mol_type = other DNA
gaattaaaggcctgtacagaagttagtagacagcattctcttagaatgcagctataccacttctttgaaagttatatataaatcttcattgttggtttatttccttaagatagattcagaaagaaatgcttgggctctgccctattacttgttaagaggagaaatctctttacctctgggtagaggcgtgtacccgaaggggatggcagctgcaaaaaggtgtctgtttggatagttgcaaagatgccaccctcagaggagggggcaagaagcttcttccctcgggacagatagcggtggctctgccagcaggcttgatgatccatccaccccaccccgtggggggcggtcagtgttccgggaccccctcccccgcccccgggcgtggcccaccacggtcacgcctgggaaggatagaggagccctaggccaactggctgcctccttgctccgatcccgccctggctcccgccggcggccccaggcaaagagccac

SEQ ID NO: 41786 - DNA, 408 bp, Mus musculus
  source 1..408: mol_type = other DNA
cagggtttctctgtgtagccccggctgttctgaaactcactttgtagaccaggctggcctcaaactcagaaatccgcctgcctcgagtgctgggattaaaggcgtgcaccaccggcctaagtacctggttctaggacggtggccttgttataggaatgtcttcagtatgaacctcaatggagtttttgcattgaaacaatcagggcttcctgtatagtaggcatgtcatgagttaatagatgatctatggggtgatgtcaacatctagcacgtctgattttgtacaattgacacagactttggtgagtgaaaatatcattacagttgctttcttttttttttttttaagatttatttattatatgtaagtacacccttcagacattccagtcagcgctcttaccggct

SEQ ID NO: 41787 - DNA, 337 bp, Mus musculus
  source 1..337: mol_type = other DNA
atactttcagaatgaagttatagccacagcatctatcaggatgattgagcacgtggtcagctgcatattcatgttctgtgttcaccagtgcataaacagatggtgacccagctcgaggcttgtgcctggggacactggcacgcctctgacagtttccgataaagaatctctgtgatcagggatattccgttttcataagtgttcatgaatgtttaaaatatgtgagatttgtttaaatcaaattttaggtgcaacaacttggtcaccagtactcgttgcctgcctgtcattcctaggtccccgccggaagccccgccccgggaggttgctaggctcc

SEQ ID NO: 41788 - DNA, 461 bp, Mus musculus
  source 1..461: mol_type = other DNA
caggcactgtaagctccagcacggaggctggagcaatctctaataaatgtatattaatgtctgtctattcagcaagtcacttcttccataaaaatcccttttattagactgcagtagcaagggattgatgctcttacagaggaccaggcttcagtacccagcacccgtgtgtcaggcagcttgcaaccgtgctgccttgggcatttgcatgcacatatgtgcacaaattgacaattgatacaggcacacgcacataaatcttttaaaatatatacatgcatatatgtccataagactgtattgaggccagcctggtctacagagtaggacagccagggctactgaggtgagaaactgtcagaggatctgcttatagttctgttcaaaattttgatgcggaggcggcttcctgaccagcgtgctttgcgggcagagcttgaccggagcggccctctagggcg

SEQ ID NO: 41789 - DNA, 538 bp, Mus musculus
  source 1..538: mol_type = other DNA
tagcggtccttgagcgactgccaggagtgctgcgagcgagctctgtgaccgagctgggcgaacgggcgttctccttcacgtaggaggatggccacatcttccgcgtcggtgtaggcgatgcgcccggtcaggggctgcggctccggttccgtggagccctcggtggaagccccgggcttcggatcggacgcctgctccgtcaggcccagccgataggcctccaggtcaagtcgcccgaagcctcggccagcgcctccccgggctgggcgagaagcacggctccgggttcctgcacccgacacacggtgccgccgccgtgcaggatgagcgtcgacagccggcgcttggccgagctgggccgcacgtaaaacgacatggcgctgccgtcttctctcacgaacagagtggaggagtgagtgggccctctccgccggaggagcccagcactgcgcctgcgcagcgagagtccggccgagggcccgccctctttcccggaagaggcaggacttagagccacgacctggaagttctagttcta

SEQ ID NO: 41790 - DNA, 650 bp, Mus musculus
  source 1..650: mol_type = other DNA
caggcaggcagccccgccccccggagccccgaaggtgccggcctcacctccgctaaggacgggctgaccggggcgttcccgagcaggtacttgtgctcctgaccccgtcaggtagcggtccttgagcgactgccaggagtgctgcgagcgagctctgtgaccgagctgggcgaacgggcgttctccttcacgtaggaggatggccacatcttccgcgtcggtgtaggcgatgcgcccggtcaggggctgcggctccggttccgtggagccctcggtggaagccccgggcttcggatcggacgcctgctccgtcaggcccagccgataggcctccaggtcaagtcgcccgaagcctcggccagcgcctccccgggctgggcgagaagcacggctccgggttcctgcacccgacacacggtgccgccgccgtgcaggatgagcgtcgacagccggcgcttggccgagctgggccgcacgtaaaacgacatggcgctgccgtcttctctcacgaacagagtggaggagtgagtgggccctctccgccggaggagcccagcactgcgcctgcgcagcgagagtccggccgagggcccgccctctttcccggaagaggcaggacttagagccacgacctggaagttctagttcta

SEQ ID NO: 41791 - DNA, 376 bp, Mus musculus
  source 1..376: mol_type = other DNA
ctaacgaaagcagccatggaaactagttatttcctacagctttgggggtactatgtagttccaggcactaagaagacattttgagtgacacatatgggtaggtacactattgtttcaaataaccttggataggccaaggataatgtaaaggttcttcttttaagaacaaagatatttaaccattattagaaggtagggaaaagttagtttcacttttctttaggtatgctcgtccctacggctaggaccagggaacccatcagccacgcagttgatcctcctggggcatcctggaggctgtaggtttagaactagaacttccaggtcgtggctctaagtcctgcctcttccgggaaagagggcgggccctcggccg

SEQ ID NO: 41792 - DNA, 332 bp, Mus musculus
  source 1..332: mol_type = other DNA
ctcacttatgtagaccaggctagcctggaactcagagacagcaagatggctgtgcaggtaaaagcagctgacttattatccaataaataaaattgtaataaaaaattttaatttttttttaaattcacaagatcacagtgagacttgtctcagagcaaaaactaaaataaaattgtccctataaaggctttgtggacttgttctgtggctctattaaaggaaagaacagcagagcaacaaagcgcatagaccgtctgcatcagttctgtgcacgcagattttttccttttagaaaattcctgtttattattcagaaatgtacagagagcgaa

SEQ ID NO: 41793 - DNA, 285 bp, Mus musculus
  source 1..285: mol_type = other DNA
aagaaacatgattatggaatgctgcctatttccagaaggatgctttcataaaactcagtctactcagagaactcttcatgggtggatttgtattcagcaccaactaaaataagaaatgttaatttctcgcagactattatcagatgatttttaaatatctgccaaaaacataatgcagttttacctggatacactcccaggagcagcgggcagcgggcagcgcctccaggtccagcttccatcacctgcagccgctgcggagctcagaaagctgctggctgctgc

SEQ ID NO: 41794 - DNA, 445 bp, Mus musculus
  source 1..445: mol_type = other DNA
gtgcggcagaattctcagccaactggttggctcggcccacagaaccgtggggtgcgctcgtgttgcccgcacacactagcccccctcgcaggctggcggagtccagaatcagcatccgagtcccataggctggctccgccctgcccctataattgaataaaagagcgtgattccagcaaagaccggaacaggagcgcacactatctgcggaggctccaccagaatggttgggtgagagggactaggtcccgccccctcgacctagtagatttccaggccgcgcccccaagtgggccggtctggccccacttcacagccgatcctggctgcgtccggtggaaggaccgggagagtcccgcgctatccttacggtgagggaacgcagcgtgtggctgccattggcactccggggagtccaagtgtcccggggaggcgtcgcttccgg

SEQ ID NO: 41795 - DNA, 277 bp, Mus musculus
  source 1..277: mol_type = other DNA
accgtgcggcagaattctcagccaactggttggctcggcccacagaaccgtggggtgcgctcgtgttgcccgcacacactagcccccctcgcaggctggcggagtccagaatcagcatccgagtcccataggctggctccgccctgcccctataattgaataaaagagcgtgattccagcaaagaccggaacaggagcgcacactatctgcggaggctccaccagaatggttgggtgagagggactaggtcccgccccctcgacctagtagatttcc

SEQ ID NO: 41796 - DNA, 331 bp, Mus musculus
  source 1..331: mol_type = other DNA
gtgacagcagccagaggcacaggttgctctctgagccccctcataggaaagtgggacactctaagcagcccaggttgctagcagacctgagactgggctgaggctctcctcagggtaggggcctgtgcttgaaaccagcctgggtgtttgaacacacacacacacacccaccatgttgggctgtttctgaataagaaggtggcctccagcatcgatgcagctttgtgaagatgctccccaatagcatgaacatattctggacaagagcttggttgcgcgcatgcgtgcaaacgcaagctagcagttgcatttgcagatgttctgcgcttgc

SEQ ID NO: 41797 - DNA, 304 bp, Mus musculus
  source 1..304: mol_type = other DNA
atctataagagatgtctcatgtctgacaagttgcaatcacagatttctattactgttttactgtggctgctatattttcttcctcactacaaactgtagagatcataagaatcaattaaatgcattgaagctgtttcttaggactaatacaaaagacagtgactacttattcactgcccactgtcttggttcgcaagagcttcaggtcgtatgcagaaagtttccagcaagccttgggttccaggctcatctctctgtgcgcctgagctaggatcccaaggcggaccctgagagctgctccggt

SEQ ID NO: 41798 - DNA, 285 bp, Mus musculus
  source 1..285: mol_type = other DNA
gcagtctgcattgcagcaggacgtttcattcctggaactcacagggtggaaggagagcacacacacacactagtaaataaaatgttttgtttttggtttttggtactcactttgtagaccaggctgccctggaactcaagagtaatccccaagtgctgggattaaaggcatgtcaagcgtaattaatttttaattttttaaaattaagtactttttacaactgcttattgcaaagtgtattcaacactttaaaggccccgcccctagctcgggcgtcttgaaggg

SEQ ID NO: 41799 - DNA, 215 bp, Mus musculus
  source 1..215: mol_type = other DNA
gcgcacgcgcccaaacactgctgggttgtttttctgtaaccttgcaaaacaaaaaacaggcttgttctgggagcctctttcctagaaagggcccgcgggagaagaggcaaccttgtctaaggcgccagagtctgtgccgtatataccagacaaatagcctgacttagtactagcacacggcggaggcggtggaccgcggctccgctcacagggtt

SEQ ID NO: 41800 - DNA, 388 bp, Mus musculus
  source 1..388: mol_type = other DNA
tggcacagccttaaaactaaactaaaacaaaattttcaattttatttcaagacaaggttttcctggctttagtcttaaaaataaagataagaaggagacaggtgactcctgaaaatttccctccacatgtgtttctgacatacatattacacacacacacaacaatttggccactttttgtttaaactcttaaaagtgctttccagatcttgaatatacttcagcgctttaaaacaaaggcttatatactggatctttacagagcttcccagatgttgatatataatatatatatattaaatatagtaaaaagtttttaaaaaggcaaatctttctttaactcagcactctgagctccttatgccatggctggaggaacattccggcc

SEQ ID NO: 41801 - DNA, 338 bp, Mus musculus
  source 1..338: mol_type = other DNA
tgaggagaaagtggctcccgttctcccccgctcctgctggagctgttgtttgtttgtttatcacagcagcagaacaaaccctttctagatcggctcagctctagattattggcacccatgtgtgtatcatatatctcacgtgggggcgctacctacacttgcctgactcagggacaagtgccggatcctgccacgaccccatcgccttgaggttcctgggaaggaacgtccgtgcctgccttcttttgctaggctgcaaagcaacctgcagcctaaccgttgcgcaggcgcagcccatagctttcagaaagccacttcctgcctggttgcctagcaac

SEQ ID NO: 41802 - DNA, 451 bp, Mus musculus
  source 1..451: mol_type = other DNA
tcgccgcctcccattggcggagagtgccatcttctcgctgggatcagaggctttaaaatcgagcgtagctcgggctgctcgtcttgcaattttgctttaaaaaaataataagaaagagtgggggaagaaagaacttaactcccccctcccttgctcggtcttgcactttgcacggagggagaggagcgcgcgcacgcctccggtgtggaggccggcgcctccgggacagccacccgccgcgccacacagccccggagcagcctccgcgcgcgccccgcctgcagcccggccggcttaggcgagccctccttatgcaaagcgcgcagcggagcggcgagccggggacgccgcgcaccgggccgtgctcctccggcaccaccgtcaccgccagccgcggaggaccttcccgagcctgaagcgcccgggatcggagctccgagctttcgggcca

SEQ ID NO: 41803 - DNA, 405 bp, Mus musculus
  source 1..405: mol_type = other DNA
tttaaaagtttgcaagtttgtaatcaggtgctcttaatagagaatctggaggcatgagaatttgcatggttttttttttttaaatggcatatttacataaacaacacagatttgaatggaaaaatacctggatagtatcaagtcaggcaacctgaggctcgtggcaacacgtggccaacacaaaaatcctaaactttaagcattgtgagatttttcttttttggaaatgaccatgtcacagtatcatgtcgtagtgtcaatctataaggaagtgccttcgggtcgcccagcaacgtgcagagtcctgcatgatgactgggtaagcacgccccttccaggagggctgcaaaagccgcggaccggctgggcgagcagtgcgcaggcgcgagcggtctggtcccctcc

SEQ ID NO: 41804 - DNA, 590 bp, Mus musculus
  source 1..590: mol_type = other DNA
actttttagaaagaggtaactctacctctgtagcccagcagtagaggattcaaagtccagtgtgggcagggtctcactggtggctgcctggaagcaagggggcccctcagctccgaggggccagttttcctaagaacgtgcccagtcccctccccgggaaggagaagagtgttcgcagcccgggcaggtcattccgggtgggcacctggccgggtactctgggggcctcgcggctgcgcgcgcggccgggctcgggagcggtacccgggctcggccctcggtggccgccgccccctccgccccgggggccgggccgggctcccgggaggcggggactcgcccagtggcagcagcgtccgggcgggcggcgggcgcggggcggcttcctgcaggcggcgccggggcgagccgagcgctacagtcaccggcctcgggacacgggggcccgggcgctcagggggccgcgtccgaggctcagggcgcgctgcgcagccgtcggtcgcccctgcccgcgctcgcgtgtcgccgcgattgccgcggccgccgccggttacgccagccccgccgccgcccgctccgattctgcgcac

SEQ ID NO: 41805 - DNA, 355 bp, Mus musculus
  source 1..355: mol_type = other DNA
gcaaaccagttttaacagaggcttctaatacatctattgtgaaagtccagtgacttttcagtaaagaaacttttgacggcagctccctagattagttgtacgcgcactcgaccaggcgcgcgcccaaggtcgcaatgccagcgagcggcgggcagatctcagcagtgtgacagctttccgccacaggcagccagatgcccggaggctgaagacttgcaagcaccgacgctccgcgcatgcgtcatcctgcatgcatcgctccgcctggaccggtccactgtcccatgctgagggggatctagggccatcccaccggggctcggcgccccccgtgcagccgaagcagtgcggaggg

SEQ ID NO: 41806 - DNA, 356 bp, Mus musculus
  source 1..356: mol_type = other DNA
gcccaatccttagcacttccgaagattcttaattctgagtgatcctccgggcggatatgacgccatggacgctcatcccggccctcttggcccggacccggcctcgagatcccgtggcggaactgcgccgtggcaaggcccccgtagatgtctgaggcctggctccccgccgcctccgagtccaattcggtgtcgctgaggctgcgcagcgccgaggtgaagccgccaatggccgctcgggccccgcccccctccgcactgcttcggctgcacggggggcgccgagccccggtgggatggccctagatccccctcagcatgggacagtggaccggtccaggcggagcgatgcatgc

SEQ ID NO: 41807 - DNA, 332 bp, Mus musculus
  source 1..332: mol_type = other DNA
ctggccatcatggaagctcaccacctttgtcatgtacagcttctagttggctaagggacactgagccttttcagggagactcggaaatccgggcgctttctttctttgaaacagggtttgatgcctagaacggtcttaattagcccagcaaaaccatccttgctggaatctttctccctgcagcgatgcagttcgtgcggacttggacacgcccctcgcgcgggttgtccccgaagtggaaccttcaagatgtccaatcagagcgcgcctctcccgggctccgcccccgggcctgggtgctccgctctggacccaccccgtccccaccggcc

SEQ ID NO: 41808 - DNA, 548 bp, Mus musculus
  source 1..548: mol_type = other DNA
aattttagaaatatgttgtatagcaatataattacaatatctatcatatatgcttgttaaagtatttccctcatatatatgggggaaataacaaatatagattcatgtgtcatatacatcacatctttagaggccgttaatgctataaatctatgctatcgattgtatatatgctatactgtatatatattatataatgctataagtgtaaaaagtagtaattcttagccattttttccaaaagcctttgagacttgttttcttaatactttttaaaccagaaagcaaggagaagtgggcggccccctcgcgagaaactgctgcttctgccccactaaagtggatcccttcaatgttgatttaggacatcggggaagtggccaaatctccagacactgtttgtgtggcctctgaggcattccttctagaaggcaaaaggctgttgcagcgcaacttggccgcccaacgtcgccagtgcctgcgaagctccccgccctcagaggggactccgcccgggttacgtcacttccggcatgcctgcacctagg

SEQ ID NO: 41809 - DNA, 466 bp, Mus musculus
  source 1..466: mol_type = other DNA
tggtacagttggcaggaatcaattctcaaaaatgcctgcttcagaattcctggagtctgagtatgtccccaaggcaaagggactctgcagttgagcccattggccctgtgacccagctgacaccttgcttactcttccctcttcagagataagagagaattagaacgctaccactaggcttagtaaaacagttcaaggactccttgattagcctcaaagaataagataagtttgttttgttttgtttaatcaaatagtctacaatataaaatttattcctaataacaataaaaaaaaaaaaggttaaacctgaaagcatctctttctcttctcaggtcctaggaagtagagtgggttcatggaacctatccaattcaacacgcgctcgccgcggccggcgggcggcgctgcggccaccgaccggccggatgctaatgagcccggaggccccgccccctgccggaag

SEQ ID NO: 41810 - DNA, 302 bp, Mus musculus
  source 1..302: mol_type = other DNA
aagactggacttagaggacagctagcgaggctcagacttagtcctgaaagttatcctctgacgtctacagtgtcagagacagacagaaataataggtaatagatatcattttttaatagatatcatttttattttatttattttctctgtatagccctggctgtcctggaactcactttgtagaccaggctggccttttactttataagtaagcacattttcaaactgtccctgatgaaaagctaagagaacacgtggcaccccaagcctgagctggcggtacgtggcctttggaaggacag

SEQ ID NO: 41811 - DNA, 381 bp, Mus musculus
  source 1..381: mol_type = other DNA
catctttttagctgtgctgggattatatccgcacactaccactgacatcttgtccggggccagacttcttgtgtacaaagataagagcttttcgccagacggcctggttataaaagttatttgatgacatgaaataaatcttgtagggatgttttatcctccggtcagcataaatgatgacatgatgtgtcggaaggggacctgcctgtcccacgagacgggaagacggttatcacctgggggcagatgtataagggtaccactctgaatgtgtgccatcctatactaaccttctatgcgagttgtatcacataccatgaattgcttttcagacaggcgtgtattttgtcccataaacaagagttattatttggtgcaaaa

SEQ ID NO: 41812 - DNA, 320 bp, Mus musculus
  source 1..320: mol_type = other DNA
tctttagttttataatttctttaattacataagacagggagatcatctgctctcctgtgagggcgtcacttcgagcagcagctcaaaaatgcagtgtggattctggctatgcagaaggcctcagggatgaatcgtgctctgggcagaattcaaagcctcgcttgtgcacaggccaaaagccaagtctttgtcttccctttttaaatgaaagaaaaccaatcaagtgtccgttgataggattttttttatctctctgtttgcagaaggcaaagatgtcttgcaatagtgcggtcagatgggctagctcgggcaaactcacc

SEQ ID NO: 41813 - DNA, 214 bp, Mus musculus
  source 1..214: mol_type = other DNA
ggtggccgtatatggcagcatctgagcccagctgagctcacaataggaagttgttctaggaacaggtcccgtggccaggagcatgggctctggagttgaagaacccagggctgcagacttctgatctgtcttctggtctcaggagtagcaatggacctgtgctgaaatgttcaagagtggcagacaagccaggcatacctctaaggatctttaa

SEQ ID NO: 41814 - DNA, 212 bp, Mus musculus
  source 1..212: mol_type = other DNA
tttaaaagaccccgccgtgtgtgtgtgtgtgtacatgtatgcatggagatgcatgcatattattgaatcttcatacctgtttgaggccagcctgggctgcatgaagctctgaaggggctgtaacaagcctcaggacatcagatgtgtcgtccaatttcagaaggcaattaaaattggtgccctcccacagcctcatagtggacagggtgtgg

SEQ ID NO: 41815 - DNA, 790 bp, Mus musculus
  source 1..790: mol_type = other DNA
agtttcaaccccaagaaactgttcagcgggcagaaccccagctttcggcccagtcttggactaggaaggggtcccaagcccggcccaggatggcggcgcagggctagtgctcagctgtgcaccctcgggggcgcggcccgcgtgacgtcccctcgaacactacccacattccggggcgcggcgcggggactgtcgacgcttgcccaaccccggccccctccccaggggccgcccctcccgtcgggccgcgcccgcctccaccaagtccccgcccggggcccggcccatcccggactccgcccgccccggggaggccgaagccgctgttgccgccattgacgtcagagggcgggcacatgaccccgcggggaccaatcgcgcgcgccagcctcccgcaatctccccggcagccggcgcggcccccgcccgcagcacacactcgcggacggacgcggacacacgcaccgcacagcgcgcccgcgcgaggccgagacacgcccgcgcccgccgtccccggcgccgcccccgccccccgaggacccgatcctctctgcgccccgcgatcgcccgccgccctcgccgcagtcgccaacccgttcgcgccggcatgcgccccaggaagcagcccaggaagcgccccgcgcgcccccgcctgcccccgcgcgctcccgttcgtccccgcggggcgcccccagcccacgcccccccaccttcccggcggtgggggggtgcgggccctccgcgggggccccgccggcccggccccacgccagccgcgatcgcgcgcgcg

SEQ ID NO: 41816 - DNA, 324 bp, Mus musculus
  source 1..324: mol_type = other DNA
tccttgtagaccaggctggcctcaaattcatgctgggattaccagcctgatcagagaatcatatacacataatttaaaaataatattaaaaaaatttttttggacacagataaaggtatggaccgttaagcggaaaaatacatttttttttccccagaaaaaaaagcaacgagttttaaagaacacagtcttccaatttaaaagccgataatcaatgcatgcatggtatctgactggggctgcctcagtttccccctggggcgggtcgggacccgccttgagacagggcggcgcgttaaggggggcggccccgaggagtcacgt

SEQ ID NO: 41817 - DNA, 383 bp, Mus musculus
  source 1..383: mol_type = other DNA
agtgatgagcactcaagtgacataatttataaagcccactcaggcatactgacttccagacagaaggggaatgctcatatccagagcactaggctccagttatgttctagaccaggagtctacattcacatagagtttccatggtgatttgaaacagatggatctctgagacttattactgcctaactaactgagccagaggatctgggttcagctcccaaaccctatttcagtgtttcacagcccctgtaaccccagatgcaggggatccaatgccctgttctggctctacatacattttttttgaaataataaaataaaaaattgaagaagctctgaaattagatcagtgatgagcactcggtgacataatttataaacaa

SEQ ID NO: 41818 - DNA, 313 bp, Mus musculus
  source 1..313: mol_type = other DNA
ctcacaactggcctgtaactccagttctaggagatctgtggcatgtggttgcatatgtgcaggcaaaacactcatatacataaaattatatatatataaataatatatatatatatatatatatatatatatatatatatatatatttgtttgttttgttttttctctgtgtagccctggctggcctggaactcagaaactgcccagctaaaataaaatatttttaaagaaacgtggatcaaaagattctgaaactcggaactgtcagcacagtttaaaactggagggaacctccgggcttcctagagagacc

SEQ ID NO: 41819 - DNA, 244 bp, Mus musculus
  source 1..244: mol_type = other DNA
tgtaaggacatcctattcggagaccgagtcctactaccaagaacgagtcaggagcagagcactggttctgacagcttctctcagtcgaagacacaggcaccttccatctgcctggggatgctaaccaaaggagattgtcttcttgtgattccaagtctgtcaatcattatcgtatttatatcacagtgcacagtttaaattacatcctgggtcaaagggtgcgggggctgtcgttcccccctcc

SEQ ID NO: 41820 - DNA, 484 bp, Mus musculus
  source 1..484: mol_type = other DNA
agttatgagtaaatgtgtttctgtaaccacttaacacattatgtctttatttaaacctgcagggcgtttaatatccggaatgctttggcaccacaacttccatcacgggggtcccggggatcaaactcatggtgtatgcatattcatagaaaacacgctaaagccaccattcgtatttttaaaacttttaaactctggcagcctcagctaggacctcagcaaggaacttccagaccgggtcgttagggagtcctcgggtgtcgtggaggccccgcctacagctccagctcgccccgcggtggcccgagctcttaccacagctctttgcggagagacgcgctccgggagctggagaagccagaagcagctccgagcactagggcggggcagcgcgaggggcgtggcaacggcgcgggggcggagctaaagctctgccacgcctgtaagcgacgtggcccgggcgggtctagagcgttctagctcc

SEQ ID NO: 41821 - DNA, 434 bp, Mus musculus
  source 1..434: mol_type = other DNA
taaatgccttttattaaggactttcctgcctttaggactccttgagccatggctagcactgtttcgagcccttgggaatagctcagggactcatggctttttgtggagtgtcggccagtcccacccttgatggatttgtgatttgtggtgatggcagaaaaacaccaaacaccaccggtggctgagccactaagactcttatttattgggaataaagtggatcttattaacattttaataaagagaatcttttttcgcaatgtgttagaagtggctgcgggtgcaattccagttcctagggaagtttgtgaggctgggcactccttgctcggagggggctctccctgcgaggtgctcgcccctatctggtcatcagccgctacccaatgctttcgtggctggctggcgaggcagagcctctcctcaaaggctgg

SEQ ID NO: 41822 - DNA, 329 bp, Mus musculus
  source 1..329: mol_type = other DNA
aggactagtccactatcatcatgacaggaagcatggctctacatctggctcctaatagggccagtccctatgggcctatggggccatttgtattcaaaggaagagcagtgagtgctcttaaccgctgagcgtgtatgcatgcatgtcacagcagtgcacacacaatttgtgggaatcgagtttctgcttccaacatgtggatcacagagattgaactcacagtgtcagaccttgcaaggccactacatccatggaagaatcggttcagccttcagggtggaactgggtcctgccacaatgcctcgcggtcccgtgaccgtgtagtcgcg

SEQ ID NO: 41823 - DNA, 316 bp, Mus musculus
  source 1..316: mol_type = other DNA
aaaatcatttcactgaaagaatgaatgaatgaatgaggaagagattcttcctatgatggctgcagagaattactctgagaattaggtgtgtacatgtgcatatacatttccttgtacacacgtgtgggggtgcacgtatgtacatgtgtggactcaagttctcactagatccgaaccctagcacaggaggctagctcaggtgccccggggctaccgggttccggggacctttggctgcacttggcctccggcctaatgtctccgtccgccgtccggcctcggccaatggggccggcgagaaaccggaagccggagc

SEQ ID NO: 41824 - DNA, 496 bp, Mus musculus
  source 1..496: mol_type = other DNA
tttttttttaaagaattgtttatgtaatatatatgagtggtcttcagacataccagaaagatggttgtgagccaccatgtggttgctgagaattcagtctctggaagagcagccagtgctcttaacttgggtacttagagtgagagcctgacactccccccccaggaaaagcgctcacatgcgcatgcacgcacacatgagggagtccattcagatggggaaactgaggttttctccaaccacacacccgtgtcccctctccccacacgctggggtgggaagtgagtggctggagttcagaagccagctggccagctatttctcagaagcctaccactcactggtaaggaagagacctagtggtctctttcaagattccctagttcctccttcaaactgaacccgggaagggaggaactgaggggccctttaagactggccagggccaagttcattcacccaggggcccctgctgactcacgcttatgaaagtgat

SEQ ID NO: 41825 - DNA, 508 bp, Mus musculus
  source 1..508: mol_type = other DNA
tgagatttgtccagggcggggccctggctgctgccagctccctgctgaagaaggagaccaggaagcctcccatttgggaaccagtctccccagcagaagggtatctgccccagaggcatggggaacacaggctgccctaccctcaggcgagatgaggccccaggtgggagcagtagccatagaccagggggcccccttgaaactgtcagtgtgtgctggagtcacagggccagctgagtgtccaacttggagggcctctgtgctgtggctaggccgcactgggcccctggctagactctatggagtctgggtcaggaatgaggcttccagaagcctgatgcagccctgaggggagcaggctggtgtccagtcccgggacccctattcaggtgtcttgagtctgagtcacttgcacaagtctgcgtcttgctctaccttctgggcaactagcgcccgcgggtggggaccgggggtcagcgagaccctggcggggacgggggcacaatcc

SEQ ID NO: 41826 - DNA, 323 bp, Mus musculus
  source 1..323: mol_type = other DNA
tcagcagttcaaggcctgccaaggcttattctagtttcaagccagcctggacttaggtgacacttgtgccagctgcgagagggacctggacttagagtgcaaagtcctcccagtgtgttagcccatcccacttcctgggaagcaatatgggtgtccccttgggcctggcctcagggcctcctcaccagctgtatgctggggtgcccaggtctcgttatacctgcagggatcaccctgttaggatgctaccctcaccgcctttgctgtgccctgcgcacaccagtgaggggacacctgtagctgaattttctgctgaggcttcc

SEQ ID NO: 41827 - DNA, 406 bp, Mus musculus
  source 1..406: mol_type = other DNA
cgtgctgcctcatgtcagcacagggcagggggcccatcatggaccagctacttgtctgcaggagtcctccaggggattcccaagaagcgagttgaggtcagccttcacaggccgatgttggcagccacactgcctggagcttgttaacaatcaagaaccttgggcttccccaatgggcagcacagctgaggcatggggttgggaggagcccccaccactggccctgtgagaggcagggagtgagaggacccaccaggggtccttccagacagccaataatgatagttgacttagccttcttccatcaggggctctgaacaaactgaccccggggtctgcggtggtagattgattccagctgagctctgcccaccgagcagctgagaaagcaggaggggcttttgcc

SEQ ID NO: 41828 - DNA, 505 bp, Mus musculus
  source 1..505: mol_type = other DNA
ggcgtgcaggtgccctcagatggaaacttggctcctatacaagagtactgtcccctcttacatgcactcttctactgaacacctgagggaggtcaaacccagtttccataccaggtttggcagccaaggtgagcccccgagcacacttaggttgtgccagggccaagagtgatcgatccagctcagtactaaggctgagaatgggcctcaagtgcgttttaccagacgaaattcaccttgatcctgtttgttccaaatggtaaatagttggtgttacaaaagcagtaaaactgccacttcagccgcgcaaaggtgctcgcacccttcctgagtttccaggccaggaaacctggagaaacctaaaccaccagggttccctatatagagagggcgatttggccgcgagagctccgcacagcctctcgcctcggtgccgggccgtcaggagcgcgcacgcaggtcgcgggcgcgcagagcacgccgggccgtcgtaacccccccacgc

SEQ ID NO: 41829 - DNA, 521 bp, Mus musculus
  source 1..521: mol_type = other DNA
ttgatcttaacctctgcatgtatgtacttctgagattcaaactcaggtctggatctaagcagagctgtttgggaactgtgtcttacactcattgcaaacaattctatctaataaattatcatggaataaataatgggtcttctatatgtactggattgatcatatcaataaaggtggaaatgggcatgtgtgagggacacgagccctcgcccctttgctggccccgcgtcggctccgccacgctgtccaccggcggctcagagacttcggggtgcatgacgctttcccggtcgccgcggcaaccagtgcgcacgcgcagtcagttacgccgccgagggcgggcctagccgagggggggccacgggggaaactgcacccgggcgcgtgcgcggatcacgtgggtagcggacctgcggtggtgtcccggggcggcggccgcgcgggcagcgggcgggacgggcttcggagaccgcgcctctcgctgcgggaacgccctcccccccgccgcgccccgtagcggg

SEQ ID NO: 41830 - DNA, 475 bp, Mus musculus
  source 1..475: mol_type = other DNA
gggtgtgatcagtttgatcgctcaaacctgaaagaagcaagctttgttcctgtgcacactattaaatatgaaagacattttccagggcctggttgatcttaacctctgcatgtatgtacttctgagattcaaactcaggtctggatctaagcagagctgtttgggaactgtgtcttacactcattgcaaacaattctatctaataaattatcatggaataaataatgggtcttctatatgtactggattgatcatatcaataaaggtggaaatgggcatgtgtgagggacacgagccctcgcccctttgctggccccgcgtcggctccgccacgctgtccaccggcggctcagagacttcggggtgcatgacgctttcccggtcgccgcggcaaccagtgcgcacgcgcagtcagttacgccgccgagggcgggcctagccgagggggggccacgggggaaactgcacccgggcg

SEQ ID NO: 41831 - DNA, 714 bp, Mus musculus
  source 1..714: mol_type = other DNA
gccactaggcaggatcatcgctcagggttcgatgctagaagagagcgctgtccccgcggcttctcctcaatcgcacccgggtgtactacacaagagtctcagcgaaggctcggcccagagccctggcaggtggtcgttgagactccccgtgggaacccgaacccgctgcggtcaccgcccaggggtgcggctgagtcctggtagcagaacagggactccctgctagtgtcccatccctccccagtggcgccgggcacggcccagcgactctgcaaaacccaccgggctctgcagaagctgcgcgctttcttcagcagcgcggccattctgcatcagtcctgagacttagaacctacttagaccaagggccgtcccggggcgtgtcgcctgtgcgagcctcctgccgaggaccaggcccgggacacctgctcagggagctgagcggctgcctagagcgcggaaccagagttccccgctacggggcgcggcgggggggagggcgttcccgcagcgagaggcgcggtctccgaagcccgtcccgcccgctgcccgcgcggccgccgccccgggacaccaccgcaggtccgctacccacgtgatccgcgcacgcgcccgggtgcagtttcccccgtggccccccctcggctaggcccgccctcggcggcgtaactgactgcgcgtgcgcactggttgccgcggcgaccgggaaagcgt

SEQ ID NO: 41832 - DNA, 288 bp, Mus musculus
  source 1..288: mol_type = other DNA
ctttcagtattcaaatcaatttctttaggattccaacagagactgaagctcggcggctctttaggaatggcccaggactacagcaccagatcagaactgctgagacaacttaataaactcaggaacacagatttttctccctgaataactagaatctgttccttgtctcgattctatctgaagatattcttagcctccaggcgatggaagcatgcgaagaggtgtcttgagatcaattcaagcttctcaacacttttgtgaaataggatggaaatttcaatcctcagc

SEQ ID NO: 41833 - DNA, 396 bp, Mus musculus
  source 1..396: mol_type = other DNA
accctgtctctaaaataaaataaaataattataaaaccagctgattagaagttttgattcctgaacgtctttgagagaccatcattttgtttatcaccgacttgatctgaacagtatgtagtgatgtgttctccacactcaataagaagtgtcagcaaatatttatatagttataagtctcatttaaaattacattcgtgtgtatgtggctcgggaattgaactcaggtccccgggctttgagggaaatgcctgctgagcaaagacccccgttcggtctgaaccagccccccactagacctgccctcgcgcggtacagttggcgggtggagggtagatcccactccccgcgtccacgcctgagcaccgggagtcgggcagtctgtcattggccatc

SEQ ID NO: 41834 - DNA, 419 bp, Mus musculus
  source 1..419: mol_type = other DNA
gactacaggccctgtcttcttggaatttctgtggaaccctggggttcccataataccagagctgaggacagccaggctctgatcccacaagcctctagggatctcagaggccgaatggagttgcttggctgcaaagtcctcatctgaccagtgagagaagctggcttgcagagctcccaggagaagctcaaggcttggatttcatatcctgaaagccttggacactgggatctggccccaatcttaggctctgagactgggtcggtctgtcccagcctgtgagtggaccatgaggttgcaatcgccaggtccccagctgtccagctcctcctgagctcggctcctcctcagagaggagaaggacagacattctccttgccttcctggtggctggcagagcctctgctccccgcctgctg

SEQ ID NO: 41835 - DNA, 477 bp, Mus musculus
  source 1..477: mol_type = other DNA
agagctgaggacagccaggctctgatcccacaagcctctagggatctcagaggccgaatggagttgcttggctgcaaagtcctcatctgaccagtgagagaagctggcttgcagagctcccaggagaagctcaaggcttggatttcatatcctgaaagccttggacactgggatctggccccaatcttaggctctgagactgggtcggtctgtcccagcctgtgagtggaccatgaggttgcaatcgccaggtccccagctgtccagctcctcctgagctcggctcctcctcagagaggagaaggacagacattctccttgccttcctggtggctggcagagcctctgctccccgcctgctgcctggctgatggagagatcaggcaggaccatgctggctgtccccgtgggacttggagcaccatgctgaggcaggacagctggcccagctccctgcagcatccggaccttcggctt

SEQ ID NO: 41836 - DNA, 586 bp, Mus musculus
  source 1..586: mol_type = other DNA
gctgggaactgctgtcagagccccaggacccgggtgctcctggtggtgggtgggaagacagacctaccttcctgggtgcccactgcccgtgccacccagcctcacagggtgtgcctcggagccccctcggcaaatctgggagctagctgctccacctcacactgttgtctgatgtgagagctcccccttatggggatccacacagcagccacctctgcatgctgttggggacaacctgtgtgcttggttcccgcagcaaccctcagtgcagaggatgctttcctgtgcaatgccactctcccccagagtcacatcaaaggggccacaggctcctgcggccccagttcctggggcagacagtcacaggcagcgctgagagaggaggccgccacagcagctcaatagttacaggggagtggcaggtccctcccggccacgtctccggcatctgagctgcccagcttacagtcactctagtcactggagccacagggtggatacccagggcacaggtgctggctgagggcacaagatcccagggaccctgtgtggaggaccaaggctgcagcaggcaaagtttcctctc

SEQ ID NO: 41837 - DNA, 536 bp, Mus musculus
  source 1..536: mol_type = other DNA
gggcttcactgggccaagagcctgctgtcgctgggaactgctgtcagagccccaggacccgggtgctcctggtggtgggtgggaagacagacctaccttcctgggtgcccactgcccgtgccacccagcctcacagggtgtgcctcggagccccctcggcaaatctgggagctagctgctccacctcacactgttgtctgatgtgagagctcccccttatggggatccacacagcagccacctctgcatgctgttggggacaacctgtgtgcttggttcccgcagcaaccctcagtgcagaggatgctttcctgtgcaatgccactctcccccagagtcacatcaaaggggccacaggctcctgcggccccagttcctggggcagacagtcacaggcagcgctgagagaggaggccgccacagcagctcaatagttacaggggagtggcaggtccctcccggccacgtctccggcatctgagctgcccagcttacagtcactctagtcactggagccacagggtggatacccaggg

SEQ ID NO: 41838 - DNA, 328 bp, Mus musculus
  source 1..328: mol_type = other DNA
tggccaccgcctgggggcgatggggcatgacccagccttctccagggccacctctgctccgtggagctagggaccctggtcccgctcaagtttaagagtgaaattgaaaattgaagagcacgcactgggcagcccgaagtgtaggacaccggatccccagttttcctggggatctacataggtgtaggtaaggttgactggccggacaagaatcagagctctgagaccacacagaggcttcgagccgctgcggctgacccggtcctggcgccagcggggcgggccaggcgtgcagagggcggagctgctgggccctgcccaggggcgg

SEQ ID NO: 41839 - DNA, 284 bp, Mus musculus
  source 1..284: mol_type = other DNA
gtgtcacaataattaaataataatactaataatactaataataatgtgtggtgttttgcttcccctggaaagttacaagcaggcctgagctgaagttcctctgtgccactctctgtctccgacacttggctaacgcaagtcagattttccaccctagttctggggggcgagtcccagctcaggccttctgttcacagtgccccctaaagcccaagttctccttcagcctttgcagaacctgagcaactgtgctcatgaccgtccgtcagcgccgttgctaggga

SEQ ID NO: 41840 - DNA, 356 bp, Mus musculus
  source 1..356: mol_type = other DNA
aaggcacctgctgaggctccctgaggctcgtcttaccacggggagagagcagtcctcttgaagcagttctagagctgggcctccagggccagcctttcacctgccggtaggggggttaaggatgccgccccatcttctctttgttaggggcgccagccttggccagcctggctcatctgaggagagctctgcagcccagctcactagacgaggaggaagggcccccctccagccctccgcggagttgcgcaatccgcacagactgggattggccgccggatgtgcgagacgccccgcccccgcctcgcctgaccaatgggagcgaaggggcgtggctttcacgggagtggagtccc

SEQ ID NO: 41841 - DNA, 332 bp, Mus musculus
  source 1..332: mol_type = other DNA
tcacgtagaggaacctcttcaaggtttttgataactattagatgaattaacaatgatctaagatcaacagatgtttacttgtacctgccataaaagcccagcaaggattgtaacgtttgttgaaggaaagaattatttaaaatattttgaatcgacttggtccagccacctcatatcctggagcctgggacgtgggcgccagcaagcttctgcggcgcatgcctgacctataggggacagccaggcaccatcaatagtaagggaccctgggtgtctcttagatcgcctctgaagctgcaggcctgcccctcaggcgaggctccgctgccggc

SEQ ID NO: 41842 - DNA, 483 bp, Mus musculus
  source 1..483: mol_type = other DNA
ggaagcagagatagcagatctcagaactcaaggccggcctggtctcgtgtgtatacacttgcgtgtgttttgcagaatgtgctaagtcatcatacgtagtagactggtctgcaattcatagatgatcgtcctacctctgcagtctatatactgagctcacaggagtacaattcctggattaggcgtcatgtggatccagagacaacgtttacttttatgttttacaaagaaaaaaaaaatctttttttccccaatgccaggtgcgctcgggatccttggagatctccagcggagatcccagggcggagctcaggcggggctccaccttgcagccccagggtgcctggccaatcctcacgccctcgcctggagcagccgccctcggcgcgctggggacagaagggtcgccggcccggggcgcacgcccacctgtcgcgcgcaggcgcagaacgccgcctggctctcccgcggcgcagtcagtgc

SEQ ID NO: 41843 - DNA, 540 bp, Mus musculus
  source 1..540: mol_type = other DNA
ttcaaacccaaaagatgcttttttttttttcaagatggcattactatatagtctagatcgaatcctcctgcctcagcctcctgagtgctgggacttaggcgtgcacttccatgcctaaacttaaaagctgtaattttggagcagttaatctaatgcacccttatttcgggacaggaaacccgtaccccaatgggctagatcccggagctgctgccctggacaaattgtgctaagtctgtcaggataaaaacaggaaggggtcgcagcgacgctccagcgacctgggcatggaggtgtgcaagcctggacccaggagtcccatctccggtccagggcgctgcctcggctcgaacggcaacgcggcgtggccctcgcggcgccccgtaggcagccgtagatgctgctgcctctcctccaagaaccgccgagttcttggaagcccggtcgcctccccgcgatccgcctcccggaagccccgggcggcgcgaccggaaggacgcaggcgcagcgtcttgacctcggcctggtccagttccgggg

SEQ ID NO: 41844 - DNA, 439 bp, Mus musculus
  source 1..439: mol_type = other DNA
ctgggtcacccccagggctgctaatcagccctgttaatcagcactgaatggatgcttccaaaactgagatttaaaatgaaaaatattaacatatctgaatctttatctgcgcgaggaaccccagcgggctcggctgtacctgctcctggtgcccttaagggtttgggtgtcaacctttacctaaagtaatttcccggattctaacctcgggttatttgctccgccaaatgccctggggcacgtggtactaagcttagcacaccccggctcagcacgtgcggtccacaggccacggactgtctgggggtgcccagcctgccgcacgcagataggggccgcgcgctccttgcgcatcgtggtcctcagtgcctccaccctcccgaaaacaggaggcggggccggcgcctcgcagcccaatcagcgctgcctgtggacgggc

SEQ ID NO: 41845 - DNA, 423 bp, Mus musculus
  source 1..423: mol_type = other DNA
cacgcagacgtctaggtgtgagacgaagccttagttggacagatcttcccatctgttgtcagcaaagggcagaccctcaggacttcagaaaaatcccagaagttcggccgggagtcaggaccttgaccactcagaggcaaaagagccaatactggcctcttaaagacaactcgcgccttcaaaggcgtgtgggtccacgggacctgctaccccaggccgcttgcgcgcacccgcgcggctgtcgggaggcgcagggactaaggggcgctcccgcgcctgcgtacaggagctgagcgaggcccggcgctcccgcgagtcacgtggtgctctggaggcgtggctcccgggggactgggcgtggcgccccctgttggctcgcgcgtcacgtgcacctaaaggggcggggcgctcccgctgactgac

SEQ ID NO: 41846 - DNA, 451 bp, Mus musculus
  source 1..451: mol_type = other DNA
ggctcgctggacaggggacccggctcccagtgcccagcccacccaggctttgctttcaggccacacagcagagctgaggcgtgggggtgtttaaaacaaatcccggggcggggcgggggctgtgacccgcagacctctcaacgtgttagtgctcaagtctaacagtgggagtcgcatactctgggaagcccaggactgccccaccgggccttctgccttgagggtggaggagactctacacagcagggtccagggtgaagtcccaggcaagctcccttcggggatctccctgtccgttcctggtggttacaagcactttgaacccccaagaacaccaaggcatgtggagtggccctcctcaccccgcaggggaggccctggttgcccagcaaccagctgggctcctcccagggcttgcctggggatggcccgttgcctggcaaccaggcag

SEQ ID NO: 41847 - DNA, 789 bp, Mus musculus
  source 1..789: mol_type = other DNA
tcgggctcgggctcgggctcgggctccggttcgggcagcgcgtcggcgtccgacagctccgacagctccgagtcgcgcgcgtcctcggtgttccactcgcgggccccgcgccggccagccgcgctcgcgtcgcactgatgcggcctcttgagccagtacacgcgcttgtccacgggcgtgcgcgcgcgctcgaaggcggcccactgctcggccaggaagcagcgagcacgcagccatcggtcgcgctcagcccgcgcgcgccgggcgccggctcctgctgctgcaggaacgggaagaagggctgcgcggggcccgccggcctcaccggcagcttcagctccttgccgcgcgcgatgccgccgccgcagatgaagcacgacagggccgcgcccgccgctgccatgagccgctgcttacgggagagcggcgccgcccggccgctcatggcccggccgccgcgtccgcctccgcgcgccccgcggctgccgctgctcgggccgcgcgcaccgaggccccgcgcccaactcgcaaagtttggcgcgcggcggcgcgcacgcggcccggggcgcaccgagggtctccgcggcggtgcccggggctgccgagtcccggcgggtggcggcgcgggcccaggcggcgccggagagcgcgcccggaacgcggcggtggcgacggtggcgacgggccccgggcggctgcggcggccgcatgtgcgagctccggcgccggcccgagcgtcgggtggagggaggcggaggcggagaagccttccctcgcgccgccctgctg

SEQ ID NO: 41848 - DNA, 682 bp, Mus musculus
  source 1..682: mol_type = other DNA
tgggcggggacgctggggcccacagtccctctccgcgccgcctgtgggtgccgaggaatttcaggacgctccctgagtcatccccgtgaagtgcctggtttctggaggcggcggcctcgcctctgaccgcaaccccataatgatgcccctggcgcagcggcgcctccgtggactctctttaaagaactagttctcaaaaattccttaaagcgagatggagactttgcaaaactttgggacagaggctcgtggcccgagctcttaacattaagtggccaacggcctatattgtgtggtcccctccactcagcacaaggaaaggcctatccctcccctctcttagtgggtggccaggtgccaggcactgttccaggcgcttgctccctactcttggagatgagtggcccgcgaggcctctgagagatccccctggactgtccggacagccagggtcgccaggagcgcggggggcggcacctacccggcgggttgtgaccgcgctgggtgctccgggcggtctgtcggtgcgcgcgcgtgcgcttgcggctgaaacccgacacctcccgccggctgaggtcagggcgccgggagcgagccggggccggggagagcagcaggtgtttcttggcccaggccccggaagctccacctccccgagcggcggagccgccgccgcacagcc

SEQ ID NO: 41849 - DNA, 320 bp, Mus musculus
  source 1..320: mol_type = other DNA
tgctgtcaggatcaccattggggatggtgccgggctctggactgtcactcggcggtgctgaccactggcttcccgacctcagggaccctttcctccggcaaatgtcgctgccatctgttgccaggctccatccctgctgccgcctgggaacctctgagaacctagtcaggtgacttcctaggaggtatttattactatatgtgaagtacactgtggctgtcttcagacacaccagaaaagagcagtcagcgctcttaaccgctgagccagagttttcaccaagtctaggtcggcattaaacccgtgacagtgaaaggctt

SEQ ID NO: 41850 - DNA, 653 bp, Mus musculus
  source 1..653: mol_type = other DNA
agccggctctgctgccgcggaagtgcgcggggaagtgcgcgggggcggctccgggtggggtggcagtccaaggggcctccgaaccccccgcccagccccgctccgcctggatgcgcctccccgccccccgcggccgcgctgacggcgagtggcccgcccgagtggaccgccgcctctccggcaggctaattaaattcccttcttggaggcggagcgggagctgggctgccctccccgctgcccgcctctccgagcgccgggaggtggcgggggccgaataagcaggcttggggccgcaggtctgggcatcggagccgggagcgagcaaggggcgcccccgcgcacctgccacccgtggtgggggtgccagctcgagttgggttgtcttccatgcatttaaagcactctaaacacccctgcggtgccttatctgtcgcggttggggcccacacaccttttgttcgctctaggagggagcatcgggcctaagccgattcccgcttggcagtgtctcagtctgagactggtttaccccctcttcccgaggaagacaaggcccccctggcgagcagccttccctgggctggctacttaagtgttgcttagcctgtgtttacagccgcccccacccgcaggcggggaacctgaggcgc

SEQ ID NO: 41851 - DNA, 306 bp, Mus musculus
  source 1..306: mol_type = other DNA
tttgaggaccgttccatcttcacaattgcattgcttttaaaccatctgtagaaagggcagccagccatgtccggggaaggtgaaaactcggctccaaacctttaccccagcctgctgcaggaccagcctccagctcgtggacagatacagacccgacccaaacgaggattcagggccttagaggggcggggccggcgtacagctccgcctacggccgccgcaggacgtcttccgttcgaggggcgggccccgcgcggtggcgggaaagaagtgcctgaggcgctgcctctgagtcgcggaggggcg

SEQ ID NO: 41852 - DNA, 437 bp, Mus musculus
  source 1..437: mol_type = other DNA
tgaggctggtagagtggccacacgctacagaggcaggcagatttctgagttcgaagccagcctggtcttcaaagtgagttccaggacagccagggctatacagagaaactctgtctccccaagcttgtaatcctagcacttaggagatagttgacaagaggccctaggggaggcggcagcccgaggcctctgagtcttcaccctcaggtcctctgccagctgtgacaggcgggggcacgtggtgcagcgacgagccgggggcgttacctctgcgtctctgcacaggaggcggagccgggctccccatttccttccacagaaccggggacagccggccgatgcccaaactttgcccggtgccgggagcgcggctgcggtggggctgagccctgggcgggctgcggggcggagcggcccgggcggcgccgccctccagg

SEQ ID NO: 41853 - DNA, 609 bp, Mus musculus
  source 1..609: mol_type = other DNA
ccaagggctgtaatatacatggctttggccaatgactataaatccggcttcttaaaaaattatgctagaactagatatatagatagatagatagatagatagatagatagcacctgagttttattttaaaaattgacttgcgggaggaggccgcccaggctcaggccctggcccgcttcccgttcctgcgtcccgcaggcgacctggatgaccctgtcaccctccccgagaaagaaccgtagcgtgacgtcagggctcaggtcgctgtccctcgggcctggcacagcgggaacgcccggtgcccggcaggccggagcggggacccgagaccgctcggggaagcgggcgccccaaggtcaccgagccgctcaagtcccgggtccgggggcgtctcggaggcaccgctcccggccccggcgctccaggtcctcgggcccccgaccgtgccaccctcccgccgaaggccgtcacctgccaccgctgcccaggcgaccgccgcgaccgccctctacaccctggggtgcggagccccgccccaagcccgtccgtttcagagcgcggggcggggcggggcggggcggcgcggctcggggcagggcggggcaggcg

SEQ ID NO: 41854 - DNA, 598 bp, Mus musculus
  source 1..598: mol_type = other DNA
taatcctctgtaaaactagagatttacatgctataggcatttttttctttgtggcctcacaaacacattaagtttaaactttaaacgttaccaggctggcctccgagtgctggttttaaggacgtccaccacacattcgatttctcggtcatcttacaaaacctcgagagctccccgggagcagccgcagcgtcccgcgaagggcgcccgactccgcccggcccggaaccccgcgccgcggcctcgaccgcgagcttaccagggtggtgtggctgcccgctccgggaggatgctccttgcgcggcctctgcctctcggccaccaggagcccgttgacggcgcagtgcgggtacttggcgccgtggagcaccacacgccgggcatcgcgacccacgcaccgcggtcctccgccacgaccctccgctgcacgccgtgacgctctcgcacctccggccgcggcctcccgcctcagccggtcggccggaaaacgtctgccggaaagcagctgctacccgcctgccccgccctgccccgagccgcgccgccccgccccgccccgccccgcgctctgaaacggacgggcttggggcggggctcc

SEQ ID NO: 41855 - DNA, 416 bp, Mus musculus
  source 1..416: mol_type = other DNA
atcattgaactaatacccggtaatgtcttaagtgcctttcaggtataccacaatgctcatcagaatccttatttgaattcgtatttatttgaaacctagccgtatacttcttgtatttgtggaccaatcaaaaattcttgtcgcggctccactgggggcatcccagtcctccatccaggagggcgcgctgcaagtggctgtcacccagcacgcagctctgggactggtctttctctgaaactccagcctgagcagctgacactcagggtgcccctggacacgtgcccgggccccctcccccctcaggctgcgctgattgggccgcgccagcgcccctcccgctcctcaattagctcgcgcgaccgtcgctctgcgcgcgggacccgccttctcccccgccccatctataaaagcag

SEQ ID NO: 41856 - DNA, 616 bp, Mus musculus
  source 1..616: mol_type = other DNA
actgcgaagcctgccccgcctctgccgacctggacccggtgtgccggtccccgcctcctaggcccggatgaccgggctggacacgcgcccgggactccggtcttcccggcgcgctgggctgcggcggtggcggaggccttgggcgggttcccggcccccggggcaggacggcgtaagttcccgagagggaccgcctcccctcactccccgccctgggaagcgctgcgccggcgcccggcgctcctcggactcgcccaaccgcgctgcagccactgccccagccgagcgcgggcgggcggaaaacgaaaccgcaggcggcttagcgggcgctttgtctccaagcgggcttcaggtcgtgcagtgccacgaaccgccggcttcgtgcactcattcatgaaagcgcgcacacgcgtgcattaacacgcgccagggtcccccgggaagctgccactctcagatctgaattcacagagcaaagtctcctcggccccgcggccccgtgaggaagtttacaaggctcaacgtaaacacgttccggggatcctttaatagaagcccgcgggcgcggggggagttggcctgatgcccctatgggctcggcctgccgccgccgcgg

SEQ ID NO: 41857 - DNA, 653 bp, Mus musculus
  source 1..653: mol_type = other DNA
ggagactttgctctgtgaattcagatctgagagtggcagcttcccgggggaccctggcgcgtgttaatgcacgcgtgtgcgcgctttcatgaatgagtgcacgaagccggcggttcgtggcactgcacgacctgaagcccgcttggagacaaagcgcccgctaagccgcctgcggtttcgttttccgcccgcccgcgctcggctggggcagtggctgcagcgcggttgggcgagtccgaggagcgccgggcgccggcgcagcgcttcccagggcggggagtgaggggaggcggtccctctcgggaacttacgccgtcctgccccgggggccgggaacccgcccaaggcctccgccaccgccgcagcccagcgcgccgggaagaccggagtcccgggcgcgtgtccagcccggtcatccgggcctaggaggcggggaccggcacaccgggtccaggtcggcagaggcggggcaggcttcgcagtacactgcaggctgcgggggcgcataggcggggggggcggtgccgggccccctgatgcgcgtggcctcccgcagggaggaggaagggcgggcttgcgggggaggcgcgctcgggagccgcagtgacggcagaggtgcagccgccccgcgcagccccctcccctcctcctcc

SEQ ID NO: 41858 - DNA, 248 bp, Mus musculus
  source 1..248: mol_type = other DNA
agggaagccttgtctgctcacatcccccaatcagaggctaggatgtgtggagctataaacagtctttgttcctggtacaattcatggtactttccttgttaaccttgaatttcaagggatgtttctataggtactatacggctcaaaagacaactttcgggagtgggcatccgcgttgcaaggcagttccagcggtgacagcacgaagcgctggcgtctggcgtcactagcgcgcggggacatgctac

SEQ ID NO: 41859 - DNA, 484 bp, Mus musculus
  source 1..484: mol_type = other DNA
tacacagtgccgcgctcctttgaggcttggagctccccacgccgaacggggacaccagctcccgggggctggctgccttgtcctaacctccagacagcggccctcaccacaacagttgggttcacgcgcttccctgaaccccacgaaattgtttggagaaggaccaatggttccttaggtccctcccagcccgaccccgtcgtgaaggggagaggaaataattaagaaatctaattattcgcctcttcatccattaataataataaaaaaaaaatctatcaattcgatgttatatttcaaactaaacttctttttattttccaaaggaacagggtttttaatttctcgttaaacaaaatgtgataataaaataaaattttataagatgtaactcatttttaaaagtcctcaagttagactcgcagctgccagatgattggtgcaaacttcctggagggggcgcggcgaagaaagtaaaaactcg

SEQ ID NO: 41860 - DNA, 436 bp, Mus musculus
  source 1..436: mol_type = other DNA
gcagcacggaggcaggggcaggtatccacaccccccatcctctgctaagggcagcccctggagggagccaaagtctgttcccttcaccaacagctgtgggctgtttcggaacagcgggatcgcaggcttggcagcaggagcactctcctatgcacgtctgaccggcgcgcacatgcgatctgggatgcacagagtgaatgtatctgacaggctgtgaagtaacacatggctttggggatccctggtggtatctgcgacccaaagaggaatttagcccatggggaccccctttggtccaccgggtcgcttcgggctggtctccatgtccacccaggcgacgagaggatatggagctcgagccaaatgttgagccacctgcgagtagccaatcagctgtcagctcagtgcccgattggctgatcgagggccaatcagc

SEQ ID NO: 41861 - DNA, 286 bp, Mus musculus
  source 1..286: mol_type = other DNA
tgtgcctggctaggaacctcctctggccagccaaggtaggggaccagatactctgcccagggcctcttcgacagtagtcccctagagagtgctcatctctacaatgccctaagcttcctgactgtgtgcttacagcgtcaaggggtggacgtggtatttcaaacatcagatcagtgcgtttatacaatgaaattttaattaattgagaacacaaggactgtttatcatagacaatttattttagcaaacttacaacaattatttaacatttttaaagccatgaaga

SEQ ID NO: 41862 - DNA, 262 bp, Mus musculus
  source 1..262: mol_type = other DNA
tgggtctgaaagtatactcatatacataaatctttttaaaattatataaaataaaaatcagcaggtggatctcttagagttggaggccagcctggttccaggatagacccccgggggttgacactctgtcagctcagctctgccctccagtgtgctgtgggacacagccatggtcctagggctcccttgaagtgtgtgggagaggcagccacctgtgccatggtactccgtggaagccagccttccaatggaactatggaat

SEQ ID NO: 41863 - DNA, 305 bp, Mus musculus
  source 1..305: mol_type = other DNA
cggttaattttaataataaaaaataggcgatattgttatatacttggtcatggcgaggccaccacctgtgcaaaggccctggcagcgagcttgctgctaaggagcctcgttcgtcagtctcataatctgaaggtcgtgagttcgcccttcgttctaccctgtaaacggggtcacagctgaacccggcgaccctcttttagcagctgggcgtccgccaaacgttttggggtaacacgtagggcggggcctgagcctgcaagcgggactacggctgcctggccgcctgcgcagagcgctgtgcgtgc

SEQ ID NO: 41864 - DNA, 313 bp, Mus musculus
  source 1..313: mol_type = other DNA
gcctgtaatcaggcccaggctcagcaggagtcaaagtgtggggtcacctgagtctgaaaagctcttgggacagaactgtgctctgtgagccatgcctaagaccttgcttctcttccagacgtcgtctgcaggactccatcatgctcgcccagcgtgtgcccagcgagcgcccagcgtagctggcgtaggcgcaggcgcatggcttgggcgcgtgcacgcttgcgcgccgccgagcttccgccacgcctgtcatggccgctctcgggggccgccctcggccccaccctcggtgacgcgccgcgagtcacctgac

SEQ ID NO: 41865 - DNA, 884 bp, Mus musculus
  source 1..884: mol_type = other DNA
gccgtcgcgcaggacaggcggcctggccaattggcgtgggggggcgggctcggacagcccgggctgtcgcgagaggcggccaccccgcccactccgctggccgcggctgcccgtgctcgcgagcgcgctctgctcagctccgacggcccgggccgcgatccgtccgcgggtcccgctggatccctccgccgcgccaggcccgtccgggcgccgcgcccagcctcgcagcgggtaacggccggcctgggcgcaagcacaggaggcggcatggccggggcggctccgtcggggggcggcccgcactgacagaccctgcggcgcgcggggagatgggggcggccgcctcccgggcgacgacgacgacgacgaggagcggccgccgccgctgccgcgcaccggccgccgctggggacgggcgcgggcagggcgcctccccgtgagcggcggccccgaggccgctcgccgtccccggccgcccgggccgcggccccggctccggccgccgcggggcccctggcgggcggctcccccggcccgcgcgcgcccggcccgcgccccgttcgcgcgcgcgcggcctcgcccggcgcccggccgcggccctgcgcgccccccggccgcccgcgcgctgctcccgggcccggcggcggcggcggcggcggcggcgggcgcggcgcgggcggcagcatggttgcagagggacggcgtgtaccgctggttcctccgcagcgtgtggagttcctgtgcggcctgctggacctgtgcatcccgctcgagttgcgcttcctcggctcgtgcctggaggacttggcacgcaaggactaccattcgctgcgcgactgggcagcctcaccaacctgacggacgaggtggtgcgcagcaagctg

SEQ ID NO: 41866 - DNA, 377 bp, Mus musculus
  source 1..377: mol_type = other DNA
tcattccaatgttagcatatctgctgccaacggttgattctgtgtatctcttcaggaaaaaaaaaaaaaaaaacattgttttcctcaaaagcaagttttcttcttaagaactaggtttatggaaaaaccagctttgcaccgagaaagaagattgctcaaagacgacacctctaggcaatgcactctggtctcccaatggagggacatgctggtccagtggcactgcgggagggcctgacaggtcctggcacattttacgggaaagagggctgccttaattcatgtcaggaatccctcccacatcacgcagcttgctggtgtgccagcggagcggctccctactcacgcggcccgcggctgcgcgcgccgctcgtttc

SEQ ID NO: 41867 - DNA, 729 bp, Mus musculus
  source 1..729: mol_type = other DNA
cgcaaggcccattctattaatttttaggaaggtgagcgcctccccggggaccccccagcggctcacagggagaaaccacctcgtggcccgcacgggccgcggtgcgggtgtccccggaggtagcggggtggggaccgcgcggccctcgattgcctgcggcgcccgcgcctcctcccggctccccaccgcggcgtgcgctcgcggtgccccagcccctggcagcggagactggggcgcgccggccggaccccgggccaggggaggggcagggcgccccggggtcctcgcgtgcgcgcgcgcgcgcccgccagcgcccctctccaggcggccgcgcgcttgccggggctcggagcgcaagccgccgccgcagtgccgctgcccggtccggccgggatcggtgcagccgcgcgcgccgccgcccgcgggccccgccgcccgggcctgagccgcgccccgcgccctcccgctcccggggcgcgcggcgaggggccctggcggcgaggtggagccgcgggcaccagccgctcccccgccctgcgccgcccctcccgcctcctcccggtcctgtctccagcgggagcgcgagacgctggtcaggctccggcgcagctcgaaaatcgccgctggcggacctagacgccgccgccggtccgcgcgcggggtcgcgggcgtgcttcgtcctccccccccccacccccccagccaaccaagactccggtttgttgatcg

SEQ ID NO: 41868 - DNA, 369 bp, Mus musculus
  source 1..369: mol_type = other DNA
tccttgagctcaccggtgggcgtcacataatggtgcccacgatgatggcaccaggcctgggataagatttcctaagaaagatggatatctaagtccaggagtaagctggctatgacgataagatatttatccttcatctcccagacgcacaggatagcgaggcagggccaggattccgggcaggtgttggtctgcgccgcctggggcgggagaagaaccctgacatcctgcacaggacttgtgaggaggtgtgagtcgactctccaccgccgcgttaaactcagtttcaggatcttaacgctccacgtgccttgggggcgggggcccgcgaaggaggcggggtcgcgcgggctgagggggcgggggcgc

SEQ ID NO: 41869 - DNA, 577 bp, Mus musculus
  source 1..577: mol_type = other DNA
ctgccgcggggtcagagccgcgacccactgaggtctcgcgagctgaaagccttggctcgcgcccacccggccccgccccagcccggccccaacgcagaggcaggccacgagcttggcagcttcctcgggcaccggtggaggcttgagcaagtaggtggcgaagcctcccagagcttgaggaaggcgggcaacgagccgtagacctccagcatgtaggcgtagtcgccgccttgatggtggtgcccagctccgcgtagcagagtgccgcttccttgagcacgccggtgggcgtcacgaaatgatggtgcccacgatgatggccacaccgttgagcagcgtgatattgcgctgcagggtcacgccttcgccctcggggtccgcgccgtccccgcgccgcgcgcgcctgccgctcctcctccgccgccgccgccgccggggtcgcaaccgcgcgcctcttggcgcccgcgaccgccatgctctcggcgttcccggctcggcctggatacccggcgtgcgcgcggccgagccgctctccgcgtactgagaagtgcgtctgcgtccgccccgcccgcgcggc

SEQ ID NO: 41870 - DNA, 343 bp, Mus musculus
  source 1..343: mol_type = other DNA
attgttttcaatttttgcactatatatgtatatatacatatgtgtgtatgtatatgtgtgtgtgtgtgtgtgtatatatatatatatatatatatatatatatatatataaaatttgagaaaaggtttctgtagaccaggctggcctcgaactcagtaaaagtgtgtgccaccactgccgatcttaccctccagtcagaaagaggctccctggggctgtgcatgaaacactgttgggcccccaagtttagcactctggcaggcttgcccagctgtttaccaggccaaagcagtgaccagagtggcctgttcccagccaaggccactggtttaaccgttttaat

SEQ ID NO: 41871 - DNA, 572 bp, Mus musculus
  source 1..572: mol_type = other DNA
aggaagtccttggcagaggctccctggggtctgtctcggccccgatgtccaaccagggcgaagtcacccggttaccggggcatagcgccaacaacggccgggagatggggccacctaggcggcggggcggcgcgcggggcccgggcgcagcgcgcgaggctcagtcctgagagacttgggcggccgagccagggccacagcgcccgcgcgccgagcccgtgacaggagcgccgggcgcgggcccgggaggcgccgaggccccggagccgaacgcacgcgagcacggccgccgggcctcggccgctcgcccgctcgctcgctcgcttcccgggtcccgcagccccggcgggtggaggcgcggaggcgacgcgcggacatcccgcggcccgccggcccccgcccagcccggcgtgcggccccgtggccgttggcgacggttggcggcggggcggggcgggggcggccggagatctcgctctcgctctcgctctcgccccgcgggaagggggagtggaggcgcgaccggctgcgggagctgcaattactaatggcgtccgtcctcgcgagagaag

SEQ ID NO: 41872 - DNA, 319 bp, Mus musculus
  source 1..319: mol_type = other DNA
tttgtttagttttctaagtgaaaataactgtttgtaggattgctcactgctagtggcatttctggcaacaaatgcacatcggcatgtcacatataatctctatcacagtgacagtgtatcaggcaactttccagacccagcagccctcagcagtcccaggacgcatcgtgccacacacagcgatccagattgaacacccgtcggcgaaagcgcgcgccagaggcgcccagagcaggccccgcccccttcccgaccggccccgcccttgagccgggagcccagggagcctgcgctgagggcggggcgcaggccgtgggga

SEQ ID NO: 41873 - DNA, 202 bp, Mus musculus
  source 1..202: mol_type = other DNA
ctccgcagccttcgagcataaaagaggcctttaagccagacatggctgctcctgactgctgtgcatagcagagaaatagaaggggaatgcgcagagggacacgctgttctgcctgcctgtgctctgaggtccagcgctggcctcctgaggttcttcagcggctgctggccatacctggcacccagaatgttcctgggaggcc

SEQ ID NO: 41874 - DNA, 138 bp, Mus musculus
  source 1..138: mol_type = other DNA
aggccggcgcgacctggggccagcccaggggccagcccggaggacacctgggctgaggctgtgctcttgcccggcccaggctgccgcggaggacggtccggggcgtggcgagaggcggggcccgccgccagctacgcg

SEQ ID NO: 41875 - DNA, 330 bp, Mus musculus
  source 1..330: mol_type = other DNA
gcaaaatttgcaaggggtcatcgggctccagcagctgagccccatctttaagtcctcccgaatttaacgatgccagaatccttcaactccaaaatcttttttgagggtaccagcctcgcacggtttctgtgtagccctggatgtcccggcaaaatattgatatttaataaggcagaaagttcgtgcctggaagactgcgcacgcgccgccaggaggcccgctagagggcggggtcgacctcggtgagcctgcgcagtagcagagccttgggagcgcgcgccgcggaggcgaggccggcggggctagcgagggaagcccgccggttcgcaa

SEQ ID NO: 41876 - DNA, 434 bp, Mus musculus
  source 1..434: mol_type = other DNA
tgacccactcgatggaccttccagcactccagacagctgctcatcagggatggggagtcggtgcctcccccctcccccaagatgctctgagggcctcatctaagcgtgatgacagcggtgcctctctgctgagactcaggccacagtttcccacaggtggacctgaggaccacaggaataaagggctgaagtgggtcctgccaggaacacttcccactgcgcatacatgcaacagctgctggagctggtctaggccagaggaaagagacaacagaacaacggtgttccggtgttctgtgtttagggactttatctgaagaggagtgacttacgcctctggccctgggggggtatggggagactgtcccacccactgcagaggaggcctctggggcacagcccgacagggcggggcctgagcagggggcgggccg

SEQ ID NO: 41877 - DNA, 396 bp, Mus musculus
  source 1..396: mol_type = other DNA
acactcctacggttgtatcaagtaaatatctgatgcagtacatccgccggcgcggcggctggacaccagactgcgggcgcgaccttgggctgcggatcccagcgtagaggctagatgccagctccgctgtttcagcagcagatggccccgctgtcccgacggtgccagaaggaggaacctttgtaagaaggaggcctcctacgcctgcgcagataccacctcctgcgcatgcgtagatccgcctctcgctcgcagccacgagcttgcaggcaccgggggcgggctcagtgtcagccgcacatcattcgatcctgtccataggctaaaaagtggatcatgggctcggcctgtcgcctattggacagcacgggaaaagcccggccagcgggccaatca

SEQ ID NO: 41878 - DNA, 266 bp, Mus musculus
  source 1..266: mol_type = other DNA
tgtgggctaatgttgccagggtgacccacctcagcccacagatgccaaggaatgtggggtggccaagttggctggcacctgtcacctcgatggcgagcccccgcggggtcggtgcgtgaccatgacgcgggccagcggagtcccgtggggcagacaccgccgaccacgcggcgggttccccgcccgcgcacctgtcctgggcgtggcttcgcggccccgccccgccgtgctccgcgctggttggctgagctcgcacctgccggccg

SEQ ID NO: 41879 - DNA, 479 bp, Mus musculus
  source 1..479: mol_type = other DNA
gctgacttaagggtcgtcaccagtggttcccaccactatttacggttagggctaagcacttacaagttaccgcgcctttacggggtggggtggggacggctgcccagatctcacctgcagaaggcatctcccagaaaacatatgtggcagaattctcgcaccatggcgggcttgggggagtcagggtcgcgcttcccggcccgagctggcggaggaagcgccaggctcacgcgccagggcctaggtttagttctagccgccgactcacagcagtcccggaattccggttggtggggaacccccttaccttggccgcggcacgggcggaggctcccgccgcgccggccccgcgtaatcctcaccggcctgggtgggtcccgacgccggcgcgctgagatgccggcgcgctgagatgccgtcaccgccgagcgggcgctgtcgtgacgcaacccggggaggtggggcctgggcggtgacgc

SEQ ID NO: 41880 - DNA, 649 bp, Mus musculus
  source 1..649: mol_type = other DNA
ggctccctcccaaccaggctggggttgtgaaggccctgagcaccgctccctccctcctcaagtttctgctcctgaaacacgggaggaggagccctggaagcttcctgttcagagggaaacatttccgcaagcccggacccccgcgctcggcgcagcggccgcgtccaccgccctcgaagcagccggcggccgttggcaacgcgcggggccggggcgggtgcagggcgcgcgcgcggccggcgggcaggggctgctttccccacgtctggccgccgaccccggcccggacccccctcccgcgggctcccggcgcgcgctctcacgtgtggccgcagctgccgatggccactggccgatggtacacctccaggcagatgggacagctgaactgcgcctccaggccgctgtcgccgcccgcgggcccagccggcggctgccgctgctgcgccgaggccaccaggctgcggaacatcgccatccccggggcaggccgccgccgccgccccctatccaggccggcagacccggcgtcactgccgcgacggcgccgcgctggcgtcaccgcccaggccccacctccccgggttgcgtcacgacagcgcccgctcggcggtgacggcatctcagcgcgccggcatctcagcgcgcc

SEQ ID NO: 41881 - DNA, 537 bp, Mus musculus
  source 1..537: mol_type = other DNA
atgtccagggaaagcctgcatttctggtctgctggtgccttgaggctcaaaagggtcacatcatcaccgcccttaatacggaagactgagccaaaccaaggcggcttgggtgaggtaccgggcacgtgccggactcagaccttgtctggctgctctgtcagcttttgctactgtctgtagcacactgactaaagccaagcctggggcaggtgtgactgaacgcagaccacagtgggatgcagctgtctgatgccacagcagcgtggccgccagtgccacagttagggactctgacagcccccagagggcgctgcgccatcacggcttggggacccccccaccccgggtcccaggccccggagccccagggagaagcgccccacgggcacagtgcgacgcgcgggtcgaggtctccgggtcaccggcaccagccaggctagtagggccggcgctcgagcagactgcgctgggcagcgagggggtgcctgggcgcgcctggccgtcgggggaagcgcggaggcgggcactccagggcgg

SEQ ID NO: 41882 - DNA, 390 bp, Mus musculus
  source 1..390: mol_type = other DNA
ggagcaaccaagtctccaaacttctaaatcttggtccttcagctgcagatgcagtagctggactgggccacttcctccaggaacttgcgtgtgactcagacccagctacttggctagccttgggccaagagctgtcagggccgcagccgccgctgtccacaccgcgcgccaagtggctcccgcggaaaccacgcggatcgcggatgtactacgctgcacgccagcgcgccagcgcacaggagtcaagctgccgcgggggtggtggcccggcatggcgcatgcgtctcttggtgcctactagcgcgcatgccccggagcgcgcacatttcccccctcccagaactgtgcgtggtggtacggcctgggcggggcgaggctgaagccgcgaaa

SEQ ID NO: 41883 - DNA, 309 bp, Mus musculus
  source 1..309: mol_type = other DNA
ctagattcataacggagcttcattgagtaattgcaactgcactgaagatgataatggccattatactcagaggccaggtactgtgctgggaaggtagaacccagttcgaccttctggtccccacccccgttgcaatgcacaggagtgtctgtggtctcagagaaggcattccttaagcaggggctgaatctcaggccccttgtacttccctgctcccccaggtggacatcgcacatcccctttccacccatatatctttgaggtagggatgcttgtgtttaggcagctcaagaaggacgctccgccctt

SEQ ID NO: 41884 - DNA, 270 bp, Mus musculus
  source 1..270: mol_type = other DNA
tttgtttcaaatcatcctgaactggatgtgactctgataggctgagactgcgaggaaggcacagactgatttctaagtctcagacagggacactgagggagatatgccccagggcagaattcataaatgaccacaggctgcactcgggaggggatgtgacaccgcgtggcggggggctgcggagcacctgcggccaagagtcctagggcactcagtaccagcagcagctgctgggctgcgggactgtagggcgggccctggcggcagggg

SEQ ID NO: 41885 - DNA, 315 bp, Mus musculus
  source 1..315: mol_type = other DNA
cataaacagctttccggaaagaaatgaatatatatcttgagccgcgccaggcttatatttaaatagcgccggctgggcagccaggtggcaggctgcagcgaccagctaagcttcccgggggaggcggaggcctgcaaactggcggcggacggctgtcagctgtcagcgaaagcgagtcctgatccatggctggaaggaggcccgccgcccgccgcccgccgcccgccgcccgcagcctcgcgatcaccgcgatgcacaccgccatattggcaggctgtgcgccacatcatgtgacccgatgtggaggcaggcccc

SEQ ID NO: 41886 - DNA, 294 bp, Mus musculus
  source 1..294: mol_type = other DNA
tataatagcattatttctagacagcctttctagcaagctccaggtcactaggcagagaggccaactgcctatgttaccacctgagccatgggtgggcaggaggctggtcagagtcctgaccatgctcactcctagccagaggctctggccaggatggacattactccaggccacaccagattgggcccagtgggaggtctcagatggttcctgaggaagctctgggcacagctgcagactgtgacacagctggctgcctcacccctgaaggctgcaggaggacctcccccatgc

SEQ ID NO: 41887 - DNA, 167 bp, Mus musculus
  source 1..167: mol_type = other DNA
cagaaggagcccatggccggctgatgtcagcgagctctggccaaaggccaggagcctctgatgtgttctggaagaggccacaggcctcagtcccagcctacgctttacagagcctccctcaggcactgacttggcctgcacttgcgctgtcactcagcccaatgctc

SEQ ID NO: 41888 - DNA, 414 bp, Mus musculus
  source 1..414: mol_type = other DNA
aaactatattaataatgaatcttcctgaaagcctttacctactggaggtctgtgagacttccccagctgctgcagggagaacaaggtttatctttactgtacagaaagcatttagtatcctacagttcctggtctgtgtcacagaggtgtgtcaggggccaagggagtcagatggtgaccacagctgtgtggtccctttggccacgggagccatcatccccaggtttcatccttggcactaaaggtagaggtaggttacccttagctacatgtacttgttccatcaggacaatggatccagagatctggtaacagatgtcaggcacctctctgccagtccctctcaagacttgcgagcagcaggaacgttcgttcccggaacgcatttctcaggcgctgcatcccgggacgtat

SEQ ID NO: 41889 - DNA, 342 bp, Mus musculus
  source 1..342: mol_type = other DNA
ggagttctctgcaagagtagcaagtattaactgctgagtcagtttaaacatttaaaaatgtacagggtttttctttttccctgtaaaagtccaagagcttggcatgactgcagaggtgccagtgtggaaggctgtgcacacactcaccccgaaggctgtgcaccgaaggctgagcacgcactcactcatcccgaaggctgtgcacacacggctgtgcacccgaaggctgagcacgcactcactcatcccgaaggctgtgcactggaaagctttttcagaactgtctccttttcaacagtgtcacagtagcacttaggggaccagaatcctgagtcctgactc

SEQ ID NO: 41890 - DNA, 422 bp, Mus musculus
  source 1..422: mol_type = other DNA
ggttaagagcactgtctgctcttccagaggacacgggtccaatcaccactttaaatgttttatttatggaagagcagccagtgctcttaacaggaggctgccctgtggtctcacacaccactggctctaagttgattctgtagccagccaggggcatccccctgtatttaggtggatctccgagttcgaggtcagtctgaagcgaatcgtgtatccacttgccaagtactgggtaaccgtagcctgtctctacgtgaacccgcaggctgcgggctgctagctttcgcgctgcgcaccctgctgactctcgaggtttcgcagctaaccttgcggataccagacggttcggaccgcgcaggcgtcgccaggagcgcgcgaccttcaaccccgcggaggccgccctcaaaacctgaccgttaggg

SEQ ID NO: 41891 - DNA, 304 bp, Mus musculus
  source 1..304: mol_type = other DNA
agacaaaggtttcatggaactcaaatctttagctcgtttgcaaaccaaatccctccgggccccacatcccggtagccggatcgcgggtgggggccgaggccgcctttctccttcgcggccgcaagagcctcctgccgggccagccggtacaagccggctcccacaccgagtagggccaatcgtcgtgtcccgtggcagggagaagccgtcgggccgtgacgtaagcggcccctgccgctctgcggggcgggccaatggcggtggatgggcgggaggctctcatgcggccggcgcccgccgcagc

SEQ ID NO: 41892 - DNA, 683 bp, Mus musculus
  source 1..683: mol_type = other DNA
gagtctctcggccgcccgacccccgggacgccccgaggccggcctcggagcccgccctcggcccctcatggtcgctcgcaggacccccgcggcccaccgaccggcctctcgcggcgcacggcccgccccggggcacccgcggcggcgggcagcggaggaggcctgcaggccgcaaggccgcaggaacgcccgacgccccaggtccccggcgcctctcacccggctccgagggcgacgcggctccgcggcggaacggcggcggggcgcgggcgctgcccatgcagcccgcggccgcgtttcccgggccgcgcggcccgggcgggaaggcggcgtcggcgcgcgggctggaggctgcggcgagtgcggggccggcgggatgcaagcccgccctcggcgtgcaggagctcacgcggggccgcggcgctcgcgcggacgctactgcgggggcgtctggccgcggactccgccgcggcgcctccccggctggggccctcggtccatcgcgctctgtcgcgggcggcctctggctccaggacccagcggtggctgcggcgggcgccggccgcatgagagcctcccgcccatccaccgccattggcccgccccgcagagcggcaggggccgcttacgtcacggcccgacggcttctccctgccacgggacacgacgattggccctactcg

SEQ ID NO: 41893 - DNA, 306 bp, Mus musculus
  source 1..306: mol_type = other DNA
tgtgtctgaagacagctacagtgtacttacataaataaaataaaaagcattgaaattgctattgtcctgtctcattttctagatgaattatgattatggtctatcggtataatgtggatttttaaatttatagccctcttaattactgagccatttctacagctacaggtgtagtcacacctgatttccccccgaggagttaagtcagggcttctcaccaggcaaatctataataaattttcctgggtgggtgcgcccctggatggtccgccggcgggcgggtggccggactccctacaagcccag

SEQ ID NO: 41894 - DNA, 340 bp, Mus musculus
  source 1..340: mol_type = other DNA
gaccccagaccaggagtcttgtttgtccccgccccagccgtggctttgggtccggtttctgccctatatttaggcagaaattggccaacacctcctcttccgcctttctctgggaagggaagcctcgcttccacagagtggccgggagagaacgctcctagtccctctctgaccctcagccatagaccagagatccagtgataggttcgatcagtgcggatctctccgctccagtgaggggatcgaaacccctcttcaaggggcggctccctacagcccccgctctgtggcggccgcccgagacacgtgtgcccgcgcccggcgggcgtgcggggaagcg

SEQ ID NO: 41895 - DNA, 364 bp, Mus musculus
  source 1..364: mol_type = other DNA
gacaaacagacaccgggtcagtgtgtgctctgtgggtgtgtgttgatacacacaccgtttcctaaatctcctaagcaaatggaagaagttttgttgtgttgtataccctgtaggcagagagacattttcatgctggctggcagctgcctatgccttctgttgtcagaatacaagaaagggacggtgcactgcctcttcctggccccttccttcctggccagtgctccacaggggagaattgtgtcattcccagacactgttaaacttattttttgagcaccttagtctgcaaactcttcccagcccctcccccaaatgggtctggttgggggcggggcaccctgcagtcttctgccccagggcc

SEQ ID NO: 41896 - DNA, 361 bp, Mus musculus
  source 1..361: mol_type = other DNA
atctcaatgtctatgacagctctgagagggagcaggggcagagggccctgtgtgctctcgaaaggcctgttgttctgccagagaacattccaatctgaggttgctgttgtttctccttatggtgaggatggagagagatcaacggaacaatggatccaagggctcccaggggtgggcctattcctgggtctggctgtcccaactgggaagtcacttcagtaacctcaggatattgagctcagcagaataaactcaagagtgtgctctgcgctggagagcagagacccggaccccaccggatgctctgcgttactgagggcttgcgaggaacagctgacatgtgtgatacattagtcctgtc

SEQ ID NO: 41897 - DNA, 386 bp, Mus musculus
  source 1..386: mol_type = other DNA
aaatgctgggtgtgaaaagaaacacttttgtcccactccgaggagaattctgctccaagctgtaacatgttgaagggatcactgtggaccagagagacagggtctccaagcctagcctagagccaagggcagtgctctcgcgagccttgagtgcttggatgtcgccaggctttcggcagtgtaactaaacctacagcccgcggacgcccgcacggagggcgggcctcgccgccaggcggcgcccttccataggtgaccccgccgctccagccgggcggcctcggggccggttaacccgaccgccatggcaaccgcgtgccgcgcgagccgtgcctgagccccgcccaggccccgcccaagccccgccccggatctcgcgacagccg

SEQ ID NO: 41898 - DNA, 452 bp, Mus musculus
  source 1..452: mol_type = other DNA
agtgggttaaccgggccctcctactaggaggggcaccgggtcgggtcctggtggctacacgggctgcaggccccagggcaggtcctagtcggaggtctcgagcccagtgagctgggggcgggtcccggtccgagggtatagactatgggtcccaggcccggggggatagagtctggggctgaagcccggggcgggtggggctgaggcgagacgtccgcagactcccgctccgaccccgaagtggatgacagccccttaccgtccatggccggtcgggctagcacagccctcggggcggcgcaggggacgcgcggacccgctgtctccgcgagggcttccggggtcgccaccgcttccggtcgcgcggccggctgtcgcgagatccggggcggggcttgggcggggcctgggcggggctcaggcacggctcgcgcggcacgcggttgccatgg

SEQ ID NO: 41899 - DNA, 285 bp, Mus musculus
  source 1..285: mol_type = other DNA
ggcgtgcgccaccacgcccggctttgaactcagaatcttctggcctcagtctccagagtgctatgattacaggcatatggcactgtatagtggccatttagaagcaggaacattcatcttcctaatctatatgcaagtcttgcaggttgctctcgactgggttcccacacatccagctttcgcccagaagagacgcattttcctccagttgatcaaaaccaatctgagtcttctaacaacagagcctctgcgctccgagcggattcatgcgcctgcgccgagggg

SEQ ID NO: 41900 - DNA, 268 bp, Mus musculus
  source 1..268: mol_type = other DNA
tgtaaggaagggtcctggtcagacatgcacttccataaaggttcctcagtttctatctgtcagacattgttttcctccaagggagaccttgttatgctaagcaagcattgtggtcgagacaaggtccttgtttgtacctcgctggcaggtagcctcaagctccaggctttgtgcatagcacccttagggtacacacaaggagcactggccagaacaccctccttagggcgttgcacctccttaagagaaaaggggcttttccctaaaa

SEQ ID NO: 41901 - DNA, 415 bp, Mus musculus
  source 1..415: mol_type = other DNA
gtcctttgactgtgagaaccaggttctatttgatcaaacttggcctaggcttggtgaagcaaaagctactgcttacacgaagcttagggtttacttaaggaacaccttgtcctggagggtgaatacattcatcctgcctcaaatactccctaaccgactttctcagggactaagaaatgttataattattttgtttgcatgcatgtgcatcaaaaacaccacgttttaaattgtacttaaatacgtgtgtttgaggtccatgatctgccaagacaggccccgcctagccggtatttggctattctgtgggttggcttgaggagccaaagtccagcctggcactcagactagctgaaagactaactagtgaatctgagacaggggagggccacgcccagcttcgcccaggccacgc

SEQ ID NO: 41902 - DNA, 697 bp, Mus musculus
  source 1..697: mol_type = other DNA
cctgggcggcagaggaaagggcctctatcggcagttctccagagggcccgcgttctccagaaccaggaggcctggtcaccggggcccgaggacgcctggaacccaccagcttcgtctgtaccgtcgtcgcccgctcgagccccagctgagctgagcagccgccccgtcagcgctcgttccgccgctgcgagaagggcgaccccgagtccccccgcgctgccgagctattccgggagacaggaagcggccgaggcggtcccgcttcgctccctgctccgcgctgctcggtgtccgcgctgccccgctccgctcggctccccgagatcggagccggaggaagctggggagccacagcggccgcggcggggtcaggagcccggagttcttcgggtctctcggaactcgcgacaggcccttaaaggaggggcagcccggagggtgaacggccgcggactgccgcccgggcggtggcgcaccttcccgtccgcgctcgcagcaagttggccggaggaggtgacaagagccactgacccctccggtcccctaaacccaagtctgcgcggcggggcggggcgcggcggggcggggcaaggccggcggaagtgtgtccgggtccccttccggcggtgcgcagctcctgcgcctccctcagctccgcgctccgcgttccggtctggaggcgtccgccccgtcccgc

SEQ ID NO: 41903 - DNA, 553 bp, Mus musculus
  source 1..553: mol_type = other DNA
aactaagcactggacaaccagtgattgggtggcccactttacaaatgacctttgaaggcaactgcagacagcagcagcatcctgaatgagccaacagtcgggtcttttctagattaactctacacagactctgtcaagaatttggatgtaggtcctttcccagtgcgagctgagctgttccaggtccccgcagagctcggcgcccttagcctccgggccccgggtctccgggcgcggtcccagagccgccgccgccgccgcgcgcatcgggagcgccgaatccctcgcgaccctcccagcctcacccggggccggttgccggtggtggcttcgccccgccgtccccggccgcagcggccatggcgctgggcgggggcggggagcgggaggccgcggcggcaggggcgggacggggcggacgcctccagaccggaacgcggagcgcggagctgagggaggcgcaggagctgcgcaccgccggaaggggacccggacacacttccgccggccttgccccgccccgccgcgccccgccccgccgcgcagacttggg

SEQ ID NO: 41904 - DNA, 610 bp, Mus musculus
  source 1..610: mol_type = other DNA
acacctgtgtgcctcctgggcggcagaggaaagggcctctatcggcagttctccagagggcccgcgttctccagaaccaggaggcctggtcaccggggcccgaggacgcctggaacccaccagcttcgtctgtaccgtcgtcgcccgctcgagccccagctgagctgagcagccgccccgtcagcgctcgttccgccgctgcgagaagggcgaccccgagtccccccgcgctgccgagctattccgggagacaggaagcggccgaggcggtcccgcttcgctccctgctccgcgctgctcggtgtccgcgctgccccgctccgctcggctccccgagatcggagccggaggaagctggggagccacagcggccgcggcggggtcaggagcccggagttcttcgggtctctcggaactcgcgacaggcccttaaaggaggggcagcccggagggtgaacggccgcggactgccgcccgggcggtggcgcaccttcccgtccgcgctcgcagcaagttggccggaggaggtgacaagagccactgacccctccggtcccctaaacccaagtctgcgcggcggggcggggcgcggcggggcggggcaaggccg

SEQ ID NO: 41905 - DNA, 337 bp, Mus musculus
  source 1..337: mol_type = other DNA
acagcaatcacaacctggctactccactagtgtctgcgtgtgcacacacctggggtaacagtggctgcagtgcacataatttcggaatgctgagattggaagaaacaagaatgacagcgtttttgtggctgtttttccttttttccctcagagtcaaataagcacagatcgatcctgagttttgaacaaagcaggtaaaagtgcttttttttttaaccagtttgtcacgtgatctccccaggccaagctctgcaggtgtattgcaccaaggctgcccctcgggggtcctagccaatgagcgccagcgcctggccgcggccaatcggaaggcagcgcg

SEQ ID NO: 41906 - DNA, 396 bp, Mus musculus
  source 1..396: mol_type = other DNA
tgagatattgattataaacactttcaaaaattcatttgtatcctttctttccaattgaagactaagaatccataggcgatagttctaccgcaaagccgtcgtaaagatggctgaaactactttcaacaaagctgtgtgctgtgcttagatgaaggcaacacactctgagaatgaggtgttgtgttagctcggtcacattgtttgtcactaagacactaagggtcagaaaaaaaggaccatttatgaagtacttcatccctgaaggcttgcatacaggcactgtctgctttaaagagccagagccaagggagcgcgtgtacgtgtgcctctcccgccctcacctgcatctgcccgcgaggggcggggccggaatgacaaagcacacgggcggcgcgg

SEQ ID NO: 41907 - DNA, 410 bp, Mus musculus
  source 1..410: mol_type = other DNA
ggtcatgatattttgtccaggaatagaaaccctaagacaggtggtgtttttgttttgttttaaaaaaaggtctgttgttgcacacacttttggtcacaacacctgggatggtctggctgccgtgacttcacaggactgggtccctcgctcctgcggcgtgcgcacctgctcgcccccaggctcgcccccgggaatcgcgttcgtgcggagcagcgctctgagcctgcgcgttgctgcccgccgcacagccggctttctgaaagccagccatctccaaagccccacggccgccgctagggcccgactctcgcgagagctccgcaccttccccgactccacggggaattgggaggaagttccggagagccgcggcgcgcaaacgcgacacgccaatcttgcgccagcgcgcc

SEQ ID NO: 41908 - DNA, 476 bp, Mus musculus
  source 1..476: mol_type = other DNA
cttcacagcaccctgtggtatatatgacagctaccttaggacgcacaatccatctgcaccactgctggagtattgcagtgtgcgacctgatgccacggtctcaaaccaccgcttctttgggccggatgctgagatcaggtacagagccctgcaagtagagccctccagtaggtgccagagggagtccagactgtaggtcctgctccctaaaagaggagcggatcctgtcctgggggctgcctgcccaactagagtagtggaggatggccctggagccacacccaagcagctgccagtctcaagaatgagttagtatcatgaacttttccaagatttctagactgtcacatttctcagaaacaagaaaaaacacacagaaaaagctgtgtcatgtggtggttgccacccctctgcaggtgcccagtcagcaactgtaggccggcccttggtgctgctccacagaaacagaaacagtc

SEQ ID NO: 41909 - DNA, 324 bp, Mus musculus
  source 1..324: mol_type = other DNA
gtctcagattcttcccgaagaattttctgtcactgaaatatcaaatagtcctcataaggtgtcactggtatgaatattaaatcaggtagccctctcttctccagaaaatagtgacctcagagtccccaggtctcttaagcacaaggggcctgggttctattgtccccagagcggattgcccaccggtggcccctcctccgaaggcgcggccagacttgctccgtcggtgccggtgctgatgctgcagagcctgccgcattgtgcggcgctccagcattggcccgcagcgctccagcgagggcggggcagcctcttataagaggg

SEQ ID NO: 41910 - DNA, 132 bp, Mus musculus
  source 1..132: mol_type = other DNA
ttaggaaagactgtatcctaaaggcttgaggcagacttcttccctgggatcctccaattaccactgtggaaccattccctgaggtgctccagcgagccagcgaacctcctggccggaggcggcagcagcggg

SEQ ID NO: 41911 - DNA, 430 bp, Mus musculus
  source 1..430: mol_type = other DNA
agcaaccaagggtgggttgctaccaccactgcgtgtcacatgcccagctgctggcccacagaggctggagacagatctgccctgatgtggttcctggctccagggctagcatagcttgctggccaatagcctcggggcccccgcttgggcccatgagggacttaagcatcagctctgccagagctcatctgagcccaaagttgaagtcagtagctgagttgctgctatatgaacacatcttcagcttcaggtggaaatgccactgccattggcacacttggtgggaggtaggggtgcctcattcacacccagtggctgcctgaggcagcgcagcctgagactgtctgcctctgccccctagaggcagcctggggcactacacatccctggcacatgcccatcatgtggccaccctcaggaggaggggctc

SEQ ID NO: 41912 - DNA, 274 bp, Mus musculus
  source 1..274: mol_type = other DNA
ttaccactgtggaaccattccctgaggtgctccagcgagccagcgaacctcctggccggaggcggcagcagcgggcggaggagccggtacagtgtatcagcggcggcgaactacagtgtagccagccggtccggtacaatgtagcgtcggactccgggatcgggcttctgacccagggcagaggcctcaagcaagacgtccagctcccggctgccgcctgctggctctccgctgtgcgcaaggccttggtgacctcattggtccccgcagggca

SEQ ID NO: 41913 - DNA, 239 bp, Mus musculus
  source 1..239: mol_type = other DNA
tagcaagccaggccttgatgtagtcaaggtagaatctgagtacacgcagaagaaaaatgttgttaagtaaaattaaacaagggtctatgacgtggatcaatgacggtcaagttggccgcggaccatccgccatcagcggttcaggatcctaaggagcacggccgcgaccgagccgatgcggcggccagctgcgcacgcgcgcccccgagggcgtggtgcactatgatccgcctgctgcg

SEQ ID NO: 41914 - DNA, 233 bp, Mus musculus
  source 1..233: mol_type = other DNA
tcatcctcagagcaggcagaggagcataacctgctgtcccttctgttatgtgcatacactgcagtgcagggtgcagccctgctccaagcatcaactcgcttatttattattataaataaatacactgtagctgaagaagactcagaagagcagtttgcatccaatttgggagagaacccgaggaaccacaataggtttcttctgtagcccagctagtcggagttgccaggaga

SEQ ID NO: 41915 - DNA, 288 bp, Mus musculus
  source 1..288: mol_type = other DNA
aggcaagaactgccgcccaggccgaggaggagctgcttactggcgggataataaggtctgtggtaccaaggcctagccttagcctggccttagcctgctcagataacgtgttaagtcgacgtaaaattaaagccagcgcgcagctcagtgcgcaggagccagggaagctagctgaagtcgtccgggcgcgcgaggagcagggcggggctgcacctgtgctgctggctgctggagatggggaggggagcggcgccagaagcagctgcgcgccccgccccgcgggctcct

SEQ ID NO: 41916 - DNA, 240 bp, Mus musculus
  source 1..240: mol_type = other DNA
agggagggcaagggcagtgcagtgcgtgccccaggtgggctgggatgccatccatccatccatccatccatccacccatccattcatgtatccatgtatccatgtatccatccacagtgggtttgcctgggcacaggtccgaggtccagggggtgcggccaaggctggcactcactggctgggcccgtggtgcgtccagggctcgggcatcgggcgtcgggcgtcgggcgttggggcttg

SEQ ID NO: 41917 - DNA, 232 bp, Mus musculus
  source 1..232: mol_type = other DNA
agggagggcaagggcagtgcagtgcgtgccccaggtgggctgggatgccatccatccatccatccatccatccacccatccattcatgtatccatgtatccatgtatccatccacagtgggtttgcctgggcacaggtccgaggtccagggggtgcggccaaggctggcactcactggctgggcccgtggtgcgtccagggctcgggcatcgggcgtcgggcgtcgggcggc

SEQ ID NO: 41918 - DNA, 263 bp, Mus musculus
  source 1..263: mol_type = other DNA
agggagggcaagggcagtgcagtgcgtgccccaggtgggctgggatgccatccatccatccatccatccatccatccatccacccatccattcatgtatccatgtatccatgtatccatccacagtgggttgcctgggcacagtccgaggtccagggggtgcggccaaggctggcactcactggctgggcccgtggtgcgtccagggccgtcgtcgtcgggcatcgggcgtcgggcgtcgggcgtcgggcgggctggggcttg

SEQ ID NO: 41919 - DNA, 365 bp, Mus musculus
  source 1..365: mol_type = other DNA
tgagtcacacacagacttagaaagactcggcttgccgtgagctccttaccgggcagagtggctctcacagtgacacaggctgcagtagaaggccctgcagcatctcttgagggcagggcccgacctaattgtaagttcagagggctgaaagcctcgggcacactcagctgtgtctcactccgtgggaaacattccctcaggtccccagaagcccttcattcattcattcattcattcattcattcattcattcattcttcagcaaatgattgctaggaatccttttcgggagctgacgcatacactggtctgcacttgatacagtacacaggcctgagctgcggctcggtctttaaccacagtgt

SEQ ID NO: 41920 - DNA, 355 bp, Mus musculus
  source 1..355: mol_type = other DNA
aataatattaatattaaagacaattagcttttcagatgaatcaatgatttttaacagaaaaatcatacatttgtctgcaatcaaacttaagtcctactcatcaggactggctatcaagacaataatctctcctgagggccccctccaaaccaagacacttgtgtggaggatccgcgtgggttggcgtggtggagccagctagtccagccgcaccgtttcgaggcgccggcgtagttcaccagcgcggcgcgcagacgggggcgctgtggtctcggatagaagaaggagccgccggacccgcctctttccccgcccgccggtgtcgcagggaagcctggcggagcaggctcggcca

SEQ ID NO: 41921 - DNA, 303 bp, Mus musculus
  source 1..303: mol_type = other DNA
gttattttaaaatatatttacttatatatttttttgtttgcatgctgtgccctcatctccttaattttctgtcataaagcacaataatgaaatattagctgtgaagaaggcaggatcttacttaggccccggtttgctcccaacccttttcctcggaggaaggggtaggttcgcagcactgctctgcccactaacgtggtgagcaggagagttctggtgaccaaagcctggcggggaggatctacgggcgcaggcgccccctccctagttccccctgctccgccgggctccttcgccgggcgg

SEQ ID NO: 41922 - DNA, 517 bp, Mus musculus
  source 1..517: mol_type = other DNA
aggcaaggctcatacctgctaattccagaagaccagcttgggctcctcaggttgcatctagagctgaagcctcctcgcgaggcccccagtagcgagtgggcgaacgagctgggggttcacagcagcgccccaggcgcgggcgcaggagcgggcgggggcccggcgggcgcgcggggaggtgcaggcttcaggctagggcggcgccttcgtctccggctgctgtaggaccgcggagccaccgctccatcggcgacaaacgctgttcgcgctatagctgctgcgccacgatctcagctgacctccggagagcggaggatagacgctgctcctagagtccccgactcctcgcccaggagggtgtctggggacctaagatcccctgtcccgtcaccttgagtccggtggtctccacctctaccgagtggagcagacccctggtgaccgggccttcccagcccggaactccgccccccagcctccgccctccagtccgggcggggctccgggtttgaaccgc

SEQ ID NO: 41923 - DNA, 235 bp, Mus musculus
  source 1..235: mol_type = other DNA
ttgctcagcctagcagagtttggagagtacactgcagaatgcagggacgccctggcctcccattctgtgtgccagggccacaatggagttcaaatgtggggcttattttcttaagctgtccaggtgggcagaactggggagacgcctggtccggtcctagctacctgggccagggccagtcctctccggtcagtgcaggagacccgggcggggacccaggctgagaactcccggg

SEQ ID NO: 41924 - DNA, 310 bp, Mus musculus
  source 1..310: mol_type = other DNA
gctttctgagctcttaaaagatcaaaacataaagtggtcaaaagtctggctacaatgttgtctaagtgggacacaatgtcccctgggcgccctgaataaactgtgtgaacatgcccggggactgggggcactgtcatttccgaatctccggcaggcgcctccttccccagcccacgctcgccgcggagggtcagctccagccggagaccggcgcttctggcaagctctcggtccggagcactggatccaccgcggtgaatcgggtcgcaggactccatcgcctgccccggggccgagtctcggcgccgat

SEQ ID NO: 41925 - DNA, 385 bp, Mus musculus
  source 1..385: mol_type = other DNA
aaatgacttttccagggttggaaggaatatattgaactaaaatactggggaggttgcccccctttttttttaaaggcagggagactaggtctccaagatgtggagactccttggtctgccgaccgcacgaaggtaaggggcgacctgagtgccgcgcatgcgcactccgccagtgacaagcttccgcgtgcggctggcgggcgcaggcgctggcgactgcctgccggacaaggcactgccggggagctagcggctggtcgccgcccaggggtggaccctacgcggcggaaggcgcggcccgggcgctggcccgatggggcgggaggggcgggccgctgctgcgtccccgccctgtgctcgggccgggcggggagggtcccggggc

SEQ ID NO: 41926 - DNA, 273 bp, Mus musculus
  source 1..273: mol_type = other DNA
agatctcaggagccagacaaatatgaaagattcttatgttattatttttatggctatcctgggactctctatgagaccaggctggcctagttcataaacaaattacaaccagctgctaactgcttggtttccaaatgacttttccagggttggaaggaatatattgaactaaaatactggggaggttgcccccctttttttttaaaggcagggagactaggtctccaagatgtggagactccttggtctgccgaccgcacgaaggtaaggggc

SEQ ID NO: 41927 - DNA, 585 bp, Mus musculus
  source 1..585: mol_type = other DNA
ctgcgggtgtacataaaacacccatacaaataaaaagtttggttttggtggtggtggtttatcatgataccttcaaatcctacccgatcggggctccctcgagtccgagctccgtgtaggagatcggggtgctctctaacgtgggtctccctcagatcaaggttctctcaagtggagctccttcagttcggggggaactccctcgggcagaggctcctccgaccgccaaactggcgcctcggcgcagggacctccacggcggcgagccacatgtgagggaggcgcttccggcagacgttgacgccaacggctgcagacatcgctagaggagcgccgagcgcgccctggccgcggcggcgtcgcgcgtccgcggcctagcccggcgtgcccgctccgtcaggcggtcatggggcggccaccgagaaccgcgagcgcgggaggacgtagggcgcggggacccggctagccggtcgtcgtacggagtcctacggcgggcaaccgatacggaagcagccggtgccggggcggcggcggggcagcgggagccgcctacgcgggggaggggcctcgggcgggagagcgcgc

SEQ ID NO: 41928 - DNA, 412 bp, Mus musculus
  source 1..412: mol_type = other DNA
tattcacattatgcttccaacagtaggaaaattgcaattataatatagcaacaaaactgcgggtgtacataaaacacccatacaaataaaaagtttggttttggtggtggtggtttatcatgataccttcaaatcctacccgatcggggctccctcgagtccgagctccgtgtaggagatcggggtgctctctaacgtgggtctccctcagatcaaggttctctcaagtggagctccttcagttcggggggaactccctcgggcagaggctcctccgaccgccaaactggcgcctcggcgcagggacctccacggcggcgagccacatgtgagggaggcgcttccggcagacgttgacgccaacggctgcagacatcgctagaggagcgccgagcgcgccctggccgcggcg

SEQ ID NO: 41929 - DNA, 362 bp, Mus musculus
  source 1..362: mol_type = other DNA
tcggaggagcctctgcccgagggagttccccccgaactgaaggagctccacttgagagaaccttgatctgagggagacccacgttagagagcaccccgatctcctacacggagctcggactcgagggagccccgatcgggtaggatttgaaggtatcatgataaaccaccaccaccaaaaccaaactttttatttgtatgggtgttttatgtacacccgcagttttgttgctatattataattgcaattttcctactgttggaagcataatgtgaataagttctgaaggcctgtagtaagctttcaagttgtttaccataatggaaacaaactttatgacttttaaaaactcaaaaggttta

SEQ ID NO: 41930 - DNA, 698 bp, Mus musculus
  source 1..698: mol_type = other DNA
caatctttcagagtgtgggtttacaggagaagaaaccgaggcagcaagctcgcctgctacaagaaagactcccttcctacgtcggactggacgggactcccggcagagccccgaggctatcctccacctgccggtcccggcgaaggggaaaactcacctctcgacgccggagccacagcgcctgcgaggtccgcggggccgcgtctccccgcggcagccgcgagccctccgtccgctgcccacttccgccgagcgccctcgtgagctcgcagttggctccgcgcgagggcgcccggcggggccgcggggtctccgggcgcgtgcagccggggccgccacgtgcggggtcgctcggacccgcgcgcgcgcgagcagggccgggactgcgcaggggcgggcgcgcgcgcgcgcgctctcccgcccgaggcccctcccccgcgtaggcggctcccgctgccccgccgccgccccggcaccggctgcttccgtatcggttgcccgccgtaggactccgtacgacgaccggctagccgggtccccgcgccctacgtcctcccgcgctcgcggttctcggtggccgccccatgaccgcctgacggagcgggcacgccgggctaggccgcggacgcgcgacgccgccgcggccagggcgcgctcggcgctcctctagcgatgtctgcagccgttggcgtcaacgt

SEQ ID NO: 41931 - DNA, 398 bp, Mus musculus
  source 1..398: mol_type = other DNA
tcccttctcacttctgagaagtctgaagttcatcagaatcctggtagcccaaggcttgcggcaactgcctgggcagatctcagaaatatttgcaggctctcaagtactggaaattcttttccagagacttagagagtcaccagagctgctgtcagggaactttgcttttaagagcaggaagggtcatccttacaagcagtgcattcctgttatcccaggactcagaagtctgatattataggatgagaccttatattaaatctgcagactggccttggggaaccgcgcgtccgcgcccgctgcctccacctgccactcccgggggcgcgcagtgggcggggcgccgctgccatggagactcggctccgcccccgcgcccgcccctcagcgtctgaccc

SEQ ID NO: 41932 - DNA, 485 bp, Mus musculus
  source 1..485: mol_type = other DNA
agaagtctgaatcagaatcctggtagcccaaggcttgcggcaactgcctgggcagatctcagaaatatttgcaggctctcaagtactggaaattcttttccagagacttagagagtcaccagagctgctgtcagggaactttgcttttaagagcaggaagggtcatccttacaagcagtgcattcctgttatcccaggactcagaagtctgatattataggatgagaccttatattaaatctgcagactggccttggggaaccgcgcgtccgcgcccgctgcctccacctgccactcccgggggcgcgcagtgggcggggcgccgctgccatggagactcggctccgcccccgcgcccgcccctcagcgtctgaccccgccgctgggccgccgcttcctgccgggcgccgagcgccgagcgccgagcgccgcccgccgagcgccgcgtcttcccgcgccgccgccccgagctccgcccgccgcgc

SEQ ID NO: 41933 - DNA, 411 bp, Mus musculus
  source 1..411: mol_type = other DNA
aatttgccactctgaaattatagcgagacagcagagaactgttcgctttgtttgttctaacaatatcttcccatgacagaactaagatttggtaataagaataaaatattaacaagaaagcaagacttcttatcggctgcagtccagcctatccagcacatggtgtcctgtttggtctaaactgaaatacaaagggatcactttaagggcagtgacgttttctctcctcaccaggagaaaagaacaaggctgtcctggttcttgacttttctcccaggccagctgcctcggtgcatgcgtgaggctgcagtaccacgctcgactcccggaggcagtagcgccaggctgggagcttccggctcgagggcgccgctctcaacagtgcgcagccgcccgcgacgctcgtctatt

SEQ ID NO: 41934 - DNA, 304 bp, Mus musculus
  source 1..304: mol_type = other DNA
agaggcaggttgtgcctgtgtccacatggccaagaggccacccatggtagcctgcaggtgggactgtctgccaggcccactggaagcccctgtacaagcagctggtgacgtgaggttcagctcctgcaagtgagcccccttcctggcatgcccagagaggggctggcttcaggttgtcacaacccactcgggaactggggtagtaacccaaggccatgcatgaggctcatctgccagtagggcttcctggaaggggcccagaggaacatcaccctggccctgatccatcttggtcaagcctgga

SEQ ID NO: 41935 - DNA, 267 bp, Mus musculus
  source 1..267: mol_type = other DNA
tagaccaggctggtctggaactcccatagagccagctcaaagaggcagcgctgggactataaatggacaccacgatgtccagctttgtatgcagatcctggcgtccacacagttacttcggcaactgtgacagtccctgcttaaagatcccagggagctctgcctgcaatgtcacattggcatcaacagaggtacccttggaaccctgagtgccatccgggagggccctatgcccaggcagcgggtggaggccagggctgggacctc

SEQ ID NO: 41936 - DNA, 433 bp, Mus musculus
  source 1..433: mol_type = other DNA
tttttttaaagagtgatttttaaagacagagtcctgagatttactgctgcctcacagtggcaagcatcgaaagcaatctgagagggggtggaatccaacctcctggttgacaactggtgggtcagtgccctagcctagcccccggctcagtgtggtggatcgcccagcgaagtgccacgtggcgccatggcggtcttcgccctgagatctcggcggcgcttgtatgggggactctgtagcagccccagagatgccctagggtccctcgggggcggggctccagtgggggcggggctccagatggaggcggggcttcaagtgccgaccgggctcagggacgattagtggtcccgaccggtaccagcggtgctcagccagctccgggaggagacggaggcggagccccggggcggggcgcgggcggaccgggagg

SEQ ID NO: 41937 - DNA, 446 bp, Mus musculus
  source 1..446: mol_type = other DNA
ctctgataaactaggaactcggctaagacttgcaggttttaaatatttgcatatctaagaaaaagctaattgctcatctaaaatgagattggtgattagaacagtattttctattctctaaatgatgcatagcaatatttatcacagttacagcactgcagaagatcgctgtgatcttcagcgctaaattgcagcctgcctttgaagaacgctttgctcttgcaaatacaaatgcaaataatacaaaaaaaaatctgtatttataaaagtatattaacccattactttagatattgacagttgtgccaagatatgggtggttgtcattccaagtggtagccccaccccttcctgggatgagatcaggatctccgtgctgggcccacctgagtctgtgctaggctcttgcagagcagctggccagttatggaccacagtgactcagt

SEQ ID NO: 41938 - DNA, 355 bp, Mus musculus
  source 1..355: mol_type = other DNA
gcaaacctcccggagttcttatgatttctgagattccaggaccagcgtctgctaggatttttttttaaagagtgatttttaaagacagagtcctgagatttactgctgcctcacagtggcaagcatcgaaagcaatctgagagggggtggaatccaacctcctggttgacaactggtgggtcagtgccctagcctagcccccggctcagtgtggtggatcgcccagcgaagtgccacgtggcgccatggcggtcttcgccctgagatctcggcggcgcttgtatgggggactctgtagcagccccagagatgccctagggtccctcgggggcggggctccagtgggggcggggct

SEQ ID NO: 41939 - DNA, 401 bp, Mus musculus
  source 1..401: mol_type = other DNA
gaatctaaggctgccctacatggcgagcaacatccccaattgttgtattatttactattaaattgacaagtaccccttttcttctaagaactaacaagaggagacacaaatcgaggctggagtccaactcgtgattctcctcctgcctggcatgcgagtggagtgctggagtcatagaaatgcgccaccactcctgggtgccacaagtcttagaacatctatggcctaggcaggccgcgccccgccccccggcgcgctcagaagaagtcgccgctgcgccttccgttctagggctcctgcttccggccgctggcggaagacgcctggactggccttgggaggggcacccaaggagcgggtactgcggctgcgcgccgcgcccacctgcccgcggcgggcag

SEQ ID NO: 41940 - DNA, 525 bp, Mus musculus
  source 1..525: mol_type = other DNA
tccccacggcaagtcggagggacacccactggaatcaggcctgaatctcaagattggattcctgaggtggggggaaagaagtctgacttcctggcccgtgcacgccagcaggcaccctccaggcaggtcagatgcttccacgctgggcaggggcggcccagggagagggcggctcggcccactcaccgcactccgggtactggtccgcccagtcccccgactgcggacagccgccgcccgccggggcctcctgctgctgccggtgctgaagctcctgcttcagcaaggacagcggagagtagtgctcggtggcccgcgcgcaggccagcgcccccagcagcaggagcagcggccgcaccaccgcagcacccaagctgcccgagcagccgcagccgcagccggcaggtgccatcttcccgcacggcgcaggcgcggccctgctctgcccgccgcgggcaggtgggcgcggcgcgcagccgcagtacccgctccttgggtgcccctcccaaggccagtccaggcgtc

SEQ ID NO: 41941 - DNA, 290 bp, Mus musculus
  source 1..290: mol_type = other DNA
gaagttggtgaagtcccgagattcaacgtcttttttcacttaaaaaaattccacctacttattttagtgtgtgcacacgcgcgtgtgtgcacatgtcatgaatggaccaccaaagttggttcgtttctttaaaagagtgagcaaaaggccggttctggctgctgccagcacctgcgatcatcacgcccacgctagggcgcaggcagcacggggtggggtacccgagatggaggccagggggccctgcagggcgtcgcctcactgcagcagcacagagccgaggagaggac

SEQ ID NO: 41942 - DNA, 438 bp, Mus musculus
  source 1..438: mol_type = other DNA
tcagttcagcagagtcttactatgtaacacccagactagcttggaaattactatgtagcccaagctggcctagcaactaggcctcccaagtgctagaattacaagcacgagccagccttgtctgttccaagccagcttgaatcgcacaggaagagagggccgcgtggtgcgcatttcgctccacgcgctctctgggcagccggcactacccagcgcagaacagcgggcagacggcagccaggcgcgcgggcggcgacgttgcaggaagctcccctcccgcctctccgcactcgcgagcagcctggggaggttgtaaagagctggccagggttgctctggcaagctgggcggggcgccgtgctaattcaccgtgccggagcccgcccctgactgccagccgcgagaggcgagccctcattcgctgagctgacgcctggc

SEQ ID NO: 41943 - DNA, 733 bp, Mus musculus
  source 1..733: mol_type = other DNA
gcccgcccctgactgccagccgcgagaggcgagccctcattcgctgagctgacgcctggctaactcctgggcgcgcggcacggcgggcgggcgggcgcgggaggcggtggggccgggagggggattcccgagccagcgggtgctcgccccccacccgccgctgcagcgtggcgcggccaaggtcaggggcgctgcaggaaccggagccggcgaggccagcctgggacgctgctcaataccggcctacgaggaggcagctcagagagcagcggcccgagcagcggtacggcgacggtctccgggccgggggatgccgaggtggccgcggctgcacagcagcctggcggaggatgcgcgcgggaggggggacgggcgcggactccgggcccatcctctcgcgggcgctgtccgccgtctggtggtgctgaaccagccctggccccgccactcgggcactggccaagagctgggtaggggcggactcggggcagcggcgctgcggagtcgggctcagttggagtggaggcacgaggtaccccggacggcgctactctcggaggccaccgcgagggctccccgccaccttcagacggctgcctccggtgagggagcctcgccttcaggaggtgaggacccctcctttctctggcggccaagcgtcttagggcggtggcctgaggacggcgtgccaccctcggcgctgacatcgccagcccagctgcgcttgtcttcg

SEQ ID NO: 41944 - DNA, 279 bp, Mus musculus
  source 1..279: mol_type = other DNA
agggaagaacatggaggaacctctgccttcctggcccaggaagtagaaagtgaccacaatcccaaacccaagccttggccttgcgtctcacactgtagcccaggctggcctggaattcactatacagctcaggctagccttcagcaatcctcctgcctcagcctcctgagtactgggattacagaggtgagcaatccaactcagatgacctctttaaggaggttccctggggtccagctccccgccccccacaggagtatgagtgggcggggctagctg

SEQ ID NO: 41945 - DNA, 440 bp, Mus musculus
  source 1..440: mol_type = other DNA
agtgaccaacacaaaaaactctacgcgcatattgtagccgaatatttttctaggtcaggactaagattactactcaggttgtgtgcgggggctcccggcctgacggcacatggttgccgtggataccaagccacgtacccaactgggttaggaccggggagggactgtccttcccgcgacgggtcctcccaggagcacactgctagggctggccgagccgaccgagaatcgggagctggaggagctaggaacgtccatggcgcggctgccgtccctggcggggcctgggctggtctgctacacggctgtagtgcagccgctgggggcggttctttcgcacggggcggctcccgtctgcccaggacagtggcactccgtacggccactgcacgggaccccgggcaccgccataggcccgaggccgcgcacgcgaagccgcg

SEQ ID NO: 41946 - DNA, 427 bp, Mus musculus
  source 1..427: mol_type = other DNA
gtatctaggattttaaaaattagtcttaaaacttgtgaaattcgaggccagcctggtctacagagtgagttccaggacagccagggctagccctagaccttgagactcgagctcttaaggaggacctttatgaagatgtgtgtacatatatgggttgagggaaacacacaaaaatgcatgtacatgtacacctggtacgcaaccgctccaaaataaaaacaatacagcgtttgttacgtgtctggttctaaaagtcaggcaatccgcttgcggacatggctccaggagaccacgtgggccgtggtcccgccgcctcgacgctcacccaggtcgtagagggtccgcagaacggcgtccaggagtgcctccgaaccaggaggctcaacggagtccgaatcgtgctccgccgccatgggcgcggcttcgc

SEQ ID NO: 41947 - DNA, 665 bp, Mus musculus
  source 1..665: mol_type = other DNA
gggctggtatgaggttagaagtacactacgtcttagcctgctttactcaaactctgataagggatccggctggttcatcactgagggactggggagtgggcacgtttcccggcgacctctccctgcgccgcgaggcggggacaccaacgcggcctggccctcgcctgcaggtctggggtggggtccaccagctcccaggacgcgtccaccaacgacacgggctcccgcgccgccgccgcgcgccgcgccatctgcacgtcccaggccgctcccaagacgccggtcgggctcgtgcggcgcacggatctcgcgaggcctcccggccctgctgtcagggcgcgcgggctagcctcgaacgcctaaccgaaggtggctcggcgctgccccgcgggcacaggcttaggaacgctgggctcgggctggggacggctttaggcagccggttgtctcctgacagccgctgaggtccggcgacacacgtcaagtctggtccgtgccggaccctcctctgacttccgtgctggctcgtccgcgcacgcgccttaagacgctgccgtttccgcgcaggcgcattgtccgcactccgccccgggcgcaggcgcagtgcgagcggctcgactctggcacaggcgcaatgcagcgctcggctccggcgcaggcgtttg

SEQ ID NO: 41948 - DNA, 746 bp, Mus musculus
  source 1..746: mol_type = other DNA
ttgaccaccgccaggcggtccagcgggtagagtgtggcagccaggtggccaccagcaggaagccgtgcacgcgctgcagctgggccatgtggtccgcatcgtattccaccaggtccccgttgtacaccaggtactgacctggccagcagcgtggtgagcgttcgctgcttgccctcctcgcccgtcccggaaccctctcgagggacgcccgccggcccgggcaggaagcccgcctggaccgccccgcgctcccgcggccccgcgccggccgtgtcctcacccgcagaggcgcccgcggcggcggcgggcagcagtgccagcgggatgctctccaggctgctcttctgctcagtcagcaggtggctcagcgagatccaactgccggtagttctcctctgccagcgcctgcacccgctgccggtgctcctgcaggtcgcggtcgccgtccgactgctgcgacagttgcagccgcgcctcgaagccccccgactccagctgcctccgcaggcggctcgccccgctgtccgacatggctgccacccgcggcccgcagtggctgttactcgccgcctccgggccccacccgagcccggtggagaaggcagcggaggcaaacgcctgcgccggagccgagcgctgcattgcgcctgtgccagagtcgagccgctcgcactgcgcctgcgcccggggcggagtgcggacaatgcgcctgcgcggaaacggcagcgtcttaaggcgcgtgcgcg

SEQ ID NO: 41949 - DNA, 575 bp, Mus musculus
  source 1..575: mol_type = other DNA
actcacctctatgaggtttgaaggtttcataaaaacaaagaaacagcaactagtgtgttcgtctcaatttacaacactgaaatcaaaagggactatgctcttgagagcttcaggcctgaatgcggatctggaaccgagccctgaccaggcccggcgactgcaggagccggtcccggagcaggctgcccggggggcctttgttgtgccctccgcggcctccggggagcagcagaccgggagcgcgcagcggccgtcccggagcttggagcggcccagcggccgtctgagcttccgtttcctcctccgcgggaccgaggtggccgaggcagccccggagcgctgccggcgggcccggacaggcaggtggagctgcgcgcgcgcaggccggcgacgcgcgccccgggcggagccgcgaggaggaggggagggcggaggaagcggcgcgcccgcccgctaggcccggcccgccgcgtgcgcgcggcccccgccctctccgcccgcgcgccgggtcgccggggccgtggtgtacgtgcagcgcgcgcggagcgagtggcgcccgcaggcccgcgccctgc

SEQ ID NO: 41950 - DNA, 302 bp, Mus musculus
  source 1..302: mol_type = other DNA
ggaagtataagctgactttcctcccttcaagatggttatgtgtccaacattcatccattgttgacagactgacttgactcaagatgttgggctttgttcaataagtaatcttaattgagcaatgtgccaggtgccacgcacccagcacatgccaagggcatgcatccgctgccgcagcacagggagcgcgccgggagcccggccggaaacgtgcgctgctgcaggagcgcgcccgcccgcatgcccgcccaggcggtgtgggacacgggccggaagtgtgtgcggccgaggggactccgcgg

SEQ ID NO: 41951 - DNA, 406 bp, Mus musculus
  source 1..406: mol_type = other DNA
cacgccccagctctcaggagatggaggcagaggatccccagggaaagctgggtagctagaccaggcaagccagcctgtcttaggtccagtgtacctggactcacatgtccacagacagagacatgtatatacacatgcacacatgccttacacatgcacatatgcacatatgttagtgcacacatctgatgaattaattccttgtaaatttatttatactttttttctattggtgcacacaaatcacaaaatctacactcctgtatcaatatgggtgaggcatgttccctagtcacagaatatggcctgggacacatgtgcttcttgtgttctcctgtcaaggagaaagcctcagcttcatgacaaaactgtttttgcactgcacatggtgtaacatttcaaactg

SEQ ID NO: 41952 - DNA, 275 bp, Mus musculus
  source 1..275: mol_type = other DNA
tgggctgggccttcgaaggccagttaactattgtaatcatggctaggctattcctggtaagaggaggcgaggttatgacgggtttgctgaagcagctgccaggagcttggcacaagccaaggcttgtgccgtgctcctggccagccccgtgctgacttggtaggaagaagtccgggtctgggaagcctgcggtctgggagccgcgaggggcggcgcgcgcgcgctagcgaggggccgaggctggagcaggaggaagaagccagccctcggctcgg

SEQ ID NO: 41953 - DNA, 324 bp, Mus musculus
  source 1..324: mol_type = other DNA
cgtgggcaagcttgaaaacctcctgagcccctagcagtccagatcgggcccatcaaactggctttgaaaaaactgttttgggctctccttctacttccaggttgcaataaaaaagcttaatcagatctttagactcttacgaggttagctgttctccagctgactgctccgcagccaagtgaacattgtacacggagttcataggagctcacttgcagcctgaggtgagggtctacttctggaatttccaggttggaaacgcatgcgcgaccacggggcggggcggtgctttccctgccgacaggggcgtggccttcagcgtaa

SEQ ID NO: 41954 - DNA, 304 bp, Mus musculus
  source 1..304: mol_type = other DNA
gaagttgtggagcttctgaacttggatctgagatcagtgcacttcttccgctctcatggcggtggtactggagattgtatgcagtgaacaagcacttatatagtaacgatcccatttagggtgcactgtcccaatacactgagacaaacctcctgaggcttcaagaagccacaagccggtgacagaagctacagcctctgacccacttccggttgatgaaatataaaatagaaattatattcatttatataaaatttagagaggaagtcaagtctcgcgagggcgcggccggtcacgtgaccct

SEQ ID NO: 41955 - DNA, 576 bp, Mus musculus
  source 1..576: mol_type = other DNA
ataatgtcatatacaggttgctggcatgttttacattacacctgtatttaaaatgatatataagagattggacaagataacattattaacattatctcttccaggaggtggagccagctctgccacgccgctcttctgcagccggccgcaggtgaggctcccggcggttgaccgagagcaggcgtgggcccgctcgtgccctcgggcttcgccaggccgtggtgactctcaagggtccggacatgtacccggagagcaccggtcgttccgagggcacccgggctcgcgagcactccgaagccggccgcctgtccccgtaagccgaggcctcgcgctcgccgcgacctggagaatcgctctccgaggacgctcgcgctcgcgcgcgcccgaccgcgaggggcgagtctggccaggaggcgcgccaatgggcgtgggcggagcgctcggggcggggcctgtccggttggccaatgggcgtgaggggcggggaccgtccggccaccggccaatgagagggggcggcgcgctcgcggccggcgggggcggagcgcgtgggggcggtgccggggcgggcgg

SEQ ID NO: 41956 - DNA, 317 bp, Mus musculus
  source 1..317: mol_type = other DNA
aaaataaaaataaataaataaatagaagttgccttctatttatgagttatatataagggtaaaaattccaggcagacataggtctgtacactttgcttatatttaaaactaaacttaatagaattgatttttttttttttttttttaaagcttaacaatgcaaaagagtctacttaagtattttatcttgtccctctgctgcagctcccgagggcagagtgtttccagaacaccagcagcagcctctcatgcgagaaccttttaatccagtaacatgcctgctcaggcaagggatcatatccaatgatagactctgg

SEQ ID NO: 41957 - DNA, 77 bp, Mus musculus
  source 1..77: mol_type = other DNA
tctgaacctagtcgtgagctagacctctgtctggaaccgcgctccaggatccgcgcctgagcggtccccggagactc

SEQ ID NO: 41958 - DNA, 249 bp, Mus musculus
  source 1..249: mol_type = other DNA
aagtaaagattagacccttcattttgtgaattattaaattatgttcagttatgctcataatctcaatactctatagagaattgccatgaattttcaggccagtttagagcctctagtcggtggagctcagaggacatcgctttgagtaccgcaagcctaggcctagaagtttcctgtctgtggtcaccaaggagagggagggactgagctccttcgcagacttgtgtgggcgcagggcggagccgccgg

SEQ ID NO: 41959 - DNA, 395 bp, Mus musculus
  source 1..395: mol_type = other DNA
gtaaatattttcctttatgagaacggctgtggtcatggcgtcttgtatggcacgatatataagacaggatacagctatgctgagtcttatgtatgtgactgtcatccttctctaggaagtgtcacagagtcactgcacatgtctatttttagaaagaggttcattgtcaatattagctgtccgggggttacggtggcgcgcgcgcgcgcgcgcacactctctctctctctcaggcctgctgactgcactggggaagggaagagggagccaggcagcctccgggtggcctggccagggtctggcgccaccaaacctgcactttccggtttcggaagccaggtagggggcgcgggcagccagcagctcccgccaagtgggtgagagcgctccgcccg

SEQ ID NO: 41960 - DNA, 222 bp, Mus musculus
  source 1..222: mol_type = other DNA
ttgtaaatattttcctttatgagaacggctgtggtcatggcgtcttgtatggcacgatatataagacaggatacagctatgctgagtcttatgtatgtgactgtcatccttctctaggaagtgtcacagagtcactgcacatgtctatttttagaaagaggttcattgtcaatattagctgtccgggggttacggtggcgcgcgcgcgcgcgcgcacactct

SEQ ID NO: 41961 - DNA, 557 bp, Mus musculus
  source 1..557: mol_type = other DNA
cgcaaataagccacttagtgtgcactgtgacgccaggaccgtgacaggtcccgcgccctaaggttgcagagcttgcggagcctggcacactccgggctgcgaggatctgaacgcgcgtccccgccaggtccacgcgcgccgaggccgccacagcctcgcgtcccggtggctccggagcgcactaccgggcgcgctctccggagcctgggcgtccgtgaccgcgagtactagggcgccggcggtggcaggcaaggggcgcggcgctgttctgccaccggctccgggcagcgggcgcgggcgacctacgggcgtccagacctttgtggcggctgccgggagctccggccgcggctcccctcggctccagcctgggcgccccgggccactcgctgccgccgcccatggggatccgagagtttcccggcggcgcttccggcgcgggagggcagcaggcaggtagcccccgggcatccgcgaccctgcctaacccgcactgctgctctcctggtgggagggagggacgagcttgggaagtttcagcagcatctccgggccac

SEQ ID NO: 41962 - DNA, 407 bp, Mus musculus
  source 1..407: mol_type = other DNA
cttataaatcaatgagttccaaggagttaaatttaattagacctcctgctggaatttgtctgtagaaggattttcagtgcaaatttaaatttctactagcaccatctctctagaaactgtactaaacttcactactgaaattgctactgttatttcagtttccaatgaaacagacagctgtggctggctgcgaacatattatgacagtcataacagggtttctctgtgtagccctggctgtcctggaactcactttgtagaccaggctggcctcgaagaacggagcttggtgccggctcggccgcctccgccaattcttagtttccgcccataggccacgcccctggtgccggaaattatccgccggagaaacggactcggccggaagtcccgcccttctatttgca

SEQ ID NO: 41963 - DNA, 441 bp, Mus musculus
  source 1..441: mol_type = other DNA
gcctcaatgcaggctggagcccagaccctgcctggtggctagcagagctgtccaccattgtgacactggtgttggtggctgggtttcagtctcagagccccaccctcaccttttcttgtgcaaagtgaacaatattaaagtttactactaatgaaactggctcatcagcgactcgggggggagatgtgtctccaccacgcaggatggtagttacctctccttattttcaaaacataaatccagatttcatttgtgatccataactcttaacatgcacccttttaaaaagcagccattttaggccctaggcctatttccaatcggaacttcggaactggtgtaatactatgtctgcagcaactctttttactaaaaactgtgagtggcaggaggcccagtgggaacctctcgccgcgcacgcgcactcgcgcttagggtggc

SEQ ID NO: 41964 - DNA, 721 bp, Mus musculus
  source 1..721: mol_type = other DNA
aaacagtttgcacgatttaatcgacgcgagctgcacacctgcggcgctagggccgcgtgaactggtctgcgcctcagtcccggcgcgcacgcgatcggagggcgggcgcacggggccgcgcgcgccagggagggagggggccgcgcaggcgccgtgcgtggagcggccgcggcggtagcagcagcaacagcggcggcgcaggagctgaggcgcagtgggtgctgtgcagcggccgcgccggggcccgggaccgagctgcacgccgccgcgcgcggcatgccccgccgctcgggctgagctgccccggcggctgccccgcgtcccccgtacctcgcgcggctctgcgccccgggcgccagcgcgacctgctgcgctcgcggcccgtctttgccccggtctggaggccccagcccgcggccccggccgagccgccgcccccgcgcgcgccgcgccgccccgccgcccgtggggacctgcaggcgcgccccgccgcgcgcccgccgcccctcgtgccccgggggcgccgcgcgggcgccgcgccggcccgggctctgccgccgccgcctcctcgcctgcggccgccgccgccgctagtcgcgcagacgcgggcttgggccggccggcgcgcgcgcgcgggatccacggggggcggcggcgtcccctcacccggctcctcctgcggcgcggcgggctgtgcggacatggccgcggcggtggcggt

SEQ ID NO: 41965 - DNA, 314 bp, Mus musculus
  source 1..314: mol_type = other DNA
cagccactacaggttaaatttttttgaacgaattaaccggctacatcataaaattattttgcagtcaatcattgtgtctaatgcggctcaggtcttcctttaaattcaagacagtgagatgagatgctgttctcagccggctcccaccttcgtctttcattgacagtgtctgactcagctgctgcccctgaccccctggtcacggtggcgtctcagccgcgcagactgggtccatctgcgcgtgcgcaccaggcgttcccgcgcaggcaccgccgcggacagcccgccgcggaccttcccccggggtcctcgcg

SEQ ID NO: 41966 - DNA, 518 bp, Mus musculus
  source 1..518: mol_type = other DNA
gacaaactcaggtcaacagcgactctcttgaagtttgccattcttttatttaaggatcacattttctaagtaagtcagaaagcagttattaaacaccttagagtttgcttatcacccactccctgtggagttgggggccagcagcgagggaataggcttatttaaacaagtgggtcaccaagaaactttaaggttgctacagaacagcgccgcccggccttgcaccggagccagcgccagcgcgactcggtggctctcgggcttaaactgctttctcccaggatctgggggcgtgggtggggcgtcccggagtgggcctcccactgcagcctacggcaagtgggctggaggaggacgcgccctgccccgcgctggcccgagcacagcgccgcgggctgcgacgcgcttcgccgtgcggtgaaccgagcggccgggcagcggcggaggcctcggggcgccccgccctgcgcctcctcctgccgcctgcgcgcggtgctgtgcgcccagcccgtcggagt

SEQ ID NO: 41967 - DNA, 332 bp, Mus musculus
  source 1..332: mol_type = other DNA
ttacctaggttaaaaaaaaatctaagtatgaatttacttaagagcactgacacatggtggctcacatccatccataatgagatctgacaccctcctacaatgtacttatgtataataataaataaatataaaaataaatgtttgaaacgtcaaacttcgggaaaggtgtacccttccccgatgagctgtggccgacagccttccctaagcctggggggcgatcgaggtaatccggctacttcgagccccaaattctgggattaaagcgcggctcctgcgcagccacgggctgagctcagccggaacccggaggctgccggaacccggaaccg

SEQ ID NO: 41968 - DNA, 438 bp, Mus musculus
  source 1..438: mol_type = other DNA
ggcggctgccccctagctgaaaggcgctgggggtatcaggtacccatcctcgcctttatgcacggcgaggagaccttgttctaagatcaacagcgtgtctcgcagaacaaccaaggcgttcttcttgcggggtgacagcgcgatccacgcctccgggggcgccggtacctagggattaggagttccgtgaagtagcagctaaccccggtctctcggaactccttgactccaggatcctcgcctacacgagcagcctagttcagttctggggtgcagagatctcgtcaaggtagactagcctgccactggggctggtaccacgcgcagaccctgctccctagtgaccttcttcccgcggagagcacagcagggtacccgacttgtgtctctgaatctccagccaggcaatcactggcagagctggccagtggagaaagt

SEQ ID NO: 41969 - DNA, 424 bp, Mus musculus
  source 1..424: mol_type = other DNA
tgggggtatcaggtacccatcctcgcctttatgcacggcgaggagaccttgttctaagatcaacagcgtgtctcgcagaacaaccaaggcgttcttcttgcggggtgacagcgcgatccacgcctccgggggcgccggtacctagggattaggagttccgtgaagtagcagctaaccccggtctctcggaactccttgactccaggatcctcgcctacacgagcagcctagttcagttctggggtgcagagatctcgtcaaggtagactagcctgccactggggctggtaccacgcgcagaccctgctccctagtgaccttcttcccgcggagagcacagcagggtacccgacttgtgtctctgaatctccagccaggcaatcactggcagagctggccagtggagaaagtccttgctctccct

SEQ ID NO: 41970 - DNA, 405 bp, Mus musculus
  source 1..405: mol_type = other DNA
taagatcaacagcgtgtctcgcagaacaaccaaggcgttcttcttgcggggtgacagcgcgatccacgcctccgggggcgccggtacctagggattaggagttccgtgaagtagcagctaaccccggtctctcggaactccttgactccaggatcctcgcctacacgagcagcctagttcagttctggggtgcagagatctcgtcaaggtagactagcctgccactggggctggtaccacgcgcagaccctgctccctagtgaccttcttcccgcggagagcacagcagggtacccgacttgtgtctctgaatctccagccaggcaatcactggcagagctggccagtggagaaagtccttgctctcccttcctgagacatggcccgggcagtggctcctggaag

SEQ ID NO: 41971 - DNA, 631 bp, Mus musculus
  source 1..631: mol_type = other DNA
aagatcaatacctttaaaggcaacgaacgttcagtcatttactaattagaaaaacgatgctcatttattaaaattttagttaaacaatacatttgatttgctcatgggcaacatataacttttagttttactcttccagaacagaaacactatttcttgggttcataaacccggcaatgaaagctgtctttacggctgggtggtaagctgatggcacctgctgtcccccaagtttcaagcttctcatttagattttgagactggctacttttcaattctttttccagaaaagagaaagcaagtgcgcaaacataacatttttcctttttgtgcttggccacccagatagaaaattggggctgcctgcagaacaccccctcagcccacagagaggtctggctcgggatcccagggaccggacacagactgcggctgggctttccagccgggcggccggcgccctcggtggttcagcgcggtaccccaggcagaaagggccgaacgaccgagctcctttgtcccctccttttcaggcgcggctgacgcggcgcggaggaacccgggagaaagagcttcgcggcgggggcggggcggggcggcttcctgagggacaggcgggccgagtctccgc

SEQ ID NO: 41972 - DNA, 384 bp, Mus musculus
  source 1..384: mol_type = other DNA
ggcctagtcggccattattgggaagagaggcccctcctttgaaatataaatgaagaaaatatctaataaaaatgtggtaaaaaataaatgacatatctataacatcatttttgaaagtttcccatgaaaacttacttttgttgaaacatgacaagacatgctagcatatctccttggacttatagaaatttgttataatatattgttttctgcgaaaacctataccttatttatttatttatttatttatttatttatttatttacttagtcatcatccgtggcacccacttgactccttgtagctgtagctgctagggcacaaagagctggaggcagctgtttgcatcctcttttctgctccctgggcgcaagggatcagggt

SEQ ID NO: 41973 - DNA, 356 bp, Mus musculus
  source 1..356: mol_type = other DNA
atgatgttatagatatgtcatttattttttaccacatttttattagatattttcttcatttatatttcaaaggaggggcctctcttcccaataatggccgactaggcccttctctcatagggaacatactcaggatgagttaatgataattccataatgacattgtacaagaagctgttgttttctgcgaaaacctataccttatttatttatttatttatttatttatttatttatttagtcatcatccgtggcacccacttgactccttgtagctgtagctgctagggcacaaagagctggaggcagctgtttgcatcctcttttctgctccctgggcgcaagggatcagggtg

SEQ ID NO: 41974 - DNA, 275 bp, Mus musculus
  source 1..275: mol_type = other DNA
atgagatatgcttttaaatccagtgattttgttacactatagcagcagaccagggagactagctctcttccctgagtttcagtggtcagagcctggtgtttggacctcctcctggccgaagatgaaggcccaaaacaggactgtcctgcagactgcccgctgcggagtcccagaatcaaggtggcccccgtggaacgtgaggcagaagcctcacgggctgatggcgccgcctcagaggctctatggctcttgcccggtccagaagctgctggcct

SEQ ID NO: 41975 - DNA, 139 bp, Mus musculus
  source 1..139: mol_type = other DNA
acctttttggtgaaaaggagctgaagtcagacctgagatctggaccccaggcggacctgccagtcaggtgaggggacctcaaacaagctccgctctaggtctggctcccctgcggaactgccagtcagacaatgaggcg

SEQ ID NO: 41976 - DNA, 308 bp, Mus musculus
  source 1..308: mol_type = other DNA
taagtaaaatgatgagtcttaacttttgtcatctcaaaggcattttaaattatctttataaacccttggagacagggactaaatataatttacacctactctttgcagggtcctgacaaaagaaagtctattgcccatgccccagccctgggctcagtgtgctccctggacacctcaatggcccagagtactaagttctgaggcccagccagcttgccctagacaaatggtgcctagcctcctaccctggactacgggctccgtgtgcgagaagccgcgttacgagtggcctgcggagctcaggggcc

SEQ ID NO: 41977 - DNA, 511 bp, Mus musculus
  source 1..511: mol_type = other DNA
gtgagtaaatactacaaattaaaaacaatactgttactgtttttttgtcatgagtcaatctcataatagggatataattattgtctttaatttttctgccatttaaactttactttgaaatatctttaagtagatttagattatattataatttactcttttattattaattgtacatacatacattaatacaaattgtacaatgtttcttgtatttaagtctgatcattcattgttggataaacaactcttccctggagaaaagtatttctcttgctctcagcacacaaacacaaccgttttcattgtctttgtttaggcagtcacactagagagactttatgggtgtggcttctgatgttcaggagacattgagactgaactctacagctctgcccttaagactacagttatttgtgagtataagatcaaatgtttagcatttagtagtgatagttgtaggtcctattccaacgatagccaaattttctgtttcaagcagcagtttaca

SEQ ID NO: 41978 - DNA, 440 bp, Mus musculus
  source 1..440: mol_type = other DNA
atcccttgaggggcagcaaagcccggggtagacagggaggtctgcggagggcccattggcaaacgaagggaagggtcacctccctgccggctgccggacctttcctttccggagctccaacagccagattcaactgcaactgcagtcggtgaagtctccacccaggcccagcctgtaaactccggctgctctttcccagagtgagcagctaaaacggtttggtcccgccctttccgaggagagcgagctaagcggccgtgccgcagagctctgggttgactctgaatctccgccccaaaccgccctgccggcttccgtagcgtacaggttgggggcgaagctgcgtcaggccacgcccccacgctcaaccctgaactaaaggtgggggtgggggggaggtgctgcccctttgcgcagactccggagcgacggggcgtggc

SEQ ID NO: 41979 - DNA, 226 bp, Mus musculus
  source 1..226: mol_type = other DNA
aggaacctcctgcaggttcgctgtgcagcactggagcttggacagctggagctgggagcggctgctccagcctagccgtgagcatcactgcccacgctgcctcgctagaggtggaggtgtacgcgcttgcgtgcaagcgcgcctggggccaaaggacccgacatttggtctttggggacctagtagcaaagtgtcctagttgctcctgtgacgcccgccgaggcag

SEQ ID NO: 41980 - DNA, 437 bp, Mus musculus
  source 1..437: mol_type = other DNA
acaacagaggtcactgttttttctttatgagagataaccacacaaagcttgacctccaaataattaagaattatttatttatttatttatttatttatttaatgagtgtaaatatatttcaagacacccatcaaagaaaaatactgaacttttttttttaattacttattttacttatatgagtacattgtcttgtgagccaccagcagtcagtgctcttaaccactgagtgtaagtaacttctagcttactagtcctattgagaaatgagttaatatatcgcagggctcataataacgcatgtttatattaactcagcgcttttccgctgaacctttcacaggcgaaacattcggaactgcgcctgctctgttggcatattttgaaatgcagattcggtttctaaattacgacagtcgtaaaccgaggtttcccga

SEQ ID NO: 41981 - DNA, 380 bp, Mus musculus
  source 1..380: mol_type = other DNA
gcagacggatatgatcccaagggatattcaatttctctgcaaaaacacacggtgtgtattgctatctactaatcgcataagtacactgcttagaaagtatatttatggcttctaagtttcaaagtataaacacattcctccactccggaggctccgagaccgcaacgccacgagcgcacgtgggagtccgcagcccggcctcggtccgctgatcctcaagccagtagagcagacgctgacgtagccacgccccgtcgctccggagtctgcgcaaaggggcagcacctcccccccacccccacctttagttcagggttgagcgtgggggcgtggcctgacgcagcttcgcccccaacctgtacgctacggaagccggcagg

SEQ ID NO: 41982 - DNA, 347 bp, Mus musculus
  source 1..347: mol_type = other DNA
agaatttccaaaatgaattctgatcctgggaaagccttacaattaggattttaaaagcctaaagagaatttcctaatttgcatattaggaataataattttcagggagaactcaaaacgagtctttgatttgaaaactttttccttggccttatcgaagatcgattgaaaggccagtctccatcgggcggaagactgtctctagggaccaatcctttgctagagggtccagggcactaacccggaaccggtttgggactcgattcccattgtgaggcctggcctgaggcgggctctaaggcagagtggcaattccccctggtggattagctgcaacagccatctcag

SEQ ID NO: 41983 - DNA, 291 bp, Mus musculus
  source 1..291: mol_type = other DNA
ctacagtgataactttaaccatattgtagagtaatgtagcacttttctttactgtctggtgcagaaacccaggatgcatataagagttttataaataagaggaagagttttttttttgtttttttttttttttttttttttttttggtgcataagagagaaaatatccagaggctatggcccaggctctctgatactgacaattataataaggtaatagaaattcaaagctagccaaggctacattgtgaaaccctgtctcaatggtgacaccaatttactgtcttcctgg

SEQ ID NO: 41984 - DNA, 250 bp, Mus musculus
  source 1..250: mol_type = other DNA
cctggactttaaactatatcattgaagacctagttctccttaggacatattattttgtattgggatattagaaagctatcttcctttaaaggtgactctgtgaacaaagtgacaatattccatccttttgaatagaaatgaactgcagcctttaagtagttttcttaatttatacttctcaatgttaattcctaatttgctgcagttgcagcaaggaagtctcccctcgcgtgcgcgcgctcgctcgctc

SEQ ID NO: 41985 - DNA, 391 bp, Mus musculus
  source 1..391: mol_type = other DNA
ccagaacaaagcaatttttatgtgctattatccttcatggattaaaaaattcatggatcaaagaatattgacttagcccatgaaccttaaaatttcacattctgattgagactataaaacagtcaagaaggacactttcacaagagcctttctaacaggtagtagtaatcatcactctcagtaaaaatttgtcttgcacaattaatgaaaaaaacgaagtctgtagaaatatgtatagaaaggctgaattaggaaacaattgcttaattttccagtagaaatgaatatgttaaatttcattgacttagaactgatgttttaatagagaaaatgcaaaggtaaacaacttcaattttttttttttctatttgcagttgatactgagcagctc

SEQ ID NO: 41986 - DNA, 292 bp, Mus musculus
  source 1..292: mol_type = other DNA
tccaaaactagaaatacctgatgaaaagtttttcaagttggatcttggaattctaaatcagtgttcttgggtatagactccagcaaactaatctatttattacctttaaggatgtatccttatcgacgataccaagggcatcccctgccagggaagcaagtagttggagcagagaaaacagtatattgactacagttctgaggcagaaacacgtgtggcgagcatttaaacctaactttaattagggaaagaaacatgcgcacacagcaattgtggttatttctcaggaact

SEQ ID NO: 41987 - DNA, 386 bp, Mus musculus
  source 1..386: mol_type = other DNA
ccatgaaactaaagtataaaacggcatttttttatttttattttttatagaccaggctggcctcaaagttgtgtgccaccaagccattatttatccataaatttccaaaagttagagaaaatgactgtcctgtgcatttaacataccacagtgtacactggtgtctccagattaataatatctaaaattaacactttagctgaagctctgcgaattgacacatgatcaacaactcagagtgcattttgaaattgtgctaatgatagactagattgagaatgaattgtgcatgaatatacattttcagccaataaactttgtaaagtcaagatcagtgacacagcaccattggtatgtttctgggaaggaaaggcacactgtttctc

SEQ ID NO: 41988 - DNA, 284 bp, Mus musculus
  source 1..284: mol_type = other DNA
tttcttctatagtattaacatatttaaaatctagaaaacatacaatattcacaggattttgctttgttttttgacctcaaggcaaactagttctagtataatagtcctagcacacttagtgggctgtcagaggatttgaccactcacctcatgctcagtgacagagctattttggctgggactgtgagccaggactccaggatccctgttcccagcgccagacgctgtgacgccggctccctgcagcctgtgctgcagccgctgtccaccggaggggggcgaat

SEQ ID NO: 41989 - DNA, 187 bp, Mus musculus
  source 1..187: mol_type = other DNA
tctgccggatggggcacagcttacagaactgtggctactttttcattcataggtagacatttgtctgcagaccagaaaacaacctgtgtcctactgaggatgcagcatggcccttgaactgtgaaagttacactattaacatgtttagatgttctgcatagcctgtatatttctatggaaacagaca

SEQ ID NO: 41990 - DNA, 366 bp, Mus musculus
  source 1..366: mol_type = other DNA
aaagccctaaagaacgatctctgtgtgtgtttaacttctttggataaaagaccaaatagtaacatatgacttaaagttttactaaaattactaaaagaaatacagaactttctaacaagttgtttgcttccttactttatatgtatttaagaagagggcggagcgtcatcccctcccctaagtggggataggaaaagtgctctactgactgtgacactgggtgtccttatgtaccagcatcctggaggataaatggtgatttttaaatagtaataatctcttttaaaggcttactgcaacatcccgatgaggcaggaatcctccaggcctcagatgtcctacttccggtgcgcgctcagtaggcgt

SEQ ID NO: 41991 - DNA, 409 bp, Mus musculus
  source 1..409: mol_type = other DNA
ttgcttgctgaatcatttcatggcccctaaaagatgaattaaaaatgtctgaattcaggtcatgtagaacagagcctccaagcctcattccaaaattgtactttgggagttgtttctattctttaaacacttcagacaacctgtcaggattggattaaagcatgctcattgtacaaattttctctgatatttaaacaaataaaggattgatgtattctagcaaaaatattttcttcacacattttttaaaattttactttaaagcactttacctatattataaattataaagagagttgtcgataccaagctttccaaaactctgctaaccttcaggtagaagtaggtggaagttaagatttacctgctgttacttcacatgattctgaagtaaatcaagggatgacat

SEQ ID NO: 41992 - DNA, 456 bp, Mus musculus
  source 1..456: mol_type = other DNA
aaagatctattaaaatacattcttttagaattgttatattttgatgatttataatgatgttagattcactgaatacatagttcactggatacagtttctaagaaatgtaatgttcagtttttaatgtataaaaaatacactcagattcaaactgcctctgtgtttgtttctggggacccatacccgactgcggtggtcttcttatactctgaggccttcaaggaaatacagcaaggattctcactgttgctcgtttgtggacagaactttgtctttccttacaggaacaaacattttactttgctattattattacctgaaaaactcagagtagctgttttccctacaaaaggaagacaacatttttgtccagtgaagtgaaaaatatactaggaaaatgctgagtgtaagcatgtttaccttccccaaagtggtgactcatcactatcatgctat

SEQ ID NO: 41993 - DNA, 352 bp, Mus musculus
  source 1..352: mol_type = other DNA
aacaaaaaaaaaacccttcatctttcagttgtctactagagcttacattttataattttcatgtaaaaacaatgtttcgtgcattgtttataaggtttgaacattatgttcactgttaaaaaaacattaactatatgcacattgaagtttctattatgtatccaggactcattacaacaaccggttaagaatcttctatgagataattttacctagcaaacctttcttataagcagtatttccattagaagtgacttattcaggagtgggcacactcacgcatggctccagctgtctagaaaggacttcccgctggaaacccgccagaaaatctccggagattcaggctcca

SEQ ID NO: 41994 - DNA, 386 bp, Mus musculus
  source 1..386: mol_type = other DNA
tcaaatgaatatgaggcatctcagaatgagtcgactcagctctgtcctgctaacaagtacacataaaaccaagaccttgtttgttttccatagggaaagcaatcacgggataaaattggcatattctctgtgtagtgcctacactaagccacaaagaatattttcatttaatagttaattaactgatttccatttgaccagggcaatggagtttctgccattatagcttatgtatgtaagcctaaggcatgtttttaaaaattacactgctttcaaaatatctaaacattttgcaaatattaattatccttgagattaagcattctttcaagtttactaggttgagggattcactgattttggattaaaaatagcacccatgtgag

SEQ ID NO: 41995 - DNA, 288 bp, Mus musculus
  source 1..288: mol_type = other DNA
ctctcccagcttagatgagaattcttccagcctaagcctggattaaatttgcaatcttgtggccatagttcttgaaaggcaattggctgtcactcagggtcagtgatcccattctgacctcatgtatgttcacatacaaaacatgtgaacatacttttcaaatacaatggattgctgaagatcatctctttcacacatgtgctgctggatagtcctggtattgctgcaccaaactctgctacagaagactctggctttctagaagtacaagaagtctctatataaaga

SEQ ID NO: 41996 - DNA, 450 bp, Mus musculus
  source 1..450: mol_type = other DNA
atcctatatgtgcacagcatgtagttcaccataatgtgactctcatcgacagcatagtgtgctcattaggaaacaaataagtttagcaaaaccttttataaaatgcttaagtactacagtcatgcattatacaagaatcttgggtgatatttttcaacatcaaatcatctactacaactagttcagtaaatcatatcaatatatgagtctttatagaaaaaggtattataggcccatgatcttttaatatatgtggtcacttgtacaacttggactttttaccaagttagttacagctctggaaggacagttaaattttccaaagtggaaaaaaatgccccagttttctcttttgccaaggcaggaagcatttcctggagattaatcacatttgccttgcaattaagaaggtttgaagaacttagtaaagaagattgtatcaccctactc

SEQ ID NO: 41997 - DNA, 364 bp, Mus musculus
  source 1..364: mol_type = other DNA
ggcttgagtcctatgcaaagttatagcaatagtgtgctctgaaagcttgtcattaacatgtttgaaacattgtaagtacaacagatgttatggaaaaacccaccttatagtgaatgttttagtacatctatagctgctgtttacgtatgtatatggacgtgtgcatttatttaaaagtgaatgttctctctaactagcctggaacttaccaagtagactaggttgactgtttacctgcatgctgagaatcatgtgacaagtactttcctaacaaagccatcagatgctgcttttggtccccacacaaagcctgcttggtggcttattctaacattgaagaactgtcagtcatactgcttaggca

SEQ ID NO: 41998 - DNA, 392 bp, Mus musculus
  source 1..392: mol_type = other DNA
acacaaacaaaatatcactttgagttttattaactatctgcttattgtgttcaattaaatctcatcacataccatagaagaactttctgtcccagaagttaacaaacatttgaaagttggcaatgtgataaaaaacaaataaatttttaaaaagaatgtttaacaccattaccataaaaatcaaatataatactaaaataaataataataacaaacaattactcatatttaactatatgctagtgttttctgccaaagtaaattatttcaaaattcataacaaaaactaccagttttgagttgggggccttgctattgtcagcgctcaaaagtgagcaccacacttcatggcaatgtgctttgctgttattaattaagtgattacttcatgc

SEQ ID NO: 41999 - DNA, 439 bp, Mus musculus
  source 1..439: mol_type = other DNA
aagccttatctcaaaataaaagtcctctggcttgacacatatgtgcatttgtatctgcacacatgagtacacacacagatgtgcctcaaccctcgttagcatgaggttacagcagcagcagcagtatcagcagcagcaaccagcaccagtactgtttcctgctcaattgtactataatccaaccacgttcaaatcatttaacttttgtctttttttaaattggacctattcattcattcattcattcattcattcttatactgcttttaaagggagtcttaaaagtagggctttcaaatccctaatggatgggattcaaataaatcaagctcatgtgccattaaaagtaacttctctccctttatgattttcaatcacaatgttaccccttcatcagggatgaatcatcacttacagggcccagccctatgtgactcta

SEQ ID NO: 42000 - DNA, 397 bp, Mus musculus
  source 1..397: mol_type = other DNA
ttgtcttgttatccgagataagaaaagtgatcaatgaacatagcactgtgctgatacaggttacatctataaatactcatttattaagtccttaattgaagaggctagacctgcagtagccgctatacagcacctgcacctgcaatgcctgttgatctggctatgtagccactatgtggccacaaacttgttccacatgttataaatgtttagtaaaatccttgtaagatacagaataatgacagatccaaaactttgtcattgataagacttgaaagagtagtaattttatccaataaataagaaaagttttcttgtacttcctcattgttgctaaattcaaaaaagaaagaaagtgtgcaaatgagtcacctatttccactgccatataaatttc

SEQ ID NO: 42001 - DNA, 334 bp, Mus musculus
  source 1..334: mol_type = other DNA
tccatgatcatcacacatctataacaaagaagctttgtggaagtcgaaaagtatttttcataacaaagttttaggcttattaccctgtggaagctgtgtccatcttccacgttagttgagtgatgtgtactagacacataattttagaattctgagtggaatcaaaatgcagcattggccctaggggattttgccaaaaaactagactacaacaggctgtttttgagtcggatgtttttccagttgtagaaaaaaggataaagcctgtcttcaggaagtcctggtagacgactaagagaaccacgccctggccccgccccaggccgcctggcct

SEQ ID NO: 42002 - DNA, 345 bp, Mus musculus
  source 1..345: mol_type = other DNA
caatgattttgcagcactttcggtacgggaatatatagtgcgctttaatgagcactttttaaaaaaaataataatttaaaaatgcatgccaccatgccggcctgccagaattatatttaatgtacacgcacacgcgtgcattccgcaggcgtttcgaggccagctcacgagcctgagccgccttacgaggcgcggctcagggctgccgccattaaaggtgcactggctcgggaaagcctagccttattcccaaagcccgagcacgcaggcgcgagcgcaggcgcaggcgcgcgcgactggcccacagccccaccccggcggtgcgcgtctgctgacgtcacctca

SEQ ID NO: 42003 - DNA, 420 bp, Mus musculus
  source 1..420: mol_type = other DNA
ggaagagcagtcagtgctcttaactgctgagccatctctctaaccctttcaaaatattttttaaaacgtatttatatattaaatatgtgtacaggtgttttgcctcacgcctgtgcgaatacaggtgcaatctcctggaactggagttacagatgtctgtgagtccaatacaagaatcagtgtggttctagcatttttaaaaaacaaagtcttactatgtagcccaggctggcctggaactcacagagatccgtgctgggaaaaggcatttgctgctacccgcagctgtagttctgatctttgaaataataaaaataacctgaaattgagatccatacgtgttttgtttttttaacaaatgttcctttcagctctctttcttgataaaaacaaaaagtgaaaccagagacgggtggccac

SEQ ID NO: 42004 - DNA, 399 bp, Mus musculus
  source 1..399: mol_type = other DNA
ttaagctagcgagctcgatttctgggaccttggctgtcttgacagagtaaagcctgtttaaaacaaaatttaaaaagtaatactgtttccttttgtaaggactttgaaatcttcaaacttggtggtaaatggaatcaatgttaaaacgcggaccggattaaccttagtgcgggtgaacagggcgttgcgcgcgggtccggcaggatctgcgcccgcagccgagcggctcggggccggccggtgggtgcgcacgcagcgcggtcgcccccgggtcacgtgcggccgggagtctgcagacgcgcagggaaagtttccccgggggccgcgggccgcggattcggtgcgggcgggcgcgcaggaggcggagcccgcgaggcgcgcgggcgggcgctcctcgca

SEQ ID NO: 42005 - DNA, 461 bp, Mus musculus
  source 1..461: mol_type = other DNA
cccagacttttaaaaaaacatatttttaaagatttattattatatgtaagtggaagagcagtcagtgctcttaactgctgagccatctctctaaccctttcaaaatattttttaaaacgtatttatatattaaatatgtgtacaggtgttttgcctcacgcctgtgcgaatacaggtgcaatctcctggaactggagttacagatgtctgtgagtccaatacaagaatcagtgtggttctagcatttttaaaaaacaaagtcttactatgtagcccaggctggcctggaactcacagagatccgtgctgggaaaaggcatttgctgctacccgcagctgtagttctgatctttgaaataataaaaataacctgaaattgagatccatacgtgttttgtttttttaacaaatgttcctttcagctctctttcttgataaaaacaaaaagtgaaaccagagac

SEQ ID NO: 42006 - DNA, 340 bp, Mus musculus
  source 1..340: mol_type = other DNA
gagacatggctcagcggttaagagctgggttctcagtatccacaggacagctcacaactgtccttagggatctgatgcctctggcctctgagagcaccacaaagtaacagtgaccttttggttcttaaggttcaagcagaaggaaataacttaattagacttttgcttagtgcaaaaggaaattgtcagtttgaaactgtaggttttgatattaggtcactggccagtgtctagaactaagagttggcgcatgcgtactgagccaaggggcccacttctctcccaggccccgccctctgagcggcgcccctccccctgaacgtggtggcaggtcctaccg

SEQ ID NO: 42007 - DNA, 295 bp, Mus musculus
  source 1..295: mol_type = other DNA
aagaatttcatgaattcatcatttatgctaagtagtactccattgtgtaaatgtaccacattttctgcacctaaatattctgggtatatgcccataccttggtgtgactctaatcaagcaagtgaaagatggaaagatctcccattaatatagtaaaaatggctatcttgtggaacaactcaattcatagagttagagcaatttgccaattcatttggaataacaaaatgccactttggcatgtggctgatgccatgtaggcatagctggaacctgggtacggaggagccggctt

SEQ ID NO: 42008 - DNA, 455 bp, Mus musculus
  source 1..455: mol_type = other DNA
tctttcatctgttaatactctcaagaaaacactcatctaaagtacagttcagctatgctctcagtttacttcatctcagtttaacctcaattcacctcagtttactttagttaagtcagtataactcagcttacctcattttaccttcgtaaatggtaactcgctttaacctcacattgcttaagcttgattgagtaattcagttaaacctcagctgtacctcagtttacctcagcttccctctgcttaattaagtttaagcgcagcttgcctcagtttacctcattggtttaacctcggctcgccgcagtttacctcagctggccgcccctttgagcgagccggcccctcatccgcctagtttccgtcgcgaaggacgcggcgtcggttggttgtcaagatggctgcggcggggtcgcggccgccacctccgccgtcgccctgcgaggtcgccg

SEQ ID NO: 42009 - DNA, 341 bp, Mus musculus
  source 1..341: mol_type = other DNA
gctcacgctagattagctggccagccagcaccactgagagaaatcccatttgttgatcagattgttaaaacaagttttcaaagcagtcattcaaatgaatcaggaggttttccttaaagcaagcagacaccatcggaaaatgccctttttctgttggttttttttcaggaaccaggaacattccacggtaagaacacaactgctcttccttacttaaaagaaacttcctttcgatccctttaaaggtagtaactcttcagcggctctccctagcggctgccactgaggccccgcctgtgccctctgcctgggagcctggggccgcctgtctgcgcggtccg

SEQ ID NO: 42010 - DNA, 402 bp, Mus musculus
  source 1..402: mol_type = other DNA
atgactttaaaggtgatttattcttaaagctcaatggtaattaatgccatttagctttcccagtggaaaacttaatatgtgagctggacaggcagccagtaaggttgttcagtgtcaaacggacctcagcaccgagtaataaaatgaaaatacttgagatcattttataccttttatacaaaaaataaaatgtcacgatatgtcactgtctgtgttgaatatttacaaatattttcaaatcctgaaatctttacaacaactattcagtacaaattctgatatgtttagatttcttctcaaagcatctgatattccaggtggaatcagactagtgagtagctggaattccaacgccagagatttagatctagccagtgcgggccttcctagagcgccaacgct

SEQ ID NO: 42011 - DNA, 452 bp, Mus musculus
  source 1..452: mol_type = other DNA
tccttcctttcttttttaaaaacagatggttcaaatatacaaagatgacataaaatagtaggttattttgttgtcagggactctttgcaggaattcatatatatatattcatctcagagacagtgtttctctgtgtagagttgaatgcaggtattggaattaatgattcctttgaaatgcttgatcaggtcaagcatgtgaaatgagttaataaaatcaattcccctttctacacacctcactgatgggtcaatgcagcgggggaaacgcgcacagggcctggcgctctcagtgggcccagacggcagtgctgggtcgcaaagtgcgcaccgcagggaccgggcggggaccgggcggggacagcggagggtctgcccgggagctgcaggccggcccgcgtgcgctccgcacagggggcgggtttccctacgggcccgagtcgccgtgaggcg

SEQ ID NO: 42012 - DNA, 349 bp, Mus musculus
  source 1..349: mol_type = other DNA
tacaggtgcaagccacatggagttggagacaaaatgtatgtaacaaaatgtatttcataaatactggattgtgatttccaatgtgatttttctggacactgacattttccgaaaaacaacaacaacaaaaaataacaaactgctatttcttttgctgtttcaggagcctctggctgtctgagctatcaacacagcctggcaatctctgccagcactgttagctctcagtggtaccttcagtctttcggagcgggaggggcgcgggccactctgggagagacccagccagtcagggcgcgcggcgcggggcgcgtggacgcattggagcatccgcgcgcgagcccggagc

SEQ ID NO: 42013 - DNA, 264 bp, Mus musculus
  source 1..264: mol_type = other DNA
ttgggagtccagaccctctgagccactggccgggcatgcaatttgctggtaaattactctcagaagactttgtctgtcttgatactgtattacagtagccagccacttcagactgctttcatttaagactgaaaagctgtcttctttggggagaggactacatccttctgtcccccctgtttctctgcagaaatacctacaaagtacctagaggctcttcaacttctcctgagctgtcaaatgcaattagagtaagttgatcag

SEQ ID NO: 42014 - DNA, 163 bp, Mus musculus
  source 1..163: mol_type = other DNA
ttagaggcaggcggatttctgagttcgaggccagcctggtctacaaaataggtgaaacagctttgtcacctgtgtcaattcaggatccccagcctggggatcggcaacatattgaaattaatataaaaccatttttcagtctgcctcgttggctcattgcagg

SEQ ID NO: 42015 - DNA, 290 bp, Mus musculus
  source 1..290: mol_type = other DNA
tactttccttcctgctttgtaagggaatatgaagcagcacccggaggtaagtctgttctccatgttacatcatgacatggtgtcaatgtgcttatcagctacagacactgttcagagatggaaatttcccttaccatttattagagtgcttaagcaggcattgcattctgtgaggttaatatacttacacagaaatgggttctcacatcacgtatgatctcacaggcggccaggcgcatgcgcatcgctccgctttgtagcgccacggggcccgactcccgacagccccc

SEQ ID NO: 42016 - DNA, 289 bp, Mus musculus
  source 1..289: mol_type = other DNA
ctctagctagaatgcccccactggggtattgcagtcccactgggggtccctgacagactgcctcatgaattctttaatgaaagtagaagttagaggtataaaacccaggttttgttattttttttctatttaagagagttcacttaatgaacagtaagaataatggaagttcctcttattcagacttcttagctagaagaagccttagacatagactctccctctatttactaattccactgcaaaggcagtaagtttagaggcctttaagttgagcagtcagtagttc

SEQ ID NO: 42017 - DNA, 432 bp, Mus musculus
  source 1..432: mol_type = other DNA
ggagagcagatactgctatctgtctgttaacaggcttactaacatctggtgcctgcagataaaaatcctggccatcactatttgaacagttttaagatgtttatatgtggatattacataccaagttaaactttgacgttaaaacagtcattctatatcttaatatattctttagttatggtgagtccaagaaagtaggaaactacattttatcatatataactatctcaaaagagcagatgaaatgattttagttgcaaatgcatagattctgaggactttacagttttattgatatagtaataaaaaaatcaagcagggtttattgagctctgttttaatgtacttcttaagacaagacttctcaataatcagtgagtttgataacaatgtctgattaggaattaggtaattctctctaaagcagacttg

SEQ ID NO: 42018 - DNA, 331 bp, Mus musculus
  source 1..331: mol_type = other DNA
acccaagccgccgagaccgaggctgccgccatcttccggattcgacagccgcccgcctggggcaagcggaatccaagtcccgcctcctctctcaggtagcgcatcgcggagcctgcgggaacggcaacgtctgagttgacagacggcagcaaaggctagggcttctggaaccttcagcgcctgctgaggcggcgtttcgtggaccccctggccaatgggctcaagcgcaccagccaaacgacgactggccgtggcttgtgggcggaagcggatttcgcgctctgagagcgtccctgccgaacctaggccagggactgggcggagccgagga

SEQ ID NO: 42019 - DNA, 480 bp, Mus musculus
  source 1..480: mol_type = other DNA
ttccggctcctccgcgcgcgctcaggcggggcctccgggaactcggctgccccgcccgcgggctcttctgctgctgtggcccagtcccggtaactgccgggtcccctgcgtctccctccgcctccgccgccgtcccgggacacctgccgcccgccccgccgctcccgtttaggcccggaccgcggcggagggagacgaagcgggagctaggcggtggattccgcttcctcctcggctccgcccagtccctggcctaggttcggcagggacgctctcagagcgcgaaatccgcttccgcccacaagccacggccagtcgtcgtttggctggtgcgcttgagcccattggccagggggtccacgaaacgccgcctcagcaggcgctgaaggttccagaagccctagcctttgctgccgtctgtcaactcagacgttgccgttcccgcaggctccgcgatgcgctacctgagagaggaggcgg

SEQ ID NO: 42020 - DNA, 387 bp, Mus musculus
  source 1..387: mol_type = other DNA
tgctctcaataaaccctgactcaccgttgtcagttttgagagttttaaatggcaattcgtactcaaaaccttccatcacaggcagggattgtgctctgtaaacgaactaagctgtgtagacttctaatgcataaagaacataaagttctttgagatctgtgggagcaaagtgctgcaagaccgttagatttagatccatggagagaaagctgaatctctgccccggaggaaggaacgttctagcgtccctaggtctcagatcctctagcgagctctagcttagattggagtcgagcctcggagataaactctcgcctcccgcgattggccggagccactcattggagggagggggcggtgcccagcgcggctgccctgaaggcggcg

SEQ ID NO: 42021 - DNA, 528 bp, Mus musculus
  source 1..528: mol_type = other DNA
gggaaagtccagcttggggctgccttcctcagggtgtatcctaaaaccctgtaggagtcacgcagtggattaacactgggttttcagtgattccgtaaacagcttgttttttaattaatactaggctcaccaaacagcaagtaaaccacggccgggcgaacttcctttatcagtatttatttatttatttatttatttatttatttatttatttatttatttatttatttatttagcaggctgcctctaccaaaaacccggctttaacagggtttcttaactggtctcctctgtggacatctccccagcgccagccctggggacagccccttgggctaagccagtccagcgcggagggggagctctggcacacagcagcgccgcggcaggtgtccggtctccaggggtgggtgcagccgcagaaagccgcggctgagcactgcagccatcttcggggtggaggcggagaaggggcgcggccttggcccagagccgccccgccagagaggctcaccgcggacttccctg

SEQ ID NO: 42022 - DNA, 578 bp, Mus musculus
  source 1..578: mol_type = other DNA
gagattttattttattcttttttaaaaaaaatttattcttttttttttttttttttaattaataaaaaacaaatttcttttaaagtcacagtcaaacttattatgttaaaatttgtttaaagtccccagtgacatttacattaccccagaatcttgttgactcaattttcttctaaagcagttaccacaacatttatcaaggctgtaacttccgcgatgctcagagctagcctaggctatttagctgtcaaataagaattgcagcctaactgcagggctactaaatctccgttagcttaagcagctgctcacacagatcgtgtgtgaagtgggagtttctccgaggcgctgcaccggtgaccgccccgggctcggcttcagctccggaccaccatccctgcaccgcggcctgtacgatcgtcacgggctgcggcggcgactcggctccccggtgccacctcccagaaatctcggcgccgggggcgccaggcccaagagcttccagtttttacaccaggggctcggttgagacccggaagcaaaaccttcgcacttccaatggctgtggagaactccac

SEQ ID NO: 42023 - DNA, 393 bp, Mus musculus
  source 1..393: mol_type = other DNA
gtaaccaaaagctgagtatggcaaaccgtcgctgtttacactttgaacccatagaaggctccagaagctttgaactggcaacgtcagttctttaaggagagagaaccaggctccctccgtccatccctctctgtcactgctaggtagaaagaggggaccatctgctgtggggctgtctctagatcccctcacatacagtgtgtctacacaagaatgcccatcatgacaggaaagtcagactctgttactcaaggaataaatggtctcttatcataggaagtctgccctgcctactatcctctccggacccctgggcaggtggagtgcaagtctctcattttaaataaatgcggtagcctagcaacgggcagggctgctcgcaggctgtggggc

SEQ ID NO: 42024 - DNA, 377 bp, Mus musculus
  source 1..377: mol_type = other DNA
caactacaaaggcaggtgactacatgacccctgccctccaagtaggggcttgggcagcagccactggcctctgctctcagaagacagaccatttcgaaggcgggcagagtcacagacttcaaattctttgcttctgtagctgttctgttcctcagtggagcacatagaagtactagggcctggggatcgctttcacctggaaattccacttagaagaaaagttggtcctaaccaaacctacaagggagccagtctccctttttggtctcagggagacacgtcagcctgagtcccggcagtttccgaaatcccgggaggggcgacgggaaactggggacgggctctagggccccgcggccggggccggggcggggtga

SEQ ID NO: 42025 - DNA, 430 bp, Mus musculus
  source 1..430: mol_type = other DNA
attctctttcttcatttaaaagttccaaaggaaggacagaaaagaacggaaatgttcaattttaggagacccttccactacaacgttggcgacaacgcttaatgcatatagctatatatctatatatttatatatcttaacaagcaatgcgactataacccttgccttcaaggctagtggtttcgcaggctagtccctaggctgcggggtctactgaggagcaggagccggacgcggaccggctcctggcgcctccgtcctcgcagaaccgcagcgaacgaactatgaagcaccggtttcaaacgcccgccccctaagctgccttggctccgcccctaggacacaactccggaattgcttccgggtgtggagttctccacagccattggaagtgcgaaggttttgcttccgggtctcaaccgagcccctg

SEQ ID NO: 42026 - DNA, 334 bp, Mus musculus
  source 1..334: mol_type = other DNA
gacctggaagctctgaagagaaggcttggtatttaaaatattaactggtaaaatttaaaatacatgtctcattttaaatatggattaaatactggattaaatacttaatactacttgaaataattgtttttagaaacttgactactagaaaactttcattttaagatttatttatttatttaatgttatatacattggtaacagacagttgttaaccacctgtcttaactgtgtttctggcatggtttcactgtgtaatcgaacactgtgattagagttgtgtgctactctcagctcttaggtttacattatgattcataaccatcagcagggc

SEQ ID NO: 42027 - DNA, 380 bp, Mus musculus
  source 1..380: mol_type = other DNA
gcaaaatcttgaatacattattgaattctaatttcctaatggctaacagattgacagctgcacatttgcattgcagatttatttggcaatgtacagtacattttgtaaacttgcatcaagtttatgaataaagaaccatttaaaactaaaataaaaaaaataaatatttttatatgtgggtctgtgtgtgggagcacactttaagatttattcgaattgttacatccattttgggtcattccaaacgtttgtgtaagcttccctcacacttccagagtggtgtgtgatgccattctatatacatttatgattgcaaatgataaagactgtatgctcatcatgcgcctgcgcattctgggggtccaccgggccctgcccac

SEQ ID NO: 42028 - DNA, 569 bp, Mus musculus
  source 1..569: mol_type = other DNA
ttctacttaatttcaagtttaatattccattgtccaattaagcttcatcactagtgacaagagatgacttcttagggcctataaactccattaagggatttggtttttcttttttcttttttaaaagaactatcagaactattttcttaacattttcaatatttcctttcttcaaactcattttttaaaaagctactatacaccaattcattaagcgcttaaattcttaacttattgtcttggtatgcttaattaaaaaatcaaacccaaatatggaggaataggatgcatttcctaatttaaagggaaccctccattttgagagagatagcaactgttccagttctcatctcattgggtggagccccccatctgcgctcgggtactgacagatcactgtcgctgcggtacacgggcccttctgaggtcctgagggggcgaggccttccgaatcgacctgcgaggtggccggccgcccacagccgcccgccccaccgctcaaccgggctcaggattggctcctgtgaggtgacggaagaatctagacattctgtgatgtcacgtcatca

SEQ ID NO: 42029 - DNA, 502 bp, Mus musculus
  source 1..502: mol_type = other DNA
tcaaccttagtgacctaattcggtggaatttgaattcagtgtctaaaggtcacagtaagctattccacagtcttttgatacccagtcactttctcataaggaacagatagtgacagatcatttcagtaatgcactgtggctctgactacagtgtacttagatataataataaataaatcttaaaaaaaaacagcatgaagtggccatttctggctatgtcatgtgatactgatggtaggcttgcatagctagccctgcaataccatatctgaattacaaccatagcttctgtgaataaaaagaactcagaggatgctggtaggaccagtcacactgccccagctggtgtctgactccacagctgacctgtttcccccaggggcgcagcacccccaccccaccaccccttcgaggcttctgggggaggtaccccaggtgaggcgccagcggggcgctgtttctcggagtccaagagccctggctgggcaggacagccagcgca

SEQ ID NO: 42030 - DNA, 487 bp, Mus musculus
  source 1..487: mol_type = other DNA
tagttcctctaatgcacatattataaaggttgcacatatttacaagcgctagtgattttgagaaagtcctatgtacgtcttcaacacttactataattgtttcatgacctaagaacagaaagccacatcctgaagtgaagtcctaattgcactatcactactatttctctcttcatttggtgtacgtaactttctacgtgcataactgctccgcgcaggactttgaatcagaggccaccccatactcttaacactaacatgggttttatggggcatccccagctcggcgaaggcggcgctgccctcccacccgcgggactccgaggcggactccgaggcggaacgcagagcccgcacgcactcggggcttccgttcgccccggacccgcgggagagcggcatccgtacttctcgcgagatccattgatgacgtgacatcacagaatgtctagattcttccgtcacctcacaggagccaatcctgagc

SEQ ID NO: 42031 - DNA, 503 bp, Mus musculus
  source 1..503: mol_type = other DNA
atagcaatggaaaccctaagacgctgctgtttgagtttactgttcactagaagtcaaggttcaatgtggttaaatgattgcacattttacaggaaattatcaatcaaaatttaattgttttttttttttttaaaaaccctgtagaattatttaactttataagataatgcacatttaatttttgtaaaatctcagtgccacttttttaatgactgcaaaaaagagagacggaaatctcgattttcagactcacatttccaattctgtgggtttgtcacctgaaaaatcggtgattttgtgagctgtcatagactatgggtacgaaaatccttgtaaactaactacagctatttagtaacttacagcccaaacttgtgaattttcaacatgaattggttgagaatcatgtccaagtctagatgtggctcctgctagcaggtaggctgttgcctgcacccagggcctgtgggaaattggcagagccctggaggcccggagcatct

SEQ ID NO: 42032 - DNA, 355 bp, Mus musculus
  source 1..355: mol_type = other DNA
ggctctgcaagaggcatcccttgtctatcaatataggtatatacacaagtaatgcatcatgtgtattcatgacactatgctaactgtaattgttttaaaatgcaatttaaaaattctcactaagtgtttgaaggctgtcaataaaacaatagaccagccctccagtgagtcttaaggttaccttactgtagggaatgtgcggcaacgtgggatcctcggactgcacagacccagccttgcagtgtgactccacacttgctgtacagaaactgggctgcagccgggtagcagagccggtgtgagctgcgctgggaactgcggtgctgcgcgtcaccgctctggctccagcgggagc

SEQ ID NO: 42033 - DNA, 259 bp, Mus musculus
  source 1..259: mol_type = other DNA
ctgaagtcctggcagtgaggactgactggccttcgtgtctcctcagcccctagccctgagaggccagcaggggtcttaggctgtctgttacagcctgacacatagggtgtctctgagatagactggatggataaagctggctttgacatcccaccccaccatgttcttagggattaaagctctaaacttcgaattatctaagtgagcagctgtgatgctgctctacacagaaggttctaggagcagccagaatattaga

SEQ ID NO: 42034 - DNA, 312 bp, Mus musculus
  source 1..312: mol_type = other DNA
tgcaggcagtaagccagactgtgtaccagtgccctagcctccagccccgtgactagtcctattttccctgcacaaaatcaatgtgctttgtacataatcacaaggaatgtttttatttatttactactttttgtatgaaatttcctttggagacagaacataaaacagggtgcaaatgcaggctgcccctggtggccctgaggggcgtgcacctgcgtgcctcagaggccccaggggtctgagtgggctgttgatagaatctaagttatttccaagttctcacaggttagaagcagtcacacctgtagcagg

SEQ ID NO: 42035 - DNA, 295 bp, Mus musculus
  source 1..295: mol_type = other DNA
aaaatggagtacccggcttctactttcagtcagcacaggactgcgaaggtctctgatggcccagggaaggcgtctatgcttggcacattcaccttccaaggccgtttgccgtaaatggttggaactgaggtagggcaaagggctgggcatgccctccccttacagaactctggaaagatgcagagttgcacaagagttcatcttcagcatcggctctagggtcttgtgcagccgcgctcgcccgcgtcagcgcgcttccggaaactgctcgcccctgggaacccggttttccccg

SEQ ID NO: 42036 - DNA, 394 bp, Mus musculus
  source 1..394: mol_type = other DNA
tgggttcaaatccaagtctgtccagcttcagagccctggactgaagttgctggctcaggaagagctctgtgttttttattcaaagatctgctactgaaatttatctttgtggcccagtcttttatcctgaggaaatgaaaatctaagcttttcgttgactagggcaaccacatgaatgtttcctgtagcttcataaaacaatccagaaggtattacatcatcctttctgacatcccaaaagagatcagacctttttctaggggagaacccatctctcagatggttaccctgctgtccagtcatgcatctcttgggtggctgcgcaactctcccattgagggaggtctgcttgcacaagttgtcctgaggaggaggggcaggttgactcccaggc

SEQ ID NO: 42037 - DNA, 229 bp, Mus musculus
  source 1..229: mol_type = other DNA
tttgctcggaatcttattccctagtaagaagatctagctctgagtaactgccacaactagcttgggctagtcactcctgaggattccagagtgctgagattacaggagggccacctctaggggccactgtcctgtggtggaacgcccacctgagccaggtcccagacagaacgcagctggatggatggatggatggagcataactgcatctactccacagagccagcct

SEQ ID NO: 42038 - DNA, 470 bp, Mus musculus
  source 1..470: mol_type = other DNA
gagtagcctgctcatacaacccaagacggggtatttgggccaatcacagccatttgtttggctaaacaccggtgtaagccctggcccaagctgtgcttactgggccaggacttgctggaggcagctccatcaacagatagttaactaccgtcgacagtctttgtgagtgcttacataaatgtaaagcccttacgtacgtcttcatcgttaacttcacgaatgtaaagtcacctaggggaaacacctctgggagtatgttcccagagaggtttaactaggaagtgaaaacctacccggaaagtgagtggactcatcccacggacgggctcccagaccgatggcacttgcactgcagcggctgagcccggtcagccggaagttcctggctctcacgtgcaacctacaggaaatgtccgggcagctggcccttcgcgcatgctcatagtgttccgcgagacgctgcgcggagg

SEQ ID NO: 42039 - DNA, 313 bp, Mus musculus
  source 1..313: mol_type = other DNA
cacggtggaggagaaaccaactcctacaagttcacacacacatgcatgtacatacaaatggtggctacagtgtacttacatataataaataaataaatctttaaaaaaaaaacagtaactctaagacaattaacttttagcttaaatgtcaaatatagagtatactgtgaagtatacacattgtatttacatacacatgcacacaactgtaaaactaattaattacttgtaattcttagtgcatatattttgtttgaagaccatattcctagaccgcagaggtccctcggccctgctcacatggacctggcag

SEQ ID NO: 42040 - DNA, 323 bp, Mus musculus
  source 1..323: mol_type = other DNA
cctggacagccagggctataaagagaaacggctctgtgagcactgcgtgcacgtggttttccttgcttttttaaattaacccaccaaaactgaaatttaaggttgaccaatcaaagataattcctaggaaccgctgcactttcggcaacagcgacccggagcctcgtgcggcctgcggatggcgggattccggcccgctgctctggccctacaagagcgccgtttccgcgcggaccgcacgccctgcggccccgtcgcccgcagcagacctgagcgtcccggcgccacgaaatctcgcgtgagtacgggcgggcctccgggag

SEQ ID NO: 42041 - DNA, 365 bp, Mus musculus
  source 1..365: mol_type = other DNA
caaatatattgcacacaatatattgctaattattaggtacttatgatataccacacttttacgatatactagactagtaggctaaccacacacacaggtctttgtttgcttctaggccaacaactttacatttgaaatgtgtttgtctatgaggattaaggtgtttgtaatgttcccttacaacttagtccgattccacagactgttggacagtggtctacaaagtgccttccaggacagccagggctacacagagaagccctagtctgacagagagcttggcacactgcaggaaggtctaggccaagggagagccggggtaccgcccctcccggaggcccgcccgtactcacgcgagatttcgt

SEQ ID NO: 42042 - DNA, 338 bp, Mus musculus
  source 1..338: mol_type = other DNA
ccctgcactggaagagtaacaatcttcaaatattttttggcaaaaggagattagctttcctaagacgtctcaacttttaagaggttgatttaaaacccaaatgtgtttggctaaaagtccttaataacatttagcttagggccttatggggctttaatactgataagggacaaggagtcccattttatttataacaagctgaacattataaataaaccgccatagggtgggcgtgaccgcacgcgtgcgtctcctcctccggcgggctaggcggcctggcctgccgggcgtccgcagggtgcagggtgccgcgtggcccggccccgcgttagggagca

SEQ ID NO: 42043 - DNA, 403 bp, Mus musculus
  source 1..403: mol_type = other DNA
aagttcagaattctcaaggaagattaagaaagaatctacattttctaaaataataaatacttagtaaagcttttttcgttgcttgatttcagagtaagaaatactataaggattattttactactatagtaaacatgattgtgattctggaaggaaaatttgctcatctgcagagcaattgaaaattggattaaactcctggactcttaaattatttcatatttgtgtgttttgcctacatgcatatgtgtgcagtacccaagatcagaaggtatctgtgcctggagatctaaagtttaatgccattgttggttatgaatatgatttcctttcctattcatgaaataaaaaaaaagttattatctgagctttctcttcgaactattaccactgttcctactgt

SEQ ID NO: 42044 - DNA, 319 bp, Mus musculus
  source 1..319: mol_type = other DNA
tgattcattcctatttgtctctgaggccatgaaagtggaatagaccaaaagcttaagaaggtctttctggattgttggttccaagactgactcggtttactaatttgccctgggcactagaggaatgatgcacttgatagtatgtgaactgttctgaacccgcaagctgcgcgtgcgtgcgtgcgtgcgtgcacgtgggcggggctgcgcgtgcgccgagctggaggtgggcgggggcttggcacggcgcggccttccgggcggcccctgcggaggcggtcctaagctggttcccgccgtccgatcccgccattggcgg

SEQ ID NO: 42045 - DNA, 432 bp, Mus musculus
  source 1..432: mol_type = other DNA
tattagtcccctatctgatttaggataggtaaagatcctttcccaatctagccattgctgttctgccatatcttcataatagtacatgtataagtgtattgtgatttctatattgtgtgtgtattctatatcatatatacacatatatggtatatatatggtacatactgtcattttctcagtgaaatcaacagggtcagactgagattctgtcaaccaattcccagctggaagttactaaggtgctcgcgcctctgggtagccgcgggccgcagctaagcgggttgggcgggctgaggactgacctggccgcgccagtgctggggagttcccgctagaaggaagcggactggtgcggaggccgcgtctccatggcaacccactgggaaccagccgccaactgcgctgggcgggcgggcactgcgggcggga

SEQ ID NO: 42046 - DNA, 350 bp, Mus musculus
  source 1..350: mol_type = other DNA
ggtttgccaaagtttccaaagaaaagctatctcctagagatgccattgcttaaacagaaattctatttgcaagacattctaaacccctttaaaggaaaatgctttttaattttaactgctgcattaaataatgcaaggccctttgtttttttagaaatctgctataaaagcacagaaagcctgagataaactcttaatctctggagtttggttttatgtgtgagctttgcagtgaaaacaccattcttgacaaaaggccctgatttctgtttaggaaataatcagagctcttggtagcagctccgcctgctgccctgccttccactgcaggcagactcaacaggaagcag

SEQ ID NO: 42047 - DNA, 518 bp, Mus musculus
  source 1..518: mol_type = other DNA
ggacttccaattgaagtgaactctttccacctcaagttgcattgggtcaatggtgctttatcatagcaatagaaaccctaactaaggcagtccatgccatatatttatttaaaaaaaaaaaaaaaacctctgttaacagtgcttttcaaagtaagttaaactcacgcaccattgtccttagctagcaacagtgagggctcttccaggtactgtcattgcatttcctccgatgatagggagaaggtgcccctccttctggaagtccactttaagctgaaacggtttccgcaagccagcttcgtatgcagactgagaatccctgctgcaggtggcacagtgacttacagactgcattgcgctaccatatgacaatgtgccaggtcgggagttgcagtctgcctgcccggcatgcgaagcccggggattcagaggatcgctcctcagcttgtaggcgccgcgcctgtcaccccgaggcgcagacccgcgtgggctacggtcaaggccagcccgggccccgc

SEQ ID NO: 42048 - DNA, 550 bp, Mus musculus
  source 1..550: mol_type = other DNA
ttctcaagcctgggcctaaaggcctagaattttgcttttacgttatattttttcacattcataacaatgactataaatgacttaacaatggcataaaatgaaaattctattagcttaaataaatacattatattttttgttgtaacacataagtttgatatttctaggcataaaaagagatacagaaaatgagaatacttttattattgatagatcttcattaataaacttgggattattggtaaattacaactacctgctatttcaaaagcatcatatagaaagcatgtgctttattaatgtaataatgtgttttgcacactaaaaatgtcacaagacctactgaaagattgaatgtaggttacgtgatgactaacgtgaaatttcaatttagaattgtgattgactctaggactgcactcaaaacataatttttctaaagtcctgtctttgtaagagggctgcgcagtgaactcggcgtgccgcgcaacacaaagcactctccaccgcccgacgctggcccgtcttccggtccggaacgttcgggaaa

SEQ ID NO: 42049 - DNA, 454 bp, Mus musculus
  source 1..454: mol_type = other DNA
tttacagtcatcttatctgtagaaattttagagaagttatggtttcaaatgtcacaattacacccactcttctataattaataaataccaatttgataactgtttcgaaagctagcattgaacagagctgatctttgcaggtcagtgattgtttccaggtaaaattcagagtctgctataattttatcatctaatgatagtaagaactgaaggttatgagtctagcatagaattaacactcaatcctaattattgacagtacaactttaaaaaatagccaattaaatgaagtgggctgttttcagtcaatccagttgctcatgaagactatttaatgaaaacatttttagaccaatggaataaaattacaaaattatttaacatttccagcaaccttttgttggggggattcctgaaaaatgcttcaaaataaagccagggttttttttagcta

SEQ ID NO: 42050 - DNA, 216 bp, Mus musculus
  source 1..216: mol_type = other DNA
taattttgccattgttatagtaatgtaaatacctggtcatgaccctaagaacgtcctaaggacagcatgtgcttgaagacatcttctgactagtaagacaatctgaagtccaagaacgattactggcagtcagaattcttcgttacctccagttccacccctgggggtgatcttttatacctaaaacccggacaaacttttgggcggaagtctcag

SEQ ID NO: 42051 - DNA, 477 bp, Mus musculus
  source 1..477: mol_type = other DNA
tatagtacaacacaaatgaaaccttttgttgagtaaggtatgctaatcataaaatttctgtatacaactgtcactacggtagtaagcagaaaatagtggacgtcctagcttagtcctattgggaagtaggagaagagtttctattcttcaggtgaatggtgagtatcttcaacagtgtgaagatactcatgtcactgagacaggcactgaagaatggacatgtattttatgttctgtacgttttataatttttaaatcaaaacaatatgactctccttttcttagtaataaataaatcttaaaaaaaatacatcctagaagttaagtttgtattttctgttaacagcacatatcaatagatgagctgaattttatcacatgcacatgttctctgttcttgttatttattatgttccacttcaagattatgtgaaacgttccttttggatctaataacaaagggccattgtgactttt

SEQ ID NO: 42052 - DNA, 245 bp, Mus musculus
  source 1..245: mol_type = other DNA
tttcattctatgactaataaaatacaaatttatttttgatttaaatatgtgtctaaatatcttaagtaattgcatacaatatttaaagtattgatgatcttagaaagcttggaaaaagcatatatatacatatatacatatatacatatatacatatatacacatatacacatatacacatacacacatacacatatatatattaaaccatttcaatctcatttagaagcaattaatcggtttcg

SEQ ID NO: 42053 - DNA, 305 bp, Mus musculus
  source 1..305: mol_type = other DNA
tttgaaatgtaaataaagtaaatatctaataaaaaaagcaattttctaggtgcacgtgtgccggcctgaggacaacttgctgaggttatcatcaggcttggaggcaagcttaaaggcgtgtttctcgtctaattctgtgactagagacacaagtacctggatacttaagtgggcgctttgacaggtctgtcctgtgtccacacgggcacaatcggtaactgccctgcctgaaggggcgcagtggtcggaactggtcctgcagccccaggccgggagcggaagtgccgttggcttcctcagaggcg

SEQ ID NO: 42054 - DNA, 405 bp, Mus musculus
  source 1..405: mol_type = other DNA
taaaatcttgtgactttctaagttatatttctcaaaggatataatttataaggtttaaagattaagcatagcttaaaatttaaataacatttaaaattaagtacaatatattaacttaatttttactcttactgtttactcttaatgaatatgtttgtaaatgaaattgtaatgctaatatagtaaaattcaagactattgacattttggccctaagtaagtagaatttgtcgacttatctagcagtcctcgaatcaagaatttaacatcttatttgagatatctttatgaaaacacacatttgtgttcacattttaaatttttcatcagaaagtctcaggcagacctggcagtgcatctgcccagtagtctttgacatccggggaaccgaaatttcaattccgg

SEQ ID NO: 42055 - DNA, 305 bp, Mus musculus
  source 1..305: mol_type = other DNA
taaatgcttttactttcgtcagaaagtgattatagcttcttgaattcagcctagtaacattacagttttcagcctctcaactgttgcgtggtaactgggcatttttcctgtgacttgagatgacaaaaacccggatttgaagcatcttgccttctgtttcctactggactagggtgcactagaaaacgctgggtacccacaagaaaccctgtggttctggtcctggcaccgcggtcaaccgaggtagactcccgggcctggctctgcagcagaccgagcgcgagcggaagtgacgtcatgcccgc

SEQ ID NO: 42056 - DNA, 321 bp, Mus musculus
  source 1..321: mol_type = other DNA
tactctgaattattccaaaaatattaagtcgtttgggccaaaccatgtacatgcctgcttactctgttaaaccatgcatacagggtttcatgtatcccagacagactggccgtaccatctacggtactggcgatggatcccaggggtgatgctagtccgggctctactaacagccctggggtcgacataaaggtgtctggagacagcacaagcttttggaggcgcaccccggcctggtccaagtttttctctccagcttggagagctccaacgtggctgagaactccgagccggaaatggaagtgacgtcacggccagccc

SEQ ID NO: 42057 - DNA, 279 bp, Mus musculus
  source 1..279: mol_type = other DNA
taaaaagtctttattccatatcctggcgacatgtttcagttaacgagtgtacattaaccatgaagtcaattgtgttaaggtcgaacactttgttactgcaataacctcatgaaacagcatatttgcatatggaacttgaagtgctaactctctctctctctctctgtgtgtgtgtgtgtgtggtgtgagacatagtctcaaaacgcagaaatctgcctgcctctgcctcctgaatgctgggactaaaggtatctcccgggcttcacgccaggacggaag

SEQ ID NO: 42058 - DNA, 367 bp, Mus musculus
  source 1..367: mol_type = other DNA
aaagtgtacattgttttaatgtctcaaaattatatcattgagagctacatgtatagctcaataacagtgtgttttacaaatttttacaattctatacaatttgctcaggcctgtaatcaggaaaatatgcaatttaaggccagcctagactgtattgtgagatcgtgtctcaaaacccccaaacaaaattatacaataaaatagtaaaattgtgtgtagttgaactagtttcttagggcattcatttcatgaattgccagatttatcaacagaaccgtccgtctcaacagcatgcaaaggcctttgagaggcatttgtcaccgttgccttccctaacggagggcagagcagcctgatggagtcagcg

SEQ ID NO: 42059 - DNA, 106 bp, Mus musculus
  source 1..106: mol_type = other DNA
ggaccttgttccgcctaagctaggttttacaacggcactggcctccaggcccccgggcccccgggcccccgggcctcctggcccctgggccccttggccacgcctc

SEQ ID NO: 42060 - DNA, 197 bp, Mus musculus
  source 1..197: mol_type = other DNA
tggggtggtcggactggccaaaccggcgcgactttcagaggcccgccgagaatccctacttttctaggaaagtgcccgaggccccgggactggacaggcgagactgactaggcctgactggctgaggcgtggccaaggggcccaggggccaggaggcccgggggcccgggggcccgggggcctggaggccagtgccg

SEQ ID NO: 42061 - DNA, 385 bp, Mus musculus
  source 1..385: mol_type = other DNA
caataaataaataaataaataaataaataaataaatacatggcttctttcatgaacttcaggaaaaggatacaatctcccagagacacgtggtccttaaaaatcgtgtacctgaaaaccggggttgcctgaggtgctcaccccaatgccagtttgagcagctatcagtttcttcaagtcgccgatggtggccagtcacccctcggtggatacttcattgtggctggagctacaccgcctttcggcccagtccagtttcaattgcccggactacagacagtcgcgactccgccccttaactgcggcagtccgggccccagactcacccgcaacaggttcccaagtcttggcagcttctagctcgagcgaggaaccccggccggagt

SEQ ID NO: 42062 - DNA, 228 bp, Mus musculus
  source 1..228: mol_type = other DNA
tttcgagacggaaacgaatccggtaaagcctgagaagtcttttcaggaccaatagaaagcaagaataatgccttttgctgcctacgcataaggattaaattttgtataagtttaatctggaacaagattaaagaatcagtttgaggctgagctttgaatgaaagcagagcacacctgcagccgggattccgcggtaggggtttcttccatgatgaaggaatctccaac

SEQ ID NO: 42063 - DNA, 334 bp, Mus musculus
  source 1..334: mol_type = other DNA
tgtctgtcctgaaattcactttgaagagcaggctgttctcgaactcagagaattgtgaaaaccaaacgggactggtttcgctttagccaaatttaggctctacatagttagcctctgcatagctgcatagtcaccaaggcaactgcattgctatggcaacggcaaagtacagcaaaagtaccttgtccgcgcggatgttggcggacctccgagaatggctgcctcaggagccagtcaaataagctctattttgtggcctaagcgaaccaagagtggcgtattggacgagccaatcaccagcggcgctgctctggcgcggggtcagagccgcgga

SEQ ID NO: 42064 - DNA, 273 bp, Mus musculus
  source 1..273: mol_type = other DNA
ccaaattccaaggttcatgggcttctcaaagagagggactccttcctttgtacagaaagggttaagtgtagctttaaaccaaaccctaattatagggtcttactatatagccgaggccagcctggtctacaaagtgagttccaggacagccagggctatacagagaaaccctgtctgagacagaactcaggtcctgcccatctgtccggcaagaatggccgcccccctctcgtccgggccccgcccggcaagggctctagagcgcagggcgcg

SEQ ID NO: 42065 - DNA, 319 bp, Mus musculus
  source 1..319: mol_type = other DNA
agggggaggacctggggccccagcacctgagaggctgccaggggcccacagggtgaagatgcctgctgcctgctgaaggagagaactgactccacaagtggtcctctgacccacacgtgcaccaagttgagacaggtcagactaaattgtcgtctctgaagtttgagaccagcctggtctacatatcagttccaggatagccaggccagagatggaatgtctgctagaagagatttaagcctgcagaagtgaacagtctacagctgccttggctggtcatcctcagccaagtcctccctgggcatcctggctctgcaag

SEQ ID NO: 42066 - DNA, 347 bp, Mus musculus
  source 1..347: mol_type = other DNA
tcccacattgtgctaggatggtgagtcagtaacctggaccataagggccaccattgaaacaggggagggtagatcagtttccatttcccccggcatccacctttggtggtggtgggagccagatcacccagcaaagatttctgtgctcctggatcatagggtgaaaaagcccaggcctcttagattctggggcccattctaaaaaaaaataataaaaaaaataaaaaatctttcatttcattttgtcctacatagtctaggatgaagacgcttcgggttctgaggagcagcgagggagcaccgaactgtggtgcggctccgcccccaagggggacgtgaagacgcgg

SEQ ID NO: 42067 - DNA, 301 bp, Mus musculus
  source 1..301: mol_type = other DNA
acagcagaagaaccatgactatcttgtctgctagtaaaggaagacaggggctcactggctggcttggaactcacagagctccatgctaccacatcctaaggcagcccctcactgggggatgggttaaatgagaaagttttacccctttaagggtgtcccaggcatcagggtactcactgatacatcacaagtctaccagggcctagggcctcccatgctctgtgagcctgagagaaaggaagagtcatgctccggaggcctgggcaaggtcacactggaaatactaaatatttacacttgc

SEQ ID NO: 42068 - DNA, 393 bp, Mus musculus
  source 1..393: mol_type = other DNA
ggctgccaagcctgaaggcctgagagactgtctttgaggagaccaggtggcctcttattcaaagaaaggacgtcttagcacaggacaaaagggtttggtctgctgtttcttcttcaacaaaccagaatctgcttttcagccaagcttgttggcacacaattatagccccagctatttgtgcgcaggctagtctggaatcccgattactgatggctgaggattgtgaggctatcctatctatagagccaaagggggaaaaaaaaagtttaaaaagttctttgaagcttttttttggaggtgcgcgagagccgcgcacctttgtccgcagggaggcgctgtgctcaccgcggtctggccgctctaggctgcggccgcggcaccggaagcctcttc

SEQ ID NO: 42069 - DNA, 370 bp, Mus musculus
  source 1..370: mol_type = other DNA
ccaactctttttttaaagagttatttattatatgtaagtacactgtaactgtcttcagaaacaccggaagacggccatgtaactgaggaaaatatgtaataaaaaatatttaaaaataaataaataaatacaatctatttgggcccacggatctgtgtatcccagcgctcagtgtacgcacgcggatctctgttagttgcaggccagcgtggttcagaaacgcttgccgaaacgttcaggatagggactcgccctcaaataattgtgaggcccctctcttttgtgcaaaaaggaccacggcatctttataaagacccctggaaaggattctcggtcctttaagccgtccggagccaaggaccgttggatg

SEQ ID NO: 42070 - DNA, 461 bp, Mus musculus
  source 1..461: mol_type = other DNA
agcagccactcatgtaagggactgcaggcatgcaagattttgtttttagaccaggctcaatacacagagatcctctggcttttgcattctgagtgctggaatcaaatgcatgcatgccacagcctctgccagactcaaaagatttttttttttgcaatgcccatagaggaccccctggaagtggaattacaggggcttggagcccgagccacctcttcaggcaagggggaggtgggtggcgccagtcgcagcacggacgggtgtgggtgcctccgttgcgcgcatgcgcactcccttcggttgcgccgccccctcccaattggtttccgcgcgcgcgaaaaagccgaagatgccagcgcctccagcccgagtgcctgcgcttgcctccccggcaggctcgctcccggaccatgtccgcaggcggccctgcggccgctgacagccagggcgcgcatgcgcgg

SEQ ID NO: 42071 - DNA, 419 bp, Mus musculus
  source 1..419: mol_type = other DNA
ttcatcttccagtgaagatggtagttacatgaactttaagatcaaccatattatctattgtatagatagtaaagtcaaggaaagcagccactcatgtaagggactgcaggcatgcaagattttgtttttagaccaggctcaatacacagagatcctctggcttttgcattctgagtgctggaatcaaatgcatgcatgccacagcctctgccagactcaaaagatttttttttttgcaatgcccatagaggaccccctggaagtggaattacaggggcttggagcccgagccacctcttcaggcaagggggaggtgggtggcgccagtcgcagcacggacgggtgtgggtgcctccgttgcgcgcatgcgcactcccttcggttgcgccgccccctcccaattggtttccgcgcgcgcg

SEQ ID NO: 42072 - DNA, 462 bp, Mus musculus
  source 1..462: mol_type = other DNA
gtggcttgccaccaaactggatgggagtgaaaggaaatcgcaactcccttgagttgtcttcttacttgagagatagctctgtggttaagagcactgtctgctcttaccacatggtggctcatagccacctataaacagagcacttatatgtataaaataaataaaatatttcttaaaagtaaaaaattaaaatacatatatattgaaaatggcacacacctttaaaatttttttcccactgaagtcactatgtactatatagaccagtctgagtgctagaattaaaatcatgcagtactcaggaatcagaatcatgtggatctctctgagttcgaggtcgccctgcaggtatgggcggaccctccatcaatacttgaggtgagaaccgcgtctgatccacagcctcaggcttcgggacctggcgctgatggcggcggaatcgccttcgtgacgtacccggcg

SEQ ID NO: 42073 - DNA, 427 bp, Mus musculus
  source 1..427: mol_type = other DNA
ttaaatgcatttattattattgtacatgtatcagtgaatggaggccaactttgcttccagggactgacctcaggtcagggatcatgtgatccagataagtttggaattagagccaccattccaattgcagtgttgaggatgcatgctaggcaaacactcaaccctcctgatcttcccacctcccaggtggcagatgctggaatgacaggcatatgtgccacaaagcccagttggatctgggagtttatttcttgtagaaacacatagtaggtgcttctcacatagtagaagccaaatgtacagttgtttcagtactaggtcacctgggttaagagagctgtgacgtcacgcggccgtgacatcatgccacggcagtgtggacaaaggggccctgctcttcccccgtgcgcgcccagggagttggggc

SEQ ID NO: 42074 - DNA, 397 bp, Mus musculus
  source 1..397: mol_type = other DNA
tatatagaccagtctgagtgctagaattaaaatcatgcagtactcaggaatcagaatcatgtggatctctctgagttcgaggtcgccctgcaggtatgggcggaccctccatcaatacttgaggtgagaaccgcgtctgatccacagcctcaggcttcgggacctggcgctgatggcggcggaatcgccttcgtgacgtacccggcggccgcgagcgtccgtaccgcagcgacctcggcgctgcgagaggtcctccgagcccgggcctcgtcgactctctggctcccgggtagggcactgagctgaggtcaaggccggaggtcaaaggttgagaacctcctagcggaaggcgcggagcggccggccgagatttcagagccgcgagatagcgctggtg

SEQ ID NO: 42075 - DNA, 428 bp, Mus musculus
  source 1..428: mol_type = other DNA
cttgacacctgcccccccataaggcgcgctggggagtgggggatctctgctttctgagaggtgcctctcctctgaaagggaggtgcttccttccttttgggggagctgtcaagacgccccagagaagggaagtgaggactgcctctcaggcaggactttctcacagcggatctgtccgcctctgaatggatggcgtcccctaacgattccagggagcccttatccccggcaagggcatttcggatccctgcgaaaaccaggaggcgtgactcctggaggcccggggccttctctcctggaaattcctagatcgcaggggccagcgaggcaggaccacccctctctgccagggcacagtctccacccggaaataccgaagccctcgttccggaggggaaggcgcgaggtttcccggaaagtggccccga

SEQ ID NO: 42076 - DNA, 364 bp, Mus musculus
  source 1..364: mol_type = other DNA
agtggttctctgctcctccacatcctggacatgccttagcagctgaacaatcgagtgctcatgaagctgctgtgggagggtaagcacccctcccagcacagaaaccttttgatcaataaagttttatgactccataatgcctcagggttgtctggtaacctaaccctaactctgagtctgtggatcaggttggtccccacccccaccacaaagatgggccaacctgcatgtctagtaaaatctacgttagatagacagggtttcccatattttttaatttttaaagacttcttggggcttacgtaaaaactaaagagcaggtccagaactgtgcaatggggccggccgaggcccattctgggaa

SEQ ID NO: 42077 - DNA, 365 bp, Mus musculus
  source 1..365: mol_type = other DNA
ttcttcaagtagtagagggtcaaagtgtccccctctgctgagagactagacacacaacagcgtgccggagtcgactctaatttagaagcctgcgaacgctgcgcacacgcacacgtgtccgagtcctcttccttcgccgcgtgcgcggaggaggtcccatccacccttgctcaaacaggcgctggtgggagggacagacccagcgcgttgtctcagagggcctctcagcatcccttccctccttcgccagggatgacgcgggagagcgtggtcgcccccagaagggccgacctccatgtagatctttcccccacgggggaccgctcttgcctggctagctcgcccccagtgcgcgctcgcctcct

SEQ ID NO: 42078 - DNA, 416 bp, Mus musculus
  source 1..416: mol_type = other DNA
gatgcagagaccagtattttctgctggcttcaacagtctctctgtgaaaggtgaccattgtacccaggccactggaggcctcctctctgtccatgtgagggggacctaggggctctgcccttagccagctttgctgaattaaagtttgtaagtaaacggttttaaaaaaaaaatcagagctggctggttcttgatataaaccatgcctgagttttatccctctgccccaaatggtggaaggagagaactgtaaaaatttaagttgggcttggaggccagcctggtctatatgaattgcttagagacttaagaatttctcagtctatagagattctgtctcaaacaaaatttaaatactggttgcacataaccggtaataggcacccacttggtgcacatacgtacgacgctgcgtt

SEQ ID NO: 42079 - DNA, 228 bp, Mus musculus
  source 1..228: mol_type = other DNA
gaaagtagttttctggtgctagagagatccatgtttactatgtagaccaggctgcttaggccttcagagtgctgaaaataatgccagcatttgtctttatctcaaacttgagttgtatagtagggaatgactttgaacttcaagtcctgcagcggctgtcctggaactcactctgtagaccaggctggcctcgaacatggcgtcttttattcaatggcccagagtcac

SEQ ID NO: 42080 - DNA, 318 bp, Mus musculus
  source 1..318: mol_type = other DNA
acaatgaatattttttttaacaacctgtagaccaggctggcttcaaactcagagatccgcctgcctctgcgagtgctgggattacaggcatgtgcaaccactgcccgtcttgaataaatctttaaacaaacaatggcattgaactttttttttaaaaaaattatttattttatgtatttgagtacacagacacatcattagagggcatcggatcccattacagatggttgtgagccagagcagtcagtgttcttatgctgagactacaggcatgtgtcttcacacttaattgcgcgataccctggtgtaggcagaggg

SEQ ID NO: 42081 - DNA, 229 bp, Mus musculus
  source 1..229: mol_type = other DNA
ttagctcatttacattctggcttgctaggccccggcagtttgtataacaaccaggctgcctccggagtactggcatagcgccactaccgcccagccaattttgactttttgacagtgtcaatatgtagctcctggagagccagaacttccagctaaggacgtaacgtcccgcgccgacgctggggcggggccgtcctgcgcggcgccctgggcggaagcggaaggggcg

SEQ ID NO: 42082 - DNA, 352 bp, Mus musculus
  source 1..352: mol_type = other DNA
tggaattagcagctggaagttgccttctgacctccacgtgcacactgtgccttgcatgcaagtgtaccaagaattcaagtccagcactggcctaggctagtggactagcctactgacacccttggtcacatgccttgtgtccagagatatgcgacatttcttgcccatgggggattgactcccaaccagaactcacagtgaagtggcctcggtggctgaagaaccccctagggctctcagaacaccaccaagatttgtggatgccttcgagattccctcagaacgcaattcaagcagcttgcattggaggaaggcggttgggcttcctgaggtctgaggctcctcggccggg

SEQ ID NO: 42083 - DNA, 167 bp, Mus musculus
  source 1..167: mol_type = other DNA
ccccaagccattggccaagcctagctggggcagtcagactgggttaagctaggtcacctagagggtctccgggttagtcaaggcactgggagaacccgcaggtgggtcaaagaggtgtagtctgtctgtcaggtaggacctggcaccgtgagccctggcacctcctc

SEQ ID NO: 42084 - DNA, 241 bp, Mus musculus
  source 1..241: mol_type = other DNA
ctgctttgttccacatggtggctcccaaccatctatatgggatctgatgccctcttctggtgggtcttcagaggacagtgtactcaaatacatgaaataatttttttttaaagacaactacagtgtactcatatacatataataaataaaagcatgctcacgttgggtggctctcagccaccccgccccgcctcgtccccagagggcttgtggcagtggctggctgggcagtgtccagcac

SEQ ID NO: 42085 - DNA, 404 bp, Mus musculus
  source 1..404: mol_type = other DNA
cggacaacaacctgaaggagtgtgagtacttgatagttcaagaaaataactttctctcataataagtatctcttaccattaaaaatatataaagatgttaccctctcctcatgaggagagtgtgtctctggagcactcgagctgcactttgcaggtgaggcctgtctcaaaaagaagttataaggctggagtgatggctcagcagttaagagtacttgctgatggtagctaacaaccaaattgaaataaaaacattaaaaagttattttacaagaagatacaggtgggtattgtgcaggttcagctggaggcgtaccggacagcctaacccggaggcagcctcctagggccggccctgctccctccgcccggcacctgcaggaagggctggaactgcctctgcg

SEQ ID NO: 42086 - DNA, 496 bp, Mus musculus
  source 1..496: mol_type = other DNA
acatacaaatacataaataagcatgattttaagagcaatttaaagccaggactggtagcacatgcctttaatcctagctacggagctgaatagcgagtagatatccatttgtcatttactaccttcagaagtgtttattggccataatctgtgccctcatgatttcgaccctaaaggttgaaagggacctggaagttccctctcctctctcttgtccctcagaaagtagagaagggctctgtgctgctgtccagaggagacttgtccccacccggtgagctatctcttaattgtgctgcccggctcaggggtccagacatcagagagtgattcaggccctcccaccccgagtgtccccgggagggacccgagggagaagctaggactggtaccagtcgccgctgaggcgctctccggtgccgcggcgggtggcacaggctggcaaccccgggctgggtgcgggcgttcgccgacacttggcgtcgcgggcccgccc

SEQ ID NO: 42087 - DNA, 327 bp, Mus musculus
  source 1..327: mol_type = other DNA
attttgctcaggagaaaactgagatgaccaatggggcaccaatgggtcagggaacagaggaggggcctgtgcccctgcctttgcctcagagacttgggtttcatgcaccactacactcagtttctgggtttcagggaatagaacacagggcctcacgtgtgctaggccctctaccgccagtgtgctcagtctttgagtaccgggcagccatgagttggaggccagcctgagctccagggtgggtcccttagccctccttcaatgcagtgacccataagggcccccagggacgcgcttgcgcctgcgcggcttgctcgctagccaagc

SEQ ID NO: 42088 - DNA, 395 bp, Mus musculus
  source 1..395: mol_type = other DNA
tgtcaacaaaagaggaaagaaactttctcttttcacacctgtccattgaagaagggagcaccccttttggtgtgttggacaaagaaggggcaacggttcagtttcctctgcctgcaccagggcaggggtttaaagccctagcctcagagtgaggtcatcacttcccggcagagagcccatttcaaatcaattaaaaggataacatgagttcatttttctttcttgtacagagtttgaaatataaatatttattgctttatggaaagaaattgttttgtgcccattaaactaagacagacacggtcattcccgcccccagatgtcagctgggtgccgggagccgtccctcagggggcgtgccggagagaagccacaccccggaggggcggttgcac

SEQ ID NO: 42089 - DNA, 395 bp, Mus musculus
  source 1..395: mol_type = other DNA
gcctttaaggccagcctggtctacagagtgagttccaggacagccggggatacacagagaaacgaactaagctcccgtgaatgactaaaataagatgggcccgcgccagcctgtctccagcctcgcccgccggttttgaaaaatgtggcgggcagctccactggtcgctgcacgctgaccaatcaggagccacggagacaaacctccccagcaacgcgtgctgattggctgttattcccagcgctctgggcggggcctggggcgggcttgcctcgcccactagcggctgactctggcggccagtacagtgccggctcagagcagaccccgccgagacccggcccaaggggcgggcgccgaagggctgggcggggttccccgctgcctctctcggt

SEQ ID NO: 42090 - DNA, 328 bp, Mus musculus
  source 1..328: mol_type = other DNA
tcttttaaagcaagatcttactatgtaatcctgactgatctctgtgtcgcttaggaatcctaagcaatggatctagagatggatccatattctcttaaaaatgtaaagtttatttatgtttcctctggaagagcagccagtgcccttgtgggtgctaggaaccaacactgggtcccccaacctgggctacaaagtgagttccaggacagccagggctacacagagaaaccagaaagggtttctctgtgatcaggctggcctcaaactcagagagatccacctgcctctgcctcccaggtgctgggattaaaggcatgcattagacagg

SEQ ID NO: 42091 - DNA, 297 bp, Mus musculus
  source 1..297: mol_type = other DNA
tcgtgactaatcacagtctggaccggtttctctgtatagccctggctgtcctggaactcactctgtagaccaggctggcctcgaactcaagctatggctaacagagaactctgttttgaaaaaaatgaaacaattaaaatgtttagtgtgagaaggattaacactactaggacagcagtcgcggctcctggaccagccttggcgcctcccctttaagacgcattcacctggcggcctcccctttaagacgcgctcacctggcggctcacctgggcgaaggcgcttccgcaggaagaa

SEQ ID NO: 42092 - DNA, 316 bp, Mus musculus
  source 1..316: mol_type = other DNA
tagaccaggctggccttaggattaaggcctgcgctacggctgcccggcgctaagcactcttaacacttgtaatctagcgatatcaaagtgagtttaaagccagtgtgggtaaaatagcaaaactgtatctaggtacggagactgacttcgaatcatggcgcaggtcacgtggccgacgttgacgtcacgccaacagacccagtcgctaagtcaacgtcacgtgatgtcccgcctactgggggttgggcctaggtggatcgcccacgtgatgcgggggcgggccgctgccagtcacgtggccctgcacctccccggc

SEQ ID NO: 42093 - DNA, 448 bp, Mus musculus
  source 1..448: mol_type = other DNA
ttgttattctagaacttattttagatcatgtctgtcaacatttcaaaccttccactgatcaaagaaaatttttgtttattgagactgggtctcacagtgtttttcaaaactaccttttaaggacactcagagatagaggcatgggtatctctcttagtcaggctcagtctcaaaataataataataataataataataataataataataataaaggagatcctgcagcttctgcctccccagtgctgggattggaagattaaagtcgtaaacctaactctcaaaatcttaccaataggatgaatgtagctcagtcagcgctcagtacctggacaaagaatgacttgcgtacatccagggctgcacagctgccccccaacgcccctccctgggcacgcccctaaggggcggggctgtcttgggcgtgcgcgctgggggcggtgtcagg

SEQ ID NO: 42094 - DNA, 390 bp, Mus musculus
  source 1..390: mol_type = other DNA
tagaccaggctggccttaggattaaggcctgcgctacggctgcccggcgctaagcactcttaacacttgtaatctagcgatatcaaagtgagtttaaagccagtgtgggtaaaatagcaaaactgtatctaggtacggagactgacttcgaatcatggcgcaggtcacgtggccgacgttgacgtcacgccaacagacccagtcgctaagtcaacgtcacgtgatgtcccgcctactgggggttgggcctaggtggatcgcccacgtgatgcgggggcgggccgctgccagtcacgtggccctgcacctccccggcgcgcgcccgcccgcccgctcgctcgcccccggtccccattgcagttgggactgaagcagccccggcgaaaaccg

SEQ ID NO: 42095 - DNA, 431 bp, Mus musculus
  source 1..431: mol_type = other DNA
cgctgtcctggactcactttgtagaccaggctggcctcgaactcagaaatctgcctgcctctgccgagtgctgggcgagcggaagtggacgccctcctccgtcacctcggacagggagaagagggacaccatctggaagccgccgctatcctggggagaccccgcagcgaagccgtgaagaccctgggctttccggatcagctccggtccccgcagctccacggccaggtgtgggtgagccccggcactgtgggcctgcccaagcagatgcggcagcccagggagtccagctgctccatggtggcctgtgtacccacaggcatgaacacaggggtggctaccgttccatgcggcagccgcagctcacccgcccgagctccggagcgactgcactcgggctgcctaccgccgccattttcagtcccggaacc

SEQ ID NO: 42096 - DNA, 314 bp, Mus musculus
  source 1..314: mol_type = other DNA
ccctgattttttttaaaaaataattttatgtgcattgatgttttgcctgcatgtatgtcagatttcggcattacagacagttgtgagcctttccttgtatcaaaggagtacaataacaggcttggaaatcttgagattcctgatgagttatcatatccggctgttgtattttatacagcagaaaaacatgtcttggagtgtttaaaatacatttattgtatgtacgcccatgcgaagaatggctgtcttgtagatcccagagacaggtcatcgggcttggcgtcagatcacgtgattcggggcacctcggcgct

SEQ ID NO: 42097 - DNA, 238 bp, Mus musculus
  source 1..238: mol_type = other DNA
ccaggctggccttgaactcagaaatctgcctgcctctgcccttttgcttaaaaagaatatcacaaagtgatagcaaatgccaggaagctatagaaaaagattgcggctctctttcctcttactggttggagtagagaaggatatttatatcaggctgaggcctcagtgtcttttccagagaccccgccttcacccaagagtgacagtttggactccgccccggaggccgggagtcgcc

SEQ ID NO: 42098 - DNA, 332 bp, Mus musculus
  source 1..332: mol_type = other DNA
cactcaacttgccagattattttgtcaagtgaacaagagctaagcacacagtgttgtgtgtgtgtacaattgcaggagtcaattctgaccttccactattcaaagcccaaaatagattccttgatttttttgctggtctggaagtagttccataccagttcgagaggagtactggaatactgcatgtgtcagcacagatgcacgtggacctgcttattggaatactagcctggcatatctgcctgtcgcacccaagccgccgtcctcggagggccaccaaatgataccagggcagctccccatcccggctttggggtcgaacagaagccgaa

SEQ ID NO: 42099 - DNA, 268 bp, Mus musculus
  source 1..268: mol_type = other DNA
tatgatgatggagtggaagcagctccggctagaacggcagcacaagagcctctggagacagtctcttgattgaatgggtaaataaaatgtaccattaactaaagtgtgtgaattgtgctgcaaacctctaggcatgtagctacttaaagctagagctcctagctggggaattctaaggctaggaagggacactctggtcccagatgccaccagcacactgactaccaagagtgtacaaaactgtagccaatagggccactgggcactt

SEQ ID NO: 42100 - DNA, 464 bp, Mus musculus
  source 1..464: mol_type = other DNA
cgtcggtgagtatgatcggcttgtactcagcctctcattggctctgatgtcgcaatcatgcatgcgattctgcagtccggccggggaagtccacccagcgtggctgcaggtagcggcagcgcctgccgaagggcgcttcgtaaatcacgtgacgcagccgcccacggcccctcagccacagcaggcgctgcaggaacgcctccgagtggcggttgcgcgtggccggtgccaagagcaacagtgaccccgatgcgtccagcaaggcctcctcgaaggccgcctcactgggcgccagcgcgcagcacgcagccgcgccgcccagaagccccacgtacagggccgcgcggcccggtcgagctcgcgccgcagccgccgcgtccccgcacgcctcagcgtagtcccggagcagcgcgccggcccaggtgccgtggatctcttaagagccgctgtcaccatcgtcttcc

SEQ ID NO: 42101 - DNA, 612 bp, Mus musculus
  source 1..612: mol_type = other DNA
aggacactggcccggaggggcccgaactctccgagggagggcagagcaccgtctgggggcggagccagccctcctccggcaagagtactgggggagtacgcagcacgccagcctaggggcggagctcagcgggtgggtctggccccagaggcgtgtccgagcggccaagcattgcctcctgaaacgccctgtggtacaaagggctgtggatcaccgtggatcaccggtcgccggcccggagcggggggtggggccgcctgatcattccgggggcgtgccgggaaggctaagcaccgcctcccgacgcatgccctgcccatctctccagagctgtgcgcggtggcacaaagcgcctcggttcgcacaacgctgcctcggggcggggctctgcggggcaccgcctcccaacgtaggcgccttcacccggcctgcccgggaggctcagccacctcacaaagcagcgaccgttcccgcggggtggggccggccccacccccgtcgtgcttgcgctcgcccggctccctcaggcgccaggagggggcgctgcgccaccgagccggcccgtggcggcggcggcggcggcgaggcgtcgcgtggccggcaggcggcgcg

SEQ ID NO: 42102 - DNA, 222 bp, Mus musculus
  source 1..222: mol_type = other DNA
tttttcttcctgtagaagctataagacaaaagcctgctcagccagggtaagcctgaggtctgggtcccagctgcctggggttctagcttaggactgaggtaggagctctgaccacttgctgccatgactctttagaggctgatgcttccgtctggactcctgcatggagcctaacacggaatggaacagctccaagctgggtacctaagctggcgtggcgcg

SEQ ID NO: 42103 - DNA, 425 bp, Mus musculus
  source 1..425: mol_type = other DNA
gaaatcagaagttaaattgtgaagcagctcaataaatatttgtaaagctaattactgggccagcaggttctgcatgggtcaaagcgtttcccgggcctgcacttagcaccgcgtgggctctgccggtcctgggagcatgcctcccggcttgaggcccagtttcgtgcctgggaggtagatgtgcgcttgcgcagagccgccccgagccccccacaggggcggtgcaccaggatcttgtgcagcctctgggcccgcccacctcctcgcgccctcaaaggactagtacgcgtgcgcacagcgaatggctgagcatgcgcgcagagagcggaagggtgggctggcgcgcgcacgaggccggccgggcagcggggggcgcgcggcgggcgcgtgcggtgggggggggtggcctggcgaagcccagcggg

SEQ ID NO: 42104 - DNA, 380 bp, Mus musculus
  source 1..380: mol_type = other DNA
ggccagcctggtctacagagtccaggacaaccagggctctgtgtagcccaggctagtctggaacttgctgtccagaccagtttggactcttgctatggaattcttccattaataattataattattctaactactgggttcttctttctaattaattaattagtacaggccctgggatcaaactcaggttatggacggatccagataaaacctgcaactgcgtgggtcgtcccttgaacactcaaacagcaacgcgggcgggaggaatttgaggaacttcccactgctgcgggagcttgacgatgtcacatcggccgttccaagctcctccccgctcagtgaggtgaagatttttgaaaatcaccgcccctagtactggg

SEQ ID NO: 42105 - DNA, 309 bp, Mus musculus
  source 1..309: mol_type = other DNA
taaagattttattttattttatttttgagacaaggtctctatataatccgtagaccaggctggcctctgctcttgtagagaaccagggtttggctcccagcaccacatgatggctcacaaccacaagtggtcagatgcccttttatgacctctgctgacacatacatacatgtaggcaaaacgtttaataatccaagatctctacaaagagagttttatgtataattaatatattcctaaagtaaactaaaaaaaaaatccccggagttcataggttcgctgattgagtcctgcaggagacggagcgcg

SEQ ID NO: 42106 - DNA, 593 bp, Mus musculus
  source 1..593: mol_type = other DNA
acatccacctgtcacgtgtgctaagcagaggcttccaggagacagtctctcctggctcagaattactggatctctagtacttgtcatgtgctgggactacaggtgtgcagtcccgctgtgagagcagtgcaaacagaagttcatctctggactagggtgggaattttctgaacacacttaacacatgtgattgaccccattttgctgatggggaaactgaggcacaacttcaatttcaggacgccatggtgcacccggcctgcagctggaagacttccagctgctggcggccaacgggggaggggtgacctccagtcgccgctaccgcacccgccctcgagctgggctgcggccagctccgccccctgcagcgtccagctgcgaagggcgggcaccaggcttggagaagcggggaccctgtccggagggctggtggccaggagccgactgagaccctaggacgtgctcaggccgcagcgagagcgcgtgcacccccacgccttcaacttcgcccccaggccccgcggccgaggcgcccgggagactggaggggcgtgggggcgtggctaccgcgctggctccgcaagcttgcg

SEQ ID NO: 42107 - DNA, 197 bp, Mus musculus
  source 1..197: mol_type = other DNA
acgacccagtcacattctgtcacagaggagcagtggccagcgtggagtactgcctactggctgggtaagctgatcttatgaacacataaggtgcacgcctgagttaattccaagtaatcctgaattccgctcacagtgagttccaggcagtcctgacaagcagagacatgtgctcatccctctgctctcctggaccc

SEQ ID NO: 42108 - DNA, 295 bp, Mus musculus
  source 1..295: mol_type = other DNA
cagaagtgagtgggtctctgtgacagagtcctgtgactcaaaggctggttcaacaaatgcttagtactacttgtgggacggctccatgatgtgagcccctggatggccctttgggtggcccagcaatactgtacagacactggcgctgagagctctggtctgagcttgcagcagcgtgatatcactgcttagccatcagtctgatgcaatggctgagcctccgccaggcccttgtgcaaccatggccggttaaccattgaccaggggggtcaatggcagcctcagccatggctgt

SEQ ID NO: 42109 - DNA, 287 bp, Mus musculus
  source 1..287: mol_type = other DNA
gtagtggaaaacaacagttctaaacaaaaccttagtaattattgtgtgacgtagaccaggctggcctcgaactcagaaattagcctgcctctggggaggggaacactgaccgtccaggctccgccctatctagggaaagccccgccccctccagagaaggctggcccggcctcgccacccgccccgagaagaccccgcgtcattcccgtcttggttccgcggctggggcgggtcgaagtgcaggccccgccccatcagcacaggccccgcctctcccgcgcgcctgc

SEQ ID NO: 42110 - DNA, 394 bp, Mus musculus
  source 1..394: mol_type = other DNA
aggcactagattcgaaagcagaaatcgttaatacacataaaaatttttttaaatctgaaacaaacaaaacccttttaatcccagaactcagggggtccctgagttaccagccagccatggctacacagtgagaatctagaggggaaaaaattatatatactatattgggctgccctcagatttagtccaatgcttgtaaatgaaatttgttctagcagaaaaattttcgagcttggaagcttaatcccctgaggacaccatcgttggaaaacgaggggagagaagggcgtggtcctcccataagccacgcccgttcactccgctcaggcgcggagctcattggcgcctgcgcaagccaactgggcaatccctaagtgggagagtccagaggagt

SEQ ID NO: 42111 - DNA, 303 bp, Mus musculus
  source 1..303: mol_type = other DNA
cctggaaaacaaacaaaaaaattttaatttttagaattttaaattttattttacatgatcctggaactggagttctgagactcaaactcaataaaactatggttacactaatcttgttatgttaacacagaatgcatagaaaatgttttctacctctagttaggaaagagaggctcttgggctagctcaggaccacgcctcttgaggtggccccgccggctccgttggcggcgcccacacccgtaagaccacgcccaccgccgggcgccttctgcggcctcgccccctccgcctgggcggagc

SEQ ID NO: 42112 - DNA, 397 bp, Mus musculus
  source 1..397: mol_type = other DNA
ttgcaaaataatagtaataataataagtaaataatatcacgccacttttctagctcaaagttagaaaaagattcctcaattccaaaaagcctttaaagaggtgatgcaggaaaatcactgagtttgaggactgcctgacatactgtgagactctctcaaaatccagctgagcaaatggctcagcgggcagagcgtttgcctcacgtgcgttctggttctagtctgtcattccagcatgaatcccagcagctcaagttcacattaggtccgagatattctgaccccaccgttggagcacacgagctcaggcgaaccgtggcagctccagtgcagctccggcttgcctgagatttcccactcctctggactctcccacttagggattgcccagttggct

SEQ ID NO: 42113 - DNA, 355 bp, Mus musculus
  source 1..355: mol_type = other DNA
aggcaaatctctctgagttcgaggccagcctgtgtgtaggcactagattcgaaagcagaaatcgttaatacacataaaaatttttttaaatctgaaacaaacaaaacccttttaatcccagaactcagggggtccctgagttaccagccagccatggctacacagtgagaatctagaggggaaaaaattatatatactatattgggctgccctcagatttagtccaatgcttgtaaatgaaatttgttctagcagaaaaattttcgagcttggaagcttaatcccctgaggacaccatcgttggaaaacgaggggagagaagggcgtggtcctcccataagccacgcccgttcac

SEQ ID NO: 42114 - DNA, 224 bp, Mus musculus
  source 1..224: mol_type = other DNA
tggccatctgacctgagacacaccttgataaataaatgtaattaaaaaaattttttttaaagacagggtttctctagccctgcaattttaaaaatttagatcacacaaaccagatgtgatggaataggtctgaacaggaaaattgttcaaggctagtcttggctacggccccgcctgcctggcgcttgggcccagcccccacctcgatcacggagtctgcgcgg

SEQ ID NO: 42115 - DNA, 327 bp, Mus musculus
  source 1..327: mol_type = other DNA
gggagtatatacacactcccctccccccatggagggcagagtgcctgctcagcgagacaagcaaacaggtctctgtgaactttgcttcggtgacatcagcaattgttcacaccaacgcattacaatgatcacatggaatcacaatattcattttgcaggtgggcaagctaaaagtctggttatcatcatcattattattatttttaaagataggtcctcaatatatatctaaatttttacatgagtgtgtgtataacggggccataaatatatgtgctcgtaacgactgagccattctctacagctccgacctagagcctgggcgtc

SEQ ID NO: 42116 - DNA, 417 bp, Mus musculus
  source 1..417: mol_type = other DNA
ttacatataataaataaataagtcttacaggtctgtgatctgagcactcagccaagggctatttagtgacatcctgcatggaagaaagcaagcaatacttggcagagcccttgtgaagctctgggttccagtcccagcaccacataggtggtgcatctctgagacggatggctcaggtgagctggctcagctggtcatcctgctgcatttgtgcatgcacacacatgcacacacacacaaatgtaattttaaaaatagtaaatatttcatattcccaaatccgtgagatactggctggagcgagagcctctcttccatctgtggcctgccggctgcacagcaggctgggccccaccccctacactggtttaggcagtggctgtgcccaagaccccagcctgcaagctggccccgccc

SEQ ID NO: 42117 - DNA, 306 bp, Mus musculus
  source 1..306: mol_type = other DNA
gggaaaaagaaacggtccctcaccctccccatcacccacccctgcctctctctgtagatgaagaggagagtgaggccttcaagctcctcctatcggatgcctccgggactctagggagccctccgaccctctgggtccacctctgggagccccggaggctccttcaagggcttggaggaagctcgggttggtgcccgcctcggaatcgcgtcagtgtgccctccttctctgtcccctgcacccatatgtctgagtgacagggaccgccttgcccagccccgccccacgactggacgctcggctgcc

SEQ ID NO: 42118 - DNA, 282 bp, Mus musculus
  source 1..282: mol_type = other DNA
aagagactcactgctgagggaaacgccccggggtctcttactgggtagtagtagtagcacagcagcagcatcccgtccgggccgagaccggaagtgtgttgtctctccgccccgtcacctacgcgaggtagaggcagcagccacggttcctgagaacggaacgctccggatacgtcacttccgttttgcgaacggcaactcctccatcttgggagtggcgggttactggccactgccagcgaacacgcaggcgtcacgtgaccgctacgctcgcgcctctct

SEQ ID NO: 42119 - DNA, 344 bp, Mus musculus
  source 1..344: mol_type = other DNA
gaatctgtgcttttcactcacagtgtttgtttcaggcacggttgatcccggatccttcggtgcagtctgccacctgtgcgtgcacagaagacttcattgcatggaaggagggatgatgtgcaggccaggcctgtgcccggcccatagactccgggctagtcaccgtggtggtcgcggctgcccagcacaggggggctataatccaggatcctaaacgctggttccctagggagagaggcgcgagcgtagcggtcacgtgacgcctgcgtgttcgctggcagtggccagtaacccgccactcccaagatggaggagttgccgttcgcaaaacggaagtgacgtat

SEQ ID NO: 42120 - DNA, 381 bp, Mus musculus
  source 1..381: mol_type = other DNA
gacctatcaaggacgttccaggacagtcagtgctacctgtatgaggcctatcttctaaagttagccttacatcgttagattttcttttctttgttctttaattaaaaaaaaaaaaacccagggtctcgcaacagcctgaagtttgctatgtagcccactagtattctaatatcaccagaggccatgtggaaacaaaaactgttcacttcggatctagcagaacgggtctggcatgcacccctggttgtgtttgggtcaccaatacccctgcccgcactcgcttccacctgccgcgccgtcgggagccgggaggaggcggagacccaccgtctcagccaatgagcgacgccggcgctggcagctgcctctataaagggctgg

SEQ ID NO: 42121 - DNA, 361 bp, Mus musculus
  source 1..361: mol_type = other DNA
ttcccactgtggacacctgcactgtgagacagcaggagtaaccttctcttcctggaggacactgagagagacatgcttgagtctcaaacaggagaggccatctacactttcagagcctgcttctcagtgtggcaagctgcacattatgtgggcctacccacaacctacatggtggttcacaatgcaggtagttcatgcacgtggtacacatatatccaggccaggccagtggaggcgggtcgactcttcagacgggccagtcggagcttccgggggtctgggttgcctaagcccgagaccgagggccgccaggcggcccgggggtggggcttcacgctccgggggcggggccgctgccctt

SEQ ID NO: 42122 - DNA, 340 bp, Mus musculus
  source 1..340: mol_type = other DNA
cttttttaaacttgtcttttcaaaaattccatttatagatgggcgtggtggagcactcgggaggcaggcagacagatttctgagttcgaggccagcctggtctacagagtgagttccaggacagaaccaaaaaaaaaaaaaaaaatccatttatatatttatggtatggtgaccctgtgaatctcggaaatgtaactcagattgtcaaggcctttaaaaacatcttttaaatgtatttacctttattttaattacagcagcccttttgaaaaaatctttaatcacattgccgaagaagcacttccatggcctgggccggacggactacgcgcatgcgcag

SEQ ID NO: 42123 - DNA, 421 bp, Mus musculus
  source 1..421: mol_type = other DNA
atgtttaaaaatgcacttaaaacaataaaagcctatattcaatcattttatacatgtataaaatcctaggcctcgcagccctcagtgtgggtgggctaaagagtcaatctagactccctgtatatggccatttcacatagatgaattcaaacttcaaacatttttattaaagggcgttaaaagtgctaaacacagcttgacattctgttaaagctgaggttccagctattcgggaggctgaaccccgaggatctcttgaatccagggttttgagagtaaaaaaatgcattgagtgcttgcttagcacgcaagccgccctgggctccgaaccggatgtgggacgccggggaacccgctccagcgcctccttctggagctcagtgaggggcagggcctgctcctgaggagaaaccagcgtctc

SEQ ID NO: 42124 - DNA, 455 bp, Mus musculus
  source 1..455: mol_type = other DNA
agtcccggagttcaaactctagacatcaaacttgttggtaaacaccttaccattttaaacttgtgtgtgtgtgtgtgtgagagagagagagagagagagtctcaaggccaggctgtgctggaattctgtgtagcccaggctggccccaagtgctaggattgcaggcacgggtcatctacgagcttagatctaggttctttgctgttccctggagtcttcaaagaaataaagctttgctgaagttctcctttgtgccagctttcatactgggcaccctggagcccctctcaatgacctctgagataaggagtctcagggctgtatgagaacccctcttcccaataccaaggctctgacatcaggaggtgggggtggtgtgtggggtgccacgcctcttggcagcccccgtggccaatgggacaggcttggaagagcccagggctggcttctggagc

SEQ ID NO: 42125 - DNA, 315 bp, Mus musculus
  source 1..315: mol_type = other DNA
gcacatgtgtgcctttaatcccaggcagagactgccaggtctctgagaatcagagttatacagtgagaccatgtttcaatatagtctccatatgtggacagcaagccctgtcctatgtcatgcattacgtcagagaacagaatttggggagtctgtcccaggctaactggttagccagtgtgagatcctgagcacaggtcgtaagtgacctacagggactgttgtgcctcggcccaggagcctgggtgacgcctctggcctgcttctagaggatagaggtagagagtggccagctgctgccagcctctgacccct

SEQ ID NO: 42126 - DNA, 268 bp, Mus musculus
  source 1..268: mol_type = other DNA
cagaccctcacatctctccatcttacatattgatgtaacctgcaggcttggattacaggcgggtaaccaagcctacctggcttcaagcttacctgacaagcgtgaaggaaggctcacttgttaagcccctcaatatagagacattccataagttctgtgactgtagacttctagggctaggcttaaccaggatgagtacaggtggagccaccgctcctcgcgatcacgaacacccctaggattttgcttgtaaagcgatatttccgtt

SEQ ID NO: 42127 - DNA, 357 bp, Mus musculus
  source 1..357: mol_type = other DNA
ttatgaatgagacagtctcaggtcttctccacggcccagggttacactgcgcacctggtgtatacatttcttgtttgaaataacaaggtggctgttatctggcacagatagcactgctgggatggaacccgagccgctctggggccaaccgggagaccgagcctggctcagtccggggctggacctcccctgcgcggccaccagaggctgcccgccctggcaggcagggagccgtgggcgaaggctggcccgcgccgcctcttcccaactcgccggagcgacccgccgcgaatccgcaggaggtgagactcgcccgccaggcccttgctctgcctcccacgggggagggggtctctg

SEQ ID NO: 42128 - DNA, 229 bp, Mus musculus
  source 1..229: mol_type = other DNA
gctggccacacccaccacagcgctgggctctgcggtcgaaacagcctgcagctgactgctgtaggtgccaaggtcaaaaggctacagccagccacgtggtgtgtgccttctggacttcttgagacactgtctcaaaatgtatgtcacaggcaagccactgaggttcctctggcctgggtgcccccgccccagccctcggagaaaatgcatcatctttcccaatgatgca

SEQ ID NO: 42129 - DNA, 213 bp, Mus musculus
  source 1..213: mol_type = other DNA
ctacctggttctcaccctccccggagtgagacagagccacccagtcgcatcagatccctactcagccttctggaagagcagccagtgttcttaatctctgctcccacagagtacctttgtgaagaaggaaagtaggctgcatattcagttcctcatcctgtgcaagagaatggaatgctgtcattcttaccgctataatcacagctggtctag

SEQ ID NO: 42130 - DNA, 247 bp, Mus musculus
  source 1..247: mol_type = other DNA
aaagtgccgctctgagccatctcgaaggccttatgaatgagacagtctcaggtcttctccacggcccagggttacactgcgcacctggtgtatacatttcttgtttgaaataacaaggtggctgttatctggcacagatagcactgctgggatggaacccgagccgctctggggccaaccgggagaccgagcctggctcagtccggggctggacctcccctgcgcggccaccagaggctgcccgccc

SEQ ID NO: 42131 - DNA, 323 bp, Mus musculus
  source 1..323: mol_type = other DNA
tggccggccccgtggacagcagaccagacgtcgtctcctgacctggttattttgccatttaccgattcatacgtaaaataatgtatcagtcatctttccgctgcttggtgcacgcctttaaccccccagcctgttctacagagtgagttccaggacagccaggctgcagaaagaccccactgtctgtcctacttccagcaggggattagctatccggtgctctcagagtccaatgagcacgcgcggaccggctccatcgcgggatctgggttcctcaccccgcccctgcagggatttgattgggcggctggccgggctgtccc

SEQ ID NO: 42132 - DNA, 192 bp, Mus musculus
  source 1..192: mol_type = other DNA
aaatcggaaaatctccctagcaactttcttgagaaatcattttagaatagagcccctgagcagcttcatctcggaagtaaatctgtagtatctgatcggagaatttattctccttacaatccgaggagtgtcctggtgccgcgagtgggcgtgcccgccagagcgccaggagaacgcgctctcctgactctc

SEQ ID NO: 42133 - DNA, 267 bp, Mus musculus
  source 1..267: mol_type = other DNA
taaagacaactacaatgtacttagatataataataaataaatcttaaaacaggtggatttctgagttccaagtcagcctggtgaattccaggacagtcgggaaccagaggggctttacctgctggacccaagtgaggtctctcaagcaagagacagggggaaaacttcacgggaattaaaataaattattgtgataccgtttttctgtccgctaagactttccgtatgatcagacatttgactgtcactcaggccctgtgacaggac

SEQ ID NO: 42134 - DNA, 415 bp, Mus musculus
  source 1..415: mol_type = other DNA
ttctgagaactattatttttgttatggttatttctctgagaacagcaaatcttattcattttgaccactcaaactatatagtttgtgtcaagccttcagaacaaaagcatttagaactttcaggtgctaatggacttgttaatatgtttacattttttaaaagattatatttatttattttatgtatatgagtacactgtagctgtcttcagacacaccagaagagggcatcagatcccattacagatggttgtgagccaccatgtgggtcagtgctcatttcttctaataattggaacaaaatcccagacaggctaaaacctggacagagacatttgtcttgtacaacatattccagctgaaggtttttccctttataaatgcaaagctaattattaaactttgagccttaatc

SEQ ID NO: 42135 - DNA, 544 bp, Mus musculus
  source 1..544: mol_type = other DNA
tctaaaaaaataaatttgttcacttatagtctattaaccaagaattattaagacataaaacacttaacatttgaccatttatagtattgaacaatgctttatatgcttaaattttatctgagtttatttcatactacatgaacacatacttttataatcataaagatgtcacagccagtctgcctccagcttattataataaagacaaattaggttcattcctatttatgcataaatctgctttaagtacaaatggttcttttaaaagttactgtgaccaacttgttacatcaggaatttttaaaagcttgctttaattaatggaaataatagaggcatacactttttatcccatcacaggatgcagagacaggtagatagatctatgtgagttcacagatttaaaaaaaaaaaaaaagtaatgctactatttctctttataaatacacattagatgatataaccttaagtagatcctataggaagccctgccttacaatacagccaagaacttgtcaatctttttaaattcaccaatggttgg

SEQ ID NO: 42136 - DNA, 292 bp, Mus musculus
  source 1..292: mol_type = other DNA
agacaggatctctcccacccggcggtgctttttaacttttattaaaatttgatacctgttttatttatttatttttttttttttaaaagatttatttattatatgtaagtacactgtagctgtcttcagacactccagaagccctggctgtcctggaactcactctgtagaccaggctggcctcaaggcgtgcgccaccactgtcgggtggcaaaggagattgaactcgaaatgcaagcgttcagggcggtgggtgcacaggatgccatacctgtcagtcaggtctgagccg

SEQ ID NO: 42137 - DNA, 473 bp, Mus musculus
  source 1..473: mol_type = other DNA
tgctttgtcgaccttttgacgtataaaggcaaacagttctactaccagaggtttggcaacccatctttttagacgaaagcctagcagaatgtcaaatggtaagacactgtgagggtctccaaagttactcgtaacgggaacttttattaaatatggactttcctgtggggacccgccagagtggtctctcaggaggtcaagctggctctggtggcaggatcaggcccaaaggccagagggccggaccgggttcaggaagggacccgctacggcgtgcgtgggtgcgtgcgcagggccctctccctaggcagacggcagaaccgtctccacccaagcggaggagagagagcagtgctcgcagctccggaccagtcccaacttggccgcatcacgtgacctagctcaggggcgggggcaagcggcccgcccggccccgcccaccccgcgcgcatgcgtgtcgtccggggcgctga

SEQ ID NO: 42138 - DNA, 376 bp, Mus musculus
  source 1..376: mol_type = other DNA
tatacataatataatatagatataatataggtagaggaattggaacatcttgatcctcctgcttctactggattcaggggtctctgaatgctaaagagagcctttttcaattcagtttaaaaaaaattgtgtaaagtagtcagtgttcttaaatctcctttttaaattaaatattgcatttatttattttattctttttttagtcaatgccctatttatttcataccatgtaaattagctggaggtcaactaaaactcagaattatccagctccttgcacgggtccgcgttgtgcacgctctctccctacgagcagggtgtcagtcgcaggagcgcctccagcggcggcaacggggttgcagcgacgtcaccgtgg

SEQ ID NO: 42139 - DNA, 399 bp, Mus musculus
  source 1..399: mol_type = other DNA
aacttggaacgctccgagtggagcttccggcccaagttttaaaaaaggatgctcctctgcaggaattttttatttgcatcaccaaaaatcttggtataaaatattatgaatatattggtctgtgtttaaaagagaacgttgttttcttccagccaaaaggcttttagtttagaaggactgcttttgcagagaaccagagttatatacgtagaaataaaatcttttctctttttccttttggcctgcaggcgacttggagcacccggaagccctcgggccccgcccgccttcgccccgccccggcccgccccgcccctctcagctaaggttcccgcaggcctcagggccgcgggggcctggctgcacgttccctgtcggcgttctgcggcacgggccggt

SEQ ID NO: 42140 - DNA, 337 bp, Mus musculus
  source 1..337: mol_type = other DNA
atgccaggacagtccaaaataaggcctttgacaaaatttaatattctattatgataaaaggcccacggagctgcagcagcttgctttctgatgcccacagtgggctgggcttgccaaccggttaactaaacggagggaattttcagttgaggtagccatctagactatataaattaacctataacctatatatactacatgggagaaactgtagatatgttttctaaaaggtaaaccatttacatgctggcacgagaacccccacaggggcgggacttccgccgccgataccctgagggacaggcctgcttaggtggttctgaggcgcccagcccta

SEQ ID NO: 42141 - DNA, 371 bp, Mus musculus
  source 1..371: mol_type = other DNA
aaaaccaaaataataataataataataataataataataataataataataataataaataaataaaaacttggaacgctccgagtggagcttccggcccaagttttaaaaaaggatgctcctctgcaggaattttttatttgcatcaccaaaaatcttggtataaaatattatgaatatattggtctgtgtttaaaagagaacgttgttttcttccagccaaaaggcttttagtttagaaggactgcttttgcagagaaccagagttatatacgtagaaataaaatcttttctctttttccttttggcctgcaggcgacttggagcacccggaagccctcgggccccgcccgccttcgccccgccccggc

SEQ ID NO: 42142 - DNA, 311 bp, Mus musculus
  source 1..311: mol_type = other DNA
agattagtttttttacattcagcataatgccctatagatttttccaaattgtatatccccagtcaggttgacaaaggtggtcatctaagagaagacctacttcaaggaacaggctgttctgtgtgtttaaaaagtacagttggtctttgttattttcatatttgtgaactcactcttctgtggccgctgcttcagccgcgagaattgtcttctttcagttcttatgctagaaacaagaacaagctgtgcaggcttggtggccagccctgctgagccttctcgccagctcaatcccaggactcaagagtctg

SEQ ID NO: 42143 - DNA, 408 bp, Mus musculus
  source 1..408: mol_type = other DNA
tttggatccacaagtaaaaattctcttttgctgcagggtagcggctgccaccgcgtgccctgctgggcggccgccgcgaaggcggcctgcgtggagattagcggcagcggtccctccctggcccgcgagtgaatgcacctccctggcccgggcagctccggctgggaagggcggagtctgagccaccgatccacgctttaagggagaaaggctctggccgttcccccgcctttgcccgagggagtcaagtggctccttccgaagctggggcagcgggaagcgccgggtcttctgctccgggcgctagcgggtagtggcatccctgctgggggcggctcctctgcgcgggaggaggcggtgcgcagggcgctggagacgcgccttccaggctccggcagcgccccgggg

SEQ ID NO: 42144 - DNA, 711 bp, Mus musculus
  source 1..711: mol_type = other DNA
ctccctggcccgcgagtgaatgcacctccctggcccgggcagctccggctgggaagggcggagtctgagccaccgatccacgctttaagggagaaaggctctggccgttcccccgcctttgcccgagggagtcaagtggctccttccgaagctggggcagcgggaagcgccgggtcttctgctccgggcgctagcgggtagtggcatccctgctgggggcggctcctctgcgcgggaggaggcggtgcgcagggcgctggagacgcgccttccaggctccggcagcgccccggggccggtggccggggctgggctagaccgcctggctgggcgttcgcgtgcgccgctgtcgcttctgagccggcatagctccggcgccaggatcgtagtccctcgtgcgaccctgcggattccgcgcagagcctagtacgcccctcggtcccgcacggagcaagcgcgcgggccggacaccgcgctcgggggccgggccggagctgcgcgtgcgggagccggagctcagccgggctccagagctgcgagcgcactcggcagtcgccgccgccgctcccagccacccctcctcccggcccagctctggcgcggaggggctgacggctaacgcattggccgaggctggccgcaggacccctcctcccggggcgcccccgccgctccgggcgcccgcctccctcagccgactgtctcccggca

SEQ ID NO: 42145 - DNA, 421 bp, Mus musculus
  source 1..421: mol_type = other DNA
ttctccaaggctttgtgcaaatagcaaatactttcagtatacatgaggtaaaagtagaaaccccggagtgtacccacggcgccgttccgtggccactaggttcccgccccgttcccgagggcgcactgccgcttccgggaggtcgtccacgctactcccctggccgccggtcccgccccgctggtagcccgcgcgtgcgcgcttggccgctggagcgcgcccgggcgcgcgcgccggaggggcggggccgcgccgctcgcagtttgtccccgcctccgccccgcggcgttccgttgtcgccctggcaacccgagagcggcaacggcggaggcgcgggagtccggcgccgcctctcggccgccacgcggtaggcagcggccacacggcccgcgctgtccccgcctcccggcccgccctcgcc

SEQ ID NO: 42146 - DNA, 301 bp, Mus musculus
  source 1..301: mol_type = other DNA
tcctgctgctggataagtcacactaagacttccccagggaatatttaaaactgaattcacagcagtctgttctacagttaattgtgagcattcgtactatttgcttacatttagtaaatcaaaatgttgcattggaattctatgtcagaaagtgcaagcccggacaggcaagcccatcccacggccttggggtgtccccttaggatgcggccacactgggaggagagagcagcacgtggatcttccttgtcgtcaggcagaactcttcactgaggtgggctcagggagggctctgtgcctg

SEQ ID NO: 42147 - DNA, 325 bp, Mus musculus
  source 1..325: mol_type = other DNA
caatctggactacagagttaagatgtctcaattgtacattttgtgtgtgtgtgtgtttgccaaacaccaataccatgtatttttgtcctgttcaaaatgtgagctttgtggtcttctgtttcgtatgcactgaagaataaaactagggagcagatgaatagaacttccagtgagctctcaatctttatagtcctctatagagaatgcaaggtcttttgttagaacaatgttacttaaccaaagagctctgcaagtcctgctcaggggcgcgcgggctgggctgcacgtggacagcgcaagattgcctagactgcacgctcgccat

SEQ ID NO: 42148 - DNA, 426 bp, Mus musculus
  source 1..426: mol_type = other DNA
cccatagcatttgaaatgtatatatagaaaatatctaataaaaataaataaataaaaaaaaagcccatctattttaaactaggaatttaaaaataaggcagtcttagatgccaaattgtaatgccaatatgaaatacatatgttttttgctgctcaacgtactcataacagtgtcctattactttgagtagtgattaggtataatatctaaaatacaatttgcacagaatttcagcacagtctaatttaagaaagcttaaaacatttatcttccagaggtttaagtaaagcctcctattttcaacaagactttgtaattctagtaagtggcactttttgatgaaggacatctgagattctcaggcagtctgatctggactcccttgaccaatcagggctgagggtgtggcccaccattgcaccagg

SEQ ID NO: 42149 - DNA, 494 bp, Mus musculus
  source 1..494: mol_type = other DNA
ttgtgatcccaaactataaaattattgttgtaactgcaattttgcttctgttacaaattacaatgtaaatatctgataagcagtgactaagaaaggggtcatgacccacaggttgagacccttttaattacagagaagaatttccacttggtcactaatccaatggaagcttcctttactgtatggatcctttaggaggacaagcagcatcggctcccaagccttggctcagcctgcgctccttttgcagtcagctgacacccaggaaaattagagcctaagtttgactcagcatcaggagccagctcgggagacgaagcacttcgggggtgtggtgggggcggggtacactaatgccagccccaccactggtcgcgccttccgagggacccggcgccccactggtccctctgcggcccagcaggcctcaagggcggggctcacccggccaggcgaaagggagtgccgcgggtgacgcacttccgcctcgagcc

SEQ ID NO: 42150 - DNA, 340 bp, Mus musculus
  source 1..340: mol_type = other DNA
gaatttggagaattcgaattatttagactgagcaaactccctccacaaggctgtgggaagtccttagcccatgcatcgcatggtccctagcactaggcactgtgctgcgtcacagagcaacgcaaatgcctgtttctgggtagagactctgggcggaggcggtccggctagctccgccacccttctccggctctccaccgggagcgcagaggcaggagggcgcagtgccctaggcgctctctccctgcgccgctcggccccgccccactccgcacagtctggaagcagtgacgtgagaccacgctgactggctgctgcccgcagggatggccaccgccag

SEQ ID NO: 42151 - DNA, 594 bp, Mus musculus
  source 1..594: mol_type = other DNA
atgttagcttacaatattgggaaaataaaaagtgtagaccatttaaatcccattagaattgaaatgtgtcagaaacttagatgatgtttctacctcttgagagtatttgcaactatatttaaatatgagtaagactatttctgaagtaaaattaaccagtaatctactcactccatagtgtaactatgaacagtagttttcatcagttcttcaattaagaattaggcttacttgaccaatttagaattaaatttttaaatattacttgtgaaatgattatttaggtcatcaaagaatcacaactccatatagctgacataattatagtttattttgaatccattatttcatttcatgaagatacaagatcatgggattgattatgaaaaccttcaagatttatggaaaagaggtgctttaagcacaaatatttattttattgcatgagtcaagataatttaaagtcattatatacatttatattctgtactttttgcaattagtgctttcattgatgataatataagctatttgatttgttatgaagaatagtttgtgtaatttaaaaaaaatagatgaatacatgatacatgt

SEQ ID NO: 42152 - DNA, 362 bp, Mus musculus
  source 1..362: mol_type = other DNA
atgctttttgttggcattcaaatcagaaatctgttccttcagaggtcactgacaactctgggcagggtttgtttagccaaattaatgaactctttaatctttaactaaattatcatcatttcaagatgtgatccaaaaactgttttgtattttagtgattagatttaatacttaacagaaaacacatggttcccagagaattgagctagatccaattttattctctgcctgagaatttcaggagccttgattatgcagatacctcacaaggaaaaacagactggctagctgtgagccattccctggcgctcgcgtcccgcccctacgtgccgcggggaggcgggaggaggaggggcgaaggc

SEQ ID NO: 42153 - DNA, 381 bp, Mus musculus
  source 1..381: mol_type = other DNA
tctcccactggatgactgcatggcagagaagagagagagagaaactccctgtatcctagcatgaaattcctggatggagtccacaggtggggctgccccactggcaggctccttgattgcccgaagccaagctgggggccgcaccaagccaggggcctgagcagccaggtgagctgggggtgccggcagggcgggcgcgctctcactcgagccaaagctggggtgccctgggccccgcccgaggccactccaggagggggtccagcgtcggcccccgcctcagcccgcgaggttggtacggaccgcgagtggctcgggtcccgccggcagctcgcgctcgcgggggcggggtgcgtgggggcggggcgggaggcgctgtca

SEQ ID NO: 42154 - DNA, 389 bp, Mus musculus
  source 1..389: mol_type = other DNA
ggtagttgcatttaaatttaaatcagtgtgctttccacaaaggactccattctgtttgagtcctgagtcacagaccccagagtgtccaaactctttgaatattgtcccgaagtgtctctgggcagacagtcacagtgcaggacaagtaagatgtctgacctattctgtgcatggtagccaatctctgaaggaaatgttctattaggactttgacattttattttattttattttatttattttaaagatttatttatttcatttatatgagtacactgtagctgtcttcagacacacagcagccagtgctcttacagattttgatattcttgatcagagcaaagaaaaaatacatgcacttgctctttgctaaaatattactctgaata

SEQ ID NO: 42155 - DNA, 452 bp, Mus musculus
  source 1..452: mol_type = other DNA
aaaaccatttttcttttcaaactttgagttgttttaaaagacattgtcttagtcagggtttctattcctgcacaaacatcatgaccaggaaatttccacactgctgtgcatcactgaaagaagtcagcctgctttcttatagaaccaagaggatctcatggaggcatcttcctttgacacccaattaggcccaatagttctatacctgtctgcactcatatgtaggaaaagaccctcaacttaagtgcctctgcgattcagagttaggtacttgattcctatttaaactcagtaatttgggcctgggctgagatcgccccgcccctcgacaaggccgatcccttgtctgtgcaaggcccgggaatggaccaatgggcgccagtgggctgggctggccgtaacatggttgcccaggtaaccagtgagcggccccgcccctccgggccaaggct

SEQ ID NO: 42156 - DNA, 204 bp, Mus musculus
  source 1..204: mol_type = other DNA
aagaacatgcttgagcccgtgcaaggcattcagctgtgtaccacctttgaaaaaaattgtaattatttttgggttattttctgcacttgttataacttgtagcacatggtctggagtggataggttcatattactgcgcttaacaaaatagtacatcgttcactctttaaaaaggcgattgggaatggacttgttgctccaagt

SEQ ID NO: 42157 - DNA, 317 bp, Mus musculus
  source 1..317: mol_type = other DNA
agaggcagatgacctgctgttaatgctcacctcagttaggtgcaagtggggacccataaccccagagctccagaggcaggaaaaggaatcattgttgtaaattaagaaaatgacagattaggtaaaaataccttagttgagcgggttttcgttttatcctacacttcaggaaaagcaaaagagatctttaaaaaaaaattgtgcaagaaaaaattaatcttgttgcttcatccaacattcatgagggcactgcccacctctgtgggaagctagcctctgatggctaccctgctcttttctagataaatctgcaataa

SEQ ID NO: 42158 - DNA, 333 bp, Mus musculus
  source 1..333: mol_type = other DNA
gtgtgtgtgttcccacatactgtacaaaagtaaataaatgtaatttttaaagaagtctcttttcacctgtagtactcatgtagtaccaggctggttatgtatgcagtgcttcattgcactattctttgattggacaaataagaagcacgccctacaagaccacgttctttaccttcaactcacctggaccagcagttctaaaacctgcatggtgcaagatgggccttgaagcactgccaggctaatcttctgggagcctggctagtagaagacgcgtctcagaggcgccgcccccaccagtagtcctattggagcccgcgcttcaagggctta

SEQ ID NO: 42159 - DNA, 416 bp, Mus musculus
  source 1..416: mol_type = other DNA
aaatttagaattattttaaaaactgtttcagaagaaaagtagtttggtatttaaagtgattgacaaatctaaatatttggcttggtttgcatgggtggcaaacactcccagttacatgcaagtttcgccaggtttttaaacaatcagtttgtaatctagtatgagtgtttttacgaaatctatacttgtgagcaaaacatacggtataactgccaaagtcacacgttcagtccgtcaagggacccgagagggatcggtgtcaggcgaagcccgagagccaccaaagcgctgggaactcgggcgggcacagatgcccaccgattgagtgccgcgcgcagacagccaaataagcccttgaagcgcgggctccaataggactactggtgggggcggcgcctctgagacgcgtcttctac

SEQ ID NO: 42160 - DNA, 292 bp, Mus musculus
  source 1..292: mol_type = other DNA
cggtcagtgcagagaccccgcggctgcgtttcctcaccgaggctgagacccagcggacgtcctgcagcgccattccgaccgtggacgtaccggctcgccgtcgctcccgcgcgcgctctgagacgttttggcgggagccgtgttcgtaacccaagccaatgggctgggtcgcccactgcgtgcgcggcacttgcagtgctaggacttgaacatctgggccgcgccctttggcactgcacatgcgcagatgagcgcaccccttgacggcagacgtgcgcgtgcgcgtggcatc

SEQ ID NO: 42161 - DNA, 424 bp, Mus musculus
  source 1..424: mol_type = other DNA
cgcagccccgctcgctctgagctgggcggtgggcgatcgccgatggcctgcgcccctggggtgaggcatcggctgcgggttgcggcgcccagagcagcgatgcaccgagtggcggtgcagcgactagggccctgggaggaaaggcgccaagcacgcgcgtctcgtcgcccaccgggtggggtccagcgcccagccgcacacggactcccgcggcgtaacgcaccgaagtgctacggcggcgccgggcgggggaaggggcaggagaagatgccacgcgcacgcgcacgtctgccgtcaaggggtgcgctcatctgcgcatgtgcagtgccaaagggcgcggcccagatgttcaagtcctagcactgcaagtgccgcgcacgcagtgggcgacccagcccattggcttgggttacgaacacggctc

SEQ ID NO: 42162 - DNA, 449 bp, Mus musculus
  source 1..449: mol_type = other DNA
atacatattgttaaatttataaaaaatttaaagaatccagacatggcctttaatactaactcttggaagcagacgctagcctggtctatttagccttcaagttccagggtggattacccctgtattttttaatagaaatgaattatccttctacatcaacttattgcatttatgtacttggcgtatcttgctatgcagatatcaggacctctataggtgtgaaaatactgtttcaaaaattgtcatgattttatttgtaaaataacacacatttccttaaaaatgatttattttatttcatgtgtatttagtgccacacaccacaagcgccaaaatggagtaatccttcttagatctgtagcgaaggtcactatggtgccggctcggccgaggccgcgtggtcgagggtccaagcaggctgggcgcatgcgcacgaggccggttctccg

SEQ ID NO: 42163 - DNA, 210 bp, Mus musculus
  source 1..210: mol_type = other DNA
gcagaaatgaggagggctgagccaatgatggagcctaacttaaccgttctccagaaaggacgttccctagtccccaggatgcttggggggctccatcccctcggataaccggttattgagacgcgcagcgacggactaagagtttagccaatcagtgcctaggggcggaccaccaggacaggcccggctaggcttcaccgtggacctggc

SEQ ID NO: 42164 - DNA, 486 bp, Mus musculus
  source 1..486: mol_type = other DNA
ggggagtcgcccacgggcgggactggctcgagacggtttccccgtcgtagaagaggaaatatttctccttcttccctggccgcgccggtgtcggcacagactgctccctccctcccaggcgcgagctgccttcggggaaggcaggccggagggccggctgcgggaacgcgctggacgctgcaccgcagccccgctcgctctgagctgggcggtgggcgatcgccgatggcctgcgcccctggggtgaggcatcggctgcgggttgcggcgcccagagcagcgatgcaccgagtggcggtgcagcgactagggccctgggaggaaaggcgccaagcacgcgcgtctcgtcgcccaccgggtggggtccagcgcccagccgcacacggactcccgcggcgtaacgcaccgaagtgctacggcggcgccgggcgggggaaggggcaggagaagatgccacgcgcacgcgcacgtctgccgtcaaggggt

SEQ ID NO: 42165 - DNA, 237 bp, Mus musculus
  source 1..237: mol_type = other DNA
acatacacatacatacatgcatgcacacatacacacatgcatgcacacacacacacacacacacacacactttatgagtctggccgtcaagcaagcttttcagtgatctgcgtcatctgagtggtcagaacaaacaaaaatggaaatatccctattgcttctttcaagattaataaccatgatgcgtctgaatggttgtttaacagaaattttatttagcattgcttaagacagttt

SEQ ID NO: 42166 - DNA, 350 bp, Mus musculus
  source 1..350: mol_type = other DNA
catggctgtgagccctcattagattccctgtatctttgatgagaaaaaaaaaaaaaacctgaacatgtccattttccagctggctttcaagtactcttgctgcagcctgtgagcaaagctctggctgcatcctgggctggagatgagcattagctgccaggacccctcctgctgcccacccaggagcgggtgtgcccatgcgaagccacacagatcccagcagtactgctgcgcggtgaggggggtgcgggacaggcttcaactcccctcggagtggagccttcccaacagggctaatgattcttagcaagagacgctgtctgaggaagcagcctcggtagcagcagcag

SEQ ID NO: 42167 - DNA, 348 bp, Mus musculus
  source 1..348: mol_type = other DNA
aaagtaataaacacgaagagcttaatgcttatttttgaattattgtgtggagccctgcctaatttaacaaaagagactggcctctaggaacactgtagaaagtcatagatggatgttctgaagatcagtcccaataagatgcacagatagtgggttttgcataggcccaggaaagctgtgccttaggactaaagggcatccgctcagctacctggagtggcaaaggcagttcagtgcggaaggaaggtgccagtgacctccccacccataccaggggaggcagtgaaaggcagctcgctctggtacaaggagagcgcggagccccttgaaacaccactgtccctcggg

SEQ ID NO: 42168 - DNA, 518 bp, Mus musculus
  source 1..518: mol_type = other DNA
gagactggcctctaggaacactgtagaaagtcatagatggatgttctgaagatcagtcccaataagatgcacagatagtgggttttgcataggcccaggaaagctgtgccttaggactaaagggcatccgctcagctacctggagtggcaaaggcagttcagtgcggaaggaaggtgccagtgacctccccacccataccaggggaggcagtgaaaggcagctcgctctggtacaaggagagcgcggagccccttgaaacaccactgtccctcggggatctgcgggggttaaggtgggcgcccgcgcccagcaccagccgggatgagcgcgcagtccgcaccacccgccagccggcttgctccgagtcgacacaggcagggatgctgctgctgccatgacaaccccggcggtcggggcccgcgtgcttcagggctgctccccggaggaaggcggcgcggaggccgggggcggccgctgagcgtggcgtccgcgcgtccccgcgtcccgtgcagcgtcc

SEQ ID NO: 42169 - DNA, 349 bp, Mus musculus
  source 1..349: mol_type = other DNA
aaaaaagctgtttatctatcatctattaatctgattttctttcttaagcatcatcaaggacataaatgttcccaacactctgaggatatttaataacaacacacaaagcttcaagcaggagccatgctcctaaaacagaaagttatttattattttcaaagtgagatctgtcactgaaggatacttccctcacaaatagaatttgactcattcttgcaagtttcacagagcatgaaaatgcccctttaaaatttcctgcaagccatgttggctattgtcagtttaaaaaatgaaagtaatatacaggcaaagtggcatttatccttggattagaaccaatgattgtaca

SEQ ID NO: 42170 - DNA, 589 bp, Mus musculus
  source 1..589: mol_type = other DNA
ggaaagaaaaaagacatgggagccaatttttttttctggtctgctcagaactgcacttcctgccatggtatacgacaaggctgctagacctgtcaagctgatcatcaggggagctcgccagattctcagaggccctcgtggccacgccctaataggcctcagtttccacgtgtggagtttctttcggtttttagctccaagaaaagcaaatcatcctcgctggcttccttcggcgcacacagactgggtcaaggcccgctgtgcttcagcgtctggcttgcaccaccggcgaaggacagcctacgcttgcgcaatagccgcgcaccgcctccagcgcggccccgcccctccctctccctaggccgggccggccggccgcgcggagcattgtgggacaaacgagcggctacggcggcgcccgcccgcccgcacgcccgcacgcgcgctgcggcggctccctccccccaccccgccccgccgcggccagcgcgagcgagccttcggccgccctcgaccaaccgcccccaacggccgtccgtgcgcagcgggctgggcccctcgctcctcccctcaggcccacgggcgcccg

SEQ ID NO: 42171 - DNA, 402 bp, Mus musculus
  source 1..402: mol_type = other DNA
gttaaaaggtttttaagatgtggataatttgaaaacacattgtaagatttatttatttatttttgtatgtaagtacattgtagttatcttcagacacattacagatggttgtgagctaccatgtggaaagagcagtcagtgctctaacttgatctctccagccctggaggtgaggttgcaaagccaacatgctccctccatgatgacccaattaaatatatccttttataagttgtcttggtcattcttcatagcagtagaacagtgactaagacacgtataacttccaaaaaggatgtcagaagttgtatttaaagagaattggttttactgaagtagaatttatattagcttgtatatatagtgaaaaaacctagcatcaatataaattgctattactgt

SEQ ID NO: 42172 - DNA, 345 bp, Mus musculus
  source 1..345: mol_type = other DNA
ctcagaaaagacacagggctggtactgagagaacgttgattctgaatccaatctagacctgcggcagagtgaattatctccccacatatttagatgtatttggagctgtgggcaatacagtggccacctttccccgtgtcagcaaggcaactggcagagctgtgcattggtgaagtgagaaatgtagtggtattgaatccattttactttcctggtcttgaccaggtggcatttttaaagttctccaggtttgtacaaaatgtgtctgtccccagcacctggctcttgcacaagaagaagccacgccttcagggggactgtcgttgacacttaactacttaacta

SEQ ID NO: 42173 - DNA, 385 bp, Mus musculus
  source 1..385: mol_type = other DNA
agaaagaagggagttctgtccaccacaactccagggttatgtggtgctggggctggagcaccggacttagtgtggtaggcaagcactctgagacacatcctcactccgattgcttctgaaaaacgcctttccagaatgggggcccgcgggccgcagcccagtagtgccccaggcgcgcgcgttctgggcaggtccgccctggggcgggtatatgcacagcccacacctcgagagctttccaggatcgggtggatctcccacagcggacgctcgcccgccaaggttcttagaggccttctattgggttttacacgaactgcagagcacgaaataaagaggccttcagtcattgggccggactttcagagtttagccaatcacataa

SEQ ID NO: 42174 - DNA, 324 bp, Mus musculus
  source 1..324: mol_type = other DNA
agcaaaatttcattttgctcattcttgttagcacatatgagctcaggagttttggttcactaatcaagactgtcctgcaggatgactgagccagtaagggctcttactggagagacagtatctgatgctgcaaatagttgggtcatttctctgggcacaggccactgtcagtggctctgacagcgaagaagctggtcttaacaacagctggctacggttttgaagagccagaactctgtggtgctccttcgggaccggccgcaacaggtgtgcgggcgccggtgctggctggctggaggggcggggcgaccctggaggccacac

SEQ ID NO: 42175 - DNA, 387 bp, Mus musculus
  source 1..387: mol_type = other DNA
tctgcagagggtggtacgccagttgtgaactggggcagcaggccgctttcccaggaaccaagatgcaaagagagaaagcgtgtcttttgctttagagatcttaaactgaagaaaagcctggcgccactggcctcggcggggaaggcctctctgtgccgcaggggctgtgagcgcgccccgtgcagcgctggggcagaatgtcggctcagggttaggggagtggggcgtgcccaaatcccgaggcccacggtctacccgcgaagactcctgcgcccccagcctcgggtccagagcgggggcggggctggccgtggcttggggcggggccacgagggggcacgcgtgattggacctgggctaaacaaggggaggtatctaaacccccgg

SEQ ID NO: 42176 - DNA, 413 bp, Mus musculus
  source 1..413: mol_type = other DNA
ctgcaagttgtgcggacttggagacatgggttagagtctgtgttatatttcccaacccttccaacagttttcttctgcagggaagctctttaaacaactcagaaaagctctttaagcaactcaaaatagcttcaggaagtccccgaaacggatcagattctttaggctcctctctgccagaataaacgataaaagctgagagaccttctcgtcgactctgaggccagaccagctacctggaggcagcagaaaccagctgagctgcggaaaggactcattgcaacctgttgagctgctaaaattttgtgtagcttgtggcaccagacgcgtcggggcggttcaggtgctgccacaggctccgcccctgcccgtccccttccgctgccggagcccggaacgtgcgcgtacccaga

SEQ ID NO: 42177 - DNA, 271 bp, Mus musculus
  source 1..271: mol_type = other DNA
tgctaggccccctgcctgagcagcagcagcttcagcgggcgggcatggtggcggacgccttcccatttctgagttcgaggccagcctggtctactgtcataagcgcagtcaagaaccgtttattcattacatatcatgaacacgagtagtggaaaaataacgtatttttctgaataaatcttagctaatgttcataattttgctatagcagcaatggcattgtgcgtgcacttgctcattgctagattaaccatcatcctatattatgttg

SEQ ID NO: 42178 - DNA, 308 bp, Mus musculus
  source 1..308: mol_type = other DNA
atctgcaggtgtggacacactccaggacgggacctgatcctttgctctgagggctagtcccctttgaaaaacctgacagatttttgtcaaatggatggatggatggatggatggatggatggatggccacgtatcatccaccggagccttcctctggctggagaaattcagcacctggatgatccaggaacctggctgggctttcgggaacacacttttaaaggagtgcctgtggtccccgaggccatctgaggttgccagctcctgcagcgggcggggccgggcggggcagggtgcagacgcttgca

SEQ ID NO: 42179 - DNA, 436 bp, Mus musculus
  source 1..436: mol_type = other DNA
ggctactttggaagggccgcgggcacgtcgcgatcccgctgtcattactaccctagtttataattgggataacggatcgggagcgcacggctgcagcgcgggcttcggagctgtggtcggtggtcgtcggaaagcgcgcgctctggagcccggagcttcgcgattctgtgcccccttagactcctgagtccctggagaaggaggcgcgcgcccgcagtcctgcgcgtgcacacacacacacgagcgcgcgcacacacccgtacagagccgcctggggagcgctcgactctcggatccgcgggcaagagcggtcggacccggggtgcgcaggtcagcaccccagccgcacgggcgcgcaggggcggggtagcggccgacgcccctcggctcgcgctccgcacctggccctgcaggaagtgcgcgctgattgacagct

SEQ ID NO: 42180 - DNA, 418 bp, Mus musculus
  source 1..418: mol_type = other DNA
tgcataatagctatgctgctctgcgattgtgtctagtacctagtaatgattttgttgaagaaaacaatatctgacagtgaaatttcaattggaattggtaaaacctcaattggaacagggtcagtgttttctaatttattttttaaaaaatccagttcagtgcagataactaatgataatgtcttagcaatgctcctgtggtagcgctttcagtgacaaattgagcctcacactgtgcaattcactgagcaaactcctcaaagcctttcatgcagaggctgtgtaaatgggtgtcttgagtcagtagcaaagcagtcacagcctagtatcaaccaagctattgaaaggtctgtccctcagcctgttgctgaatagtcagtaactggctctctgaccaggaagcgctcacctgtgggag

SEQ ID NO: 42181 - DNA, 256 bp, Mus musculus
  source 1..256: mol_type = other DNA
tcttatatgtttcaatattgtcagagccgctggcacagccgtgttctgagaggacattataaggtctcaaccctactgatcgatctccttaagaggtgctataaagtgctataaagaccaacattgctttatacccatattggaaggtcaggttagcccaacctcctaggacactgagtgattcttatgtgatatggacactatcacacaagaaggcctaaccatgttctttgagaactgctgcatatagatgagt

SEQ ID NO: 42182 - DNA, 244 bp, Mus musculus
  source 1..244: mol_type = other DNA
ggttcaggtctcacttgcctttcaagggaaggccatatccatttcaatgaatagccattccaggcacgcgggcgctcacacacgtgcgggggcgcttacacacgcgggcgatcacacacacacatgtacacgtgagctttcccacatattcacgggaagctctcctgaccctcgctggagagtagggaggaggctgcccgctctctctggccctgcgtccggcaccggacgagggacagcagag

SEQ ID NO: 42183 - DNA, 312 bp, Mus musculus
  source 1..312: mol_type = other DNA
tttatctttcaaatcctaagaaagaagcagacatcttgttttctgcatgtcctatttacagccacaataatataatacacttgttttgcatacctgggtaaatattagctaatgtgaagccctttgcttgctattaagatttactgatttcaatagaaaggaaaataatatctcacagttcttatataacagtggctgttttgatgataactagttgtttctaagccaaaagttatttggcatgctggcatccaatccatgtctgctgcccaggacctcagctggtgaggtgtgaaaaaatatatatatatg

SEQ ID NO: 42184 - DNA, 292 bp, Mus musculus
  source 1..292: mol_type = other DNA
tctacctccttagcgggctgtggagcccggagtcgaggcgcgccaaagcattgacaggtcaggtcccctttttaaaaatagtaggtcaaagtttgactccggctggaaaaagcattaatgaatcaaaggcccaagggaaaggaaagaggccagaggcgtttggctttggatactgggcgtggaccccgtcattgttcctgggagcaagtatcctgtgtgcgcagtgcatgaatgtaactgggcatcccgcgtatatttatgtgaagtcacttcccaaaattagctgaaaaaa

SEQ ID NO: 42185 - DNA, 224 bp, Mus musculus
  source 1..224: mol_type = other DNA
ctttcataatgctttgttaaaaagagacatttatggatatttcttccttttaatcactacatcatggacaaatggatcatctgatcttcttattcacgaagaaatacactgtggtgtttctcatggcagtatgattcaggcactaggctaaatgaacacagtttcactgagaaagtcaagccagataaaactaatcaggtgtaatttagcgctgccgcccgagc

SEQ ID NO: 42186 - DNA, 473 bp, Mus musculus
  source 1..473: mol_type = other DNA
acatatataaatttataccaataatgggtatctatcagtaggaaaagatgctgttttttttttgacaaagcgttggccaatggaactcagttacaggttctggactccctgaaccattccacgggtgggattctgagtcaggtctaggcaggaaccctcgcaggacccctgctgtggaatcccctgtgtgtcaagctttgtgaatgaatgatgtacacgcaccttcaagaatgcgtgcccgagactgtggcagtagccccggcatgccagggacaggctcgccagccattcttagcagcggtgggctgaggccctcgccccgcgcgcgcggaatagctggagcagcgccgccgggccaggctcgcccgcccttccttgggcggtgattggctgcagatgctaagccccgccccgccgccccgccctcgccgcctcgccgagtgggcagggcagcggctgggaccctgggcctg

SEQ ID NO: 42187 - DNA, 262 bp, Mus musculus
  source 1..262: mol_type = other DNA
gcatatactatgttttcttttgagaataaaatagggaaccaatcttccaagattgatattttagagattggcattgtctccacagtgtgtcataatttcatactataaacctataccattatggattagctctcatcacctttgtgatataaaggctccttgccagggtgactctcttcttaatgtcagaaaacagggtgtgtctgtgtttacacataatcataatttcatgactgaaaatcagccaacagaagtctgtgat

SEQ ID NO: 42188 - DNA, 231 bp, Mus musculus
  source 1..231: mol_type = other DNA
cctagaaaaattcatgttggtaaaagacttgcaggtttttaagaaattgttgcctatgaccttggcaaagacagactgctgcctgtccttgttaggggagacacagactgggataatagtaataaataggtatgtgtcacaaacctgccttttgttttctttttgatgcatgtgcacgagtctaatcatcgaacagcctttctgcaaccctcccgttttgcaaagcgttcc

SEQ ID NO: 42189 - DNA, 254 bp, Mus musculus
  source 1..254: mol_type = other DNA
ctcttcaaaagaactgggtgttagatagcaacatagccacctccccagtggccatatgacccagctgccctcattgagctggcttgcagtggctttgtcactagagcgaatggcacattctcacagagtgcattctatgagcctcagagcctcctcttagctagtctgcaaagaggaaaagagagggcgtggctgagcccagccacaccagtgagctgcttctgatctacaaagatcactggcaaatgtgcttg

SEQ ID NO: 42190 - DNA, 235 bp, Mus musculus
  source 1..235: mol_type = other DNA
tttcataacattatattttccatcttaatcatttaaaatttgaaagtgtgtagtccagaggacagcctcatgctcacaaaataaatatatatatatttttaggtttatacaaattgacccaggtcagggaaagtacttgatggattgagccatctccctaactccttgtagagtcagatagtcattatgtacagacggtcagaattaaacttgggacacatgaattgtgtgtgac

SEQ ID NO: 42191 - DNA, 241 bp, Mus musculus
  source 1..241: mol_type = other DNA
ttgtagccccagggtgcgcactgtcagggttaaaggcttgaaggggtttcctctggagacaggatgcctggacttttctgtagagagaaaaggatactttttttttttttaaccgcgcggggacagcaaagaagcctttcttggttattgtttccacattcacaggcagcgcttgccctgggtttgcccggccgtctctctccaggccagggaggcctccaggccaacccgcggcgttcgc

SEQ ID NO: 42192 - DNA, 281 bp, Mus musculus
  source 1..281: mol_type = other DNA
aagtgactggcacctcctaggtagcactctaggggtgccgtgtttcactagcaagggatctgtagcactgaccctgccctgtgtattggtgtgtgccccttgtgagagacaactatcactgtgtcggggctgcccataggtctcctagtagcctcctgacttgattgtcctgctcactcactcctagagagcgagacaagtccagctccccagggctgtggccaccctacaccaaccccgtgcagcgtggcgtccacgtgcggggccccccgaccacctct

SEQ ID NO: 42193 - DNA, 327 bp, Mus musculus
  source 1..327: mol_type = other DNA
agctcatcccgggacttgagcggaggcccataaaaacgctgagttttattactattcctttacaataaaagaatacaaacttttgtcagcttactttttcttatctacaaacaaataaaaaaccaatgaacaatagtttacgtactcactttttaaaatagtggcgtacgcctttaatctctacactggagtcagaggcaagtgaacaaaatgccttgtcgatttatttaaaacaaaataaaacatccttctaggcaaaagtcattggaaggccggagcatgccgggagttgaagtccagtccctcacagactgtgaggaaggaccg

SEQ ID NO: 42194 - DNA, 317 bp, Mus musculus
  source 1..317: mol_type = other DNA
taagtcagcagacacaattgctttccaggaattcttatgaatattcatctctcacaaatgtaattttgatgagtaaacctagaaagatcattcaataaggcctccattctactccttgcagccttggaaatgcagttgaaatgccattaggaaatccctgccctgaaggccagcacttttggccagactgattccagctaccttacttaaggggatgaaagtctcaaagaaggtaaggtctgcagacgcggactggcgagcgccccctagggtccggccggcgggtgtgggcagggagggccgtggccgaggagctt

SEQ ID NO: 42195 - DNA, 322 bp, Mus musculus
  source 1..322: mol_type = other DNA
atcttctagcagctccgctgctcggatgagtggatcctgggtggccggtaaccgagtctgagggacgacagcccggagttctgccccgcgggggtggtacctgcagcagtacgaatcaacgcgttgacgggcccggtgcacgagtcgctcacgccctggaaaaggccgagaccggggccgggaactcgggccgcgtccgccgccgccgcttcctgctgcgccaagcgcgggacacgtcgcgcccctttcccgctcagggcgcgcgagatgaactccagaggcgatagctcccctatagcgtggaggggtgtctattccccgt

SEQ ID NO: 42196 - DNA, 318 bp, Mus musculus
  source 1..318: mol_type = other DNA
cataagatcaactcatatgcagcagtattgttagaactttgttgtttggtccccaatatcatggatctctaacactggaagattcaacttcctgaaagccttctaaagccgatatggcattgtccactgggaagtgcctccttgcgctgtcccgcccgcacgaggcagggggagtaaagcctcctttgcgtgtgcgtagcccccggtatgggaggcccgggcccaagcccggctacggggaatagacacccctccacgctataggggagctatcgcctctggagttcatctcgcgcgccctgagcgggaaaggggcgc

SEQ ID NO: 42197 - DNA, 351 bp, Mus musculus
  source 1..351: mol_type = other DNA
aagtggggactagacactggtttgttaccagtagtcacatacaataataaggtttaattaacttgaattcaagagtgtctcatgaataaagcttcaggggtgaccctagatggaagggtttattaatgaccacgaggtcgttgtcctggtggagaacgctgcagctgctgtgggtgggtctggcagtagcaaaagtgcggtattccgactaccacagagtctctctttctctgccaatctctgaccaggcgtacgcaagcagggcgcggccatcttggcgagggcggggccgcctgctgatcacgtgggcaggtagcctacgggtcacgtggggcggtgcgcgctcagtgc

SEQ ID NO: 42198 - DNA, 344 bp, Mus musculus
  source 1..344: mol_type = other DNA
aacggcatgcgcatcccaaggtgttttcgagaccattccaaaacagctgttcatattcccagctgccctttggcgatagaaagctctttactttccttgggaagagtagacctctgaggacccgccgaggacctggttgctaagagggaccagacaggtgcgcgtggagtcgtgccccgaagcgagacacgcttgccagggcagtgctctcccgggccatgcgaaaaccgttggggcaccggcatttccccaccgctccagctgcagctaccggccggcgcagccgcactgagcgcgcaccgccccacgtgacccgtaggctacctgcccacgtgatcagcagg

SEQ ID NO: 42199 - DNA, 454 bp, Mus musculus
  source 1..454: mol_type = other DNA
aagaggattttttttcagaacactattagacctctactctatgtgtgtagactttagtttagttaaatcttctcttttctataggaaggtgtctttgccgaataaaaatattttattctatactttacccaaataatctaaaactaaggaaaaaggaaggataagccagatttaaggcttttttatttttttccaaggtattcagaaaggtttcgagttcgaggccagcctggtctacaaagacaaacaaacaaaaaaaattaagggtttattcttttgaagattattaaaaccttttgaagttaaactggacatgggattaaaataacaaaaaactactaatactaattattgttaaaagttacaataggttattctcacagaatatcataatactgaactcagataaaacatatgagttggccgatcttagaactttgtcacctgtcccagt

SEQ ID NO: 42200 - DNA, 481 bp, Mus musculus
  source 1..481: mol_type = other DNA
gtgagattttgtctcgccttaattttaatataattctagacattctcttactttctaaataactctaactttccagtctctttttagatgaaaatgtgagctatagaacttttaggataagagaaaaccttcagaaaaatatcaaattagtgttaaactctgaatactgtagtctccacatgttgaagtaaactgccacatacttttagtgcaaaggagaaacatttatatttctataaaacacacaaatgtatattgtttaactttcttgcaaaaactcggatacagtatttggaaaatctttctttgaatggtttaatcacccagcaaaatcaattgctggaggtgctgcgctattgttttgctgtggttcccatcagcctctgctgtgcaaagtacttaaacagtactgatacacgaatctagcttgtgtaggttgcttctcactttaagataggacctcccctatcctcagggcata

SEQ ID NO: 42201 - DNA, 597 bp, Mus musculus
  source 1..597: mol_type = other DNA
ccgaagcccaccgcatgcgcattggtctaaaatgagaaaaaaagattttcaaatgctggctatcctatatgaaaactaagagattgaagatcctgtcccaacatcgtttaattaacagaaatttaaccttgagagtcgaaacatttactactagaatgtaaatgtaagggttaaagggaaatgctttgacctgaaacttttgacaattatagaaatgttgccccaagtcttaaaattccagtcagaaaactgaaaatcctggttctttggtccaaacttagcagcaatacatgtcatagattaaaaggagacccctccttagaatatgtatgtgggcacatcacaggtatcctggacacatgtccgcacttggtgatgcccaagcggggctgtcgggagagatacccgcacgagagcctgctggccggctggtcaaacggaaagctcgcgggtgtcccgcacagctgcgccccgcacctctctccctccgcccgccccgcgccgggcccgcgcctgcgcactgcgccgcgccacgggtggtcgcgaggcggacgccggtcccggagcctgaccattggccactgagccgagccggcg

SEQ ID NO: 42202 - DNA, 557 bp, Mus musculus
  source 1..557: mol_type = other DNA
cggcgtccgcctcgcgaccacccgtggcgcggcgcagtgcgcaggcgcgggcccggcgcggggcgggcggagggagagaggtgcggggcgcagctgtgcgggacacccgcgagctttccgtttgaccagccggccagcaggctctcgtgcgggtatctctcccgacagccccgcttgggcatcaccaagtgcggacatgtgtccaggatacctgtgatgtgcccacatacatattctaaggaggggtctccttttaatctatgacatgtattgctgctaagtttggaccaaagaaccaggattttcagttttctgactggaattttaagacttggggcaacatttctataattgtcaaaagtttcaggtcaaagcatttccctttaacccttacatttacattctagtagtaaatgtttcgactctcaaggttaaatttctgttaattaaacgatgttgggacaggatcttcaatctcttagttttcatataggatagccagcatttgaaaatctttttttctcattttagaccaatgcgcatgcggtgggcttcgg

SEQ ID NO: 42203 - DNA, 414 bp, Mus musculus
  source 1..414: mol_type = other DNA
cagcctggtctacaaagtaaattccaggacagccagggatatacagagacaaaaaaagaattgtttggaagatttaagcagctttctatatattaagaaataaacacctatttgtatttgatgtagaaagttttctttgtaagtacacaaatcattgtaaacgtcagacatacatgtaatatttttattatactattttgttaacagtacgctagaaaatgccgcggggaccgctgcagctggaattggtcgggcggtcctatcgcgggttgcagtggagaccgactcacgagccgggccagccccctccgacgccgccggccacagccaagagcggctgcggcacggagcagggccagcccgttgcctaccacgccccaaaccccgcttccgggcccgaggttggggagggcc

SEQ ID NO: 42204 - DNA, 362 bp, Mus musculus
  source 1..362: mol_type = other DNA
ttataagcataaaatcttcttctagaagtttgttctagactgcagctgaatcagcagcctatttgctttcccctggagtaaacagaaggacaaggagctcactggaaatatatctattttcagatatcccaaacttgactattaggcttaaaattccttcttttcgtatgactcaaactggagaattttctgtgcagggaactttcatgttacatgttccttgaaaactagtctctctctctgtctctctctcacacacacacacacacacaccagctgtacccatttggtttatctggtttattaaaaagaaaagggcacttcggaaattccttcctgttctccagctttatatagagagc

SEQ ID NO: 42205 - DNA, 390 bp, Mus musculus
  source 1..390: mol_type = other DNA
ctcaaacagtttaatgctccaggattacctagttaccctttaaattcctgtatttggctataactgaaattatggtgcaatttaacttctaaattgaatgacaaactgctctctggtaagatcacccagaggccacgggcgtgccgtgagctcccagggacccgtccccgtttccatgctggcagggagggctctgtccactcgcttgcccaccggggcctgtgctcgggctgcgagttaaagacgtcccgagcacttgggccgagggaaagagcgtgggctccgctgcaccctgtcccaggaaaggtccaccgctccggctccgtgatcctcaccagcctcggccgccgctgcccagggtctagcagtcgcggctcacccccgctgttg

SEQ ID NO: 42206 - DNA, 347 bp, Mus musculus
  source 1..347: mol_type = other DNA
tcaccagtgatcacaagatcctgggtgtgctaggtggacagttataattaatataataaagactatattgtaaaaagacgttagtggaaacattaacagttattatcattattggcttctgttaatatgcgaagtccatgtccttggcttacaaatttaaagaattaaattcccagcaaggaaggagtactcctttacagctgtctctgacaaaatcagagacattttggctttactccagcgccaaaagaatctctatctaggttccagatctcaagactatggagaccacaatcaatgaacctaagctctcgaggaataattataaacttttgctggaggaaaaa

SEQ ID NO: 42207 - DNA, 271 bp, Mus musculus
  source 1..271: mol_type = other DNA
ccaagtaaccttggctctctgagtcaagctggtgatcctgtgatcctatgatcctgagatcctggaaaaagctgcctttgggatctagagatcctggtgttaccaagctcctgggatcctgggatcccctgatcctgggtgtgttagagcacctgggagaggagctgtgcccaaggtcttctcagggcacccactgctctagcctgagtccagctggtcccaggctggatatcaaaaatcctacaaagaagacattagagtcactagtttt

SEQ ID NO: 42208 - DNA, 398 bp, Mus musculus
  source 1..398: mol_type = other DNA
tgaagtatgtatccactctctatgatgaacaatctataaatgatatagataaaatattgactgtctctttaatcaagaactgctgtaggaaacatggagagaaacttcattctgtacctctggtatccatagaaaccatccaaatataaggaagacatgtcttgaataagggtcatggtttcattaaacatacctttaaaattgctcaatatgatatggggatcataattaattcattatcttgatctgaatttgtaatttcctgcctcatttttggcttgaaactctgaagtaattttttagcttaatgttatatgatacatgtgtgccatgcacttggaagtctgtaagataaagttacctttcaacatcccagtttgctaaaagggtgagaggaa

SEQ ID NO: 42209 - DNA, 516 bp, Mus musculus
  source 1..516: mol_type = other DNA
tatttcaatagaaaaatgaaactatgagttcaagatcatcctggcctccatagtgaatttcaggccagccagggctacatagtcagaccttgtctcaaatatatatttgatatataatatataattatattatagaatacacttagttattaggaaagttttgtattgagctgttaactctttattgttaacatcatctaaagctttctttacatgatcaaaactgtcaggattcataagcagaaaagctatcagctaagtagctcttttgctggcaattgcactacagaggatctctacagctccgaaagatgtcctcaggcagccttacaaaacagagtgaagactctgctgtgagtggtactatggcccttccttaagtagaggagttctttcaagatagcattttgctgtgttggattttctaggaaccaagagactggttagtgctgcattagtttcaataaaagacttcttcgaaatgtttttccagtcatgtatctttagtgccacctg

SEQ ID NO: 42210 - DNA, 537 bp, Mus musculus
  source 1..537: mol_type = other DNA
gaagaattcatcttcacaaagtgttttatccgattcaacaatgaaacattctgaagaacgctgtgttaactcagttgtcacaggtgatgagaacctgtcagcaacctcaagatattgaaatctcttatctgtcaacttcagaaaaggctgcaatagaaccttttatttgagatgtatctgaaaatgactttgagcagaaagaagaatactctccatatagcttttatcaaatgtttactctaagaatatgggcccacattggaaggcaacagaatttgtgagcttctgaggccatcaattcctaaatcttcattttttttaaacatgtaccattgttaaagtctagttaagactttatgtactaaatcccttgtgattgggaaaaggggttatttacatattacttcaaggaacctcatcatattttacatactgtacataaaaatccctatgataagattgctttttggttattttacattttcagcaatattatatctccaggttatcatgttcatgttcatattggccaataaa

SEQ ID NO: 42211 - DNA, 525 bp, Mus musculus
  source 1..525: mol_type = other DNA
gatgtttacctagatcatttttctttgtttcaaaatctatgtacaatcagggcacccagcttgacagcacatgttgtgttattaagtatgtaaaactggtagtagtacattaagtttgtaaaactgacaaatgtcttcattagaaaaggtatatatatatatatatatataccttttctatatatatatataccttttctatatatatatataccttttctatatatatatatgttatatgccatgaggaagatacctaataaaaatatttttaaaaaagaaaaggtattagtttgattaaacctgttttcttcatttacctaggatagaactccactgttaataagtgaattattaaatcttgtggcttagcatccatgcaacttaatggtcatgcttgtaaatcatgaagtgccatctttgaaggaatatgagattgggacactttcctaagtctgtgagttttcctactcacaaaacacccacaggcaggtgtgtaaggaaggggagcagctcaaagaagaa

SEQ ID NO: 42212 - DNA, 466 bp, Mus musculus
  source 1..466: mol_type = other DNA
ctatgtggcagagagaaacttatctttacttggcagagaaatcctttcaattgtctctcactcaacattgttgtagagtagaaatgacaggtgtgcacccttgttgccttggtgaaaagtgatcttatctctaacatctcttcatctttatcaacaaaaatagtttagttatttctagccaggcaggacactactaatcttctcagaataatgagtgcccaatagaatttacaaacttataagcaggaatttcattttgtaagcttagaaccattctttgacccaatattggaacatgtaaatcatccccaattaaatgttttcccttttaagagttaatttctcatagtgtctcacagcaattgaaatgctaactaaaatacagcatgaactgatgtcttatgattgatccaataaaagattacaatttttggaacattatcaagaagattcattaccttaaatt

SEQ ID NO: 42213 - DNA, 534 bp, Mus musculus
  source 1..534: mol_type = other DNA
atcagtacattttaggtgcacattctatccactgagtatgcaccgtgcatgtctagatgtttgcttacttttataaaacatgattaaaaatctgaagacaatttagaagggtataatttttaaaattaggaaaatgtttgtctttgtgttttgctcactgcacattagaacaagcctatgaagaagtgtgcaaattctgtctgaacctttctaaactagaaactgagagtctgcagaactaaaataactgctgattagaatgtgaaattatccctttaaaaaaagaatgcatcattttacctctgttgcatatgtactatttagatgtttttttgatacatgtttaatgaatttctagcagaaatctacaacacatgaattggatgcaaatcttggtctatagagcatacataacaagactctgttgctataactactgagagaaagaatgatctccttctgagatcacctttaggaatatttgaaaagaatacccatggccaggtgtgtcaggaagctcctgcccaagaagac

SEQ ID NO: 42214 - DNA, 427 bp, Mus musculus
  source 1..427: mol_type = other DNA
tgataagaacttcatcttcccacagctagatgcacaggcgaaatcactaaagataccttagagaacatcagtaaaaatgtaattttaaatattaggagactattttggattgcatgccctgtgtgccatacacatggccaggttttcaggaaagattcagaagctaagtctgtgattgggaaaatactacttagttaatttaggtatttagaggctaaagctttactgagtacacattgtgattacagaacacaatgaacaaggttctcttgtttaaccttaggaagctcacttaggaaataaacaaccctagcttcatctttgaaggaatatgagatcttccctaagtctggctactcacaaaacacccacaggcaggtgtgtaagggtgctcctgcccacatcctgggagcagctcaaagaagaa

SEQ ID NO: 42215 - DNA, 522 bp, Mus musculus
  source 1..522: mol_type = other DNA
gttgagtcattagtacattttgagtgcacattctatttactgagtatgcaccgtgcatggtggtttgcttacttttataaaacatgattaaaaatctgaggacatttttatagaacagagaagggtataatttttaaaattaggaaaatgtttgtcttttttttctcactgcacattagaacaagcctatgaagaagtgtgcaaaattctgtctgaacctttctaacctagaaactgagagtctgtatctaggtttggcagaatttaaataactgctgattagaatgtgaaattatcccttaaaaaagaatgcatcattttatctctgttgcatatgtgctatttagatgttttttgatacatgtttaatgaatttctagcagaccaaaaatctacaattggtctacagagcatacataacaagactctgttgttataactactgatctccttctgagatcaactttagaaacaaaacacccatggccaggtgtgtcaggaagctcctgcccacaagaagac

SEQ ID NO: 42216 - DNA, 366 bp, Mus musculus
  source 1..366: mol_type = other DNA
gccaagaagcacttgttgataggagcctggtatagctttcccatgagaggctctgctagagtctgacatatatatataagctgataaaatggagaaacccatggctccatttgaatatgtagagatgataacatttgtaatgtaaataaataaaataatcactttttaaaattcaaaaataaataaataaaaagagacaagcttatttcagtttggtattctcaagattttcctgaacatccttcccacaaaaagtacctgaaggcaattttccttgtggccatcagattgcactgcgaagattagctctgactcagttgtccctgaatttaagtttcccttaatggaagctttccaataccatga

SEQ ID NO: 42217 - DNA, 373 bp, Mus musculus
  source 1..373: mol_type = other DNA
aactagctaattttcctccttaagtacatgaactcactgagtttcctggtagtgtaagtagacagtaaggtttacagggccaagccatataaaacatggcatttggaattaattttattaaacaatgataaggaccttgtttcctaatcaaattttattgtctgaatctttttattgaggaattgatgatagtcatattttatcatggaaaaatgtatctctccttcaattttaatggatagttttgtttaaacatctttccaggtccttttgtctttaaaatttctttttttaaaatgttttaattataacatgttctctctagattagacattagctctggtgagtcactatctgatagtaaatacttttt

SEQ ID NO: 42218 - DNA, 348 bp, Mus musculus
  source 1..348: mol_type = other DNA
gtttagatgttgggagaagtcatctaactactccaaaaaaccaggtttaagacagaagtgtttaaataagttttgttgctaagacttaaagacatgaatgtccctacctgagaaggcaaatagtcctcttccccttgactgtaggagttacaggtgccacagtgccttaattccagcctaaattgaggttattctcaacaaaatcagttggtataggagtacatgaaaagtccccctctgaagattaactccttcattttgatttaggtaaataaagatctctaatgtggcacactcaagagcaaacgctcccagtgttgaatcagagcctcagaaacaactggcctg

SEQ ID NO: 42219 - DNA, 275 bp, Mus musculus
  source 1..275: mol_type = other DNA
tgggttatttttgcataatcttagaagataagatgtaacatgttccttctctgtaggatttttaaaaattcgatattttctttcaaaccaaaggcctcttatgcagctttcagagtcacatttcctatttctgaatcctagagtgagtagatatttcccacttagtattgctagatagctggtctgtacttcccacattatcatctatctgaaaagaaaaggtttattgaaaaagaaaagggttccttcctggtctttagctctataaagagagc

SEQ ID NO: 42220 - DNA, 292 bp, Mus musculus
  source 1..292: mol_type = other DNA
gaatcttaattataacagaaatagatacacttaagtttaggtccaacattcagtggcacattacatatgaaatgacttttctaaaaaaaaaaaaaaaatatgtggtgttatagaaaactttaaatattactatggcctagttaggactaacctcagttctcagctaatctcagcaaagattagtcttccagacttttaaactttcactaaaagaacatgtgtgttctggtaacattttttgtttgttgcattgccatgggttgcaggccagttgtttctgaggctctgattc

SEQ ID NO: 42221 - DNA, 387 bp, Mus musculus
  source 1..387: mol_type = other DNA
tgttcgaattagtacatctgtttatatgtatatatcggaaaagactggagtttggcagctgaaaccccttcctgtgctcctcggagggcccgggaggaaaggtcaccctcgcaggggcccggcgatgctaagctgctcctgattgcccagggctagccgctccgagccttgagataatttctgcaggctattgccggctcagcccgactcgggcggtgacaccctaaaaaggcctcccgggcccttccataaagtcagacctgagtgaaacgtttcggtgaaatttgtcaaaggtccctttatcgaggctttaaccgtttaataggtaacgggccatttctaccttaaaaagtctcaacagggtgaatgacagtcacattgtccatt

SEQ ID NO: 42222 - DNA, 254 bp, Mus musculus
  source 1..254: mol_type = other DNA
ctgaggttatagatgacaccgtgcttgtttaagaaagctagttggttctggagttgccttgaactcaagatcttctcacaattgagtacagctcctggggctccgaggtcaagagccagggaacctggcttcggtgcctctaacgtaaggcgtggcacacgccccgtgcctaccaaatctggtcagcttgtgtcttaggtcggtctactgaagtcgctcctctgcagagccgacaacgcgcgccggcccgcttt

SEQ ID NO: 42223 - DNA, 178 bp, Mus musculus
  source 1..178: mol_type = other DNA
ttctcaggagataagtgacaggaaccgagctctaaattctagggctgcagcctcgcctgtgccccacgccatggccacgcccaggccgcaggcaggctcagcacctcgttcgggccggccaacagcccgcgcggcacctgccaatggacaatgtgactgtcattcaccctgttgagac

SEQ ID NO: 42224 - DNA, 357 bp, Mus musculus
  source 1..357: mol_type = other DNA
tcactactaactcactagctaatctgggttttgtttcttaaattcaaaggagaaacctgaacttttcctacagtttcatgacaagaaaaaacagcaatctctacgaaattccaagtgctgagattgtactatcatgccataattcttggacttgaagccaggcttttttctgccaaggctggtacttactaggtagccaaggcgaaagcctccaaattatcaagtgttcttaaaggatatcaggtctagaatcctggacctggatacccagaatgagtctggactctgaggtccatggcgctagccccgcccctgcccagcgaccggcaggctgcccgcccgacttcccagctgccc

SEQ ID NO: 42225 - DNA, 334 bp, Mus musculus
  source 1..334: mol_type = other DNA
ctgggagtccccagacttttttttctaacaagaaaaacaccctcatgtttctaacactgttgtgataagagtttcttggtttggcctaaaatcagacaaaattagggcagacatgcctttttcttttttttaaaactacattattagattttatatgaatagcatctctaagcacagatttacatacagcacatcaacgtgtgaggtgcacagttttggatgacaaaaccaaaaagtgccagaggctctttgagtgtgtctgacggcaattcataaatattaataaaggtaggtgacgttcaggccctgggcgcgcccgttaggcgggttcccg

SEQ ID NO: 42226 - DNA, 300 bp, Mus musculus
  source 1..300: mol_type = other DNA
acatgagattggactaagcagtagcagtggcttccaagcacttgcctgacatttgccaagggatagcttctgacggatgcctgagcacctttgctggggccaaggtaatgagaattattcaaaggtacacagaaaatggaactcgtcaccagttgatgggcgcctgctgcctctctccagcagcaagcaggccagagcctgatgtctgagccgagcctccagctctagcagctcctcgcctgggaagcggccgggtccaggagagtccggggggcgggtccctgtgccgctgacgtcccg

SEQ ID NO: 42227 - DNA, 284 bp, Mus musculus
  source 1..284: mol_type = other DNA
gatagaatacacgaaggatgcaaactttgaccgctgcatacaaaatctcttccacacatgtggacttattttaactagtgattgcattcaattcaggagggattctagggatcctgaaatgccaagccgatttgattgtccccacaatcccaggctcctgatcggtcggagcgtttaatccttaccaaggtgtgattgacaagcattgctatccaattgaaacgcgttgcctggagccacagccaacgtcagctattgaggacgcccttaagtgctgaaagggc

SEQ ID NO: 42228 - DNA, 400 bp, Mus musculus
  source 1..400: mol_type = other DNA
gtggagttgtctgaatactggacactcctaagagttaggagtgggtggggtaagggctaaacccattcctattttatgtactattaaaaagtttacttttgaggcgaataggtggaaatttactctgaatctttcactgccacagcagactcagtgaactcagattcgtctgagcaagcagaactgagacacttccagggctcccaaagaggtggccactgcgttcacttacacagagcaccggatttgctttgtgtcagttcagttccccatcccctcgtgggtagtgaaatggatagctaggacttgcactcggcgcgacctagagggcaggccggtcggcggaggctctggccatgggcctgcctggggcgggccagtcggcggggcatttaaatcg

SEQ ID NO: 42229 - DNA, 300 bp, Mus musculus
  source 1..300: mol_type = other DNA
gctggagattcaaactccggttccaggaatggtattacaagtggagttgtctgaatactggacactcctaagagttaggagtgggtggggtaagggctaaacccattcctattttatgtactattaaaaagtttacttttgaggcgaataggtggaaatttactctgaatctttcactgccacagcagactcagtgaactcagattcgtctgagcaagcagaactgagacacttccagggctcccaaagaggtggccactgcgttcacttacacagagcaccggatttgctttgtgtcag

SEQ ID NO: 42230 - DNA, 308 bp, Mus musculus
  source 1..308: mol_type = other DNA
gcctggctaactatacaccttgagtaaaatgagtgtatgtcttttgtcccattgagttgtgatggtcacacacaagaacatgtcaaaggtaatcacgaaggatccactggcaacatgttctgttgtggtgacctacaaccataaaatttgggtgcgacttcataactgtatgaactgtaatgtaaaatatctcattgcaggatatctgatatgcgacccccagaggtagctaggttgagaactgctgtcagacctctcacttcgagatttgagagcggaagatccccgcgctcggattcccgcctccc

SEQ ID NO: 42231 - DNA, 254 bp, Mus musculus
  source 1..254: mol_type = other DNA
cactgtgaatacgggtgagcccggcacactcacttaaatgatttctcctaactaagaatttgctgggtgcaacggaggccattgttttagccattttacagaggtaaaactcaagggcgcatggctaggctatcacactgataggggatgacagtggactctggaaagacactcccagctcatttctcgagatatccaaatgaaacagaagctaaattggaaccaacacacagagctctgtgtattcagaggga

SEQ ID NO: 42232 - DNA, 295 bp, Mus musculus
  source 1..295: mol_type = other DNA
tcccactgatgatgcttcagagagtttcagtgaaacacaggtgatacccctgctattattaatatccccattttacaggtatgaaaactggcttgatgaaaatgcgtacactgtgtagccctggctgtcctggacctcactctgtagaccaggctggccttgaactcagaagcagggatttcatttaagaaaccctaactcccggggattacagctgaagtgtagaggtcagagagtttctcacctctggtcccctcccgccaggcaggaagcatccgtttcctcaaagctgctt

SEQ ID NO: 42233 - DNA, 256 bp, Mus musculus
  source 1..256: mol_type = other DNA
ctatctggaagggaaaagactgagaagtttattctcttccatacgtgggagagaaactgattttacaacgaccagggtggagcctgcacccgccacgccccagcatgcagaagtctgactgagagcaaacctgaggcaggagatgacccagcttttcttgatttttaaaactgtacctttcaggaaaagctctgtgacttcacaggattcctggaattttatttcatctggagcagagatcatcagagatgaattg

SEQ ID NO: 42234 - DNA, 304 bp, Mus musculus
  source 1..304: mol_type = other DNA
gggcttagtggagcaatgcactatgctaataggtcagttctgagcacccggcaggatttccggactccaggcgagaggtgatccagcggtggaattctcttcttcccctcgtttccaggacccagaatttgaaaggctgggacattgagagctcaacggaaataattcctgctataattttagagggctgagtctgacagaggctcagtccgcgagagagagagactctcccgccataagcccttaattacggcgtgatccgcccgcccagctcccaggggattctggcactgggggggggggg

SEQ ID NO: 42235 - DNA, 460 bp, Mus musculus
  source 1..460: mol_type = other DNA
aacaaggttatatcttatagctatatgatacttcaatgttcaagactttaaatattcaggagtgatgagtgctaattcttgaacttgactgggaaattttaaaccagtcccaaatcccagtggactgaggtaccggagcatgtccccattatagatactgtataaaagcaagaaagacctttatcattggctacagttactcagaggctgagtttcttgaaaagctattcccgtacctaaaggcgggcttagaggcctcacccctgccacccttctctgctcggagcttgggtgcgccgggtcccagcttctcctcccgggagaggagcggccggcaccagctggctggagcgggctgcttgggccagccagacacatcctccgggccctctgaccgcggcgagccactcagccccgagccaggccccagggcagccccggagaccccggtggccggatg

SEQ ID NO: 42236 - DNA, 438 bp, Mus musculus
  source 1..438: mol_type = other DNA
ccggtgcgttccccctgctgaagcagcccgggccatcagggggcgcagaggtgccgccacccccatccccgcccccaatgacatgggtggggtgtggggttgaaattaaattcacagcggaaagatctagtcctgggaattaaaggatcagaactgctgtacagaagggaaagacattatttatatcccgtcccctcggtttctggaactctggagaaccagcccctctctagccttcaggaggcctgtggcgtcagggctttccccagaagcctcgggcgggggctcgggatgccgcacgccaggcttggagcggccgttctgaccccagatacagggcggtcggggtcttaaatttaggccgcggctgtttgagcctggggagagctctcttcccccgctgcgagtcactagcgcgccgcgcccggcaggacggtg

SEQ ID NO: 42237 - DNA, 371 bp, Mus musculus
  source 1..371: mol_type = other DNA
tggacaagaagtaattgaatcactttttttttttgctacgaagtagatcctacctactcagattcattcctgaggctaaggagcccctaacctattctgaacagcaaggagctgatgagctgatgatgaactctgctgctgcccgggatttccaggacagaggagaggaacctcacccatgtctaaggcataattgcctctgggaatggtccctggagagactcacaccgcagagagaatctctatagggtctataagagctcctggatgcatgcttgttgcctgtgacctcccaggtctctcttctgctaaagatactttcttcaaaacaagcccagcaactttcctagggctgaaaagcttcggaagag

SEQ ID NO: 42238 - DNA, 207 bp, Mus musculus
  source 1..207: mol_type = other DNA
gaatggaatcaattaatacgtagaatcaacacaatacagtgttcttgctaaaaattttaaaaagaaaacacttagtgcagacattgccagcagtgagaatgcaggtaccacaccaccccgcctgggagtatgtatggatgacgtacatctgcctggcagtctgcgacttagtcgagagaaggagtggtcctcgctccagttctcccc

SEQ ID NO: 42239 - DNA, 394 bp, Mus musculus
  source 1..394: mol_type = other DNA
gtgaatagattcctatcttttgatatctccatgcagagggcaatgctgcacaatggccagtgtgaaatagctccctctccaattcagagctgaaccgtatttcttagccctaataaccacttagaaactagtaaaatttaatgccctccccaagggcactactgagggtcagacaaaagtaccttgagccagaactaggtgcgaaaagtccagttctgactcaaaccagaccttgctgtgacacctcaaaccatgtttgtgaagatcctgattaacccgccgaattcagcccggggcctgggagggtctacctatcgggccccaccctcaagccttcgcgaaaccatcagcggcgcggcgcggcgcggcgcagggcgctcccctcccggcctcc

SEQ ID NO: 42240 - DNA, 392 bp, Mus musculus
  source 1..392: mol_type = other DNA
ttcatttattgacagtctatggatgaggtccactctttcagtgatacaaagaaaagaagtaaccttttactttaagtgaatagattcctatcttttgatatctccatgcagagggcaatgctgcacaatggccagtgtgaaatagctccctctccaattcagagctgaaccgtatttcttagccctaataaccacttagaaactagtaaaatttaatgccctccccaagggcactactgagggtcagacaaaagtaccttgagccagaactaggtgcgaaaagtccagttctgactcaaaccagaccttgctgtgacacctcaaaccatgtttgtgaagatcctgattaacccgccgaattcagcccggggcctgggagggtctacctatcg

SEQ ID NO: 42241 - DNA, 258 bp, Mus musculus
  source 1..258: mol_type = other DNA
caaaaatctagtcgttctagaaattattataatttgttgaatagtttcacttgttttccctctgcctcccccaagaagcacaaaggcggcgttttggccacaaacagcagattagataattggagagggagtgggggaaactgcctcacctcttctggaggccgggaggggagcgccctgcgccgcgccgcgccgcgccgctgatggtttcgcgaaggcttgagggtggggcccgataggtagaccctcccaggcccc

SEQ ID NO: 42242 - DNA, 438 bp, Mus musculus
  source 1..438: mol_type = other DNA
aggagcaccttaggtatttgtgaatggttgcattcagtttgtcaaaactgcaatggtttttacagttttcagagattaaatacttggatcacttactgaagagcgcgttaattatgtaacatacttcttggcttccatgtacaaccgtaaacgtctagatttggagaatttaacaataattatcttttatatgagtacacttcaattggtttgttgaaacgctcctggtttcattttaaaaccatgctacttaacattttattaaaacagtttgctaactagataccaagctttggggcaatcaaggtcttgtttgcgatcagcacatatgggaaactgagttcccgtggacgtgcattccctgagggcacctgcctctggctatcagccgggtaggaccggttctttccaccggaagttacacgtggcggtcgcaac

SEQ ID NO: 42243 - DNA, 480 bp, Mus musculus
  source 1..480: mol_type = other DNA
cattataacttaaaacagtccaagtagttataaatctaatcatcattttatagacacaagttcattttaggtgaaactgtttaggaagaaaaaatatttgttagcagacatgtgttctgtctccaggtataacatatagaccaatgccaatgatctaatataatgcttaataattttcctattagttggatttgaggtatatgataagttatttcttagacaaagaaatgatactgttcttgggcaggcaaattctctgactccaaagaaggtcaagtgtttgttccaggttctgaaacctaataacatacagcattttatatcattttttgataatacgttttcagcattcaaccctgaaaaacaaatcttctacctttgactaatagtttttctgagtctcagagtagactatgcagaggcaattgctctaaattttaaacaaaactgaagcagaaattcactatttcattaggaatt

SEQ ID NO: 42244 - DNA, 225 bp, Mus musculus
  source 1..225: mol_type = other DNA
gatcatcatgcctgagttcttaccaaatatagggcatgcctgtctttcaagttgaaatataagcactgttggatctccaaggaaacatttcacctctatagagtaaccatccttgatgaatgctgggggctccgttcccactggggggctgagctccaccactgctgaaaatactgtattaaccctcctccagtgaggactcaccgaggttagtgtctggcacag

SEQ ID NO: 42245 - DNA, 285 bp, Mus musculus
  source 1..285: mol_type = other DNA
ggatacctcaacttcaactcaaacttcaaacttcgaagtggtaattaaatttgttacagaagctgttacaattttaaatgttcattgctattccaggaaaattaatccgcagctgttttcatttggggaaggtaagagccagcgctgcccatccccctttaggggcttgcttaaacgatgcaagaatcctttaatactgattggagctcttaagttcttaaaataaataaatatcaggaagtcttcccagcagccaacagcaggggagtggccagctgtttcttc

SEQ ID NO: 42246 - DNA, 389 bp, Mus musculus
  source 1..389: mol_type = other DNA
gagagagagagagagagagattctgtctgtgtatatgtctgtacctcctgtatgtacatggaggtataaaaaggtacctatgaagaagcaagaaacattaattgtattaattcagcttccagagtttagagcagtgatgtatatcctttactactataggtttacaagaatatggtaggaaacataattcttcattaattagatttgctcttgaacaatttcactcatgtgtatgatacatacactgattattttgttcattctagaaccacaatggagcatctgaaggacaccatctgcaattgcccttggaaattatcttctgggtttaactagaacatttctcaataaatattagtatatttgaagaatttcccttactggtgaaa

SEQ ID NO: 42247 - DNA, 382 bp, Mus musculus
  source 1..382: mol_type = other DNA
gttagactgcctggccagcaaggggatcaaattaatatggctactggataaatttaaatcgcacatagacttaatattataaaaggcctttgtatccaggtccctaccacctgtgtagaaattcatgattctctacataatgcttaactgtgagtcagagtgatacagaaaataggattttttttttttttttactcaatcaatggtgagagttgaggtaagaatcaatattgcgtgcatgaaatactgaggaaggaagacagattcttctcgaaagctttcaggggggatacagccttgctgaattgctaattctgactcagggaaattgattcggactactcaaatctagtactataaacgaaggttccgcgcggggcat

SEQ ID NO: 42248 - DNA, 392 bp, Mus musculus
  source 1..392: mol_type = other DNA
acccagaggatcctcactctctcagagaagaaaggggtttgggatgttaattaaattaattaattataaaacatgtcctccaccaaagaaattagtacatttctttctgatctagagaaagtttctaggttctaagacaaaatattacctctatcccagttgctaaaagatcttgtttctcaactaaactgtgttcacagagttctggagtcttaaactttccagtaaacggtcttttaaagaacccaaaggtccttggtcctgtgaaggcacgatgcagtacaggactaggacctcctctctctctctttctctctcgggagatggaggggtgtatcagacctcatagaaccttagtggttccaatgccctaggtaccgagaattccatag

SEQ ID NO: 42249 - DNA, 383 bp, Mus musculus
  source 1..383: mol_type = other DNA
tatcttcagccaggctagaggtagactgggcttcaacaaagctttgatcaagggtgttgtaacaccctctgcacggaaacggttttcaagaaatggctgaaaggagaagacttgcacatgtcaccatgtgacattcttagttctaagaccaacagtttgtgttttttcaagacggcagatgttctggcggcccggcaacagctgtgcatgaaggagccagcattcaaatctaaacctttctttttttattcttccatgcttgaaggaaaagaaaacttagagggcagcagtccagggaatgcttcccggcatgggtctcactggagaagccccaggctttacagcctagacaggctccagcaccccttggaggtggggcgagt

SEQ ID NO: 42250 - DNA, 462 bp, Mus musculus
  source 1..462: mol_type = other DNA
tttccagagtggttgtacaagcttgcaatcccaccacaactcattgagaataccccattttttaatgggattagtagttaatttctaatttttgaacagaagtagttatcatccctcttgtagaataatcattaaatctaagcagaaagcaattggctgcatatgtaattgttgtaaccgctatatgttcatagtagtagtacatagaatttagagtaccttctgacactatgaaagccagaaccagcaggtgagaaccttccagctcagtcctgcagtgtcagtagtagtcttactatttgtttctaatgtaaaaccaatggccagtagctcatagctaatcaccaaaaacttcagagatcattgctttaggttatatatactctgtctcaagaaggcatagtaagtacttgagactatctcattctttgttttaacatctgttcagttaaaacttttcat

SEQ ID NO: 42251 - DNA, 295 bp, Mus musculus
  source 1..295: mol_type = other DNA
ccctttttggctagagaacaggagaaaagggcctgggcaggagccagacttttgtaccagtaggcatgcctaatccgttaagtcaattcgagtttataactgaggatgctcagcagctgctaggactcggagcgtctaaggggacaggtgtgccacaccctacccttattatagatgacatcattgcttcaaatgtgtgtgtccataactcagagagaaacccaacaagaagccaccgcggtcggagggtgtttgcgcctcttctcaacgcgccagccctgggaggggcacgtgg

SEQ ID NO: 42252 - DNA, 286 bp, Mus musculus
  source 1..286: mol_type = other DNA
ggatgctcagcagctgctaggactcggagcgtctaaggggacaggtgtgccacaccctacccttattatagatgacatcattgcttcaaatgtgtgtgtccataactcagagagaaacccaacaagaagccaccgcggtcggagggtgtttgcgcctcttctcaacgcgccagccctgggaggggcacgtggtggagaggggcggcttgatcacccaatcgcccagcatcggggcttcgcaggatccagagacgcgccccgcggaagggggtccccccctctaccc

SEQ ID NO: 42253 - DNA, 462 bp, Mus musculus
  source 1..462: mol_type = other DNA
tggccgcccacacatagtcctatggcaatctctggtcctgaccacagagaaagcaacgatgctgagctggttgtgggctcccaccctccttctcatatcctggtggggggggggtgaagagaatatgctcattttcctctaacccttaacctatggtaaagattaaatccaattagtttctgttacatggcattagttaattacacatctgtctcatcccagtagacattccttagagatgctgtgtcaagacatggtctgtcatggaacatgttttcatgaaacacatacatgcttgagtgtatgtggagtccagagggaaacctctctggtgtcatcttcgtgggcctagaatccagccactaggctagcttagctagccatctagctccatcctcatatttgtgaggcaggcacattaccaaggtgagcccctagccctgagccattattttgctgagg

SEQ ID NO: 42254 - DNA, 254 bp, Mus musculus
  source 1..254: mol_type = other DNA
cttacttttgagagggtctcaagccctgcgtcttgccagaggcctggggatcgaagaatccttggatcaggagcccaagacaagcttgactatcctcgttcctttgccagttcaaagggccatcttgaagcctgaatgattaaccaggaatcttctacacatagacacggggctgttcggtcacatgagtacccagtaccagactgtgaggagcaactgcgttgcacaccctgctccggggtggacggggactt

SEQ ID NO: 42255 - DNA, 219 bp, Mus musculus
  source 1..219: mol_type = other DNA
gctgtgagcttgatttggggttaatgacaggattcctgacttcaggtgactgaaagcctgctttacatgccctggtcatgtgggcggaagagaactgtgagttctctgtgctcagaactaactgcttgggagctcagagcctgctggctaccccattttcaggtatgctcagctgaggaatcctgaggttgttacctgttctgggacaaaacatgtgct

SEQ ID NO: 42256 - DNA, 290 bp, Mus musculus
  source 1..290: mol_type = other DNA
acacataagtctgtaagggacatttctcacttaagacagacattctcccgggtccatcatgggagtctgacggaaagtctgccgaggtgctgtcctgaacaacagattatcccaattcccagggctcaggcaggggagagcagctgtcatcctctgaaggatgcaagcttcacgcctgcagccccagtagctctgccctccaaataattgagagctggcaagctgagagttgcattatgtaaaccggcaggctgcctctctctctctctctctgtgtgtgtgtgtgtgtg

SEQ ID NO: 42257 - DNA, 378 bp, Mus musculus
  source 1..378: mol_type = other DNA
attttggaagcagcctctaggagagagatttggctgaaaagtcacccagttttccttcaacgggagggctaaatccattgattcccctcccccaggggaaaaaaaagccaatgagcagcagtccctccccaagggattccagccggctccccaacgcagtcggctgaacgcaaaccactgagagtttgctgcgcagttccctggggtccggggccgccgagtcccgccaggagggcagccgggtggcaaagcttggcaggcgactgtcactgcgtcccgggtcgcctcttccctcgtcggactgagcgaggaagcgcgctgaccgcaggaggcggcgtccccttcagtcccctcctcgcggcgctccaggaaaaggaa

SEQ ID NO: 42258 - DNA, 409 bp, Mus musculus
  source 1..409: mol_type = other DNA
agattttctgaaacccaatccttcccggacgtcttggaagaaggaacccatcaaccatataggttcaagctcccagagggcagattttgcacgaagcccatctttttcaggggtgggaatgtgggtgcctccgacaatggtaaaactcaggttggacttttccagctaggtgtatgttcctggcagtcaatgactgagagctttcaacttaactccttggcttcaatactttgattttaatactagtccagggttgtcctgaagatcccacaggtaacctgtggagagaggctgccatctgatttgaacccagcagttggttttaaaggaaccgcctgcctaggtgcagtccgggacgacactgagccaacgcgctgcgctctgggagggggctgtggatatatataga

SEQ ID NO: 42259 - DNA, 189 bp, Mus musculus
  source 1..189: mol_type = other DNA
aagggaatcttccaagcattgtgggttcaaataagcctggacctctggaaggagtcgggactccatgaattcctgctaccaagtcttgaactcgagtcgttctctggccacctccggatatcttagtggttttctgaagacaccaactctgggtgtttcaggtgcatgcatcctgggattggaccccag

SEQ ID NO: 42260 - DNA, 257 bp, Mus musculus
  source 1..257: mol_type = other DNA
tctagcgctaacttctttatccctgtccttgaactctggattcccacttctctaggagagtggcaacttgactatgaataactgcgctcgcactaggtatatctattcgagaccagcctagtctagtctaccaccaccccagtcatcctcgggagggggaggagagcaccggttcttggcccaagtgctgcggattctctcgcccccctcgatcaccccgggccgcggccctccctcccgggtgggaggtaaagcag

SEQ ID NO: 42261 - DNA, 207 bp, Mus musculus
  source 1..207: mol_type = other DNA
taatgcagttttccattggaaagagtttccaaagtaatttggatattctctaacaacacgtttaaagaattggaatttccttttcagacactgttctgcagccttcatggtaagcttaccatcctccataaaaatcttacaatgagatttatttctacctctttaaaaggaagacaaaactgagcctcaaccttttcctggctccag

SEQ ID NO: 42262 - DNA, 408 bp, Mus musculus
  source 1..408: mol_type = other DNA
aaaaaacatttatctttcgtaagagaggggacagaggtcacgctgtcccctgtgggacagcgagatcgagcctccgcactggggggggggcgcggcggcttagcctccttagtctcaggctggggtggaccaagcccgaggccgggaaaccgccgggctcctctcaggcagcccggggtcccaagaggtagggatccggccgaacgcaggccccctcccgcctgcgctgccgggtcgcgcacgcgcactcgccggcgacccagcagctctgagtgacagaggactcccgcgcgcgggctcccggcgccccgccttctccgctccccccgggccgttcccagagcgggggcgagcgtgaagacgccgcggtcgtgcgtcatcgcgagtcggcaagggctggtcgtcccc

SEQ ID NO: 42263 - DNA, 461 bp, Mus musculus
  source 1..461: mol_type = other DNA
aggagtcccggggagtctcttaggcggcggctgcagctcaggccgtcaccaccagggacagagactgcagcagatccggaggatgggctgagtcagggcggcgccgccatggccttgtggctccgcgtggcgggggaggggagccactgcccggcgcccacagggcagggccccccgaggtgggaaagggggatcctggctcccgcggtgcgcggtccgggtggggggggttcggggggcgctcggaggtggccacgtgctccacggctgtgccaggcttggcacagaccacctatactgcagcactgctgccacgagcctgccgcgtggcttcaggtgataggtctgggtcaccaagtccagacccactgcgggataaaaaaagcgagtgcccctgcagttggcattgcacagtttttgcatcagcctgagattgcaactgtttaaatatgacaatataa

SEQ ID NO: 42264 - DNA, 393 bp, Mus musculus
  source 1..393: mol_type = other DNA
cacacattctgatcgggaatttgccaaccaaacaattgtgcaattcattgttttttagaccgctgtggtcacacgacaggcaacaaaagatgctaagaaggtaggcatttcaaatcaagtacaactttgttagggttaacttgcccacttttgatgtgtcaatcctcactattgaattttgacaaccgaatggtcaatcatttcattctgtccgccgtctccgcacggcctgcgagcgggccaagcgcaccctctgagattgattctctctatgagggaattgacttctatacctccattagctggacaagtcacagatccatgatattgtcttggtgggtggttctaccagaatccccaagattcagaaacttctgcaagacttcttcaatg

SEQ ID NO: 42265 - DNA, 406 bp, Mus musculus
  source 1..406: mol_type = other DNA
cacttttgatgtgtcaatcctcactattgaattttgacaaccgaatggtcaatcatttcattctgtccgccgtctccgcacggcctgcgagcgggccaagcgcaccctctgagattgattctctctatgagggaattgacttctatacctccattagctggacaagtcacagatccatgatattgtcttggtgggtggttctaccagaatccccaagattcagaaacttctgcaagacttcttcaatggaaaactatggtgcaggtaaatacatacagcctttatagtctttataatctcaacaagtcctgtagtgatgatggattccaaaaccattcgtaatgtctgagcgaatgaaacatacatatgttgagcaggagaaggcggagtcatgaccagcctggtg

SEQ ID NO: 42266 - DNA, 273 bp, Mus musculus
  source 1..273: mol_type = other DNA
ggcggagtcatgaccagcctggtgtgatggattccaaaaccattctaaaatccgtggggtccctcagattggacatcgatgccaatggcatccggtaatggacctgctgctttctttctgaatagaaagaacaaggtttgctcttaccattaaagagacatgctcatgattttgtaactttcatcatcaggccgcttgagtaaggaactcactggagtcctatgccttcacttatcagctggctggataagaaccaggtatgtgttttgccaa

SEQ ID NO: 42267 - DNA, 198 bp, Mus musculus
  source 1..198: mol_type = other DNA
gctgtagatgatcaccttaattttagcaaattgactccaggtttaaaagacaacaaggctcaaatgcttgagttaagtgctttaatccaacaacggtgaaaaaaaatcattttccgtcttttaaaaagtaggaacccattgggctcagcactccctgcttggccagccggggatagcccaggtccgtatagctgccgg

SEQ ID NO: 42268 - DNA, 418 bp, Mus musculus
  source 1..418: mol_type = other DNA
aattaagttcctttccaataaagggcaaatgcttattgggggttggctagacctgagcatcccgagccgagccggggtctcccgcgccgccgctgagctgaggagcgctgggcccgcggccccgagcgagcgagcggtgttggccaccgtctccaggcagcggcgggcggggcgggagccgccgggggagccggggctgcggaggttgcggggccaggggcgcggctgcccagcggtgccggcaggtgacgggcggttcccggcgggtgggaaggggccgcgcgggcgggtgtggtctgggaggaaggaccgcgcccagacagggctgcgaccccccaggctgagcagccctgaaaagggcaactttggatccactgttcagccttccttgtttactaagaagtggattggtcaggaa

SEQ ID NO: 42269 - DNA, 566 bp, Mus musculus
  source 1..566: mol_type = other DNA
cttaaatgcttaagtatttagactttttaaagattttatatatataggattaaagagggtctcagatcccattataaatggttgtgaagcagtcagtgctcttaaccaatacttaagtatttaaataatatgtaaacaaaaaagtatttaaataaatacaaaaataaccattttaaaccacagaaaattctttgattaaatgagcagtgagaagtactcatacattttggaaatatccactaacatttctttgttcatttagtgactcacttagtaagtactaaaacggagttattactgcacatacgtacgcgagtgcacacacacgtgcgcacaaatgtgtttcacaataagagaaattaagtatttgggtaaattaagcatttttaatcactaaagattcgtacgaccagaaaaatgggccaatgatatggaagcgcatttcctatggaaataggaaaatatccatatgcagatggacagacggtactgccaagagcatgctgtgctccagccaggtcacctggcagatgggcaagtgctggactccaggttttagcacaacc

SEQ ID NO: 42270 - DNA, 485 bp, Mus musculus
  source 1..485: mol_type = other DNA
ctatgatgcctcctcctggtctctgtgggcaccaagaacacacaaagaacactcatgtatacaaaaattattttttacgaaaaaagaatgtttctcaagaagagagtctatttgaaatagtctatctcagtgaatgagagaaatgaacctaaattgtctatttgcatattttaaactctcatcgtaacgaacacatttttcttaaaaacaaactttgtgtcatgtctgatcatcttacattcgaagtgaatgaatgaatcaatacatctaataaccactagatattgttgtcctaagttggacaaaaattacctagctattgtttgcttagtaaagtagaaaagctaaaacaatcagacagagacatttactctcttgtggctgagcagtgtttgtcaccaacacctcgttctaggacacctgtggttccccaagatgttccaccacaggaagctgtcagagactccctccgttcagcacagcca

SEQ ID NO: 42271 - DNA, 445 bp, Mus musculus
  source 1..445: mol_type = other DNA
atgcagcagggatcccgactcccgactcagaacccttttatagacagggtgcgcactcactcatgaaagtcagctctttccattcggaagtgtccagtcagtcactgagggctgtgaggtactcggcctacagtgatgtaacaactttgtaactttagcgagatcaatttgaggacatcgagctacggctctgcttctgtctagaagcaattcctactatggctggctgtaatccagccagcccagcttgggccggcgcgggcgctttaagagaggggcggggcccggcgcaggcaaggcagggcctgcccacaaggagcggcgcaacgctgggactccgggaccccgcgggctgaggtcggacccgcagcagccaccggcccgcgccgagctccagtggcctctccaggcagtctccgcccggagatctgggagcaccgccccc

SEQ ID NO: 42272 - DNA, 444 bp, Mus musculus
  source 1..444: mol_type = other DNA
aaaagatttttttcccataaattcaaattaacttgagaatttttacatacatcaggtatgtctgcatacatatttcataagtacgttaatatgaaaaatttaagcaaagtaatgcccaggtatttgtgtaattattgtattttaatgagatgagagtttattatttaaaaatttcaggctagatacccagattttcacaaaattatttttttttttctagaataatatggtttgaaaagtttagtatgtgttattaataacacatgtccagcctactaatgctttcagcctgcaaagacaggcttgaaaatgttgggctctctcagctgctttcaggctgcagagaaggcggcagctgtcgcaggctgccttgcccatgacagcgtgtcatccaccgagatgcaggcatatgctcgcgcaatgctggagcgagctttgaatggg

SEQ ID NO: 42273 - DNA, 462 bp, Mus musculus
  source 1..462: mol_type = other DNA
gtatatgcttttcctgacatctagggaagggattgtaggggccatttacaaaggtccgttgtcttgaacaattgattgtgtcttaacaaatgaaatctttttataataaggaaagatattttcttttacaacttgatttttaaaaatacccccatttcagtgtaatgaaatctctgctaagatgagttgggaaagctctcttccaagttagcaattctgcttgttttttctgacatgcaaacaaacaaacaaaagaagttaaaagaattaccttaggcacttattggccatattgacattggtttgggctaaatagatgaggattctgatcaaataaagctcaccgtttctcatgaaatgacccaatcgcaaaatctgttgttggattaaatgagccaatgacaaactcttttttgttggactaatggctttaacgaacttgtgctgattctgcacacaagc

SEQ ID NO: 42274 - DNA, 406 bp, Mus musculus
  source 1..406: mol_type = other DNA
tttgacataatgatgaattgcctgcaggagcaggctgctgcctcctggagggtgaagctcgggttgaactcagcccctcatccccagaggtggagcacagtctgggtgtcctgggcgggaggtcaggaaaatcagtcccgcagaagagaattatcgatttcttactttctacctgcctgctgggcaggttagcctgggacaccataggccaggagagtccaggaaactggaccattatgcttattctcagacttcagagaccgtgcctgtctctccagaacggccggaacgctggatatccaaaggatttccctggttaatttcagaggacctacagaaggacacagtgtactctgtggtgctcagcatctcccactagggggagcccccggagggcagctggggc

SEQ ID NO: 42275 - DNA, 298 bp, Mus musculus
  source 1..298: mol_type = other DNA
tgccaggatattcatgacaagtcgaaatgagcgttcagcttctcagtgagaaggagacactcagtgagggatgtcacctagcttgactgagtctttctccagccccaccatctcaatggttcattctctaacaaagagaagaacaggggcccattggtttcattgtactgacccttaagaattttcaaaacaaaacatttttttatagctttcagacaactttgttttatggataccaaaggctggtgtattgatcgaaacaactgttcagcatgaagtgaatgggtagctctccagc

SEQ ID NO: 42276 - DNA, 332 bp, Mus musculus
  source 1..332: mol_type = other DNA
tgtatatgaaagcatatttaaaatagttagctattttccttttctttttatttattattattaatagaaaaatttttaaagaggcatcttcccaaagcgccgcttccaggcagaggaggttcgagaaagcgactctatcaggtacagcgcctcggattcttctgaaatattggccaaaggcttcaaaggaggcgagggtgggggagcatctccccagctcgcacccaccccgccttggcctcagccaagcagctgatgcagaggagggccagctttgcaagactgacaaagaagaagaaaaagaaaaagaattttttttttccgagcagtcc

SEQ ID NO: 42277 - DNA, 301 bp, Mus musculus
  source 1..301: mol_type = other DNA
aagaagaagaaaaagaaaaagaattttttttttccgagcagtccatgaggtgccctgggggaaggcagatttgaagagatgtttaattccaattgtagatcgcttcttttctttccaaatagaactggacatttctgagcttattcatattattttccaatttggtaaatgattttacccaaagctacaaagtttcctttgatacaacagacatttatatgttcaggtatatatgtgtgtgttgcatatacagggctgtatgatttttgctttgttttgtctcaagaaagaatgaaggaat

SEQ ID NO: 42278 - DNA, 561 bp, Mus musculus
  source 1..561: mol_type = other DNA
ctcccaccagctgggggacttggagctgattttaaggtgcattacatgagcagtctttacagcctttacaactaatggtgtttggttgaaacacacatcttagctctgagaggggccctgggccatgcctggagcaagtatagcctaggtgatcctggtagttgaaaccacgtaagtttcacaaaccagcaggttccagtttggggcgaccagggtaccccaggagcccatggagtctcttcactgcggtagggagggcgaggtgtgcgcgaaggggaccacggtgccctcaggcgggcgctccctgccttgacttccccatcccagggggcggggccgcagtcgcagcgagcggagaaagtgcgcgaagggggacgcgctgcgagctcacacgtgacggcacggcgccgagcgagcgggacccggcggcggcggtggccgtggctgcggtggcgggcgcagcggagcggcccgggcggcttggagccccgggagcggcgcgcgcggccccggccctggccccgcgctgtcccggcgcgcgctgcacattctctcctggcg

SEQ ID NO: 42279 - DNA, 299 bp, Mus musculus
  source 1..299: mol_type = other DNA
agagctctggaagatcagatctggccagattagccaatttgatgctattaataattgctttttaaattttttgagtcacaaaaaggaagcgtcattaatccccgtagcagcatcatgaagcgcctggatagtcccggcagagtgctggacgaggcgtggggagcgcgggacgcctacgcggcgaccacgtgaccgccgcgaccgcgccggtccaggtcgcgcgatccgccgtcacatcagcttattgcgccggctgctgattggccggctgcctgcacatgggcggggctctgctgagc

SEQ ID NO: 42280 - DNA, 433 bp, Mus musculus
  source 1..433: mol_type = other DNA
tgtgtgtgtgtgtgtgtgagagagagagagagagaagagagatcaccttcccttgttaatacttaactgctcccaccagctgggggaacttggagctgattttaaggtgcattacatgagcagtctttacagcctttacaactaatggtgtttggttgaaacacacatcttagctctgagaggggccctgggccatgcctggagcaagtatagcctaggtgatcctggtagttgaaaccacgtaagtttcacaaaccagcaggttccagtttggggcgaccagggtaccccaggagcccatggagtctcttcactgcggtagggagggcgaggtgtgcgcgaaggggaccacggtgccctcaggcgggcgctccctgccttgacttccccatcccagggggcggggccgcagtcgcagcgagcggagaaagtg

SEQ ID NO: 42281 - DNA, 527 bp, Mus musculus
  source 1..527: mol_type = other DNA
cccaggtcctgcaagaacaggaagtgctcttagtatttccttctaagtgggaaatgcccagatgtcagggcctaaattttgtcacttcattgattcccactaagtgacaacacttgtggaagtacctgcctaatacgtcatcaacaggcaggtgtgcctccttaggacgaatgattcctgtgagagaccccggtgtcagtctcttctgaaggaagcaccactgtgtgcagcagcgtcaccaagagagccttgtgctgaaggtgcagcctgggcaggtgccctttcctcctaagtcaggatgggcgggaagatgagagggcggctttctgcagacgtgcctattgtatttaagtggatccaaatcaaagatagtttccacttatggagccccaccctaggctaggacaggtggtgctccactggggaatcctggtgacctggctgcatgaagtccctacaagccctgtgtacggtccatagtccagagtggagcttgcagggaggagctgcagggcctggtggccggg

SEQ ID NO: 42282 - DNA, 421 bp, Mus musculus
  source 1..421: mol_type = other DNA
gaggaagtcacttgaccccctgatgtgggctcctggtgaaggctaggtctttcacctttcctaggccgaggttcataaagtgacaactatctggccttgctaaagcaaagcttcacccagctccgcgccaccaccgaggaggccgaccagggcgggctgccccttggcgcccggcccgccgtctcccgatcgtccggatcagggaagcgctacctaggtccgggtccccagctaaagaccccgccggcgagcggagactccggcggccgcggcccggaagggacgccccctccccggccggccgcgtgcgggaccgccgcagttccctcactgcccgccgggcggcgcctcagcgcctttccgcgcgcctcccgcgctgcccgctcccggctcgctcgcagccggacacagactctgcctt

SEQ ID NO: 42283 - DNA, 231 bp, Mus musculus
  source 1..231: mol_type = other DNA
tgcagcaggagcaattttcaattctacaaaatatgtcctttaggaggaagcacacacaataggtgaaaattgtaaattgttagtgttttgtcccctacgcctagatgtatatgaagtatagagatcgtaactgcaagcagatggggtgtgaatgcccccggttgccatggcaaccgcagctcgctctgagcccaatcacgcagcggacgtgacacgtgcggcggggtcacg

SEQ ID NO: 42284 - DNA, 353 bp, Mus musculus
  source 1..353: mol_type = other DNA
ccagtatttggggaaaatattttaaagttaaataaagataatagatgatatttatatggacttccacatgcttattcgtacttattaatgtaacctttttgaattttgataataatctatgagattaacttgcccagctgcatactaagtagaattaacttttaaaaagtgtatgtgcacacatgggacttctagtcccgtgtaagagcagccaaggctcttttttaaactttatgtttacgcctagttaagcctgttccatctcacagactgcagaggatagagtaccaggggttgaatccagggccttatgccttagtctaacgtatcatccttctcttcctaaggaggac

SEQ ID NO: 42285 - DNA, 234 bp, Mus musculus
  source 1..234: mol_type = other DNA
gaggggaggttccctgtgcacaagttcagtgctccttgaccaggaactcggccatgtgtgtgtgtgtgtatgagagagagagagagagaccccaagatgttttaggaagaaggccaaattgccatgtttattttattctattttattcttttttaaaaaaagctttatttattattatacctctaagtacaaagcgagtagtcagtgctctgagtgttgatcattgagccaaac

SEQ ID NO: 42286 - DNA, 173 bp, Mus musculus
  source 1..173: mol_type = other DNA
actagatgtggtatcctgtgtctgtagtaccactgatagggccacagcttccctcagaataaaattacaaggcgatttggcttgtgtgcccaggggcctgcccacctgtgtggacagaggctctgccttcctgccagacataaaaaacacttctttaaaatcccgggctggct

SEQ ID NO: 42287 - DNA, 281 bp, Mus musculus
  source 1..281: mol_type = other DNA
agaaacaatggtcctggccatgcccagggggcctttagcagacagttaggctcaaacaattttcaaagtatgcttgtgactaaagtgttaattttgagaaattcgctgtgtcagagaagtgtagggggcgggggagtcacccgtcccgcccttaatgggaggaagggatttgcccggcgcaaactctggacaaggcccggccggtgacggggcgcggccggctgagccccgtggtcgcccctctctgggccactgcggtccctttaagggccaagaggtgc

SEQ ID NO: 42288 - DNA, 805 bp, Mus musculus
  source 1..805: mol_type = other DNA
ttctcccccttgccggccgctaggggtcactgcctccctttgtcagcgaccgaggagggcagcccgccctccggccctttccacgaccgaacggcgacccaaggggcatcttgctagcttggggccctgagccgaaccccacggccacgctcgcagccacagctgcttaggactgggaggtgcggccgcgcgggcggaggccgggccagggctgggccgggcgcgtgggagccaggagggggttaatgctaacccctccccccgggctgacatcacgggagagcggcgcggctcgcctcggcaccggggcagctccacattgttgcggatcgcccgcaccgagcgcagcggccgcggtggggacccgtggcgcacccggctcgctcccctcggtcctccgagaccgtgcagccccgagccccgcgggcagctggccgccctagccgcacaccaccgcctgggccccgagccctccgcaccgcccggccaccctcggagaacagccggccatggacgcctgcaagttgagcgggagggtgtgagcgcgcccagggccgggagcctgcgccgcgctagcccggtagccgggcgcgccgggggtgggtccctctccccagccgggctttgcgtggaagaagaggtgcgggcatctgccgaggctctgagccggcggcagccggggaccggattgcggccgcgcggatcccacccagcccaccccgccccgaccgacggctgcggctgacctggatcctccgagcgcccgccaccactggtttctggagcgcgaggagcgccctcctgg

SEQ ID NO: 42289 - DNA, 348 bp, Mus musculus
  source 1..348: mol_type = other DNA
tgcttctccgagtatttttaaacgctaaaaatactggctaaaaatagcctgcaaggtgggtcataaaaagttaaaatttaagattctaatgggctaggccaggtctagaggagttgagaatcttttctaccaaggctcctccgtcacgagaggcgctcccccagagattgtctgtggagcctaacccctgggccggccagtgtggccccagggtcatcggctttgggcgggccctgcgacctcgccggcgtccgcgtgccaactcccggggcggggcgaaggcggggcggggcgtggtccgggtccggctctgcccctgcccctccccggcgctgacgtcgcaaagct

SEQ ID NO: 42290 - DNA, 197 bp, Mus musculus
  source 1..197: mol_type = other DNA
aatgtgcaagttcacctggaggtggtggtgcatgctaaacaagccaggcagatgcaccccttgccttgcttccgaagggctgcagtagcatggaaaacatgaagctggagggcctccctctggttatccacggggtatgggtagaagactgctccaccccgacccccaggccacttccccacccctggtgaaaactg

SEQ ID NO: 42291 - DNA, 296 bp, Mus musculus
  source 1..296: mol_type = other DNA
actattggtgtgtctgaagacagcgacagtgtactcatatacataaagtaaataaatcttaaaaaaaaaagacaaaaattattttttggattgccactcagccggggagtagtgggcttgggctgctgacgttgcagcccgcctctactccagcacggtgggtgaggatgagggcatagtgacgcccctcgccacaacccacagagcccccagctttctctgctgtgtctgcagccactgcctgtgcctttgactgctgctcagtgccagggtcaggacctcagcatcctcagctg

SEQ ID NO: 42292 - DNA, 409 bp, Mus musculus
  source 1..409: mol_type = other DNA
ccagtcagccttttcaactgcaacaggctgcccgtggcagctagcctggaagcttgctcccagccctgacccatcctcctctacctatgtgggtgggtgagggattctgcgcatcctccctggtgcttctcagaaaggaaaaggaccagagttccaattctgatcctgccctagacagtggccaggccccacgctgtgccattggacagcctagcagacttcctatccaagtctctgaccctgattccgtgtcagttcactgtcatctgaccttcaatctttttcatttaatcaacaaaactgttttgagtgacaatctaagcctggaggtagctcctgggaactggagtcccaagtgtctgcctcacagttcgaattttggccggccgccgggcgacaccacgagttg

SEQ ID NO: 42293 - DNA, 398 bp, Mus musculus
  source 1..398: mol_type = other DNA
cccagagttggctgggtcctcctctgtcaattaacaaaagaatcctagtcacccaatgacaacagatctcctttaacaatctttttcactttgtgaatagcttgagataagacgataatcttaaaaagggttgtatttccaaggcatgttaagtgcttaataaatgataaaaaaggcagaggcagttcgaggccagcctggtctacagagtgagttccaggccagctagggctacacagagaaaccctgaaaataaataaataaataaataaataaataatgaatgaatgaatgaatgatctcagcaacacttaaaggcagcctcattaaagtgtggctctggctctttaagaggagggggcgctttaaaactttccaccccaaaaccaccaatggtt

SEQ ID NO: 42294 - DNA, 431 bp, Mus musculus
  source 1..431: mol_type = other DNA
gtgctagagcctttttgaatctaagagtccaggctagggctcctggcctcccacttattaacttttcctcattgaggtgttcagaccccttcctcccttctctagggtaagagggccctaggtctgtgggacctggcacagttcttcccaggctgccaggtgccaagccggcagccgccgcagtagggtagaggaacctgactgagagtcctctatcagggatacctctctgttgctcctctgctagagggtccccgctagtagtggacgaccgggccagcttctgccgcaggcctggatcggggagcagcagctcgcagccagcgcgccgggggcccgccccctagggcgcggggagggggcggggggctacgcggggcggggccgggcggcgcccggggtcccctcccccgcccccctgacgtcagccc

SEQ ID NO: 42295 - DNA, 458 bp, Mus musculus
  source 1..458: mol_type = other DNA
gcagggagcctgggggctgctaaacccctgcctcactgacgtctggggatttcaggcaaaattaagtagctgaactccagactcctttttgaggcaaaccttcaggttgttgtttaaaaaaaaacaaaaacaaaaacaaaaaacaaaaaacaaacaaaacatttatttatttattttatgtatctggtggtcttcagactctgggagagcagccaagtgctctcaactgtgatggccgctatcgttgcaaaacactgctctcccagactgcaagtttgtagattcctagcctggagagtctccagaccacaggtagtgcctgtgtagacatgaataatagctattcggctcctaagcctcttctttagggctaggatataagctttgtgatttagctcacccagagttttccagttgcctggacaacgtgcagtattggctcccaggacccaggctcc

SEQ ID NO: 42296 - DNA, 194 bp, Mus musculus
  source 1..194: mol_type = other DNA
cagcaaccacatgacggcgatttgtttgaggtggtcaccctggaagagctcatctttcagggtgcacccgtaggactgacagtccatgtctgacaaattgtccatgaaggaattccagtctttgagatccatcgtttgaataggttgtaagtcccattgccaatgcttccttgcagcgtcttcaagaaggcgtg

SEQ ID NO: 42297 - DNA, 254 bp, Mus musculus
  source 1..254: mol_type = other DNA
actttttaacagccagttcaaatgtcagagtctctgacttctgaagaaattcattgtcaagtatggtgggtccctgcatgacttcagtcattgcacagttggggtttttagaacacggaagtcccaaggctaaaaggcccccctctagagtcttgggactgcttcatcaagtccagacttggaggtggactgcaggggcctgggccctgggaagaccgggtggggccggagtctccgccccgcgccagcacccc

SEQ ID NO: 42298 - DNA, 476 bp, Mus musculus
  source 1..476: mol_type = other DNA
cagcctctgtgggcggggcctcgtgccgccagcatctttaaagtacatattcagttcccagaaaaggaattgctcttcaaaaggaagttacttgttttaaaaaggttaaaagttcttaaacctttatgtgacttagtctgaaagctgcagttgagggttataaataccaaggcgatttttaatcccgaatctctgtgagttcagagccacccttaaggggaagaaaacgaactttggctttctttttccatctttacgaacatggacggccaggcttagcagagggggctccgccccgcccgtcccagtgggtcagggcgggagcagtgggggctttccgggagccgcggggcacgcgggtgcacgcgagctcgtgcgcgcgttgggggtcgccgcggcgtgccgtgcttgcccgtctccggcgcgcgcccccgcgttgcgccggccgcgctcgcgcccgcgcaggggcgcgcctc

SEQ ID NO: 42299 - DNA, 402 bp, Mus musculus
  source 1..402: mol_type = other DNA
tttatttttaatatttaaaaaaatatgtgcaaaaaaatcaaggccagcctggtctacaaagtgagtttcaggacagccagggatatacagagaaatcctgtaaacaaataaacaaacaaataaatatgtgtatgggtattttgcatgcatgtgtatttgtgtaccatatacatgcagtgccctctggaagagcagccagtgctcctaacggccgagattctccaatcttagaagaacatctcttaaaatgcaaatatgcccttttccaactttttaacagccagttcaaatgtcagagtctctgacttctgaagaaattcattgtcaagtatggtgggtccctgcatgacttcagtcattgcacagttggggtttttagaacacggaagtcccaaggctaaa

SEQ ID NO: 42300 - DNA, 276 bp, Mus musculus
  source 1..276: mol_type = other DNA
tcttccgctgcagtagcagttgtctctgcatgtgacaggcgggaactaaaaagctcaggtcacgtgacgtgtaagcgctctgaggacccagccacgcaggctgtgactgggtcaaggttaaccttggagctgcctgcagggaggtgtctcaaagtctcaagaattatacattcaagtcctttgtactttaggggcagatattgacctcagtcctaggtccaaaaaagggccccattcgggccccaactctgctcgcggagtgaggggcagtacggg

SEQ ID NO: 42301 - DNA, 237 bp, Mus musculus
  source 1..237: mol_type = other DNA
ttacacagaattctgacttgtgtgtgtctgtccaagaaactaggcgcatgcccagtgggtggtcggcgcgagtttgcgcagtagtgggaattcaagcctcaaagcttcccgcctgcgcacagtcgggagcagctcggagccctctccgggacgtgcgcacgggctctgacagacgcagcggccattggctgtcggtcgactcgagagcggcgattggctgtcgctggtcgtcgctca

SEQ ID NO: 42302 - DNA, 163 bp, Mus musculus
  source 1..163: mol_type = other DNA
tcacccaggctggtttcaaattactatggaaatgtattatttttaaaaacagactcagccttgggcttgggaaatatctcgagaaggagactagctctgagcggcgggttagctcagccccgcccggtgagggcgcggctcctttaagggcgggtggggggcg

SEQ ID NO: 42303 - DNA, 374 bp, Mus musculus
  source 1..374: mol_type = other DNA
ggattcctctctgaggaaaacatttgccacctaagggatcaatattccagtgaactgctgtactactagcgtgtacaggtgttttaatccctgctgtaggttgcccagcaacaagcttcccaggttttaaaaaccctccagattgttcctgagtttctggaaccagtgaaagagcgggtgtgcttccacactctccagactaagctcaggctgctagcccacgtggtaatgttggaactgggcaaagcctatttccactctggtatttcttcagttgagttttcaaaaacgctaatggtaccactcctttagaactaaagctttgtttaaaataacactaccgcccgttttaaaaatggtgcagcgatagttct

SEQ ID NO: 42304 - DNA, 348 bp, Mus musculus
  source 1..348: mol_type = other DNA
tggtatatttatttttaccgggtacctttcccaataggatctgttccatcagaccctttcttgcaaaaaaggcctgtcttgtgatagcataaaagatcacagtgctccatttataggattaaactcctaggctgagttccctactcagagaaaatcctcaggcttgggaggcagaggcaggcggatctctgaattcaaggccagcctggtctacagagtgagttccaggacagccagggctacacagagaaactccgtctaccagattagaggagggagtggggaggtcgcggtgagcagcctccggcttgcggcggttaattgcaaccaaccagaggtgaaggccgg

SEQ ID NO: 42305 - DNA, 257 bp, Mus musculus
  source 1..257: mol_type = other DNA
caaaaaaacaactgttacactaattgcttatgccaggagggggtggctttaaatcccagcacttgtagtctgagttctaaacaagagcactgactgctctcatggtggctcacaaccatctgcaatagggtctgatgcccttttctggtgtgtctaaagaagagagcaatggtgtactcatatacataaaataatttttttaaaaagtaaaagataataaaaattgaaaaggaaaaaaatctttttgagttgttctg

SEQ ID NO: 42306 - DNA, 437 bp, Mus musculus
  source 1..437: mol_type = other DNA
tgagatgtttagacatctgtgacacgggtggaagtacctaccctacctagtagttctgggtcaattaattaaaaaacaaattgtttgaacttagcaattccttttcagtgaccaagaacttgagtgtctggttggacaatctgtacagtgactcctgtcccctttatccaaggcgccttaacaaaagaagtgtccttttgagctcttggctctggcttaagacaccagaggaagccagtaagtggcctttaatttaacaagcccttgatgggatgatgttcccagggctgtacatctaatgcttagtgactcacccagggcttagtgaggccttctcaagtgccctgccccagcttctgtaggccccaccctccagcagggcccaccctcactgtgccgaggctgatgggccttatcccactcagaacctccttggc

SEQ ID NO: 42307 - DNA, 406 bp, Mus musculus
  source 1..406: mol_type = other DNA
agcataattttacttataaagttttgtttagtattatatctaagtacactgtagctgtcttcagacacaccagaagagggcatcattgtgagccatcagtgctcttaaccgctgattttttaatttatttattatatgtaagtacactgtagctgtcttcagacacaccagaagagcagtcagtgctcttatttttaagatatatttatttacccaatgtatatgagtacactatagctgtcttctcacacaccagctataaagttttatacatctaaaaagctttggatattaactacttttaaaaaggtggcacttaattacagctttattttgcaaaattaaaaagctgatgaattagatagcttcccaaaacattattctctgcatcgaacagagtattgag

SEQ ID NO: 42308 - DNA, 452 bp, Mus musculus
  source 1..452: mol_type = other DNA
tacatcacatgaatactcattttttaaaaaaagatttatttattattatatgtaagtacactgtctttagacacactatgggtggttgtgagccacccaccagaagagcagtcagtgctcctctgagctataagccaattaaagtcttattttttagttaaagccaatccgtcacaaacacggtttacagggcacacgcatgcgcctcttccgcgtcgccgcagcgaatgcagctcagtatgattccgtcgcgcggatgccccaggtaaccggaagaagcctgctcccacgcggggttccgctagggttccgcatcgaagcgtccggcaccgatgctggcagaagtcccgcgaccggccgcgaaccaggcccagctgcgtcctcgaggggcggggccgcagaggggcgggtcttctacgtggaccgtgggcggtgctaagtgcgcggcgcag

SEQ ID NO: 42309 - DNA, 294 bp, Mus musculus
  source 1..294: mol_type = other DNA
atcatctgtggagcccttaaaggatcagagatggaggcagaggcaggaggatcaccctcctggttccggttcaaggactggaacatggttgaatctgagttcaaggtcagcttggtctaaaaagatttttaaagaactctgtctgaccacgaattaaaactccaaattgtgctgaatttattttccagagaaaattcagggagtttcctgaatctgcacggacgtctccatcccagggtggacagtagtccgcccaactagtctgggaccttggggctcccctgacttccgact

SEQ ID NO: 42310 - DNA, 276 bp, Mus musculus
  source 1..276: mol_type = other DNA
ctccagcggctgtgcagcggagcagaaagctgcggtggcgtgcttcggggacccacagccccgcagtacggacccccacctaagccctaggcgcgccttgtgaactgaggggcttaatatatcccccaatgaaggggatacctattaggaaactgtactccattgtgtgctaagccacaatgtccggcagcgggaagggcaagcagtcctggggaccctctcctcccccaggacactgggttccctggttgctgccccaggcttaatgattgtcca

SEQ ID NO: 42311 - DNA, 386 bp, Mus musculus
  source 1..386: mol_type = other DNA
aaatagtaatttccacatcttaaaagggtcgtaacattaataaggtttaataccattactttataaaagtattacaccactgtattcttaaagtgactatgtgattttagaatcatggtggtcccatgcacccccacccacccaggcgccgccgccggagcacatggacacgatggcggcagccgcccggagaggcaggcccgcgggtcgccttaccatggcgaagctcagagagtcgttgcctcgagagagtacttccggggcaatgggtggagccacgtcttggctcgtaaaattgctgcactttgctgcgggtcacccaacagccactaattctctgctctgtcactgagaaatacagtaggacaccagttccgggactggag

SEQ ID NO: 42312 - DNA, 358 bp, Mus musculus
  source 1..358: mol_type = other DNA
caaaaataatttcataaaaaaaaaaataatttcatggaggcagatttctaagttcgaggccagcctggtgaaatagtaatttccacatcttaaaagggtcgtaacattaataaggtttaataccattactttataaaagtattacaccactgtattcttaaagtgactatgtgattttagaatcatggtggtcccatgcacccccacccacccaggcgccgccgccggagcacatggacacgatggcggcagccgcccggagaggcaggcccgcgggtcgccttaccatggcgaagctcagagagtcgttgcctcgagagagtacttccggggcaatgggtggagccacgtcttggct

SEQ ID NO: 42313 - DNA, 427 bp, Mus musculus
  source 1..427: mol_type = other DNA
agcttcggggccggccgaatcggatggaaaccgggtaattcgcagggttacccagattgccattcacgtccatgccattgatggccaacactgcatggccagagatggcccgggccactccccgcgccagccccgccctcgagcccggcccaccccggatgccgtcgcgctggccgaaagcgaccagcacgcgttcgtcgtgcagtttcagcagcaggtccagcccgtggcgaatagctgtcccactggtaaatcaggccgccggctttgtttccaggcgctccagtcccggaactggtgtcctactgtatttctcagtgacagagcagagaattagtggctgttgggtgacccgcagcaaagtgcagcaattttacgagccaagacgtggctccacccattgccccggaagtactctctcgaggca

SEQ ID NO: 42314 - DNA, 388 bp, Mus musculus
  source 1..388: mol_type = other DNA
gttttgtttcacacaagccaagttcaggtaaatactatcaagtaagcttaattgcagagaccttggcctgctttgagaattagatttcccagccaatgctcggagaaatgacttacagagaatattcttgtgcagaacacttcagactggtctacaaagtgagctccaggacttagacccctgcaggtctcagggaagctggattttttcccatgtgtaaaatgccaataatctccacggggtcacagtgtgcgccctgaaattacccggagtgaatattccgcgcagccgcagaacggattgcaatagcgcctactgcctctaggggaaccgggagctcctaggtcgccccgccccgtccggcccggaagggtcaggggtcagtggg

SEQ ID NO: 42315 - DNA, 227 bp, Mus musculus
  source 1..227: mol_type = other DNA
ctggagaaatctgaaggctcacactgataccctccgcttctcccagacctccttggagacagcaccctctacagtccaggaggcagacactcagacagaggaactctgtccttcagtcgcggcccgagggccagctccccagcctgaaaaacctgtctggggcccctccctgaggctacagtgcccaaggggcaagttggactggattcccagcagcccctcccact

SEQ ID NO: 42316 - DNA, 273 bp, Mus musculus
  source 1..273: mol_type = other DNA
cacctgaggccaagatgggcagtgcctcacctggcttcctccccgagatggagtcgttcttagtagaacaagtcatggtttccagaaactcagaccctgagaaagccaagtggggtggtcactgcgctggaacccctgggacaagctttagtggccatttatctgtcaagggcttcaaaagcggatggctttcggcagctttcagacgttccggaaactgtgggagtggggtccggagtccctccctccctccttagactggacgctaggagt

SEQ ID NO: 42317 - DNA, 447 bp, Mus musculus
  source 1..447: mol_type = other DNA
caatgctttaaagaactgcttagaatttttgaagacaaaggtttcacttccttaaatttctttgcactgctgaaggtttaattgaaaaaaactcccactccactcctccctagtccttaggaaagggggagggtagctcgaaggccccttccccgcccagggccaactgctcctgctagccggtcgggcgccttaccgagtcagaccaccaggggcctctcccaggctccggcagcgcaggggatcccggggaggcggcggcgcgcggcggagccagtggccggacatgccccggatccggggccgctgcagcaccgccgccgcccggagccagccggccggacgcccgcacgcctgggtcccctggcgccgcgccgcccgggggctgcgatctggaccccctccccgccccgcgcccgccgtccccgcgggcctcggggaaagtga

SEQ ID NO: 42318 - DNA, 274 bp, Mus musculus
  source 1..274: mol_type = other DNA
acacttgggtgcaaggttgccaccattgagggttcttccctttgaaagaacttaactctttcaaacttgagctgaaaagagggaggggcagggttccccctccctggccgggcaaaaagtgccctggctcgcctgggactgaggggtttcccaggacagggtcttctatatgcatccctcatagagatcctggagtgccaggaaaggcactgaaatgggagtttccctttttcttaaaaaaaaagaaaagaaaagagcagctgacgcctgccac

SEQ ID NO: 42319 - DNA, 519 bp, Mus musculus
  source 1..519: mol_type = other DNA
gagtgccactgcgggcaggagcaaagggtcacctcgcctgcactccgggatagcccacgaccgagggcgcgctcccggcggccatcccagctcagcttccggacccgcgcaggctgccctccgagtgtgtccgaggtcagcagtcagcagacgtcccctccggcccgggacccgtcagcccagctccgttggcggccccgtcaaaggccggtctctcccgaccctcgcccgccgcgcccaggaagccgtgacgccgcggcggctgcagctgcagcggccgagctctcgccatcttgtgtggaggaggaggagccgcggccgccgccatgcggagcggctgggaagagcagagtcagctcagcccggcggcggcgacatcgggggcgccggcacagcgggcgccggccgaggtagtgcggggtggcggcggcggcggcggcggcgagctgcgcgggcagcgagcgtcgcggcgggggcggggcggggcggcgggcgtcgcggcgaggggccggaggagcc

SEQ ID NO: 42320 - DNA, 196 bp, Mus musculus
  source 1..196: mol_type = other DNA
tgaacagtgtgacttttcaaagttcctgagctgactggtgccacaccctcaggctgtgtcctcacagggtctccgaagacttgagccattctgttttaagtgataaagaaatggtcccttcacagactcagtgtcgtgcccacccatggctttggctgacctgggtaggcaagtgaggcaggccgtgttcagcaag

SEQ ID NO: 42321 - DNA, 228 bp, Mus musculus
  source 1..228: mol_type = other DNA
tgaatcactgactgtggctcagatgggtcctctggggaaaggcagggtgggcagcccccctggtctgcctccatgctgcatgcataaccaggcgctgtgtgcatgctcagagcatggtcagagcagaagcccaggttattttgagacacaggtggtgacccgggatcctcatcccaggagggctgatgagccctagggcgggggtgaggcattggcccaacctcctgg

SEQ ID NO: 42322 - DNA, 183 bp, Mus musculus
  source 1..183: mol_type = other DNA
ggcaaaaaggccggctccattcagctttcctttgaactcattctgagaccagtctggtctcgaactcacacagagaacaatgggggccttgggctccagcaccacaagggcgtcttctctagctggccaggcggacaggcagggaagcggggcgggacagtctccctctcctcctactcagct

SEQ ID NO: 42323 - DNA, 212 bp, Mus musculus
  source 1..212: mol_type = other DNA
ccatggcagataaatcacttataagctttctaattttagaccaggctggcttggaatgtatttcacagattattttatatattccattgagtgtagagcacccgactgctcttccgaaggtctctggagtgtctgaagacagctacagtgtacttacatataataataaataaatctttaaaaaaaaaactgggctaacaggggtctgttgg

SEQ ID NO: 42324 - DNA, 637 bp, Mus musculus
  source 1..637: mol_type = other DNA
gtgccgctttcgtagtctgcattggaaaagaggaaacagttctgttagctaatgagatttcttgaactctagggttcaaagtgggccaccaaacacacagtaggtgctaggctccactatttgataattgatggattcactaaggaacaaggccaaggagagccttggactttgatctcagctctgcccgtgggcggcccacatgctgcacgtcggcaggtgggcgggggctcggttgcccacacccggctgacctgcgccgccctctccctgtccgcccgcaggcgccctggaggacttggagcgcgcggtgacattgagcggcggccggggtcgcgccgcccgccagagcttcgtgcagagcacgacgcccgcagggacttcgagaaggctgcgcgactgggcagcccgttcgcacggcgccagctagtgctgctcaacccgtacgccgcgctgtgcaaccgcatgctggccgacatgatggggcagctgcgcgcgcccagcaacgggcgctgagcgtggccggccgttactaaccagcctcacggtgcgggacagggcggggctggaacggccacctgcccttgctcgggcagcgattggtcctgcctggcgcgggccccgcccttgcagcgga

SEQ ID NO: 42325 - DNA, 331 bp, Mus musculus
  source 1..331: mol_type = other DNA
acaggtgtcacaaggaatacctggtaattgttaactctcaagacagtttctatgaatactccttgaactcattttattttattattattattttttatcaattttgaaactggacatttaccaagttacttactgaggatagcagttatgcaccagcttgcctgactcatagttttctttagcaagtaaaaacacaaagggcttttaaacggccaagcgggctgctagaccgcctagtgcccggggccgctctatcccagcgccgcgtctctgcttccgccaccaccggccgcagcagaggggcggggtggcggcgcagtggcggggcacg

SEQ ID NO: 42326 - DNA, 515 bp, Mus musculus
  source 1..515: mol_type = other DNA
ctagttctgtctttcaaccaagaaaaaaaaatagatttgtggtgtttcttttcttgaaaatacaggtagttgaataattgtttaagcttcatttctagaataagacatttctctacagctgtgtgttaactccctgaaggaaaatactttaatattcaaaaaataataatgctacatagttgtaaaaacaaaaaaaggagtttttaaacatgtttattttctatgcacttttttttatttaagtgatagtttaattaataaacatgtcaagtttatgaggggcttgtcaatgggttacctaatgccttccagcctaccttcagtgagcactgaagtatatccaggacctcagaggttctgaggttaagtagtgatctttaaacagactttaataaagtgaaagcataatttccatctctgctccaccttaaagctgaaacaggatttgtttattcctgaaaaaccaccctgccaggtcagtaaccctggccactgaggctggactacacctctgt

SEQ ID NO: 42327 - DNA, 502 bp, Mus musculus
  source 1..502: mol_type = other DNA
cggaggaagaaggggcggggcgcctttgcccgcctcttccctccagtttgcggagcgcacgctgtggctccaacgccccctcacctccctccagcgcacagtggagcgaggaggtggcagccaagcgtgaagatgggaggggctcctctggattctagaagcgctctccaaagcggcggagaaggctcgctcctccggggacccagcagccgcgccgcactggaagcggttctcctgggccgctcaagtccctgcgcgtcccgggaacgtgtgttccctggcgctgccgctcccggagggcggggcatgtgccgggcgggaggagccgggcccggggctcggcatagagcagcggcctccgggcggcggaggcggaggccagaggcttgcagggcaggcgggcgccacccggcgctcggcatagcgggccgcggggtacggccatctgggcggcgccaggcgggttaggcaggttccggggcccgccgctcccccccctccg

SEQ ID NO: 42328 - DNA, 234 bp, Mus musculus
  source 1..234: mol_type = other DNA
tcagtgctcataaattcataatgtcaaagttacagcctttggaatttgtatattaggggataatgcccaaagcatgcttccaccaaatttgcctggcacagtggtttgaaaaaccggattggatcccaattctgatactgtcacataatgtaacgcctatgtggccccttgctcctatttgatatgcctttaaagcgattctgaatttacttggagtgaacaaaggtcctgccg

SEQ ID NO: 42329 - DNA, 251 bp, Mus musculus
  source 1..251: mol_type = other DNA
tttgaagtaaccctaggttagtccaaactcactgaatagcagaggatgacttcggatttttaattttcattttccttactaaaactaagaaccaaaatgctcataaatatttttcaaaattaaaaactaaaaattaaccagacttgtaggctgtatactgttagcattgtatagataaatctactcgctagctgccagcaaacgtgcgcatgcgcctcctgctcggcgctcagcgatgatgtcagctccgg

SEQ ID NO: 42330 - DNA, 344 bp, Mus musculus
  source 1..344: mol_type = other DNA
cttttgagaacatctaagtggtacccactagccagtcaatgcataacagaaattcacagaattcctatgtgattccaggcacaaaggataattttgtccgtagaaaagtctattgtctcctggggaggatcgattctacaaatgagtggattgattatattgttaagaagactctgactccatgcatgggtactatgtgctggacctaggattccgatgtctggatgagggcttctcaagtccatgatcagaaacaagaggatctgctccaggaaaggctattctaaattcccttacacttcctagaattctgaacattgcttcagaaagagcagacagtctta

SEQ ID NO: 42331 - DNA, 443 bp, Mus musculus
  source 1..443: mol_type = other DNA
tgtttctgatcatggacttgagaagccctcatccagacatcggaatcctaggtccagcacatagtacccatgcatggagtcagagtcttcttaacaatataatcaatccactcatttgtagaatcgatcctccccaggagacaatagacttttctacggacaaaattatcctttgtgcctggaatcacataggaattctgtgaatttctgttatgcattgactggctagtgggtaccacttagatgttctcaaaagaacagtgtcaaaaatctcttaaggaaggtctactcctgcctaaacccatgagttctgggatcaagtcatcactgtcatcctattgcgcatagaggttctagtggtaaaggggtttccaagtgggaatctatgctggggcccctgctgcccacactctacaggagagggcggagacacctggctctac

SEQ ID NO: 42332 - DNA, 502 bp, Mus musculus
  source 1..502: mol_type = other DNA
acagataaagttgtttgtggttaaaaacctaaagacctgaatactcacatgttaatatacacatataataaataggtaaataaataacgtaaaacttttttttcgtaaaactttttaataaaagacttgtcgagaaagtcaagtgtgttacaattgtatgaaattatcaaagagctaagtcaataagcgttttttacaaagaaaaagattgttgcttataactcaggaagtacttatgctagattttaaataataatgctaaaagctaccctagtgggtgcatgagtaaagcccctagcatagtgtcagtacaaagacaggagctatttgtcagcaactgcccagcatgtgcaatcaaaggagaaggcagcttcgtcttcctgcctccgctggaggggttatgcataaggaaggctccctcagtgtggaggtgctttgcagggggctgcttctgcctcacatttccaagtgacgtggagcaggcgggccctgagtcccctct

SEQ ID NO: 42333 - DNA, 437 bp, Mus musculus
  source 1..437: mol_type = other DNA
ttgcttagtaagtacaaggtcatgagtttagtgagtattgccaaagctgggcagtgactccccaacttcaaggtccagcctgggctacatggtgagacagtcctgtcctggaactcactctgtagaccaggctggcctcgagctgggtaagatactctttacgctgttaaaatggtattcctttccataggattgtggagagaaaaggatgcccagaaaagtcctttgcatgagctgagaaaggaaccagcattgagacttggtttctttctgctgagtctcaggagagcctgttcacaccagagggtccctaggctgattccaaggacaggaatcactgaaactttaagtctgggacatttcaaactggcacagctgggtgcggaggccccacctttcattccagagctgtaccggccggggcgggatgagtcacg

SEQ ID NO: 42334 - DNA, 493 bp, Mus musculus
  source 1..493: mol_type = other DNA
aaccctaatctgagtcttacgactgaagtccaggttgtacctgacttagtttgggaactttagaaacaaggatatttgtttttctactcttgattcttctcatagaaatggaaaatgtcagctatgaaatatttccaaaagtgatatccttacttttaaaatgcagtaatgatttcatcatcactgtcactgcagtaatttaataaacatccaattctgaatgatgtaatggctacattaaaaggtacacagacccaaaaaagatatatttattctgatcttggaacttcaaatgtatgagaatctcctggttccctggaattccataaaaatagaactgttttttcagtctgtagccaatctgaagcagaaccgggtacgattctagtaacaatccttgtccctgattgaggttgggtccgggacggctctttcaaaggtgactcccgacatgacgtcacttccggcaccacctgcatggtccccgggaggc

SEQ ID NO: 42335 - DNA, 346 bp, Mus musculus
  source 1..346: mol_type = other DNA
atttgagatcttgcttgcagagtttgtaatccagaagggaggtgtgagatatgaggctcacctgagtgagctgcaagtctttccttctagaaaaaaactatacataaatcatgtccacacagcagctgtggctacctgcagaagacttatatatgcacagatgtacacatgtacatgcatgtacacacaggcacacacatgtatacatgcatgcatgcatatacacaggcacacataggtgcacgtatgaccatcacaatacattgaataccatttgtaaaattgaaaaaaaaacccataatttaaaagtaatgggtttctgtttccgcagccaccacagaaggca

SEQ ID NO: 42336 - DNA, 496 bp, Mus musculus
  source 1..496: mol_type = other DNA
tgtaaaagtctcttaggcatttgtgcatccggaaatgctagagcaatgaggaagtcattactttccaagagctttcctgggtgtttacatctatgtacgtacgtatgtacgtacgtacgtatgtatgatcttgtgtgtgtgtgtgtgttggggagagacagagagagacagacagaggttagaccataacttgcagggaaccaggtgtgttcccggggatcaaactccacaggcctttggggcgtattcatatgataaaaaggacttccttacagccctttgataaaaacagatggctctaacagtctttgcctaggctagctttggactgctatgagttcaaggcagtcctgtctctagtgctaggattgcaggcacgtgccacctcacctagaattctctaacaattttcaaagtctaaaaatcatttcaaatgcattgattgagctctgagtttagaggctaaattttctggcaacttaatttcttccaggaa

SEQ ID NO: 42337 - DNA, 487 bp, Mus musculus
  source 1..487: mol_type = other DNA
cccacccccgcctccccgcgctgggggcaaagcacgctgtctccagactgcctgccaaccctctctccatccgcagagcgaatgagcggcgcggctggaggcgacgtcagggctgtaccggtcgtccgcagcgggcaagccggcacacgcccaccggctgcggcagcgcccgctgcggatgtcctcccggcggtccccggagaggcagccgctgcccgggcgtctgcgggctggccctgcagtgccaagccgcagcattcccgtcccgctggagaggaagagggctgcccaggctggaccctacggccgtgacacggcgcaacgggcactgtgcgaaaccgacggggacgccgcccctcctgcggctggagcgcttccagagcagaggcgcatcgcagtgccgctcgccccggcgtcttccagccccggctcctgcagccggctccaagaggcggcgggcgcgcctccccctccttgggagccccga

SEQ ID NO: 42338 - DNA, 366 bp, Mus musculus
  source 1..366: mol_type = other DNA
tgcatgtttaagcatccttgggagatagtacatctttgcctgcaatcaacacacagacaaatggtgatggcagctgctataggcatcagactttggtgtctgttaaaatgaccctagacagctgaccaggcagcttttgtttttaaattctacagaaaaagccacagtcagtccacagtggaaagaccagtgttagtgttccactagtggagcccaccagctccttcgccctgctgagctgcctgcttctccgaagcagacattgctttaaactagagcaccgagaggctgtttctctggccccatgggaagggccctggcttcccttgatctcagagggaaacagaccctctgaggctcttagct

SEQ ID NO: 42339 - DNA, 377 bp, Mus musculus
  source 1..377: mol_type = other DNA
aaagaaaaatttaacaaatacctcatactgttttcagtcagtttctcgatggctggccaagccttctcaaggcagtagtgtcttccgtgtgccttggcttctgtgaacaaaatcatgtaagtgacatactctgataccaggtccctcaaggcgcctattgactgggggtgtcagactcccaccaagagtcaggtagggacgttccctcactgttggcttagcagagggccctgcatagaggtcccaggactttcacacatgctggcccagtcagtaattccaattgctccagtctgcctgctgaggttcctgcggaggttcccaagctccgtgggctgaggagcaacgaggctccgccttcaggttgatgtcaagct

SEQ ID NO: 42340 - DNA, 362 bp, Mus musculus
  source 1..362: mol_type = other DNA
cctctgtagggtcaggatggcagcccatcctgactggcagtgggagaggacaggtgcatacatcttactgttctccccagatgtgaaacagaacacaatgtacattttttttaatgtgtagactctgtaaatgtccaggtcccttttagctgtacagtacagcccctggcctggggtggttccaatttccagcagtacgctatttgaaaggcgcattctctccctcctgccttcctggttggatgaaaggcattcaagcagataggcttgtgtggtgtgtcacctgtccttaggcctatgaaccactccaagacacataatcattccagtttggcaacttcaccggttgtgttataggactt

SEQ ID NO: 42341 - DNA, 479 bp, Mus musculus
  source 1..479: mol_type = other DNA
gccccatcagtgctggcaccgcagctccaggggtttatctgggtacagattcacagccaccctggggctttcagcctaatatatccactcaaatacatacatgttttatagtaattgattttgatataattcataatattttattgctgccaatggaggtaattcattatgtgcaccatttaaaaccatctgatttctcttgtcgttgttaagagttttcataaaaaacttttttcaggaaaaaaaaaagtccatctcatgtccagatttgggatttggacacagttagaaatgaggtgagaagggcttcccataatctcagatcctgtctggaaccctctgggaggggcggtgaaggggaccccacacacagaagctcatgtgggtttcaagagcccaggtattagccccatctgctgagggccggccctcggccctcagcctccttttccccacacgctgggggactgggggccaac

SEQ ID NO: 42342 - DNA, 385 bp, Mus musculus
  source 1..385: mol_type = other DNA
gataagacctggctgatgccagctgctctcctcaatgcttcagcacagggtaggccagcatcattacttagagttagtcaatggaacccttgctgggagttagtctcacctccctttcctagattagggaaaggaacactccataggatgtaaatctttaaattaatttgtcacctcgattgaaaacgggcttctgggcagcaaaaccctggttccgaaaaacaccagccctgtcacggtgttggtctggctcatttcctaccctcaccaaagggggggagaatcaaaaagcatccgctccggcgctgggcgcgcgaaggggcgaccggggaggccaaccagtcagccccctctgggaggcgggaaagctgcaagccgcgcccac

SEQ ID NO: 42343 - DNA, 315 bp, Mus musculus
  source 1..315: mol_type = other DNA
gggataagacctggctgatgccagctgctctcctcaatgcttcagcacagggtaggccagcatcattacttagagttagtcaatggaacccttgctgggagttagtctcacctccctttcctagattagggaaaggaacactccataggatgtaaatctttaaattaatttgtcacctcgattgaaaacgggcttctgggcagcaaaaccctggttccgaaaaacaccagccctgtcacggtgttggtctggctcatttcctaccctcaccaaagggggggagaatcaaaaagcatccgctccggcgctgggcgc

SEQ ID NO: 42344 - DNA, 487 bp, Mus musculus
  source 1..487: mol_type = other DNA
cctcttatttgagaattaagacaaaatcagagtcaggcatgacatggtgcctgtctcagagctcagctgtgcttgtcttgaccagacagattctgcaaggcgacacacatagaacaggcattatctgtgcattgtaaatgactctgagacagcttctccaggaagctgacttgcagaagtaccaaatgtcttcaaagatttttagcccccggccgggcgaaaaacccgtgttcttttccccttacatggcagactcttagcacatgtatgacatatgcctctgtgcgtctcctctctcgaccagaggagcaggatcgagactgtcggtctgtcccctaagcttgtgggactaagtgaccccaggctggggctggagtagcactcaccaccccggggtgtcgcggggggctggggcggggaaagcggccgcctagcccagccccgtggatgacaggagccggggagccgaggagggaggagccgccgc

SEQ ID NO: 42345 - DNA, 257 bp, Mus musculus
  source 1..257: mol_type = other DNA
accttatgtatatttaatattaacgtaattaaagcagcctcagtggactaggccatcagactggctctggtaggccatcagactggctctgacccggccatagcactaataagggctagaggactagacccctcccccgcgagaagcgtctgtgctctacagcgcaagggcgcggagttcggccgcctcctctcctctcagatcaggtgcacggaaccccgggagcaggtctggacatgcctctcccgggaaaggga

SEQ ID NO: 42346 - DNA, 408 bp, Mus musculus
  source 1..408: mol_type = other DNA
cagcattactcatgctctgctgagcctggaggagaccctgtggtccagtctcagccaacagtggcttctgggccttcagggcacaaagactctgggaggcactaagtccttgggcaggtgtgacatcataaatgacacattcaggaggctagtcagctgcctcacagagactaggtccccattgcatctggaacagtttcctgcctggtctcaggggggcctctggactacagaggcgaagactggggacccacagtcctgccagcttctaccctgacctctcttagagagcacggtgcagaccactggctctaaggtcccctaactgcagggtccctggggagaggtcagagacttgctccaaccagcccaggcaggcaggttcagggtaagagtcccctcaccagc

SEQ ID NO: 42347 - DNA, 341 bp, Mus musculus
  source 1..341: mol_type = other DNA
gcaaagcagttttttgccctataaatgttatgctaaaatttaaggtataattactatcatgtcatcataagtgatgaagaaggcctcacagctgtttaacagcatgaactgcagtgcctgcagcagccatcttcctgctatatatgtgtgatgggatgtgagagtcccactgtggtcacctcatccccaatactagtggtctctcacagatgccttgaagggcatggagtgcatctcccagcaggggacggctctcattttgaaccataaatcaaggcacgagtggacatctgtcccatctgagatcatcatgctgctcctgtgtacctgagttgccagag

SEQ ID NO: 42348 - DNA, 381 bp, Mus musculus
  source 1..381: mol_type = other DNA
tggctgtcctagaactacctatgtagaacaaactgcccttgaatttacagaaattctcggggtatacccccaaaagggcttctctgtgtagccctggctgtcctggaactcactctgtagaccaggctggcctggaactgcgtgcggcatgcgcatcaaagttgaagctagcctagactacactgtatgtttgcaggaccctgtaccctaaataaataaataaataaataaataaataaataaataaataatgaaagtattggttccttcttgctctgctagagctaaggaaatgctttccacccctttcagctccggaagctgggctgtctgccatgggaagactacacttcccagagatcccagggaaaagcaaaaacc

SEQ ID NO: 42349 - DNA, 306 bp, Mus musculus
  source 1..306: mol_type = other DNA
tttttttccccatctgtggtgagaatattaaacatgagaaacacatcctgatgtctggttcacacacttaaaattttttttgagacagggtctcactgtgatagaccaggctagtctcaaacgcacagagatctgtctgctttgtgcccccgtataatacatcttttattaagggcccaatcaataggttgaccactgataatcactgttgttcggacctttacaaaatgatggtctataaatgattgttaattttgcttaattaatagtaatagtagattattattaatattatgaatgcttcct

SEQ ID NO: 42350 - DNA, 506 bp, Mus musculus
  source 1..506: mol_type = other DNA
ggttttttacatttttatttttaagagcatcttttttgctgcaaaataaactcggccttctataagaaaaactaggtggtaaaagtaggattagttcccattcctgcttttattttgacatcaatagtcacagctcctcaggggccctgaaacgccattattgcatctcggatgcaatcagtctgcctacaataggacaaggtctgggtcaccgatgcccagtggctcaagagcccagtgtgcccaatggggggaagctgcgccgggtggtcaccgccactcttcacgagctgccgctacgctggcccttggcactggccagcgccacctcaggccgggctcccgccccccgccgtcccgacccgcgcgcgccgccccgcacacacctcccgcgccgcgcccccggggagccaagcgggggggagggaagggcggccaagcctgggggaggggtcgagcgctggcccgcgcgcggcacctcccacttccggcggcgcgagcgcaag

SEQ ID NO: 42351 - DNA, 466 bp, Mus musculus
  source 1..466: mol_type = other DNA
caaaggtgtgtgccaccaacgcttaaacaagctttctttatataataaaggttggctgagtatttggcccatccaaagtctggtttgatagcagccatccactcagcaggctcctacaatctctgtaggttccaacagagatttctggaagagaaaccgagtttgtggtccagaggcacagcagcacttattctcagacctctgagcaagaaatcttatcacaggaaccagggtctgtacagagacgacccggagacccggtccctctggggtcgcccacgccaggacccaaggtgccctcagcgaaggacctcctccgcagacgccgaccacacagcctctgttgctactgtcgctgctgctgctgccgccgcagcccccaccctacggaaactctcggcttccccggagccggaggcgccactgacagcgacatcacttccgcccggcgccgcagccaatcagc

SEQ ID NO: 42352 - DNA, 223 bp, Mus musculus
  source 1..223: mol_type = other DNA
ctttgggtactgaactcagaccatcaggtgtgagggtgacactgtcctagtagaaggggccagggttgacttgctgctaaacaaggcactcccctggttgtgcagccaggctgcagtcaagactagttcagggtcctgcccataaaaggttcagagaatgtctccggctgcccccgacagagccagcgggcggcagaggggtgacatcactgcctaggcggcc

SEQ ID NO: 42353 - DNA, 539 bp, Mus musculus
  source 1..539: mol_type = other DNA
tagagctcttttaagcctaagccaaaacagttcctcagaaaggtttttgccagttgacaacgaaaggtcagaatctttccgtgggctttgttcaacctactgtgagaggggagcggccgctgagctgctctcagtgggattttggagcacaattcctgtcttgagcaaagaaatcatctgtcagcaaaatgccaacatatgtgagccgtctcaggaggcggcgacggctgcgtgggaagtagaggcagcctggccctacgtaagcgggcgggcacagcccgctgtttaccgcggcgcagctcctggtagctccgagttctgcgccgcgtccgccgcccttaaagggcccgcgtccgggaagccttcgggccagggccaccgccgcctcggctctccgggcgcgagcggacgccgggtctccagccgggctgggccgggctgggccgggctggggtagcgggtcgcggtgccgccctcgcgagccgggatccgcgcgaggcccaggagcggctccagggaggggacgcgtcctatctgag

SEQ ID NO: 42354 - DNA, 375 bp, Mus musculus
  source 1..375: mol_type = other DNA
gattatataccacttatataatgttattcttggtattaagaatctatctgcttaacttcatagatcacagggatgcaaattgtagagctcttttaagcctaagccaaaacagttcctcagaaaggtttttgccagttgacaacgaaaggtcagaatctttccgtgggctttgttcaacctactgtgagaggggagcggccgctgagctgctctcagtgggattttggagcacaattcctgtcttgagcaaagaaatcatctgtcagcaaaatgccaacatatgtgagccgtctcaggaggcggcgacggctgcgtgggaagtagaggcagcctggccctacgtaagcgggcgggcacagcccgctgtttaccgcg

SEQ ID NO: 42355 - DNA, 427 bp, Mus musculus
  source 1..427: mol_type = other DNA
caagttgtttctcttaacagtgtatttaatactaaactgtttaaataaccctttacgattcttgctagtgtagtgacaaagtcattatcttgaaatttttattttgcattcgagataatacaagcagcacataagtgatttgaaattttattttattatctcgatagaacattctcaatcagtttcagagtcctggaatgctctgcaattcactattatgagtttgaatgaatcctatccatctgtggtatctatcacacaattctgagtatcatcatagaaattctggtcagcgagaggtcaagctacactgtctctttccgtcatcctatcaggacaggaagcaaagggcactgcgagcgcacccgccccgcaactagccccgcagccaggggcgggacttccggaagccatttgcccgagtggc

SEQ ID NO: 42356 - DNA, 567 bp, Mus musculus
  source 1..567: mol_type = other DNA
tattaatttgatcactcttaatgtccttggagagtcattagtattagttacgttttgcttaacggattgctcatctttaagcatgacgtggcaggaaggaaaatgacggtccttttctggccctcacccacccaaagactggaacgcatgtttgggatgggttcggttacagttgcttaaatactgtagctattcctgcctctgtggcctccagggctacacaggtcggagcagggatcccatcagcgaaccaggggccatcgggagtctggttctggggtctccatctcattccctacctcgctaggcgcggcggaagcttagaagttgctgctgaccctttccccagaggggggcactagggagccggcgcctcaggaacagggacccacgcgggaaggtcgagctcgcccggtgaggtcacggttgccatggcttcgggcagtgacgcgcgtccgcacgtgacgcgcggttgccatggcgtcgggcgcccggcggcgcgggagccccgcctcccggagtgacgtctgtcggcaaccgccccctcccccccggccggctccccgc

SEQ ID NO: 42357 - DNA, 335 bp, Mus musculus
  source 1..335: mol_type = other DNA
tcactacatgacccccagcggtttaagaccactagctgctcttccatcacaaccatggaaggagctaacaactccatgttggcctctgtcatttcttctgaagcatcagaggggtcttcatcctcagcttggggatatgagcctgtctgcattcactcaggctgcccaaacctggggggggctgtgagtgaaggagcccacaattcctccctccctccctatgagactatcttgaatacccctggggacccctggagtctgcagccaccccctgctgccgtgatttgcagtggcagggccaggctgagcttatcagtctcccagcccagcccctg

SEQ ID NO: 42358 - DNA, 349 bp, Mus musculus
  source 1..349: mol_type = other DNA
ttctgagttaaacctaggatttcttggctccaaagtctgcatccagaagatgatgtcggggactatcttagttgcgatatcacccagccatgggccctgctcctatctcaggtgtgggggcatgtaaccttcactctgcccctccattctactggaaggctttcaggtggcttctgtgaaggagcctgtcactggctctaggctgtaaagcaggcctgaggtccacgacctcatctaggtgagccggtagctgacaatctcagagggatttctcaactcctctggcagatggctgccctgcctcaggggactgctcagcaggtgacctttgcccagctcactgggcctt

SEQ ID NO: 42359 - DNA, 489 bp, Mus musculus
  source 1..489: mol_type = other DNA
taatggctgtcatttcacaaatgctgtcttgtggatggcagtcaatgggacagtatgatggatctcaagtccctggtgtggtccactgaggctccacactgaccacagcctggcagtggacacatgtggagtctcagtaggagacctggagagagagagaggagtcactctgcatggctcttgcataggcagcaatcaagccttagccagccctgctctctcactgttgcctctagccacttggtgaccctctgagggaaagggtggctctccctctgccactgtcaggagaggatcaggttctctccttccttcctgtgccacacagaaaatcattgtcattaatttcagtacacattgtagaaacttgaagcttcgatcctgggttctgatccgggtatcacctgaggctctgctctgtagcttctgagacaaagtggcagctgtcagactggtggcttctcagactggcacagacccagggctgcc

SEQ ID NO: 42360 - DNA, 463 bp, Mus musculus
  source 1..463: mol_type = other DNA
ggagagagagagaggagtcactctgcatggctcttgcataggcagcaatcaagccttagccagccctgctctctcactgttgcctctagccacttggtgaccctctgagggaaagggtggctctccctctgccactgtcaggagaggatcaggttctctccttccttcctgtgccacacagaaaatcattgtcattaatttcagtacacattgtagaaacttgaagcttcgatcctgggttctgatccgggtatcacctgaggctctgctctgtagcttctgagacaaagtggcagctgtcagactggtggcttctcagactggcacagacccagggctgccaaccgggcctctggggcctcccagcctcttggacagggtggagccaactcaagaagactgcttcctaaagtccaagaggcctcctgggagtgtgtcaccttccaacgtggagtcacactgg

SEQ ID NO: 42361 - DNA, 293 bp, Mus musculus
  source 1..293: mol_type = other DNA
agaagcttgtcataagagaaacatctgggcttcccggcttccctcctcggaagctcaagggggtggagcccagccttcctgtgagggaagactctctgacccagatgccgtaaggccagcccaggctctagccagtcctggacactgtccctctggccagctggctagtgcagaagacagacaagcagtgttcattggctggccagtcattctgcccacacttagtaaaggctcgagggagccacttgtctactggggcagcccccctgaggctggggagcttactaacccca

SEQ ID NO: 42362 - DNA, 297 bp, Mus musculus
  source 1..297: mol_type = other DNA
gtaaggccagcccaggctctagccagtcctggacactgtccctctggccagctggctagtgcagaagacagacaagcagtgttcattggctggccagtcattctgcccacacttagtaaaggctcgagggagccacttgtctactggggcagcccccctgaggctggggagcttactaaccccatgtctgctctctgtgcccagaaccgagcaggtgagctttgtgtaccagtcctgagttccaggttccctactttgtgaccgagggggcaggcaccccctagaccaggcttccta

SEQ ID NO: 42363 - DNA, 305 bp, Mus musculus
  source 1..305: mol_type = other DNA
tttttaaggtctggagttttttttttttaattatttattttatttattatatgtaactatactagaagagggacgggtgctcttacctaccagcccgtggggcacagcctaggcgattccaaagcaaccggggcattttacatagacctggagtagcgagctactcacgagtagctgtcttcagacacaccagaagagggcgtcagaccccattatgaatggtttcagtgctcttacaccggaagtctttgtcagagactgacctaggaaacgcagggtctgcggcctctttaagaaggggcggg

SEQ ID NO: 42364 - DNA, 463 bp, Mus musculus
  source 1..463: mol_type = other DNA
cttacccgaaagttcttattatcttccagccacttgagaggctgatcttcaacattcaaaagagtggggatgtagttctatagaactcctgcatacctaagtgagaagtcataaaacacttaacagaaactccagaatcttcctggtttctttgccacactgaccacgaagaagagtttatatcattttttagaaagacatatcaaaggtgagaaggtcagtacaggtttgataaaaacctatcaaacttttatagtcacaagttggaagcctcttcatttatagcaataaaagtgattgaaattgaaacgtttggtcagcgtccattattaaaacgctgctcaagaatgtgcccctagtggtacagctatggtaagtccgtaggctcagctgagacagcgtgggctgcaggctgttgggagcctcttaaggctcaagtctttaagtccagcagttcaaaaag

SEQ ID NO: 42365 - DNA, 169 bp, Mus musculus
  source 1..169: mol_type = other DNA
gaccttcatcctagctgcctggaagtcagctgggagggctgctacctttccactcatccctggatgggcatccaagcctctgggggacggccaggggcagccctacctggggaccctggagctactttgctaaagccttcagagactctctatggtttgctttattata

SEQ ID NO: 42366 - DNA, 404 bp, Mus musculus
  source 1..404: mol_type = other DNA
agttactcagacacagtgtgggaagcaccagaggccacacaggtgtgctttattggaggctcagttcccatcttccccagagtttgaacacttcccaagagggtgctccagagcctggggtactggtctcttgagaccaatgcctgtgccttgcagcacgggacacacctgaattttttcagccaaagttgttaaaaaaaaaaaaggttcaaatgaaagtttggaatccctttggctcccagggcccctgatgcagaggaacactctgcattgtggccttgtcacaggcctgggaaccaggccagggtggaaagcaccctttggggggttctttagcagcagcccatctgcagcaagtgagtggtgctggggtgctggggaggaccgtcctggccagcaggggc

SEQ ID NO: 42367 - DNA, 342 bp, Mus musculus
  source 1..342: mol_type = other DNA
aatcttaaatattccatattacttatatgctataatctactgctgttgagcgggctctcctgctccgccggacgtgcaaagcacgcatgtccttcgtgcagccgatgcccacgcagtgccccggcccaggaatctcgcggtcagactctccgaccaggagtccgccgcggcgccaccgagccggacgcgggccagtacaggttctcctcctaggccccgcccctcggccccgcccctaggtggcgcgggcgcgcggccgaacgctagcgccagggggcggggctcgaggtgccacgattggtcgctcctgactccgcctccattagctgtccgctcgggctc

SEQ ID NO: 42368 - DNA, 287 bp, Mus musculus
  source 1..287: mol_type = other DNA
ggcatacaccatgggcaccagtcacaacagtgtcacatgtgctccctcggggcgaagtccggtgttttagatgggaacacgtaggtgctcaaatgcgcacgtccagtatttatagaatagcttcaaacaactgtcataaaaatttccagttgtctgaagaaatccagaatgtcatatgaggctgttagattaaattagttactctatccatataagttttcccaggtgctaggcactgtgtaaagcacttttcatagttaatctcccatcctgcacaggatgccttg

SEQ ID NO: 42369 - DNA, 168 bp, Mus musculus
  source 1..168: mol_type = other DNA
tcaatggaaggagaggcccttggtcctgaaatgtaaaacggctgtgccagctttgaaggccttgctgctattcaacctgtccaggacagccagggaacagttactcccagtttcttttaaagaatatttgcatgattggagaacagcagctatccagatgtcgctttc

SEQ ID NO: 42370 - DNA, 345 bp, Mus musculus
  source 1..345: mol_type = other DNA
acctcatcagatgatatagtcttatgattggaatttgagtgtgataaatgaacacatgctatatgcatttatatttatatgtatatgttcgatacatgcaggcatgtatataactgtatctagatctgtatctttatacaaagagatttatatgtggatcatcctcttaaagagcatagattgtatccaacaatgtcccctgacaggtacctctgcctgccacagttgtcacatcacactggaatgtttgaggcatctataaaagtttagaaggaagaagcttacaaagaaagttcttgaaatcctgccaggaatgagatgcataactccgaagcagtcctgtag

SEQ ID NO: 42371 - DNA, 367 bp, Mus musculus
  source 1..367: mol_type = other DNA
aagctttgattaggcaacaatgtttgtctcacaaaacctctgtaattactggcaacacagctttcagaaaaagacacagagtatgtgattcaagactgagcacgtttgtgacaaaatctactgagctaaaatataagatctccgcagagggctattccaactctctttagtgggctgcaaaaggtagaatagtttcagaaaagagaccatttaaggactcctccaaggtagatttaaaacaattcttaaacatataaccatatttttcaaagtaaaggctggaccaaggactcctactcccatcagccctttcggcagccgagagggcgagccgacgcctcgcatgccggggcttgtagtcttctcc

SEQ ID NO: 42372 - DNA, 376 bp, Mus musculus
  source 1..376: mol_type = other DNA
atttctgccttggcggcttcggctccggctgcggccaccgacagggactcgacgtctgtcggcccgaacgctgggtcgcgctggtggccgaggtcccggctgattcggatccagcctagtaaccaggaagctcggagaccattgcccaagccatggccgacgggttgaggccatcctgttggcttgatcgccggcggacagcaacaccgcctgcagtgtttgctagacgtatgtcgatcaaactgggccctcggcggcgccgcaggtcactcggaaggagcagccgccggaaacgggcgcttgtcccgcgcgcgtgcgtagctcgtctgcgctcgcgcacggcgggcctttacgtcgtgacgtctgaacgggagga

SEQ ID NO: 42373 - DNA, 550 bp, Mus musculus
  source 1..550: mol_type = other DNA
gctggacatctactttccttttaggaagaataattctagttccgactgaaattcggacattatttgtaatattgacaaagaatgggaatataaaatctccatctcacatgactgtgtgatgtcctaagtggattattttgattacaaaaaccaaaaaaaagaaggtacaggactggtagatttaagcatgccagtcctgctttatggagtttttaaaacactttaacgtctgcaatttcaggttccacctcggatccctggacttttccaaggtggagacgcttcggcccgaacgccgcggaattccggctcggcgcgctccgctccttggcccggcctgtgaagacagccgccctaggaccgtgcccgccccttacctggtggaacagctcgaagaggagctcctctgtcaccttcggaacagagtgcggtcggcctctgcggccgccgcccccatctccgcctaggctgcctgctcagggccgacctcctcccgttcagacgtcacgacgtaaaggcccgccgtgcgcgagcgcagacgagctacgca

SEQ ID NO: 42374 - DNA, 296 bp, Mus musculus
  source 1..296: mol_type = other DNA
cagtggcagtggctgagcctgaagttctgactcctagtgctaagtgctggaactacatgcaggcagcaccacaaacgcatggcaccatgtttttgattgattaatctgatggcatgtgagcttgactgtacaatgtccatgttttaaaaattaatctttccagacccctgaccctccagggagaatccttgcaagaacaagcagactactggattgcaggtttgcctctgacctgcaccactggtcagagggctgcatggagtaatttcatcacttcctggaatagcctgaacgtc

SEQ ID NO: 42375 - DNA, 406 bp, Mus musculus
  source 1..406: mol_type = other DNA
agatttatctggccaaatcaggcccgctcttgagtactggtaaagtgggaaccgcttctcccacagccaacgagcagcagccgctgccgccggggcagcagctagatccggagcgccgagcgctgggggagagcgcacgggctctgccagggcgggggtggggcggggtgggcgggccaggaccggccagcagctgtgggcagggagccgggctcggccgccagcactaaagatggagaggcgccggggcctcgcaggggagggggctcggcgttgacgtgggacgcggcggaggcgccgcagccggcgaactgccgggcgatgccgccgctgccgccgtgagatccggagcgcaccgcccagcgaccgcctcccgccagggcgccctggggcgggagaggtttag

SEQ ID NO: 42376 - DNA, 408 bp, Mus musculus
  source 1..408: mol_type = other DNA
acaataagaatgtgatcacaaaagaccacacatttaatgatatttgctaaagctcggaaaatcaagtaaagatatgtaaaatgtatttattttattttattttattatttcacgtatgtctgcgtactacatgcatgcctggtgcaagcacctgccttaagtaattcaagtacttgagaatcacattaccttgggaagccaaagtatacttcttggagggacagtgctgacactgacagcccagtgtccagctgtcagcttcccttccccaaaacattttttttttggggcaagatgtgaccaagccacctatttggatgggtgggctggcctccctctcctgacatcacttggcggctccccaactctggtggccgggaagtgccaggctgcagcctcacaaggtgc

SEQ ID NO: 42377 - DNA, 248 bp, Mus musculus
  source 1..248: mol_type = other DNA
agtttaacatggtgtcctgagctctggcccggctgcggtcacgtgggccagagcacgcgaagacgccccgcctccggctcacgcaaaccaggggcgggcgcgtgggtgacgcctctggcgcacgctgcgggcgtgagcagagtgtggtctccggcgcaagccgcagcgggggtggggcatccagcgaacgccgtgggaggagcctctgccgcgtgggcgtgggcggggcttccatcgcgcgccgcggg

SEQ ID NO: 42378 - DNA, 372 bp, Mus musculus
  source 1..372: mol_type = other DNA
caggccagtgacctaatcctttcctgaggattgggttgaccaccctataccatctacaactagtagagttatcactcttattttatggatgataaatgattaaatagttatgaacatttcagtgtgaagaggaccctgctttagagactgtccctggagaaaaacagaattctttgaggaatgatggttgatactgaattacttagcaaatcttctttatgaactttggccaaatacttatatccatcctcttcttctgagacaggaaggaatggcatgcccttttggatgctcacagagccaagaagagagagaacatgagctctgcagtggagcaatctggattccagttttctcctggctgttgcagct

SEQ ID NO: 42379 - DNA, 430 bp, Mus musculus
  source 1..430: mol_type = other DNA
aacaatgaaatagttctaaaaagctatggctagctggacatagtggaataagtgtataattcctgtagctatgaatttgatgccttttaaaattaaacaaaaatttatttgtactgataggaagtgataagaatcttgctcatacgtatcttagaaagaaggttttataaaagaatgtctgtaacactaagtataaatttgtaccatatccatgtatcaatatacttaatatgaggcacattagaaaggtgcaattgtggggatcctttcacttatgttgattctgtaagtatcgagctagataatctcacaggaaaacctggagcagatgacgcctgcgcactttggtgccttctagacgccacacagcggacgcctgacggcgcgaggcctcctgggaactgtagtgtgaccctctcctgtgcgcgag

SEQ ID NO: 42380 - DNA, 304 bp, Mus musculus
  source 1..304: mol_type = other DNA
aaaagtagtttataaatattaaatattattgtcataatttttggctccaggttgtcaaggttgaccttttaaagtgcacgttttgttttcagaactgaccagggaagcagacctggggtgacccacgtgtccagctcctctggactggagaggatcttctgcttcaagtacaagtaagccagactggctcctggtctgccacgagggctggagccccgccctgggcatgcacatctgcaagagtcttgggcatatcaggtaacaaccagacttgcagggctggacgcacagtgtggagctcaac

SEQ ID NO: 42381 - DNA, 425 bp, Mus musculus
  source 1..425: mol_type = other DNA
atcgatcagcagttggtgctccaagctttaactagccatattgggtgttccttcttgttacacatggaaaaaaaaggaagaaaacctagagcttaaattttcttgtactttattatttgaaaccaaaggagagcattgaaaaagataatgacatttaaattgtttcctataataaacatgtttgtgcttataaaatataaacgaagcattatcctggatatcaaagtgcagttattatttgatgccaactttaactgaattgaaggaggctcttaggaggccacatgtgaggtactgacttctggccacagatagcctagcctgactatgggagcccttgacaggctggctgttcatataaaatgtatgtgcacgtgagtgcaatgccttgaggatctggaagagactctgttcctctgcaagag

SEQ ID NO: 42382 - DNA, 272 bp, Mus musculus
  source 1..272: mol_type = other DNA
atgggaactagtcctataacacatggtctgaagacgcaccagccagccagtctgtggctactgagcaccactggctaggtagctagatagctttgtcggaaaagtgtcgtttttccatttcatttacgagaaaaattgagaatcaaacggctccagagtggaagggctttcactcaacttgcttctgggtgggacatcccagcttcaaacggggcagcgcgttctttgggtcacgagaggccccgccctctccaaggccccgcgaaagccag

SEQ ID NO: 42383 - DNA, 501 bp, Mus musculus
  source 1..501: mol_type = other DNA
gaatcttcctctcccttctcctgctcctcagtgcagagggcagggtgagctggaactcccagggcactttcctttgggaaagttcaacagcgaaactaaccgctgtgattttcagacgtctgtactctttaaagacttgatgtaccactggtagtgcagcacaggttatcctctacagaaacggatgctgtgtcccccaggccccgcagtgcagagatagcactggggccctgggtgggtggggcctgtcccaggggcggggttcccgggcgcctcgtggccagggtgaccccgccccctccctcctgcgcgcgcggcgctctgactccacggagctgtccagcctcagtgccggagctggtcgcctctcgcgcgcagcgccgactgcccgcctccccgcctggtccccgcgctgcggccccgcctcgccctgccccgccgcggcccgtccactgctccccgcgggcccgagccggccgagcggctgcccgccggggatct

SEQ ID NO: 42384 - DNA, 286 bp, Mus musculus
  source 1..286: mol_type = other DNA
tgtgcgtgtgcgtgtgtgtgcgtgtgcgcatgcgcacatgagagctcgcacacatgcatgttcacttccgcccagggtggctgcaggtgggatgtcccagtgacgtccagggtgacaagtgtgacaatccaaggttaattcaacttagtaagttaggctgacaaaagttagagagttcagcgctctatcaacatacaaccctcttgctaggacgaagcctcttaggcaatctggagagcccaggcagacctgggtacctcttgtgatgcaaagaggctttgtcagc

SEQ ID NO: 42385 - DNA, 244 bp, Mus musculus
  source 1..244: mol_type = other DNA
ctcctgtgccttaatacacacagaaggttattcacttctgagatctgagttgtgctctgtgggaagatgaacttcatttccaatttccttctcttaggaggaagaggaaaagaaaagcagaagcagccatatgctttttattgaaatcgaaccgaatctaaaattcttttaattattaaaagagcccggctacaggcagcgtggaaggacacagtgaggctctcacctccgccccgcagggatc

SEQ ID NO: 42386 - DNA, 292 bp, Mus musculus
  source 1..292: mol_type = other DNA
gcattcgggaagcagagctgcatggcaagtttcagcctgtctcaaaaattaaattatacatatatatatatgtgcgtgtgtgcgtgtgtatgtgtgaattgtacagagaactaactcaaggcaagcatggagtgcattggacgtacaaatgtaatttaaaaataggtaaataaatttccagtctttccagctctaggctagtcatgagatgaggaggaaaccctacgtggtaattactcaactgtggactttgagacggggggtgtcaaataatttggccagaactcttctt

SEQ ID NO: 42387 - DNA, 331 bp, Mus musculus
  source 1..331: mol_type = other DNA
aagatacttgggtaaacattttttttaatttagtttttaaaatttaattaatggatctgggatcactgatatatgccatctctgactgacaacatttaatagaagctaaccttctgagtgggattacactggaatacctttccatttcaaatatgacattctctcacttggatattgagatgtcaaaattttcagcctgcagggtaactctaatgacagtgggatttgtcaaacccaggacttttaaaaatccaggcgaaaccactcccaggagtggagggccgagtttgcactgcgcagccgcgggggcgggactggcctcggtcccgga

SEQ ID NO: 42388 - DNA, 522 bp, Mus musculus
  source 1..522: mol_type = other DNA
ttttctgtgtatattttctaatataagaatagggcaccacaatatttttaaattaggcagtatctttttacctggatgcttgtaaacttgtaaattttcattccatcaagttacatgtttgtatggcctagaactcactctgtaggccaggctgtccttaagctctcagagaattcaaacaataacaaaataatggggtgctgaatctcattttttgttattttgttatttaggttctcaaagatacttgttaaaataataaaattatgtactgtgatatgtatattgtgagagaatgcttttcataaaactaatgaatatcacctttaatgtggatctctgtgagttcgagatcagcctggtctacagagttgcctgccagtctaaattgaaacttcattctgtctgaatcatttcagaggacccctgaatctggttccatggacttagcggcagaattttaatgtcaaaggttagagttctcagagccagggacaacccaggctcattatttacttaatc

SEQ ID NO: 42389 - DNA, 299 bp, Mus musculus
  source 1..299: mol_type = other DNA
tggtttatgggtgctggagaacccaagaccaggaaagtccataatcagctttatgaaaaatgtataactctttcccattatcgtattgagcaaggaacattctagttagaaaattaccaggtcaactaactgactaaatactttctgagggctaattaggtctgccaaattaactgacttgaactggtggagtctcccgagccagcacactatgcccagcatgctttcctgcgagcagccggtgggaaatattctggcccaggccgcaagccctgcccgccagatgtgggtaggctgat

SEQ ID NO: 42390 - DNA, 550 bp, Mus musculus
  source 1..550: mol_type = other DNA
tgtagaccaggctggccttgggcgtgtgccaccacgcctggctatggcacacacactgggtggtggtgatagtcagctccctgggtctcactagctcatccgcttagctagccaaatcatgtatcctagggagagactctatctcaaaaacccattatggatagttctgagaacaacacttgaagaaagtataatgctatagattataatgctataggtatctcatggtagtggaaaagcttctgaagagcttctagcaagtgtcatgtgacaccatgttgaagatcttaagaggaagaaagaaaacactatacaaaagttattttgttaccccccaaaaaaataatatattttatatataatggctatattataaaaattactacagtatgactgttgtttaaaaaatatttcatgctgctctaaccaaccaacggcgttcatttgcttatgaaagaggcatggtcccagcttttacagaagagatgatactgaatagtaacatttacagtaaaggaaatgcggcctgaggcgtgccaggggcagtctc

SEQ ID NO: 42391 - DNA, 387 bp, Mus musculus
  source 1..387: mol_type = other DNA
cataactcatggccagcctagacagccaggctaacagagaaaccctgtcttcacaattctcaaagcaactagcagtactacttgatagctatcagtacttccaaggttatcttgattgaacggttaaaaccctaggctcatctttctctaataatgatcaccatttggtgtctgtctccaggcacctgtgctccaaggtcggaacccagagctcccgggcactgagcactgtagatcactggggcgggaggcgcagcccggatcgagtggggccgctgtgccgcagtgtccagagctccgagcccgctgttcggcggccaccaggcgttgtaactcaggcgcttcgctggggtgcgcacgcgcggtggcagcgcaccgtctcctgcc

SEQ ID NO: 42392 - DNA, 570 bp, Mus musculus
  source 1..570: mol_type = other DNA
ccgtctggtcttcataaatacagagggaacagaaaggacttttgttccaactggagccagtatgccttgagcattattaggagcactgactgctctttacagcaaccacatggtagctcacaattctataatgagatctggccttctgacatagagctatatatgcagaacactgtatataataaataaatgaatctttaaaaaaaagataaggattaagaacactaatatttaaagctggaacattatgtgagagcaataaagttcccaatatttttaaaaagaggtttagagtcttcaaattatatattaaagttagattaaatcaacaacgaatacatccaaacggaaacgcgcacgtcttctctcagtccggttaccatggtaaccagtcccggtacaccaaaagtagagctgtgtctctatatccagttccggttggtccggactggctcctccgcaggccgtcccgcttgtctctcgggagagcgccggcttccacggcgaccggcgagcccgctctgtgggagtctccggtgggagggaagcgtttctccggagcacgacttc

SEQ ID NO: 42393 - DNA, 233 bp, Mus musculus
  source 1..233: mol_type = other DNA
ttccctgcagagccaggttagtcctttcaaagcagttctctgcactcaataatgtctacataacacaacaggcccccacacaagaagttcttcgagggttgaagccctcgggagcagtcacggggctcccggcaagcgtctacatggctagaaggctatagcgtgcctcgagggcacaagagcaagttcccccctgcttcagcctgcagcaagaggcaggagacggtgcgctg

SEQ ID NO: 42394 - DNA, 406 bp, Mus musculus
  source 1..406: mol_type = other DNA
caaagttgtatcttaaacctttctttaaaaaaaaaaaaaaaaagaacaggctgtcctgggtaataaaactgctttttacaaacaagtatctttatagaggaaatataattagtcttctgtgacgtttccggtgggttagggacctaggacagcctgcacggggcgggctctgcagccaagggtcaccccctgatcagctttttcttaaagcaaaggcggtcgttccctttggcaccgcctccctgccctcaggctgcagccggtccgactctcgggtcccttagagcggccctggcgcagcgcctgcggcctcgggtgtctccgacgcgtcccccccgcagaggggcacggaaaccctacgttccggtcgcccgtccaagcagccgcttttacgacactgcgcgac

SEQ ID NO: 42395 - DNA, 351 bp, Mus musculus
  source 1..351: mol_type = other DNA
aatcattatgctcacgtgagagcagaacactcgtgtgacaccgagggcatggcagtcgtcctcacagccacagctgcagcgacgcggtacaaagttgtatcttaaacctttctttaaaaaaaaaaaaaaaaagaacaggctgtcctgggtaataaaactgctttttacaaacaagtatctttatagaggaaatataattagtcttctgtgacgtttccggtgggttagggacctaggacagcctgcacggggcgggctctgcagccaagggtcaccccctgatcagctttttcttaaagcaaaggcggtcgttccctttggcaccgcctccctgccctcaggctgcagccg

SEQ ID NO: 42396 - DNA, 598 bp, Mus musculus
  source 1..598: mol_type = other DNA
ctgcccccaggctgcatggactcaggcaacgggtgaagatttgaaaaataaactgaattgtaaaaaagtttttagatgacctaaatatctctactcaggacattttgtttcctacatgtgtagctagcaggggcttggtgccactgtcccgatgctcactcagggctgaaaggcagctctgcagcttcacccgagtccttcgcctcacccgaggcccaggctacggctgccttcccccagccgagcccgcccggcggctcgctctcggggacccaggccagaggaggcgcaggcgcggaaagcggcctgcgggcgggcggaccggggcattccccgctctcgctgggctgggccggcgcccggcggctcgctttcactcccgggaggccttccgttgggccccaggaagtatctagagtgcctcggggggagccgtgggggaaagcgcccccatgtctgtcagcgggctccctgccccgccgcagccccggcgctctcggcggcctcccataccgtgcgccgcagcctcgcgtggcggggtgggagaaaaggtggcggcttccttccgggccggaagtcgtgctccggagaaacgctt

SEQ ID NO: 42397 - DNA, 298 bp, Mus musculus
  source 1..298: mol_type = other DNA
accagacataggctgtgtgggtgtgttaaaacactgcctatttctttactgattcctcaagaaaagaagagcttctagcaggttcaggaatcctggcggaggttgggggagctctagtctccatcctgccagcatctcccaatccttggagagcggggctgagtctacgctgctgagctgccccgccaggtccggaccgcgcccctggcctcattacctctctgcccagagctgtcggcagcgcttgggtcgaagcccagcgctgcctggccgcgtgtgacagcctgggagggaggcg

SEQ ID NO: 42398 - DNA, 318 bp, Mus musculus
  source 1..318: mol_type = other DNA
accaggctggcctctgtgcacttcttagaaataccttctgtattccataatgcacagtaagtatgcaagcagacaaggatgctggagcaaagaggtctttttgccttattaatcattttatttgtttacatttcaaatgctggcactcaaagagtcttaaagacaaggaaataattttctttcaggattgactcacacgatgttgtgaacaagttcatcttagctagggtttctgtcagtcactgtgataaaaacaaacaaacaaagtaatttacccctgtggcaggagccccctagggggtgaaggcgatcgacttt

SEQ ID NO: 42399 - DNA, 333 bp, Mus musculus
  source 1..333: mol_type = other DNA
caaaaaaatatttatgtgaaaaaaaaaggttgacctttgacgtagcccaggctgaaaaccgaagagaaacgctcttcggaaattttctgagcctttgcacacagcctcggagctactgtggacaaccaacctaatagctaggtcaaaggctccagaccttatcacagattgagcctcaaagacttcaatttgtcgaccacgagaccacatcctggagaaagtctcctggcaggactggaatcaattaataaatagtatgtagaacagcccagcccacactattgaaggtcaaaggctgggggagcggagccaaggcttgctagggctggctct

SEQ ID NO: 42400 - DNA, 466 bp, Mus musculus
  source 1..466: mol_type = other DNA
tagaaattattttattataaaaccaattaattagtgaggattgaactcaggtgtcaagcttttacaagagtagcatttattttgtaaaaaagatagaagatccttggtgggtggggtaatcctgtgactcactcctttccccaccctgtgtgtgtgtatgtgcgtgtatgtgcgtgcacacgctcggggacgcccgcctccaaacgcatatgctcaggctggcaagcccgcttgtgtcagcgcggatgtgtgtgtgtgctcacgcgtgtgtgaatgctcgttgcgagcacccgtgcggagcctgcgtgcgcgcccacggcttccccgcactccctggagacccggggctgcctgctagcgcctcttgcctgtgcgcagcgcgcgccctgctgtttctataggaaccagcacagcgccgggcccctccggctgcagcccgcgcgcgagcatgcccagtgcaagccgc

SEQ ID NO: 42401 - DNA, 426 bp, Mus musculus
  source 1..426: mol_type = other DNA
tcaactccttcagcagcagctccagccggcggtcaggggttttattatcccagctcaccgccagatcagggagacggagcctggaatcccaagcagctgctggtgggcccctttgggcctgggcagggactggaatcttcctaggcttagccccagggacataactctttgtggagtcctagaggagagcagagctgatctaaaagacagaaaatgtttcatagaacattaagtttttaagtaatgtgcacagtgcctgagaactaggcctctccttgccctcctgcagagcaggagctcactccaggaccaggaccctcagctgtcctaccaggcccctgcgacagctgaagggtgtgcagaggacactattttgggtggtgtagaccccgcccccactctgactgagccctggctctccctgaa

SEQ ID NO: 42402 - DNA, 436 bp, Mus musculus
  source 1..436: mol_type = other DNA
gtacctctatgaattctatgaattcctggcctgcctcccgagtgccaggaggtatacaccatactcaacctggtaacatattgtctcaggggagaacattgagtgctccgtgccaatcagttagccatctggtttataccagaaagaggattaagtaatacattcagtactacattatatcgtgggaatatgagagcattttcctacatggtctatttcaaaggccgtgcgatacagagagacttcctatggaaactcagagcccttttgtatctcaggtttctttataaatcgaagcttgcagcttcatcaaaaggagtttcaaatccctaaggtgagataactcttgcgaacagtcacttgggaatcattccaccaggtggcttccaaggtccaacctactcggttgaaatctgatcctgacagacttcctggg

SEQ ID NO: 42403 - DNA, 433 bp, Mus musculus
  source 1..433: mol_type = other DNA
ctgtagcaagaccagagaggtgggaggcagcatctgagtcctaccttcgtggcactgtgcggcccgacatgactgctgttgcgactagtagttcagggagagccagggctcagtcagagtgggggcggggtctacaccacccaaaatagtgtcctctgcacacccttcagctgtcgcaggggcctggtaggacagctgagggtcctggtcctggagtgagctcctgctctgcaggagggcaaggagaggcctagttctcaggcactgtgcacattacttaaaaacttaatgttctatgaaacattttctgtcttttagatcagctctgctctcctctaggactccacaaagagttatgtccctggggctaagcctaggaagattccagtccctgcccaggcccaaaggggcccaccagcagctgcttgggatt

SEQ ID NO: 42404 - DNA, 433 bp, Mus musculus
  source 1..433: mol_type = other DNA
cactgtgcggcccgacatgactgcttgcgactagtagttcagggagagccagggctcagtcagagtgggggcggggtctacaccacccaaaatagtgtcctctgcacacccttcagctgtcgcaggggcctggtaggacagctgagggtcctggtcctggagtgagctcctgctctgcaggagggcaaggagaggcctagttctcaggcactgtgcacattacttaaaaacttaatgttctatgaaacattttctgtcttttagatcagctctgctctcctctaggactccacaaagagttatgtccctggggctaagcctaggaagattccagtccctgcccaggcccaaaggggcccaccagcagctgcttgggattccaggctccgtctccctgatctggcggtgagctgggataataaaacccctgacc

SEQ ID NO: 42405 - DNA, 516 bp, Mus musculus
  source 1..516: mol_type = other DNA
ctgtaagttgttctatacacacactaatttttgaaaaataaacttgccttttccttgtaatttatactttaacatctagggttatacgtaaatctttaagacaagattatggttttctacaacctctggaaaaacttggcaagcagttccttttcgtccacagtgcgggaagttgaaataaattcgatcaaagacacctggcaaggtttaaaggcgtgaaatagacgtcttaagaactcaatgcatggttgggttgccaacaatgcagcccagcccagacctcacgcgcatccgcctgagcgcccccaggaggcgccctcgagttccccgcgcgagccacacccttacgctccgggcgggccctcggggcgggctgggactgcaggcgctttaggttctctagcgctaccggatctccctccagagccgcccggtgctggaagccggtagcgcgcgaaattcccctccccgaccaacaggaggcgccggggaagcatggtctcctccggcttacct

SEQ ID NO: 42406 - DNA, 137 bp, Mus musculus
  source 1..137: mol_type = other DNA
gtaaagggtctctgtgaaaggcccctgcaacaagagcttctctttttattacccaagcaactttggaccttggtttccttagcagtaaaggcaagacctccacacactactacactgtagcgttggcaagccggcct

SEQ ID NO: 42407 - DNA, 261 bp, Mus musculus
  source 1..261: mol_type = other DNA
aatgaattcaaagtttttcattttacattttctatattctataatatatttctatattctcagaatagggtctaggctattaaatggttaaaacactcaaagtcaaacataacttttttttttttttaactatcatctgacagcaggccacagtgctatgtatataaaccgtcctgcaagaatggcgaagacgctcagggccgtccgtgttgggccagcagtagctccaaatgtttatcctggtaacaagctgttgatgcg

SEQ ID NO: 42408 - DNA, 551 bp, Mus musculus
  source 1..551: mol_type = other DNA
tgggtacccaggaaccaaggtctggacacacataatatatttcaagatattaaaatgttgtgtttacttaggtcaccaaatcggattagatactttttaaccgtttacaagttcccaaagcgtttgtcaaaaaattctccaaatttagcgctgcagtccgcttggcgggaagggctgccccggcggagagcgcccgccaggcgaccctccaggagactggcccagtgcatcctccgcacggcccaccagggctcgctcttgcgcttctgctggaaggcaggaggagcggggcggggcggacggcgaccccgcccccggccgcgacgccctcctcagccttctcaggcctcgccgcggccggaagcctcgtgcccgcccgacccgcgcaccgcccctccctcccgcccccgacgtcggcgcggctgcggtagccatggtgaccggtggaggcccgcccccgccccctgccccggccccctgacgtcggctcacgtcagcgccggcgcgcgcctggctgggccctgtggggcgggagggagcagcgccggagc

SEQ ID NO: 42409 - DNA, 442 bp, Mus musculus
  source 1..442: mol_type = other DNA
cttatatcaaggagagatagttactttgtgccattccatagggcaagtggaacattttccattaccacctcctcctggagtcctttagggggactcctggaggtctagggaggccagtttacacccgcaccgaactggggtgagtaaaactgggccctaggttgttgtgcttcttggtaaagaaggaaaaaaaaagtttggacagcactgttctgtgtgtgtgtgtgcgcgcgcgcgcgcgtgtagaggctacccagtggctcagggccagccagcaaggagacgatgaatccctgcccttgtttctttcggctggggaaaggatgcaggggtagttcagacctccagttccagcaatgggggcttgattccatcagttcctcggagccggctgcctgagcgcggggcgtggcctgagcgcggggcgtggtctgggcacggg

SEQ ID NO: 42410 - DNA, 301 bp, Mus musculus
  source 1..301: mol_type = other DNA
ccccgggggtataaccatatgatgagagtaactgggtcactggaatggagcctatgagtctgtttcagacacacagtggcagaatgtagccccatactgtatgttcctaggattatgataagctggtactcctaaatccaaatcagcttcagttaagaagcctgagtcccatggtgagaatagtgacccctgggaatcgcatttcccgtccagatcgctcaaggagcgctgatccttgaccagtggctgtcaaggccaagcactctccagccagtgggggccttgggggtgcacacagtgg

SEQ ID NO: 42411 - DNA, 544 bp, Mus musculus
  source 1..544: mol_type = other DNA
tcctttcctttaattaattgagcccagagaggatatacagtattctctgattgcaaactgtatgacacccatttgtattgatccaacagtcttgtagatgccactaattacatgaatatatgccaatcatttcccaagaataaacttgtgtatattttaacattatctttgaaagtaaaagacaatgtttttttccttcagagtcattgttttatgaaggcttaagtgaaaggaaaatgaagtagaaaatgccagattattataaaattaacttatgaaagacatttgtaaataactatcttgtattcagtcttcttgtatttgagaaaagtataatgtatcctacaaaaggtcatttaaacgttcaaatataaataaagagttacaagttttaggaggacatcattaaaaaatcatttattttgcattttgcgcatcttaaatatctaagctatcattgcataaactgtcttgaaatttagactaaatttttttcttcaatgataaaaagtaaaatgatgaaaaaaaagcaacaatagaaaag

SEQ ID NO: 42412 - DNA, 545 bp, Mus musculus
  source 1..545: mol_type = other DNA
ataattttatggtagggggtcaccacaacacaaggactactgctctagtataaggtccttgagaaccaccaggcaatgcctgtggaagatgcctagttctaaccttgtttagaataggagacaaaggaaatgctgaaatacctaaattctgttttctttacattttttgttccaaaggaacttgtagtataatacaccaaaaagattttcagtgaagaagtttgattagaagtggttctccgtgtacagactttttaggcagcttacaagcacacacatttgtttataaatttaaaaagtgatctacatgtatttaaatggtatgagattttatttctatttgcaaatgaaaataacttcccaaaattttaactatgtttgaaaagtgtccagcttttaaaaatctaagtaatatggtctaagtaatataaatacagtagcaactgggcaatatggaatttttcatataacacactatattcatgaagaatctgcattggggatgcaaattggagatttgcatttaatcaaatctgaagcaagtg

SEQ ID NO: 42413 - DNA, 554 bp, Mus musculus
  source 1..554: mol_type = other DNA
agtaatgactgctcttaaccactgcttttctgactgctctgctgaaaagctggataaacaggacagtaaccgagatgtggtttctgctacgctcgcaataccatagtataccggaaagatcaatgaactctcagctttctactttgcgaatgtatttgagaacacacatgtaaacacaactacaaagcttccataggaagaataggatcattctttgcaacgggagtcattcacaaagcaaagtgtctttctggttgagatctggaatactctagcttctgctggaggtctccctcaggccaagtctgaaatgcctctagtcagtagacacactgccttactgtttgaaagtacagtacccgctttcgcaaactcagaatctccctgggcggctctctgcaaagagcggcccggagtccagagcactagacgttgggggcgggccagcccaaggggctgccttcccccgcagtgacgtcccagggggtggatgggcaaccaacgactcagagccctcccggactccgcccagtgcggggtctgtggatccttgg

SEQ ID NO: 42414 - DNA, 479 bp, Mus musculus
  source 1..479: mol_type = other DNA
ccaggggcacttggatccgactctggatccagagaggacgcgatcccgctgtgtcgggtccctctgggtgactgccccccagagcagaggcccagaggaccttgtgagcccagaagcggcggcgcgggggagctagaggctcacggtgagccctggactggagcaggacgcacccggcagggaactgggctggggctggtcccgcgtggaccccgaggcgcgcccgcgctgcctgcagatcccattccttagggatcctaactccctcgctggtggcctggcactgtctccaaacgcctaggccaggggccactgtgctcctcgggtgggagtcacactgggcttctaagtcctgccgggaccccaggcggtcaccggtccctcccagccgtgggctctcccaggtctcccggcccagctctgccggctcaggggcggccccttccggagggctgcctctaggcgactgcgcggtccta

SEQ ID NO: 42415 - DNA, 531 bp, Mus musculus
  source 1..531: mol_type = other DNA
ttcttttttccttgtcacaaaaataagcagtgaactgccctttgattattatttagtccaaaaaagagggagggtcagaatgcagggtccctgcagcttgctgcctgcgtgcagacatgcaaggttgcttgtccatgctcaacagctctgggttaccctgacaggcttagctagcaagcggtgggggtggggtcccttccgcagtccgcgaaagcgaggctaggctggcggcccctgcaccaccttcgagcgagccgcgctcgctgaggctcccgcgctgcagctgcgcgggaagggacgctggcgggagcgagcggacaggcgcgcggagctgcaccggaggcagtggtgcgtggtgcacggcgcgtggcgcgcggcagcgaaagcttcgtacccgcggaggcacctcgcaaggttagtggcttcggtagcgccaagcgctgagagctcgctcccggcagtgtgcacgggcggcgcggggagggccggggcgggccggggcggggctacgtggacgggcggccgcccgga

SEQ ID NO: 42416 - DNA, 378 bp, Mus musculus
  source 1..378: mol_type = other DNA
aaagatttccaaaataagttaattaaatggatacatttgttgtctttagaaactgtaactttgtgtttagggtcactgacctgggtcagatccaccacccatatgtgtgttagctgcctgtcagctttcgactatcttataaactttctatgaatatagattatgttagaaaaacatattttgcatgttaaccatcagctcctgtccttcttctgaggctcaggctgtatacacgcctgaggcagagctctgttccccaccagtgctccaagcactgtgggagagaggtacgcactttcagaaatgctatggcttaaacaagggcgtgtctgccccttctgagaagggctcccttgagttagagcccttataaaagag

SEQ ID NO: 42417 - DNA, 550 bp, Mus musculus
  source 1..550: mol_type = other DNA
aagtggcaccaagtgttactctaaatcccagctctctctctctagcgagtggatacagtgagactatggtcagactggtaactttttccaagtctagaataatttaaaaacactgcaaaatttaaaaccaaccagcctttctagctggttaaaaacctgcacctggagcggctgccgaggggatcccccctcctcccgggaacagctccacctcgggggcgctggaaacgccctccgtgagttccctggcaccagcgggagtttcaagtttccactcgcggggcgggggcaggcggcgggcgcgcggcgagcttcgggccgcgcggctccgcttcgtctgcgggcttcggactcgggctggcccgcggcgtcctcgtcccgcggggaaagcttcgcgaaggccccgcagcgcgtcccggctgaggcccactcgattccgcccggggcggccgggagacacgctcgcggggttggcgctcgagccccggcctcgccccgccactggcggcccgcgggaggagggggcgcagggcggccccgccttcccccc

SEQ ID NO: 42418 - DNA, 437 bp, Mus musculus
  source 1..437: mol_type = other DNA
actggagttacagagagttgtgagcagctctatggtttctgagtcttgacctagctacgtctccagcctcagcttgaatatttaaaccttatcagccctgagtgtgagcttatccgcagtcatggaaactcttatatccaaggtcacaacgtgcgcgttttaaaagtcggctttcaatagttactcatttaagaaaagtttcctgttaacttctcaggattttatttcagcagccctaaatagcaaattattgattatgagatagtttatgcttttacctatgcatgtctctcttcataaaaatgcctattggcattttaaaactttctttgttaaaggcaaagctcctaggtgaactcttaaccagatccctggaacagtgctcggccccgccccgcgaaggcgtggcagcggcgaggcggggcgcagccgcgggt

SEQ ID NO: 42419 - DNA, 406 bp, Mus musculus
  source 1..406: mol_type = other DNA
ctaaagacttctgagattaacctcagagtccctggaagagctactgtctcaggaaaggcaagtctaaggcttccctaaagatggtacaagtggcaccaagtgttactctaaatcccagctctctctctctagcgagtggatacagtgagactatggtcagactggtaactttttccaagtctagaataatttaaaaacactgcaaaatttaaaaccaaccagcctttctagctggttaaaaacctgcacctggagcggctgccgaggggatcccccctcctcccgggaacagctccacctcgggggcgctggaaacgccctccgtgagttccctggcaccagcgggagtttcaagtttccactcgcggggcgggggcaggcggcgggcgcgcggcgagcttcgggc

SEQ ID NO: 42420 - DNA, 330 bp, Mus musculus
  source 1..330: mol_type = other DNA
aagcatactctattttgaagatggttactataatagaatacactatttctgtttctgaaataagatttttttgcaggctgctaagagcctttttaggagatgtaaacatttaactgcatatttaggttcctgattctgattctgtcacacctagtataagcagtttatgcttagaaaagtgtacccccaggggagaagattctcctggagcaaaactgtagaagcctgcttcttcctaggcaaagggatgggggtgggtttgctcctcccagccccaaagctggagccctggcggtggctgcctgacgtcaccggcctctctggcgagct

SEQ ID NO: 42421 - DNA, 493 bp, Mus musculus
  source 1..493: mol_type = other DNA
atattgtcacagtttcaaaactttggagtttcaaaagtccatgccaggcacagtgtcgctgttcatgcgtgcgtacgtgcgtgtgcgtgcgcacgcaggtgtgtgtgggatcaggatgcagctcttaggtactgctccagtgccctttctaatagttcagtgactaacacagtaatcatatctatgtaactttttgttaattgaaaagtttgctttaaagcattttgagtcaacacggtggcatttaactgaaattagagtattcaggaggcaggtgaattcttataaattcagtctgatctacaaagtaactacgacctacatactctataacgtatcgcgaatgttacttgaatccagagtaaatgaaaagcagtactttacgctgagtatggtttccggaagcggaagcagtggagcacgcccagttcctccgtgcacgggcgtcttacccactctccccagcttgggggcgggttcccggacttgcgcg

SEQ ID NO: 42422 - DNA, 241 bp, Mus musculus
  source 1..241: mol_type = other DNA
gaattcctcacagggaagctattcctcttgttccactgtggcactggaaaacctgggacacagacagccagtctatatacatatatagagagccacaaggcaaggtggcttggctttggaaggatcctttctccagactggcaaacgcggtacacgagccagtcggggtccgggcgcgcgcccggcccgcccggggcggctctagccagaggcccgccctcgggtgtcccctcggcccggc

SEQ ID NO: 42423 - DNA, 401 bp, Mus musculus
  source 1..401: mol_type = other DNA
gcaaaagcaaccattctttatagttttgactgtttttcctttagaggagtgaaacccagtttggtttatttatcatgaaaagatggtatttgtgcataccccaccggacaaattgtttttatgtagagaaacaagttttctggaaagacatttatcttaaaaaaaaaacatgtatgcacatccttggaaatacctgacttcactatgtcatggaataattggctttctaggaaaagcttttcaaagtctgagaatgactttctatgagacaaagtttggcaaataattcaatttccaaagctctgagccaaagcctgagataaagttctcaatcattgaaagacaggattagtaagccggtggggggtgggaagagacgctgcaaagtccgccccgccccc

SEQ ID NO: 42424 - DNA, 442 bp, Mus musculus
  source 1..442: mol_type = other DNA
aaaggctgggcggccggggaagcgggggtccccccgccttttcctttatcagtcccggctcttgacaagggaaagggtaggggacacgcctcgtgtcccagcgggcctggctgtgcctcggaatccaggccccaggtggctgcccccatcgcgcagcaggaggagaaggtcccaaggcgccgagggaccgagcctctccgctcacggcgacagccccggcgccgccgcatctcccggttccactggaggtgctgaacccgcggcgaaaggcgccgaaatgaaacccgcctccgttctcctcggaaccgtcgtcatttccgtcggctgtgggagcgtcggcccctgggcggcgagggcaatcgccattggtgcgcactgcgcaggcgcgtttcctcatgatgcctacgcgcaagcgcagtcgtgcggcggcgcatgccgactt

SEQ ID NO: 42425 - DNA, 385 bp, Mus musculus
  source 1..385: mol_type = other DNA
tgactcccagcttcatgctcccaggaataagacttagactcaaaatatatttacaaataccttggccataaagccagggttttctctgactataatcgacataaatgatgcatccatacaacctgtttatggaaactgtgataattttgaaggtcttgacattcactttagtatgtaaggaaaatattttcctagaagttcatcttcctcacaaattatgttccatgcaagaacatagattacattgttacactctgacattgaggtaatgtattcaacattcaagtcaataaagcatgcattaaatatgcagttaaacttcagcctctgcctctatggcactgagactggaagagagcgagggagctattaagtcatttccgac

SEQ ID NO: 42426 - DNA, 271 bp, Mus musculus
  source 1..271: mol_type = other DNA
aatacgagactgtgattcttaaatataaataaacgctctgagactaaagtatgagatttaaaaaatctagactgcagaagaagagaattttccaagtcggcatgcgccgccgcacgactgcgcttgcgcgtaggcatcatgaggaaacgcgcctgcgcagtgcgcaccaatggcgattgccctcgccgcccaggggccgacgctcccacagccgacggaaatgacgacggttccgaggagaacggaggcgggtttcatttcggcgcctttc

SEQ ID NO: 42427 - DNA, 530 bp, Mus musculus
  source 1..530: mol_type = other DNA
aagtaaattgttcaatttgtatgttgtgccttttgttttacatcaaggaaaattaatgtcacagcatagtgctttgaaagatctctgtgagctcaagaccatcctggtctacatagtgaattccaggatagccagagctacacacaaatgtgagaattatcatgtaatatcagttaatgcactgtttctgagacagggtcaggctggcgtcgaactcatagagatccacacccagcctgcggggagtctttgaaagttgatgtaatcttattattactcagtgaagtttagatagtaatatgtattttacttagcatcctacagaaaaacaacttcaacattcttttaacgtaagaaattggtttatttgtattataaatgaatataatgggaattgctggaaacatttaccaacatcctttgtctgggtaatacagtcacctgatcagtcagtcctcgggccaagcgccaggccccgccctctggctacgggccaatcgccgccaagcgcagcgatcttttggaggaga

SEQ ID NO: 42428 - DNA, 510 bp, Mus musculus
  source 1..510: mol_type = other DNA
atagaaagtcttctttaaacatatcaggcataatatatgaaataaaatccttcagactgaaagtctgcttttctaagtagcaccccaggttatattaatataaagaataacgtttgagaaacttttagtttcaaagaaacaaatttgataccaggtggtggtttcccacacctttaacacttgggaggtacagatggcgtttcagtacagccaattaggttgcataatgcataaatactatagggtgctctaggatatgtcttaaggaacccaagattaacaatcacttcttgaacaagcagggtttttttttttgtttataggaataacagtacattaattgacttctctcagtcagcatttcctgaggcctgagctctgaatagccattccgatctggggcgagcgcgtgagggctgcgccggctccagccagcagagggcgcgctcgcaccctccgcgcgggcctcgggacccagtggcttgctgtcgcctgggttgctcccgagca

SEQ ID NO: 42429 - DNA, 230 bp, Mus musculus
  source 1..230: mol_type = other DNA
agtgggccaccaacatttaaattacggagcttctcaacattttaagtttttcccagaactagttctgcaaatttgttttcttcagagactagggtctgagagaaaatgactctcacttcctgcactagaatacgctaagccgcgcccctctagttagaggccctacagctggggcccggccccctgcccgacgcagctgccgcggccccgcccctccttccccagagggc

SEQ ID NO: 42430 - DNA, 339 bp, Mus musculus
  source 1..339: mol_type = other DNA
ggtctagggttcgaatcctagtacccacacagtggcttacaattgtctgggactggcaaaggaaataaaaatgatatatcctagatatttctatctagtctaggttttactgctatgctagtttaactgacaaggatacaagctggcgaattctccacatgggtgatgacgtgaaatcacattttcatagcttcacatgtcgagtagtgaagatagctattcttgctttatgatgttctgaacatatgattgagacatttataaagaggtaatgttcatttaaattggcagccaaaggagcagagcatgtctcaccagtgacatcacagtgattgtcac

SEQ ID NO: 42431 - DNA, 436 bp, Mus musculus
  source 1..436: mol_type = other DNA
aatctcctggcactagagttacagacagttgacgtgggtgtaagaactatagccctctgaaacagcagttttaaaggttttgttcatgatgaaaccaatcatttatttacctcacagatgttttgatttgaaacattattctaacagatatcattaaagacaggaactccgttccctacatcattttttttgccagttggcattgtaaatatttacagtgtaaatcagtcattgaagtgagcatatttattgtataaatatatatttccccttttcacttaaagcagagagatagtctattcagaatttgaaagacacattttctaaaaaattgtataatgtagtagacccttaccttgacatctaccttttaaatgtaatatctttatttattctttgagaattttatataattaaacaatgaattttcatgagg

SEQ ID NO: 42432 - DNA, 439 bp, Mus musculus
  source 1..439: mol_type = other DNA
gctcaggctaaccgagaactcagactactctaggctagcctcgagcttaaggcaatggagctaccagctagttaaaaacctggtttttcttagtgtcttctagtccctttatccacttttgtctgcttggtctccttcaggaaaaaaaaatgccttgcttctgtcagcaagaaccatccaagcatcagaaggcgtggcccgggtcaaggccaggattcatcgttcttttgaaaggaaaagaaaccacagcttgtcttcagttcttttagcaccagctcgctgcctgtacaggcatcctgaaccagccaagatcacctcttatcagattacctatagtttgctgatttcaaacaaggaaccttggagttctgctgagaatttgcagtatgcctaggcaatatcctgagttccaggctccacccacatggaggtgggggag

SEQ ID NO: 42433 - DNA, 319 bp, Mus musculus
  source 1..319: mol_type = other DNA
cattgttccgtgcctgcacaactctactatgtgacagcagcgtgtccagatgatctctgacagcgttgtgttgttcggaaactcttatctatgaagacgttctacataaaacgatatctataatttatcccattatacttaaacttgtaatgagctggctctttgacaacttcacctgacctgtccaagtcacaaccctggacttctttaggggtggtcgactctgactcctgcacagttaaactaggccactgcggccaagtgcgcagtggcgcgggggcctgagctcactcctccccgccgcgcccgcgccccgggg

SEQ ID NO: 42434 - DNA, 264 bp, Mus musculus
  source 1..264: mol_type = other DNA
aggctcctgtagctgccctccacggggcttacaggcacctgtaggggccatgcagggctctctaggcaaaacttggcttggcagcttgattggcagggcgggtccagccttccaggccaaatcaggctgggcgctcacccgacaggctggctgcttgcaccaggctcccagaccagggctctgggtgtagaggaacctggtcccagccaggagcactggcgcacccggactctaccctcgcgtgcaggcactggcgggcggcgg

SEQ ID NO: 42435 - DNA, 277 bp, Mus musculus
  source 1..277: mol_type = other DNA
gtgtctgatgacagtgacagtgtgtacttacataaaataaataaatctttttaaaaaattatttagaaagaaagaaacagggctgggccatcttctgaatagtataaaatcttctctgaaaaataaatgagtaaataattaaaggatttaaagctaaaatagaaattattacattagtaaatagatgatgctcctgaagaacaagatcaagctgttcctagagcacccccagctccttgaggaacatcatagatgctcgtgaggctctgatactcag

SEQ ID NO: 42436 - DNA, 262 bp, Mus musculus
  source 1..262: mol_type = other DNA
tcaggctgaagcgggagtggcttcaagaccagtttggctgttgcaaaaccctggctttgatctccaacaggggatcatgccactcccagatgtctggcattggccgctggctttggaaccagacctagtaagccaagtgggcagcctgggcctgggcctgggcccaagcagcagacctcggaatctagaaacttctcaggctttaagaattcctgtgtctggaccctggcaatgcccacgggcaggggcggtcggctcctct

SEQ ID NO: 42437 - DNA, 442 bp, Mus musculus
  source 1..442: mol_type = other DNA
aacttccagttttggcagcccatgatggacttgcctcccagcggagccaccaggagcctttgactcaggtgctagtagccttccttgtgggccactcctgagccaaggagggtattggttaacctcgttactttccttaaggtcttgaaccaactgagtagtgtaacctattgttaccagagcccattcctctgctgaggttttttaaaaagttattttagccaggaccgacccggggtgccagtcagtgtgctggttggaacgggaggcgcactccaggcggccctatgaggccaccgcttggccacctcagtgtgctgcagcagcatagactgagcaggcctctgtctccagggagaagtcacctctcgggccccgcggctgcgctccgccccaatccggcccccgcccccgcctaggcccgccccgcccccggccccgc

SEQ ID NO: 42438 - DNA, 389 bp, Mus musculus
  source 1..389: mol_type = other DNA
gacagggactcattactctatgtcagcatcccttaaaggctgtaagatgctgcatactttaaagtaggaccttctgaggtcagcggtactgaccaggccggccccctggccccgcccctggaggtctgggccccgggctcccagggaactcccgcaggtctgcgcgcgcaaccggcacagagggtccgcgcgtcgcggcgcgcgcagttgtcctggagacggtggcgcgcgcacgcgcacgcgcggcgccgagagcgtggcttcccgtgtgagtgcctgcgcgccgcgtccccgcgccgggcgcgcgccggcctctccctggcgcgcggcgtgacggcctcgcacgcgccccgcttgcgcgctctccggcgccgcccccgcctcgcacg

SEQ ID NO: 42439 - DNA, 366 bp, Mus musculus
  source 1..366: mol_type = other DNA
ttgctaaaaacttcagattgtacatttacatcaagtactttttaaaagatttgtctattttaaagaaggtactggatcctctacatctggagttacagactgcagactaataaatgctttttattcagtaaagctattaaaaaaaaataaaaagaggccagatctcttcagggtagctgaggctacagtccctgtacctgtccggggttcaaacccagtacataatcagtttgaagctccatgatactgtctattggcgggtcgcagctgggcccgctccgcgctagcggcagctgtgcagcggggtccggagcccgagctaggggcggggccacacggagcctcggggcggggccgtgaggggcg

SEQ ID NO: 42440 - DNA, 474 bp, Mus musculus
  source 1..474: mol_type = other DNA
atttcaggcctctggcctccagaaggatgagagaatgcatctctaagccattttactttgttttaattatggaagtcacaggaatgaatataggatctctctggtattcagagaaaagaggctttcctccttaaactaaaggggcaaacccttccccaaatggccccattttggggtctatgagctatacagtagtcctctttattggaaattccactttcttgtcctcactgtgtccagtacaggatctagagccagggactggggcaggctacacacgctgaagctggactttggggccagcagccatctcaggctcagccaaagtgtccctttaaagacagtaaagaggttttctgagggcctagaagtcctaagcccattggcggccaatttgcataaaaatgaaggctggcttcattgaaattctcctcatcttgaatgcagcgtcctgagcaatttactgcctaggaa

SEQ ID NO: 42441 - DNA, 408 bp, Mus musculus
  source 1..408: mol_type = other DNA
cataattattcagtcactgaagagcacacgaataattcaatgtccaaattgaaacagcactctgacaggcctggtatgcaggcctgtcactctagagatacctgcctatgctacagctaggcaatttattgagaacttgtttctaaataaataaatagagcaggagcatgcttgcctagcataggcaactttatgcgctattaaaaaaaaatatagtgtgcacacgtgcacacaacttttaacaatattaaaatgtggcactttaaaaattacagagctaggttgttttagaaaacctttattgtaatggagaagctttctgaagcctgttagcagcaggctgcacgccaaggcagcaggggggcgctctgccggtcccgcccgcatcccaggagaggccccgccccc

SEQ ID NO: 42442 - DNA, 410 bp, Mus musculus
  source 1..410: mol_type = other DNA
acccgtggcaggttctatgtgtgtacactccttagtggagctctctttcttgctaggccttcccagtaggactgcagagctctgcttgttccgtcccttaggcaacaacaaagggacttggtacctccgtgcctccatgcccgggataagcaagggtaggggctgggcctttcccgccactcgggtggaaagaaagtggcttccatgcctatggccttactactaacagatattttcaaacatctcctaccacccagtttaaaacagaatgtgggcggcgtcttagggcggggagtcgggctcacccctcgtgggccaccccccgcccctcgtgcacgcagggcaggggcgggacttgagggcggggccccagaagggggggggcgctaccctagcgactcaaggcgctt

SEQ ID NO: 42443 - DNA, 439 bp, Mus musculus
  source 1..439: mol_type = other DNA
gcctggtcttgtaggcttcccactccgatcactgctcatccttgaaagacttggaaataatgtcactgttcacaggtgatagacgtcatcactgctcacagctgggaaacgtctagagaggccagtgtccaaactcaggccacggggccacaccccgaggcagaggccgggtggggtccgcgcgtccgctgacctcccaagggttcgcgcacacgaggccctcctgcaggccatcggatccgaggggacggcctcggggcggcgtgacgtggcggcagtcagaactggagctccggggagtcggacggccacgggtgagcgcgcgcgcccggccggaggaccgagccccggagccgccggaacctccgcgaacgttctgggcctatgtggcgtcacgcctcctggcggaaccttccgccggcgccgaataaaagccggc

SEQ ID NO: 42444 - DNA, 270 bp, Mus musculus
  source 1..270: mol_type = other DNA
aatctggtgcaaagctcatgtcacgagagctaatacagtttgtcttagcaaacatactaaacaaacagtacatagaaggttgaagttataggaaagtatggacattttaattcattcaattagtcgattctcacggtatacttttgggcccacaagaaagtaacgacagaggctgcgcagagacccgcctacccgctccgaggatctcgcgagagttagccggcaaatcccgcgagcgcggaccccgggccagctctgcggctctcgcgg

SEQ ID NO: 42445 - DNA, 238 bp, Mus musculus
  source 1..238: mol_type = other DNA
tgtacaggactctcttagctggaggaaggcatccagccaagctcagagagggaccgatccttgtagtgaaccaggatctatgaagatggccttcaggatactctcttctaaaggcaagatgctatctctcctggcagcttgctgacagacttgtgctccaagtcgctgccacagatctctgactgtcggcggggctcgcagcggcggcgggtccggccccacctcctgcaccgcaacc

SEQ ID NO: 42446 - DNA, 457 bp, Mus musculus
  source 1..457: mol_type = other DNA
caaaactctttttaaaatgatcacttttattgaagtataaattcactcattgtgcactggacaataccatgaattttagtatgttcatcaccatgaaaccatcaaggaagccttcatgggctaagccatccctggtggatgggtccgacacatgggtttgcagctgattccaactttacttataaaagtatttatttactctgctggagcactctactgctgagcatggggatactttaagagtggcacatgtgagctgagaaagccagggccagaaatttgaccctttcttcctgccatggtgacaatgcctgtagcctagaggtttcaagagtccagggaggctctgggcgaggcatcgaggcatcgacgcagaagaccgtggcccgacgcccctcccacgacggacgcagctcctgccttggccagcctccccgccctgcggctgctagcagcg

SEQ ID NO: 42447 - DNA, 352 bp, Mus musculus
  source 1..352: mol_type = other DNA
agagagattaaattcctattgcaaatattgctaatttctgtttgaaattaaatatatgctgcattgtatggatatccctggctggcttggaatttacagggcaaaccaggtcctgagtacaggtgcctacacagaaaagaaggagaaatggatgaagagaagtctttttttcgttttttttacagggtttctctgtgtacccctggcttcttaaacttagaacaaaagtttctatacagttgctactctgaggaatctggttccactctaagccgaggttgtgcttctgcacagtccacgtgggcagactgagcccgccccagcactgggagaacttccgccccctcgcagt

SEQ ID NO: 42448 - DNA, 321 bp, Mus musculus
  source 1..321: mol_type = other DNA
cagcatcctgtcgaggactgggggggtctgctagttccactttatgtgaaaggaccgtgccaacatgtcagattatagcaagaactggacttctgcaaggctaatgtatgcttctttcagccacttaaactgccttgggtaagccaggctaagattaagatgggtgagggggacgcagcctgccctctcagacccagtgccacgcactacccggctcctgagtgtgagaaagtctcggtgggtgggtgggacccacagcagcttcccaggtggggagcacaggctccatcgggtcctagtgccgccgggcacagagagact

SEQ ID NO: 42449 - DNA, 370 bp, Mus musculus
  source 1..370: mol_type = other DNA
gtatacttggacccagggggaaaaggtcttaaatgacttttgcctttaagattctttgcaacccggtctcacttaaacagattagtgccaactccataattttctgtgaaaaatctggcactctgccactgaagtttaaagataatttgcctgaatctcttcaaccaaatgaagcgttctaatcaatatgacttgaatgaatgtcagagctgtcagtcacagttgtccttcaggtccagtttatccatctcatttacaaggaagagaaagtcttcgcacctgtcacaattcttgcggaagggggctgcgggccataggggcggggctaagcgccgcggctccgccctcgagctccgcgggccttccaccg

SEQ ID NO: 42450 - DNA, 476 bp, Mus musculus
  source 1..476: mol_type = other DNA
atttgtgaacgaacctaggttattccagaattaaatgagatatggtatctacatggttacttagtctgacacatttagcgcgagcacataaatgtttacgtgaaagattacacctctcatctccccatcccggccgcgcccaggccaggtgagtgggtggccggtggacaaccacgcggaggagcaacctccaggggcccgcgcgtttcctacccgagccgacgtggccggcgcgataggccgcgcacgtgtctggccagaggccccggtgcagcgcagaggcgcgcaggggagctcaggttcatcctcgtgcggtgccgccggcccaaatcctcggggcgagcggcgggtgctgggcgcggagccccggtgggggcggtcgggagcgcgcgcggagctcgcgggcgcgcgccggggcgggggcagccctctcccaggcggcggtgggggcggcgtcgctgttgcccttttaagcc

SEQ ID NO: 42451 - DNA, 872 bp, Mus musculus
  source 1..872: mol_type = other DNA
gccgacgtggccggcgcgataggccgcgcacgtgtctggccagaggccccggtgcagcgcagaggcgcgcaggggagctcaggttcatcctcgtgcggtgccgccggcccaaatcctcggggcgagcggcgggtgctgggcgcggagccccggtgggggcggtcgggagcgcgcgcggagctcgcgggcgcgcgccggggcgggggcagccctctcccaggcggcggtgggggcggcgtcgctgttgcccttttaagccgcggggccaccgcctcctgcgggtggagtcggttacaaaggcagcagccggcccggctcccgcacgctcgctcgctccctcgctcgcacgcccgcccgccgaggcctcgcgctcctcgccattttccagccgcgctcggacgcgggtcgcggcggcggggagaggcggagccgcgagagcgcggcccgggccggccccgcggggcggtcgcggccgtgacggcggctcccggccccggctccctttcctcacccctcccgctggagatgaggggaagatgaagttcctggcgtccatcttcgacaagcagctggaagctggacgagctgcactgccagttcctggtgccgccgccgccaccaccgccgggcagctcgctttcgccgccgccgccgccactgcaacatcacggtgaggcgccgggtcgtagcccctcggggccgggcgggggcggacctgggcgccgcagtcccgggacaaagggcgcctgcccgggagacccccggtgtcccgggcacggccggttggcggctgggccctgggcccggccgggagctcgggctgcctggtcgggaggaggcgcgtcgcagcacggcgcgggccggctttgctc

SEQ ID NO: 42452 - DNA, 377 bp, Mus musculus
  source 1..377: mol_type = other DNA
cagaaacagttgttttttctgaaggttgccttagctgaggaaatgttcagaagtcctcctcagggctcctggagagcccagagccacctacttaagtcttaaggttttccagcttgctagatgcaaacatgcatcatgctcaaaatgttctaatgggttatcacagtgtaaaagatcctgctttctgtagcaattaatagtgccaaagaatggcgagtgctatttatgtctactcgcttaaaacttaagacctaacgagttaaccagattgaccaaatagtgtttgcagccggcttaaacgccaggctgcctccggtcccttccgggcggaactgtgcaggccggtgcaccgccgcagcggcgtgtccagtaccgga

SEQ ID NO: 42453 - DNA, 484 bp, Mus musculus
  source 1..484: mol_type = other DNA
aacttatgtacatatgtatatatacacatatattatgcatatatgtgctaactatatctatagaatttcatttgatgtgggagataatatgagcaatgaaaataaatccacacacacacacacacacacatatatatatatgtatatatatatatacacacacacacacatatttgtttgaattgtgatttttggaaaataaaaccatctaaatgcttagtatacttttatctaaaggggaaacccatatttcatttaaacagatttacatgttaacattttaaaacatgacttttagaacttaacttttcttcttaccaggcgcgcttaagagagctgtgtcacaggtctcctgagaacagttcaagtcattatttgtatattttacttactctataagagaaattattttgtaaactctgtggtgcattagtttcacaccaatcagttaccaattatttcataactttgaaacaatccgatt

SEQ ID NO: 42454 - DNA, 530 bp, Mus musculus
  source 1..530: mol_type = other DNA
ctacttaagtcttaaggttttccagcttgctagatgcaaacatgcatcatgctcaaaatgttctaatgggttatcacagtgtaaaagatcctgctttctgtagcaattaatagtgccaaagaatggcgagtgctatttatgtctactcgcttaaaacttaagacctaacgagttaaccagattgaccaaatagtgtttgcagccggcttaaacgccaggctgcctccggtcccttccgggcggaactgtgcaggccggtgcaccgccgcagcggcgtgtccagtaccggaagcggcccaccggaagtggcgcgcgcctgctcagggagctgggtggtgcgccggccgctccggtacccctgagactctgtagggccttcgggccggggagccggcaggcggcggtggcggcgtctcctcctccacagatccgcgaagcacctacgtgctgagtaaccggccaaagcgctgcttcgggtagccgggggaggagaccttcgtcccggagggtggcggggtcgcctctgccgg

SEQ ID NO: 42455 - DNA, 516 bp, Mus musculus
  source 1..516: mol_type = other DNA
aagctttcaattctaatttctaccgttgaaccccaaagtcactcaggaactttgtgccctagagaaagaagggtttccgatctttaaagtatctaaaagcggctatttttaaaaaactgtttttaaaaactgttcacagcagtaagctttggggcaatgccttcaaaggctccttgacactgcgcgccgctactcacagcacagtgtgtgaaaacgcacccagggcggtaccgtgggaccgcaggcgcccgcccgccctcggccgcaccagcgctcctgccccctgtcacccgcgccacgaggcccgcttgcccttcgccgggggtgactgcccacacgcggcccccgctggtcgcagtttcctagacagccgcgcggcccctctgcagcctccggaacgcgcgagcgggagcgggagcgggcagcgagagcgcaggcgcgggcccgggagagccgccgtcccgaaagcgcgtgcgcgcgcgctcgagcggggtgggcggagagccccgggagcgg

SEQ ID NO: 42456 - DNA, 141 bp, Mus musculus
  source 1..141: mol_type = other DNA
tctgccagacctagcagattagaatccatactgctctgtaaagtctgactgaggctgaagagagcgatgaccacatctggtcattgtgtttgcgctttttctgcacaaatatgaggaagaagcttcagggatagctaaagc

SEQ ID NO: 42457 - DNA, 170 bp, Mus musculus
  source 1..170: mol_type = other DNA
ctcaggaagtagcaaataaattatttatattatttattaataactttttgttttgtggagggcgtggcgcgcatgccagcgtctcggcgcacacgtggctgcccaatgggctcccgggaagcgcgagcccccgcagtccaggactaagctgtcagctctcgtgctcgtcg

SEQ ID NO: 42458 - DNA, 308 bp, Mus musculus
  source 1..308: mol_type = other DNA
gacggtaaattaccccgtgtaacccaaaatcagagagttcgtaaaaatcttttactgtatgagtgacacatcacagcactgtttttaggctctggtgggaaagtccgcataggaggaatttttaatttaaaaattataaaagaaaaacacttttattgccttgctaggcacggcgctgcggcagagcccgcggggtggcaagccccagggcggtgggagagctgggtgacgctacaggtcccgcctccagctcgggccccgggcgagtgcgtgctgacgtctgcgggccggtgcggaatcgctccttc

SEQ ID NO: 42459 - DNA, 365 bp, Mus musculus
  source 1..365: mol_type = other DNA
tattaccaatagtgcttatcatataacttacaatttttattatttgtgtttcctcaaacatttcctccctccaggatttctttttttgtcaaacaacttgggttttctaagacctctcttaccctcttaagggtgaggcagatgttcccacaacttccaagcctggcaccgacatttgaaacattcgtcggtacagaggaaactcttacctttctacttgagcgcgcaagaagtgagcctagctgcgcctgcgcgaatggcccaggacggcctagggggagtggctgggcttcggctggcgtcacgtggtgcgccgtccatccgccccgcccggtcctccgcggccgccccgccccaccccgccc

SEQ ID NO: 42460 - DNA, 424 bp, Mus musculus
  source 1..424: mol_type = other DNA
tggcctagttggccatcattgggaagacccctcccacatttgaaatgtaaatgaagaaaatatctaataaaaaaaattccagtctggcccaagaaatttttgtacctgctctcaatcccctcaaaaaaaaaaaaaaaaaagtccttttctatttttctatacaaggatgaaattacattatttaattcgtgttttacaactatttaaatgtctcctttaaaaaaaaacagaaaagaaaaaaatgttgcctattttataaaagcgtaatactttaaccaggtcatatgaattgaacatcagatgcaaacatttggctgcaattacatataatactgtgctgttttgcacggtgaaggggcccgcaggggtcccgtggccccagcagctggctcgcctggcctccgcccccgcggccatataaggc

SEQ ID NO: 42461 - DNA, 332 bp, Mus musculus
  source 1..332: mol_type = other DNA
taaaaattagaaatgaatctctttttaaaagatgctcattagctcaagcccgggattctagagagaagggcttccagcagcaggcctgctgtgcttcttccacacttgggaactcagctgtctgatcaacccagttggtccccccgggctcaggactccagaggcctcttctgctgagtgggcaaaccctgtctggaaagggttccccaggacctgcgagcctgagtctccagactccgcacggggtcaaggacccgtgcctcatcacaggtaggacctagtctacctcgttactgtgcaggagaaactcagcagctcaacttccctgcgcc

SEQ ID NO: 42462 - DNA, 355 bp, Mus musculus
  source 1..355: mol_type = other DNA
cccgggctcaggactccagaggcctcttctgctgagtgggcaaaccctgtctggaaagggttccccaggacctgcgagcctgagtctccagactccgcacggggtcaaggacccgtgcctcatcacaggtaggacctagtctacctcgttactgtgcaggagaaactcagcagctcaacttccctgcgcctgccctgggggaggttgcacaaaccttcctgtgccggcctcaggctgcctgcctgcctgcctggccacctgggctgcctgccctgggcctcagcctgcgtcctcctccatcagtggggctggcgagagcctaggctggaaatcgtggcccacccttccatcacta

SEQ ID NO: 42463 - DNA, 414 bp, Mus musculus
  source 1..414: mol_type = other DNA
taccagtaaaattagtctgacagtcatgtaaagaactgactcccaagggatgtttgtgggtgcacacgcacatgctcacacagacacacacacacagacaccgtttttatttttaagttgctaccattcatttaagattacaggaaagagcgcacatgtcaacatgtatgaagatgtatctgtaattgcagagctgaaagggtggctgccttgcccaaccatctctgcttaacagaacagaattctgtggtcttccagtcatttggtcttgtagcggaggcgtcggctcctttaagaggcgaggccacctcgttctccgcggcgctggccgcaggcctgggaacggcctagggggcctgcggcgggctgcacgcagctgcgaggtgcttgctggggcggcgcgggggtctgcgg

SEQ ID NO: 42464 - DNA, 483 bp, Mus musculus
  source 1..483: mol_type = other DNA
aaggacatacctgctgacggcaggagcaggcaggggcctggggactaatgaaagtcccttgcacagaggacaattccctagtcacctccagataggtaacttcttttaacgtggtctttcagagaaatgaagggattattttgcccaatgcggcgaaggagacacactttcgcgaaggttcttgggaaatgtagttttcattttcattgctaaggctctcaaaaaatagtgggacttaaattttaattactgtatactggactcttagaggatagttattctggcgtttaattgaacccaaattccccgtcacatggactcaaggtccctcttgtcaactcctcccatggggctgagagtagagctcccgccgaggtttggtgcgggcacgcgcgggcgagcgcgcgcggtctgaagaagcggcaagggtgcgcgcggcggggcggcgtgacggagagcggccgggagcgcgctgtggactcc

SEQ ID NO: 42465 - DNA, 407 bp, Mus musculus
  source 1..407: mol_type = other DNA
actatcatgctgtggtagctactgcagcagcttcctacacagaaatcagaatgatccttttaaaagcataacgatcatggcccgccaagttgaggttgatccccagaatcaacatggtagaagaagagaaccaatacagatcttttattattattattagatattttctttatatacatttcaaatgctggtatggctgactaggccatcttagttcatattatccaatacagatctttgacatagctccatttctttttctgaataggattttcacaattttaaaattgtttattgacatatgcattcagtatcttgcacctaaaagtaaaacttttcatgaaggcagggacttcctgttactattatattcctggcatcttacacatgatctggtataaattata

SEQ ID NO: 42466 - DNA, 468 bp, Mus musculus
  source 1..468: mol_type = other DNA
caaactcagtatttattttagggagttagatggtaccaccgtccggagcctggcagataggcctgctgccctctgctggacaggaaacctggcctcggcggccggcctcaccctaagatccctaggaagcaatgcatttcgagaggaggggtcaagacctgaccctcctcaagcgtgtgtcggtccacacggcagtgtgcagtgaccccagttaacacgtgtgaacacacgcgctcacatgcacacgcatgtggccaggtgcacgcactctgggaagaccgcgggccttgctggagcctgggacccagaggggcgctgcgtggtgcagggcgggagcgcgggggcgccggcccgggagcgttcttcgtctgcgccccgctgccactctcgctgcgccctgggcgctgggcagctgctggggcgctcctccatcttcgtccggttctctgaaagaaggaccccctctcg

SEQ ID NO: 42467 - DNA, 522 bp, Mus musculus
  source 1..522: mol_type = other DNA
accctggccccataagccagcgcgtgtgggaaagggaccggagggtacgtgggcaaccctgcccccgttacctgaggatattcagctggtgatcgcggccgcctccacccgcggccgcggagtccacagcgcgctcccggccgctctccgtcacgccgccccgccgcgcgcacccttgccgcttcttcagaccgcgcgcgctcgcccgcgcgtgcccgcaccaaacctcggcgggagctctactctcagccccatgggaggagttgacaagagggaccttgagtccatgtgacggggaatttgggttcaattaaacgccagaataactatcctctaagagtccagtatacagtaattaaaatttaagtcccactattttttgagagccttagcaatgaaaatgaaaactacatttcccaagaaccttcgcgaaagtgtgtctccttcgccgcattgggcaaaataatcccttcatttctctgaaagaccacgttaaaagaagttacctatctggaggtgact

SEQ ID NO: 42468 - DNA, 155 bp, Mus musculus
  source 1..155: mol_type = other DNA
cactgtggcctcagtgtctacactgggctggctcagatctaatcccagtggttactgctgtggcacactgtgtctggaacactaccattagttcctttagctagtgctgtatctgggctctcagcagagagctgccataccacagagccactggg

SEQ ID NO: 42469 - DNA, 406 bp, Mus musculus
  source 1..406: mol_type = other DNA
cctacaccgcagcccttgccaggccaccctgccaggctagtctcaaactcagtatttattttagggagttagatggtaccaccgtccggagcctggcagataggcctgctgccctctgctggacaggaaacctggcctcggcggccggcctcaccctaagatccctaggaagcaatgcatttcgagaggaggggtcaagacctgaccctcctcaagcgtgtgtcggtccacacggcagtgtgcagtgaccccagttaacacgtgtgaacacacgcgctcacatgcacacgcatgtggccaggtgcacgcactctgggaagaccgcgggccttgctggagcctgggacccagaggggcgctgcgtggtgcagggcgggagcgcgggggcgccggcccgggagcgttc

SEQ ID NO: 42470 - DNA, 493 bp, Mus musculus
  source 1..493: mol_type = other DNA
ggagtgttcctctatgcgtctcctagctggggctggccacggggaaaagccacagtaactctgctttttccagctcctggttgggactaggcaggctcttgcctgggaaggagccccagcctgaagctgttaggtaggagctgggatcctggcaggaaatggccaggcaccctccacaaaatgaagggaagggtgctcagcccctaccttgcaggggtttgaagcatgtgttaccacagggctgagcttctgcaccacaagtctttacaggcagagaatgtacagtctgtggaagcctagcggtctgctgaccttgaaggcacctaaaccccgggctggcgatcctgtccacagagttctgggggtctaaagacttaagagacattgtcccgtctgccttggcaggaaaggtccttcaatcctagagggagcccccgcccgaaatctaagcgcgggtctggcgcctgccccgcccccggagttaagtactgga

SEQ ID NO: 42471 - DNA, 312 bp, Mus musculus
  source 1..312: mol_type = other DNA
agaggcaggggttttctatgtatcggctgtggaacatcttgcttctctgtgaagatacttatgaccttccagacgataatcgttaatttgttgtttggaatataaacttaaacagcagcaatccagctgttatattcgctggaaggaattgcaacttgtcactgaagaagttaccccccacactctgggagctgcggaaggcaggagggctcctctccctatcttgccgcagctctgctcccctgcagccgaggcgaactttcggagttttcctgcacttgcgtcacggaaagcggctggcgagctccccca

SEQ ID NO: 42472 - DNA, 400 bp, Mus musculus
  source 1..400: mol_type = other DNA
aaataagaggcaggaatgcttccaatcctgattgtttggtactactgccaagatctcatgctggccaggatgggactatttgtcaactctggggaccactggaactgagacatttgcagagttctaatttattagcattccactcttctaaagttgtgtatgctttaaaaaaaaaagatttgttttatgtgtatcagtgctcttagctgcatgtacatgtgcatgtcagaaaagggttgtgaaccagccatctttccagagttggagagatagctcttgacggagcagactctcttcagtcaccaaagacagaactctgagaaagatggctcagcggttaagagcacttgactgctcttcttgcatgcaaggaaaagtgtattaaccaatggaaattacg

SEQ ID NO: 42473 - DNA, 308 bp, Mus musculus
  source 1..308: mol_type = other DNA
catggacatgcctcctctgtgagttcaaggccgccaaaatggagttaagaatatatataatttattttttaaaaagttctccaactccgatttcttgaaatccttctagaatacttatctttggtctaacatgataaaaaaaatcacagtaaatgcatttttcctgaatgaattctgaaacagctacaatgatgctgctacagattcattgagcaaagaaatgttatctgtcagatccgcgggaaggtccctcccgctcccgtaggggagtcgcctctcgtccccgcatccccgtccggcccggccct

SEQ ID NO: 42474 - DNA, 218 bp, Mus musculus
  source 1..218: mol_type = other DNA
cattttacatgctgtgctgcactcaaatgctgaacgttacctatcaggaatcgagccaggtcccttatagcagtggtggcgcacgcctgcacgcctttaatcccagcactaggccagcctggtctacctcgaggcgatcagtactgaaagggagaagagtcgctcagttcagggcggaagtaatgtcctgcccgactcaactcccgcgatgcaccacg

SEQ ID NO: 42475 - DNA, 443 bp, Mus musculus
  source 1..443: mol_type = other DNA
agtggctggaacaaccgcgggcccacggtgcccgcgcctccccagagcgcgcccagcaaacgctcagggcggccactgcactcgcccagcgtggttagcggacgtggggcccggcttgctcttcggtcgaccaactccggacaccgtgagctcggtgggcccgactggccaggctgcggccgccgccccctgccgaggccgctcgccgcaaccagggccttcttctttataattattttttaaaatatttttaaagcatttacaagagcagttggttgggcggcgcggccggcgcgagggcgacccaggccgggccagccccctccccaccctacgagcgggcggcgccaagcgctgggactccgagcctccccgtagctctgtcttggggactgcagcacccacacagactttgtgcaataccgaaattggggagaccaaat

SEQ ID NO: 42476 - DNA, 218 bp, Mus musculus
  source 1..218: mol_type = other DNA
gcagttagcttcataataggggacaaatttgccattgcttttcccaatctattcagcctctgtgcctgctatgtgtgtgtggcactctttgttcagactgctagctaaacagaattactcatggatatcgtgaatattccagccagtttaaaattgcactagattctagctagccaggccggactctgtttgacccagctccaaatgggttgtgtgtg

SEQ ID NO: 42477 - DNA, 339 bp, Mus musculus
  source 1..339: mol_type = other DNA
acgccgtggttgccaacacgaaacggttccccggtgtcgtatctcctggggacactcgaactagtgaataaataaaagaactaggtctttattattattattattattaattaattaatgtattatatgtaagtacactgttgtcttcagcctagtactttttgtgttccttacccagaaggcttaggccttagggttcctaaattcagactattcctgccctttcgcgaatggtttactccttctgtgaacgtaagtgcacactcaaggttgctccgccttccggaggcttgcccaggcggtgacatttaaaggcctccgctgggttactgagggctg

SEQ ID NO: 42478 - DNA, 233 bp, Mus musculus
  source 1..233: mol_type = other DNA
aagatcccggaccggcgccgtgtccaatggtgggggcggggcctggcccagccgtgtagtgggtggactaccttcctgaagtgaagaggtactcctcttcctccaatagtattagagggactctccccgccaataggggcgtggagaaggtgagcggctcgctctcccctcccagcgagggaagagggcggcggagcgaggttaagccttccctcggcggggcgggccgggag

SEQ ID NO: 42479 - DNA, 427 bp, Mus musculus
  source 1..427: mol_type = other DNA
gggtctgaccagcagcagccttggcagttgctacctatgttgtactgcacctccctgcaggtcagggtcttttaggagaaaaagtccttgtgaccaataaaacaagggactttgctcaagttttgacaagttattttaattgaatgtaaacctggttatttccattaaagcagtaaagctggaggttagaaagccccttttctgtatttctgaaaacacccgaagtagccttcatattatgcagttaccaatgcttgagtaagtgaagagaatggaaaactaaacctttcccatgcccattgtattttaaaataatttacccagctgtctaaggctcagcttccgggtttcactgggaggctccccagagccagcctcttgcaaaagccgtcggaacctttggttccaagcggtgcaacgagccggc

SEQ ID NO: 42480 - DNA, 447 bp, Mus musculus
  source 1..447: mol_type = other DNA
gcgtgcagcaccacgacaaagaaatgtcttagttttttaaaatctataatggatataaagtgtcatcacatagcattacaaagattaaacctggtatgacatttaacatttaacatctggggaatgtgaagtgcagttaaaagaaattcattattcatgggaagataacttaataccttactttatatcattttagaatgatttgaagttatatggcttatgaaaactggggatttataacactggtgtccaaattctggtgcttacaaccactgtaagtcaaacactggcaatttcctcagttccgaaatcatgaaaagaggacacctcacctggacagggggatgaccagatgttctccatgcatgtgcagcatctctcagcagagggcgccactctgctaggagcttcgccaaactgggcgttacccacgtgggtccgaagctg

SEQ ID NO: 42481 - DNA, 208 bp, Mus musculus
  source 1..208: mol_type = other DNA
agattcttacccttacatgcacgtgcatcatatttttaatagtgtcttatttatgttcattaatatatttttgtgtgcacatggcagttactgtactaggagcccagtaagattttcattaaaaaatattttgtcatagtccatagttttttataacggtattgcttaagaacaagtaattaatggaattatttccacccggaggaat

SEQ ID NO: 42482 - DNA, 113 bp, Mus musculus
  source 1..113: mol_type = other DNA
ggcaaaaggtcagtcaaaccagcctcgcatacagctgcttgtggctctacacagcgccgtttccggctggacttcaactgcagacgcagctgcgactcgaacaattcgcgggt

SEQ ID NO: 42483 - DNA, 196 bp, Mus musculus
  source 1..196: mol_type = other DNA
tgggtttcccagccccttgttgaggaagttagggctgcctcgagataagcttttgactgcagcactcagaaggctgaggctggtgtgtctctgagctaagaggcagaatatcacttttacaaatgacactcaggccttcggcacgggaggacccaggggagcgcaggctcccagaggcacagccgggttcccccgc

SEQ ID NO: 42484 - DNA, 521 bp, Mus musculus
  source 1..521: mol_type = other DNA
gagactttataggtgtagcttcatattgaaggttatcttaaatttaatgtttagtaaaattatgcttaggtccaaggagaatggtctcagaaaaccacttttcctgttattttctcattgtttaaatatacagtgacagaaaattttcagtgaagtcagaaacatagtcaaggaatttttttttaagattcatttatttattatatgtaagtacactgtagcgttgctgggatttgaactccgaaacttcggaatagcatatattctcagggaaaggatattgtgcatatgatatcacttatgataacctattccctattcttttaaaaatcactactgtgtgcatgcttagtgtatatattagtgtcccccatgtatgccatggtacatggataggttagagggcaatttgagaaactggtcctctccttccacctcaacttgagtcacaggcttatagggcaaagtgctcttagcagctgagccaactgctggctcagtgacctaacagctccggatat

SEQ ID NO: 42485 - DNA, 139 bp, Mus musculus
  source 1..139: mol_type = other DNA
tgtcgccaaggagtcggcagtacttccccactcgtgttatgaagatcagatgtggaagttaaggcactacctgcaaggtgcggaggcgccggtgcacaggcagggcggcacgggagcgcgcgggcccgcctcggacgcg

SEQ ID NO: 42486 - DNA, 178 bp, Mus musculus
  source 1..178: mol_type = other DNA
tgttataaaaggataacatttaactgagactggcgcagcatccaagcagtcatggtggctaaaccactagcccttagtgttaggaaagctgattgagtgggctcaatgaacatgtaagttcttgaaatttcttcgaatgtgcctaggctttgccatcctctgtgatcgctttctctgg

SEQ ID NO: 42487 - DNA, 348 bp, Mus musculus
  source 1..348: mol_type = other DNA
cagagcccgagcctctgctcagattcagtggagtgcaaggaattccacctggaattggagggctgagccaggactttcaggcatgaatataagaatttaacgccgcgcaaggaccaggccacgacgtagcggtcccagcccagggaaggcgctgcgtgcagccgcagccaacgcctcccactcggagatctcttacctagggatgcccttgcgctggaaccccgcagggctcctgcataaggtagatggtgacttcggagaacttcaccgtgaccccagccgctgagctccagcgctggatcccaaaggctggagggactgggacgttggggcggtcctgggcgaagg

SEQ ID NO: 42488 - DNA, 352 bp, Mus musculus
  source 1..352: mol_type = other DNA
atatgtcccataattgaggaaagccaattcatggattcatactcgtttaatcaaggtaatttacatgtatgagagcgcagaaagttaataaactattaacttctgagactcaggttgcataagtgtagagggctagaattatagcattatcgctacaattccaaattgtgatgtcacccgggtcatcggaccagctttggcgcggcgccgacgtggtttgtcctccacggccgccgtagccgccggcgaccgcatggcgccccacccgcttccgtaggcgcgagctccgcagtgggccggccttatgctccgcccagcgtgcgtcgctgcgtgagtccggcccccgcgaact

SEQ ID NO: 42489 - DNA, 272 bp, Mus musculus
  source 1..272: mol_type = other DNA
tttaagacaaggacttatagcgcatgccaggcaagaagtctatctctgggctatataattccagccccaaggttgtatttaggcagatttctgagttcgaggccagcctggtctacagtgcaacgcgacttgggtcggacagacttcgggtctcagagtacctgaaaggcaagacctgggctggccagttcctgacgggtagggcggaaccttgatgctctctccgcagcaggcggccggaaagcgctccccgcgccggtctggccactggc

SEQ ID NO: 42490 - DNA, 291 bp, Mus musculus
  source 1..291: mol_type = other DNA
tgaacattcaagctttaagcctgattcattttactctaacataaaatatacacatagtaaaggaatattaactttatgtcaacagcctttaacagtaaatggtaattatgcgtatttgagtgaattaactaccacctctaggatatctatgaaatcaaggtcttccagctttatcctggagcacagttgttcagaaggaatgaatgcatgttcctgtcggattctatcctcagcatctctggagataaaaaggaacggacctttgtgacgtccagggccacgcccccacag

SEQ ID NO: 42491 - DNA, 294 bp, Mus musculus
  source 1..294: mol_type = other DNA
tgtcctatgcacagcttgtgagcagctcagactgtcctctacaataaatctggtagatctatagtggaagagggtagtaacatctgcgaccaccaacgtgcacgcatatgtgcgtgcgtgcgtgcctgcaagttccagcactagagattcttgctagctttgtaacagggctattaggagaaaaagcacaaaagtagtgctattttgttctcttctcagtatgcaacagaatctcctgactgctcagggaagaggcggtgggctctgcacatttcccgtgaagctccgcgcgca

SEQ ID NO: 42492 - DNA, 344 bp, Mus musculus
  source 1..344: mol_type = other DNA
ttgtcagtactgcgagagctcaccaagctggccagtctcctgcctcatgctgtagatatgtcatgtctcaatttttgtgcttaaataaaaagattttcggacagcagcctactggagctgtgacagaccactttccaaaggcatttaaattgtttttgttgaagggcagggagtgagccaggctcttcctcccgccccctacgctgcctggcaatccttggcagagggtgtcacccagcccgctgccggcggggaggagcctcggaggggaggtgtcgagccgcgcttccggcgggcagcgccggggccctgcggagtcccgcctcgccgcccctcgagcgccc

SEQ ID NO: 42493 - DNA, 270 bp, Mus musculus
  source 1..270: mol_type = other DNA
gacgataggggttctgaggagacagcccatctccgatttagccagtgcccacatctcagtttttggcaagtccccctctgaactactgaagcaaagggagataactggcacaaggacaagtcttccctgaggctctagggacaccgggcactccaagatgaagtcctggttctcgatgacccaggagagcagtgctttagcaggcacgtggttcaggcttctcagcccctgcccccccgcaccctcccccctctgtgaggagggttttgg

SEQ ID NO: 42494 - DNA, 182 bp, Mus musculus
  source 1..182: mol_type = other DNA
aaaaattagactccaaacaagatattttataacttgtatttgtactaggccagcctggtgaacaaccaatcaactaagtacccagcttcttttgtttttgacggtaacctagtcctcctgcctcagccttctgagtgttgagagacaggggggaagagcagggcctggcactaagcattcct

SEQ ID NO: 42495 - DNA, 620 bp, Mus musculus
  source 1..620: mol_type = other DNA
gaagagtctaggcctagcctccactatagaagagtctaggcctaacctccactctagcaaggaagcttcgcctagaggaagatgctggtggccctctgaaaggaccttcgggagccttcgcgaaggccagcaagtgggggcagggcgtagacgcggacacaccccccgcatgcagagggcgccgacccacgccccgctgctcgcccggcaggccccctcgcgcaggcgcgccgcagcgggcggaggatccgggccgcgcttcctctcaccaggcctgcgagcttcctcccatcggagcccgggcgagctgaggttggccgccgccgctgagcctgctgcgcgccaccctgcgccctgccccggggaatcccaccggggtggggtccgagcagggccaacccgggccgcgccgccgtcggggccgtccccgggccagccgtccctcccgcctggccagcctctggccgcccagcctccggggtgtggggcttaggcaagccctgcgagcggcgatcgaacgcccggggcggccccccggcggcggcgcgacgtccccaaaccgaacctccgtggccgcgttcggaagcggaactctgccggggccgcgccggctacattgt

SEQ ID NO: 42496 - DNA, 367 bp, Mus musculus
  source 1..367: mol_type = other DNA
ctttgtgacaatatttttgcaacaacccctcatgagaatttgggtttctctgtgtagccctggctgtcctggaactcactttgtagaccaggctggcctcagaggccagcctggtctacagaagagtctaggcctagcctccactatagaagagtctaggcctaacctccactctagcaaggaagcttcgcctagaggaagatgctggtggccctctgaaaggaccttcgggagccttcgcgaaggccagcaagtgggggcagggcgtagacgcggacacaccccccgcatgcagagggcgccgacccacgccccgctgctcgcccggcaggccccctcgcgcaggcgcgccgcagcgggcggagga

SEQ ID NO: 42497 - DNA, 512 bp, Mus musculus
  source 1..512: mol_type = other DNA
ggttcaggtatgcgctcgcgcgcgtgcgcgcacgcgcgcacacacacacacacacacacacacacatgggtgtggggtgtgatgaggtagctacaacatacatgtcatggttaatctccagtgtcatcttgatgggatttaggatcacctagaaggtggtcctcagggcatacctttcctgaaaggtaactaaggagggaaagcccagcctgagtgtgggctataccatacctaggctgcatctctctctctctctctctgtgtgtgtgtgtgtgtgcatgtgaccagccatggagagcatgagctgccctggttggcctgggggcggagaagaggttatatctgtttttgaaagaagtgtattctttcaaagacatatacctttaaaatgtcatacttttttatctccatgaatatttatctccatggaccccaagccacttctgaccccaagtgccatggcttgaagccaagaattgatcctttcagcacccgggcacctgggccagtcg

SEQ ID NO: 42498 - DNA, 299 bp, Mus musculus
  source 1..299: mol_type = other DNA
ggggcaccttgtccccagccaggtggggcggagacaggcagcccgacctctgcccccagaggatggagcaggcttacgcacgctagcctcaggaacctgtgtgcgtgagccccgggagcctacagggagctgcaagcggggactcccgggcttgcagcttgcctaaggtgacccttagaggtgagatctgcaagcctgctgtggggcacagagtcagtccaatggcgccactggccttcctgcttacacactgaatgtttgaaagtgtggggggtggtgaccccaacctttaaggtggt

SEQ ID NO: 42499 - DNA, 273 bp, Mus musculus
  source 1..273: mol_type = other DNA
ggtttctctgtgtagccctggctgccctggagctcactttgtagaccaggctggcctcgaactcagaaaccgcctgcagtgctgggattaaaggcgtgcacctctttactgagctctcatggcttttctagcctactccatgaccacaattcagctacacttccatatcactattcatcaagaaaggttcttggacagccttttttctcaggaaaaaaagcccacctaggcgtcaatttgacaaactaggccctgtgtcaacggaagtgacat

SEQ ID NO: 42500 - DNA, 381 bp, Mus musculus
  source 1..381: mol_type = other DNA
gctaggagacagctcctatatcagctgtcagcaagaagtcctctctgtagagagagtgggggctgctcatttctttttcccgtagccatggaaacatggctgggcagcattggtctatgagtcagtttgagtttgcaaaacataatcacccagccacagcacctggtgggcgcgcatcccgtacggggaggggacacctgggaaaccctggctgtccgcgttggccccgccctggccggccgccgcagcctcgcggacctcgcgtggcgtggggcaattaggcgcggcacccgcccgcttggctgcgcgacgcgcgggggcggggacgctgtcaaagcgaggccccgacttgtattctcttctgaaaaaaaaaaaaataag

SEQ ID NO: 42501 - DNA, 329 bp, Mus musculus
  source 1..329: mol_type = other DNA
aggagatttatttgtggtttataaaaaaaaaaaaaagaaacattaacttgtttagacaatattggtacctgtttcaaattaattaactttaaaatccttagcctggttcagcaatttgtgaagtttaagccgagagcactttctctgtctaccctgagtagcaatcttgggaatagaagcaatgttcatagttattgccggtttcacagttcaaacccctgtacagtgaactcagttattagcagacttaaatttatcttctgggtaaatgagttactcatcctgaaagtcagggttaagaaaagaaactcttttatacctgttttaca

SEQ ID NO: 42502 - DNA, 355 bp, Mus musculus
  source 1..355: mol_type = other DNA
gtgtggtgcacacctgcaatcctagcatttcagaagtaaagacaggatttcaactacttttgctaaataggtgagctaccttctaacaagactaggttttggctgggattgttttaagacccaaaactaagcgagagcttctaccttttttcaatgcttcattaagactagctgaaagttagcactctttattcctttctttctcacaccggaactcctctgagtccgtgctgccgaagcctccgcaaccagagggcggtctcgcctcgggccccgccccccaccgtggggccccgcccctacctgcccctcccccgccccgggctgacggccgggccccgcagcacagcttccg

SEQ ID NO: 42503 - DNA, 373 bp, Mus musculus
  source 1..373: mol_type = other DNA
tgggagacccgaggggcctggaccctctgatggaactaccaccgcgtcagtagctgagccttaggcagagaaagtacaccagctggctggggggaggcagcccagaaggctgctgggttctctcaggcagagcaatcgtggggcgttgtgggcaccccacactcctccacagaggaaagcatcctgctccggctgataggatcagcagagagctgctatgagaatggttctctgactacaaaccacttagctgacagcaatttcctaggcctttctttccactggggcgagggaaccctcatgacagatcacaagtctagcggtccggggtggggtcaggcgcttgactccgcctcctggcgctaggttctgc

SEQ ID NO: 42504 - DNA, 320 bp, Mus musculus
  source 1..320: mol_type = other DNA
agagcactcagtgctcttaacatcttttaaaattacatttttattgtggaactttctgagaaaaatcacttctctcttgagtttagctaactctaacttttgtgtaaactcaatccaatttgattgtgcattaggtggaaccctggtgcgctgccacaaggcaggtttcctgcggaagggccgcggggcgcctgtccacttaggaacccgtccccctcggagaaggctcgccaattgtgtctgacagaaatcacgcctcctaggacccggaagcattgccactagctgctggacggccatttataaggggctggcttccg

SEQ ID NO: 42505 - DNA, 313 bp, Mus musculus
  source 1..313: mol_type = other DNA
aggaaggaagcttccagtacctggctcagaacctgtacatgccaggcgctcagtgagtaactatggattagtaatgaactccgctgctcgaggccagcctggtctacaaatgagttccaggacagccagggctatctcctttgttcctctggcgggaccagcaagagctggggagcccgcccccacactagggaaccggagttctgttagcatgcacactttgcctgaaggagcatggagcttgactccacccggggccatgtgctcgtgtgcctgaggacaatgagggagcagctgagccccgagctccgcc

SEQ ID NO: 42506 - DNA, 353 bp, Mus musculus
  source 1..353: mol_type = other DNA
gatagtggttaagagcactgctagtgctttgactgttcttaagtccaagatttgacactttcaaacagacatacatgtaggtaatacatacatacataagtaaatttttcaaagaacacggagtatggttgtttgtcaaagagaaaaaaaataaggaactgtacaagatcagttaataatcaaccatttgtaagtaacacaggaaagatgtctgctgttctataactggccaggtagaggataaacagacttttcagacagaaagttcagaagttctttctctggctgtgtgagcccagccctctggaggaggaaggggggaggtcaccgctccatcagcttctctcttagcc

SEQ ID NO: 42507 - DNA, 320 bp, Mus musculus
  source 1..320: mol_type = other DNA
tgtactcataaataaataaataaataaataaataaataaataaataaataaataaataaataaataaattctctctatttcagacttagcagggaagtcataagtgagctgttatcttctgcattgattaattgcagactaatgaaccatcactaattgctgcttacacctagtagctttagcactttccaccgtggtagcaagcattggtttcacagctgcccggagccaggaaactacaagctgaaggctggtgtcccctgccaacagaggtcaagccttaactctttaaaaggtcatccaaggcttcatagtaagac

SEQ ID NO: 42508 - DNA, 335 bp, Mus musculus
  source 1..335: mol_type = other DNA
gtctctaagacagacagacactgtccctaatacacgcaaaaatgttagtgaatctttttaaaactgagtcaccaacaggtgtgcatgtccacacttgtgcacgtgagtcaggtcttcaggctcagacctgggcctcccaccaggccaggctggcgggtgagttcaggagccgactgcaggtgcatgcggtccagggatctgaactcaggtcctcatgactgccaggaagccaccaagtatccaaagaggctaggtgactactgcatccgacatctctgaggtagtgtgctgagtccaccctgctgtactgcatctgcgtggcttacctaggtgat

SEQ ID NO: 42509 - DNA, 383 bp, Mus musculus
  source 1..383: mol_type = other DNA
gcgcacgccctgagttcgaggccagcctggtctacaaagtgagttccaggacagccagggctatacagagaaaataaataaataaataaataataataataaaaattaacttgtctgcatatctacagaagggacttttcctgtctacctaaaaacccagctgcctgccatcttccggccagcagcagcagccttgggctgctgcgggcagccgaagctggtgttggggccacggagagcctatggttccaggctgcccacatactttctagatctagctcctgagaagtagggctctgcagctgcttcggagggtctctgaggggctcttaggcttcctcctagaatggctcataccagaaattggccctcagcgcagctgg

SEQ ID NO: 42510 - DNA, 476 bp, Mus musculus
  source 1..476: mol_type = other DNA
aattttctatagaatgtatgaagtagatcattgtgtgtgtgtgtgcatgcatgcatacatgctgtgtgtatggtttaaggatttatatatgttatgagtacaaatgtgtgtacaagtacacatgtgtatgtgtttgtatctgtgtgtatgtttgtgtgtacaggtacacatgtgtgcatgcttgtgtgtgtgtgtttgtgtgtacaggtacacctgtgtgcatgtttatgtatgtgtgtttgtgtgcacacatacacatgtgtgtgtttgtatgtacaggtacatgtgtgtgtgtgtgcatgtagataccaaacctcagagacaggaacttagtttccatgggtcctgggaatcaaactcagtatttcactgctatattcaaaatgcccaagacatatacagtaggttctcaataaatatttactgagagatcaaatgctaaatgggaagaattaattgatgccttcagagaaggg

SEQ ID NO: 42511 - DNA, 405 bp, Mus musculus
  source 1..405: mol_type = other DNA
tgtctgcatatctacagaagggacttttcctgtctacctaaaaacccagctgcctgccatcttccggccagcagcagcagccttgggctgctgcgggcagccgaagctggtgttggggccacggagagcctatggttccaggctgcccacatactttctagatctagctcctgagaagtagggctctgcagctgcttcggagggtctctgaggggctcttaggcttcctcctagaatggctcataccagaaattggccctcagcgcagctgggcaacagcaggatgctgatcagttattaaaagccgagctggcgatacccccctgggagtgatgagctacccgtggccacagctggggaaactcagccatcaaagccctggcttatggcaggagacaccggcgg

SEQ ID NO: 42512 - DNA, 422 bp, Mus musculus
  source 1..422: mol_type = other DNA
ctgaggggcaggattttgatatcagacagccttcttcctggaggactcaggccccacctggcctcatgggcctggctgccagctgcaggggcctgtgagactgactgaacgttcaccccggagcttccttctacagtaccagctggtcctttggagctccacccaaaggtgactttcctaaacacagttcccaatgggactggtttctctagtctcagcatccagagcagtcctagtgggtaaaggtgtttgccaccggggaccagtgaccagtatttaaatgcaataaaaatgcttttaaagcttatctgtacattgagagcctcagaatgtcaggtctgagctgagaacagctctcttcttgctcctccccacaggctgggccagggaagggagggggcagccaggggtccagctcctct

SEQ ID NO: 42513 - DNA, 341 bp, Mus musculus
  source 1..341: mol_type = other DNA
gtgggtaaaggtgtttgccaccggggaccagtgaccagtatttaaatgcaataaaaatgcttttaaagcttatctgtacattgagagcctcagaatgtcaggtctgagctgagaacagctctcttcttgctcctccccacaggctgggccagggaagggagggggcagccaggggtccagctcctctgggaagaacagcggcaggcaggcgaagttcatcttctcccaggtctgcttcttgtgaaatcaagtcgtaagaacaaaaaggttttactagtgtaacacgtgtgctctccctcatatatactcaggagaccatgtggatcatcaagaattatggt

SEQ ID NO: 42514 - DNA, 285 bp, Mus musculus
  source 1..285: mol_type = other DNA
ctgagccacagggactgttcctgagatgaggccccgaagccttgctctgagtgctgggtcctggagccagggtgttcatgcacagcccactcagtgtggggctgggctgctgccttgggagctccctgcccaacttcaggatatatttacttaaaaaaaaaaaaaaaaaagcttaacactttggcttctcgaccaggggttagagcttggcagacagacagacagacagacagacagacagacagaagaaggggctgcttttaggttagaaatttcccactttcc

SEQ ID NO: 42515 - DNA, 304 bp, Mus musculus
  source 1..304: mol_type = other DNA
aggttagaaatttcccactttcctgaacaaccccaaatttggcctctttccagagtccctgttgctgaaactcagtttcattttgttggcagccctgcttagagctgtcccgtgcaccctgagccgggtgtgcaaaccagccagacccctcctccagcagtcctggtcctgtggacttgcatcttaaaagctgttaagcttgacttcagaagaacaggtgtttttagcacatccctctgggtttgagggacttggaacaggctcctgctcagagcatctgcttggacaatctcgccagatttca

SEQ ID NO: 42516 - DNA, 218 bp, Mus musculus
  source 1..218: mol_type = other DNA
cccaacctaatgttttaggagccacccactccactgtgagcactaggtagcccacgggcagtggagtgcacctgagcgtggagttcaggctcaagaggctggctggggaggtgggcgtctcctctccgcgcaccctgcatatctgcccagatccatcaattatgcatcgtgttgaacgaagcagttcagcaggtcccactggaggtctttctgcgcca

SEQ ID NO: 42517 - DNA, 217 bp, Mus musculus
  source 1..217: mol_type = other DNA
agtgtgttcatattttcaaatcggggtattgatctcctgatgagggctgggcagatgatgcattttagtcaaatccctcccaacctaatgttttaggagccacccactccactgtgagcactaggtagcccacgggcagtggagtgcacctgagcgtggagttcaggctcaagaggctggctggggaggtgggcgtctcctctccgcgcaccctgca

SEQ ID NO: 42518 - DNA, 457 bp, Mus musculus
  source 1..457: mol_type = other DNA
ggccaataagtttcctttgattctgggcactgggaacccagtgggccacgaactggccgaggcacagactgggtatacctagagaaaactcgaggattttggtcaagcatgccccggcgatatttcccaacagcactgcaaagccacaggcagggctctttggtgcccaggcctgctcgtgccatcccttcaaggtcaaggccttgtttctgcacagttcaggcagtatccaggagcgcgggtaccagggttgaactccagatctccgcggacctagcccggggacacttggacaacctgggacctcaaaggttgaagtttgtggaggctggagtcaggactgcagcttggtaaaaagcttgctgaactgaacagattctgaatcggaagccctctgttttccttcccttaaagacggcatctgggcggcgccagggctctgcctgccgtcttctag

SEQ ID NO: 42519 - DNA, 289 bp, Mus musculus
  source 1..289: mol_type = other DNA
ttttgcgcgcacatcacgcgcccgtcccgccagcgcccgcgagcttcgcttctaattgaatgcgagccgtttggcgcagaaagacctccagtgggacctgctgaactgcttcgttcaacacgatgcataattgatggatctgggcagatatgcagggtgcgcggagaggagacgcccacctccccagccagcctcttgagcctgaactccacgctcaggtgcactccactgcccgtgggctacctagtgctcacagtggagtgggtggctcctaaaacattaggttggg

SEQ ID NO: 42520 - DNA, 297 bp, Mus musculus
  source 1..297: mol_type = other DNA
gtacacactgctgcattttatgcgtcaaagaaagcagaagtctaagggaaaatcgattttctttttctgtcacgtggaggccagaggtacagcctctgcataacttgttctgagcttttcccacaggtgctgggggaaactcaggtcctcatgcagcattaacactatgttgaaacactgggctggcagcatccctccatggcttttctgacttccttcagtgaggaaaaagacatccaagatgtcttgtatcaaattattctagaacgtgacagactccatgtgtctaaaactttc

SEQ ID NO: 42521 - DNA, 238 bp, Mus musculus
  source 1..238: mol_type = other DNA
actcagaactaactctgtgtcccaaaaagagcagctctgcctttccaggcaaacccatcccagtactgagtcgaagtctccactttctctacctggcttttaactagaaagacatatagcttcacagacagggaaaagcctgtcagctctgtttctctccctaatgagccatgcccgcatgccgggcttgtttacttcttaactttggaagggagattatagaaccaggggaggcggg

SEQ ID NO: 42522 - DNA, 378 bp, Mus musculus
  source 1..378: mol_type = other DNA
attattctagcttgtgtcaagttgacataaaattagccaggctattctgaagccagcctggatcaaggagtctcatgtaatgctttgctgctgctgctgcagccaccaccaccaccatccactgccaggattcctggggtgtaacaggctctgttttcttggctgtggggaaacaaacaaacaaaaaataccagcacacccataactcataagtgtgttgagtttggaggaatggtttgaggccaaaaacatttctctgctttgcctcctttcctaaggccaggtaggaggtgcccgccgttcggtcctcccagcgcagggggtgctgtggagcggcaggcatggtggacccggcctgattcctgatccccacaggct

SEQ ID NO: 42523 - DNA, 385 bp, Mus musculus
  source 1..385: mol_type = other DNA
gtacgtgatgtcagcatctgccctgaagcctgtagactgagacctgtggccccagccagaggtgggcatctccccagggagtctcacccttcctcccaggcaggtctgtggcttggctggaagcctaacccggcgggccgtagggccccgcggaggaggccccagcaggcggaccaggtttctgaaacctccagacactttcagcctgttgcttattcattcagagtgggaaagcgccagcctagcgagcagccagccagtgtggggctggccatgtaagggccccaggaggtcctgcccgtcccgtgccctacggaaagcctcgtgcagccctgggcaccgcccctgccctgccctgacccgtcccgctcgggacaaggctaga

SEQ ID NO: 42524 - DNA, 314 bp, Mus musculus
  source 1..314: mol_type = other DNA
agagggtaacctcttaggtaccaagtaaaagttaaaatttacctttcttcttagccctttctgtggaataatcccccagtgatcaatgagcatgcgattcccaggccacggcgtacgtgatgtcagcatctgccctgaagcctgtagactgagacctgtggccccagccagaggtgggcatctccccagggagtctcacccttcctcccaggcaggtctgtggcttggctggaagcctaacccggcgggccgtagggccccgcggaggaggccccagcaggcggaccaggtttctgaaacctccagacactttc

SEQ ID NO: 42525 - DNA, 515 bp, Mus musculus
  source 1..515: mol_type = other DNA
tgttctagaactcactctgtaaaccaggctggccttgaactcacagagatctgagtccggcattaaaggcgctgcagcttcagttatttcattaagttattcatccagttggtgagttgcccaagaccttgctctgggaagtgtttgccatgcaaacatgactacctgagtgtggatctccagtcaccctgtaaaaagccatgcatacagatgtacacatctgtagcctcagtgctggggacagagtggatccttgaccaaccagtctagccaggttgagtgagaaaccctgtttcaaaaataaggaatgctaaattgtggcctcctatgtagtcttacataaacctactcttggtctccagatcagatatactgatttggtgttttggaaaatcatccctaaacctgagggtattatgagctctggtactggtctggtaaaacaacacacatagcctgtgtacactgtaatctggaggcagttccagggccttgtgacacacatctagctggat

SEQ ID NO: 42526 - DNA, 433 bp, Mus musculus
  source 1..433: mol_type = other DNA
tctaaatttggagaatggtgatcatctgcaataaacgtgtaacgtttaaaccccaagtgctcgttttatttctatatatcgccctattaatcacatgacaaatgggtcttgagatttgttaagttaattagttatgattttgaaaaatagtgcgtggaaaattttcatgactgaagcactactgccacctggtggcaacatacctctaaaactcaaaaaatttagaatgacacagttggggaggaagccatactgagttctaagtcctgcatggcctggcataagcttataatctcagcactcagaactcttccctagtgatcagggaaccagggaaaggggacttccttttaagagatgaactggacctctcttgattccctacatttgaacaaatccagctagatgtgtgtcacaaggccctggaactgcc

SEQ ID NO: 42527 - DNA, 282 bp, Mus musculus
  source 1..282: mol_type = other DNA
aatgtgtgactcatgtgaactgaactcttccttggtaggatctaggctgaagtcacttttgagtcaagttttccttggccttagtcaaggccctgacctgtcttaggacgctctggaggagacactgccagcactcatgatgccaagagctcatgacatggaaacattctcgaagctgattaccagattttattgttccagcatgcttcccttgtctataggtggccaatggtcacagaatgtgatgtaattagcccctcccttccggagggggtggtgcct

SEQ ID NO: 42528 - DNA, 464 bp, Mus musculus
  source 1..464: mol_type = other DNA
tcaatttttttttttcatctgcaaaacagaaataatttctacctgggccagagaggaaagcatgctgccttcatttgagcccacagaagttcctgtctgtgtaatggacagatacaaacacaggtgaagggatgttggcaaattccagacggctagccagcagctggcatgcggctgaaattgccctgtggttggctcaggcgcccacgacactgtattatagagagctcccagcaactcggaattgggagtggtcagtggccggtcacctgtcccctctcaccgtgggggatgggcagcgagtagcccaacacctcctcctttcccccgtcggggtccaacaagggtctgggtcggggcgggtccagaccccgggccctgcccagcaggcgggctcaggcttcaccctcggatctcgccgcagggccaatccagcctctggggcgcacccgggcggcttttcc

SEQ ID NO: 42529 - DNA, 347 bp, Mus musculus
  source 1..347: mol_type = other DNA
tgaggtagggtccctcactgagcctagacctcatcgatcggctaggcagactagttagcaaaccagagagctcttctcttcgattcctgcacaggctagctcttcaggccctcagagcttgtgaagtccgtgcaaggaagcacagcgatcgttaacactgccttggccagatacctctaggggtctctggtcaaagtccagattcctctaatttctgagcgctaggatcccatagaagtgactccgccgtcttcccccgtgggagaaggagcgggtggagtccccgcctcgccccgtcacgtggccaaaagcgcgcttggccaatcagcctctgcaggggcggggac

SEQ ID NO: 42530 - DNA, 423 bp, Mus musculus
  source 1..423: mol_type = other DNA
gattcctgcacaggctagctcttcaggccctcagagcttgtgaagtccgtgcaaggaagcacagcgatcgttaacactgccttggccagatacctctaggggtctctggtcaaagtccagattcctctaatttctgagcgctaggatcccatagaagtgactccgccgtcttcccccgtgggagaaggagcgggtggagtccccgcctcgccccgtcacgtggccaaaagcgcgcttggccaatcagcctctgcaggggcggggacgggaggggggggaagagggcctcttctcgcgagccttgccgccggtgctcctggcccgcccacggccgccagcggaggtctcgcgaggctagggaaggacggagctcggccgcggctgcctccctcgttcactccctcgcgcgcgcgctcgcccgcc

SEQ ID NO: 42531 - DNA, 298 bp, Mus musculus
  source 1..298: mol_type = other DNA
aaataaataaacctcaattttaaaaactttaaaattttctatttctttttaacacagattgtataaataccagattctttataatagaccgtggagtccacagttgtataaattacagctgtggaaattttttgctggctataaatcacgcagaaatgtcatctgtgcctctcttctggtgacaaaaggaaggagaccctagagagccggtctatctgaagactcccatgatggtgctgaaatcttccaaattgtaggcatgaccacacttccgtagtggaatcctctgcttccgtgc

SEQ ID NO: 42532 - DNA, 788 bp, Mus musculus
  source 1..788: mol_type = other DNA
tggcctgggcacgcgatggagtggactcccagccgagtgtctcagtggggacgcggggcaccacggtcccggcgggtcgggtaccgcccgagaggaagaggtcggcgcagtgcgatcggccccctcccacgggaaccgcgccaggtccccagcaagagccgggcggcctgctattgtccgtgcgccgtctgcgaacccaggtttcctcccggaggccggtttcctctgaggccctatatagaggcccggggcagagaggtgcgcgcaggctcgcggcctccgtgagcagctccggagtccgtgcggctctgcctcaggtctccgtagcctccgcggccccttctcccctgacgccagcagcagcagcagagcccggcgcgcgcgccccgcgcccgtgcccgtctcccgagagccagaggggggaggggagcgggcccgccgcctgcccctgcgccagctcggctccaccgccgcggctgcccgcgaagcgaccgccgggattggagcccggcaggccgcggggcgcggggagggaggcgcgcgtgcgcggctgtgagcgtgcgcggcacggcgcgctccggcgcccgccccccaccccgcggtctccgcccccctcgctctaccgtgaggagcccgagtcggcggcgggtggcggcgcctggaacctggagagaccgagccaccccccggctctcgctctcctccccgccccgctgcaggagggaggcgcccggagtctttccccctgggcgcgcgagggggccgcgcgggccgggccgggccgggct

SEQ ID NO: 42533 - DNA, 221 bp, Mus musculus
  source 1..221: mol_type = other DNA
atgaactggacatcaagcctagctttctaaaccaggatttaaaaactcgagtctatagtccttccatactaaaggaacaccacgcgtggctcgttgtcaaactagggaagtaaagctccacccataactggggctgcagttccgtcgtagctccgcccatcgggcgcgcgggtgtgacgttacgcacgtctacgtcagcacgcgcccagctgggaggaggc

SEQ ID NO: 42534 - DNA, 667 bp, Mus musculus
  source 1..667: mol_type = other DNA
actacagactgttttctcactgtcgagagacactttggatctcaagtacaaaaaatagccccgtcctggcctgggcacgcgatggagtggactcccagccgagtgtctcagtggggacgcggggcaccacggtcccggcgggtcgggtaccgcccgagaggaagaggtcggcgcagtgcgatcggccccctcccacgggaaccgcgccaggtccccagcaagagccgggcggcctgctattgtccgtgcgccgtctgcgaacccaggtttcctcccggaggccggtttcctctgaggccctatatagaggcccggggcagagaggtgcgcgcaggctcgcggcctccgtgagcagctccggagtccgtgcggctctgcctcaggtctccgtagcctccgcggccccttctcccctgacgccagcagcagcagcagagcccggcgcgcgcgccccgcgcccgtgcccgtctcccgagagccagaggggggaggggagcgggcccgccgcctgcccctgcgccagctcggctccaccgccgcggctgcccgcgaagcgaccgccgggattggagcccggcaggccgcggggcgcggggagggaggcgcgcgtgcgcggctgtgagcgtgcgcggcacggcgcgctccggcgcccgccccccaccccgcg

SEQ ID NO: 42535 - DNA, 516 bp, Mus musculus
  source 1..516: mol_type = other DNA
gagagaaccacttttagtatttaaatatcctagaaatattttctttctttttccttgactgtcctggaactcactttgtagaccaggctggccttgaaatattttctaataaagaattatgtacataatattcttagttttgctttcatagacactgtatgcattcacattgtccttatctgataatagaataccttggcaattctcttaccatgtaaatagttcacacaatatgaacttatcatttttattccaaacaatgatacatcggatacctctgtatgtaaagccatgtcttatgtctatatgtatagaataaattcctataattgaaacagttttattttgtttccactggcgatgaaagcatattttcctcacaaaatgtcattgaaaaactttgttgccaatgtaaggcttagaccaaatctcttggaaacataagttataaacttcgttgtctacgtgcagagctatctaagctctgctgacagctggtcgcccgggaaacggtcg

SEQ ID NO: 42536 - DNA, 571 bp, Mus musculus
  source 1..571: mol_type = other DNA
aggtatatacacttggaattgatggccttaattgaggaacaggactgtcacattgttccggaccctcaagaagtgcttgtctactactaccttccaggcagtaactcgggcaaccggaattttagcagcacagctaccggcttcccggggtctgtgcctgtgaggcccaggagccacagcttcccagtgtctccgggccaccgccgcgccgccgcgctcccgtcctgctcaggctcggccgtggggtctccccaactacaggggcggggcgggcgcggtgacgtgcagcggaccgacgcgatgacgtagcgcggcgcggtgacgcacgccctcagagcggtagcagcggccgcggaggtggcgcaggggactgttttccgtccgagcccggagcggagcggcgtctgactgaggccggcagcaagcggcccccgcgctccctcccgcccgccgccaccgcccgcctccaaccgccgcacgcggggagcagccgcggcccacggggccggaaccaggcctgcgtccggacggcagccggagccggagcgagagccggggcctcggcgtcccc

SEQ ID NO: 42537 - DNA, 312 bp, Mus musculus
  source 1..312: mol_type = other DNA
gttgtcaagctatgtatctgcatacacacaggtacacatatgtggatgcatgtcccaatgtagaactagtggttcgcaccaggcggacttaggatccagtgtttctatgtacactgcacctctgaagtacagcacctcctaagaaggctctgcatctggaagagttgtcactttcaatcagattttagtgtccagggcaatggctattggcattagagtccactttgtacaagccgggtgacccaatgtctagacacacacacacacactagctctctctgtctctgtctgtagtgttctaagactgaaaat

SEQ ID NO: 42538 - DNA, 482 bp, Mus musculus
  source 1..482: mol_type = other DNA
aagagcacccgactgctcttccgaaggtctgtctgaagacagtgtacttacatataataaataaataaatctttaaaaaaaaatggaaattgccatgttctgaatgagcaaagtggaagttctctctcttttttgaagattgaaccaagttatctagcactgagcttcacctctagctaagagaaattttcataaattcttctcagttatagaagtaaacatggcttctgcacttacaacagcaactcactagatagcccgcactggccatagacttacaggctggggctgattacttaaagactgctcaagtgcgctttcacacagttgacactgcaaattggattctcattttcccctggggcggtgcctgtccctcccagcccatcccttgggtttgggttacagaggcttggccagggcggggatcgatccttcaccgcccacccggtcgggagccctccgattgtcacgcgggcgcc

SEQ ID NO: 42539 - DNA, 296 bp, Mus musculus
  source 1..296: mol_type = other DNA
accatggaaaccactgctgtcacgtgtgctcgtcactctaggctccagagaaaaattctcaggttctatttaagaactaataaaataatgatggttatgcctagggactggtcctgtcctcctggtccctggtccaggccagtccagacctgtccagctcgccctgatctgcgtcggtgtctcggcccccacccacagcctggtgccagggtgttaccatggttactgggtagcacttgtggctatggtaacaggaagctgcctgttgtctcggcaacgagggggtcagatcatca

SEQ ID NO: 42540 - DNA, 377 bp, Mus musculus
  source 1..377: mol_type = other DNA
tgtttattaagagcctttatatgatccttcatctttatgaatgttaatccttttcaggaaaagaaaaatatgataatataagttctttcgctctcctaaactatctgacccacagaaaacggtccggctgttggaggtgtgtagggagagatcatctccgacccacacacagggcagctgagggtccggttgccatggagagctggagcgcgtgagcccagccgcccttctcgccccctaagctcgggggctggggctcggggctgggcttggcgcgccagggagagctctgagggggactccagccggactcaggcgccccgccctctcgctctcggctgggccccgccccctgggcagccccccgtcctcgtagg

SEQ ID NO: 42541 - DNA, 490 bp, Mus musculus
  source 1..490: mol_type = other DNA
aactaaaatgtttcatttagttaatttctgagatccaggctggcaggccatcctggtctacagagtgaattccaggacagccagggctatacagagaaaccacaaaaaacaaaaagacttctaacttgatttttgtgcttcaactttctgaatgctgagatacacacctgtgcataaactaagggtttgtggttgctaggacaagtcagatttcagaattttaacttttgattcctatttttgagctgcaccaaaggggcactcagtatctctatataggcaatctagattacacaaagaaaaacattatatttcggcatgtctgcgcacgcgcgccctggctagcaccctggggtggggacacgcccaggtaccatcgcggtgtcttcgcctgagcatgcgcagagcgccccggcgtgcccgagaccgcacgctgaggcgtgtggtgcgcgacctcacccgcccgcctcggtccccgccccttggcctg

SEQ ID NO: 42542 - DNA, 605 bp, Mus musculus
  source 1..605: mol_type = other DNA
aggtacagtcttcccatttagaatgtggcaacattgtatctgctttcaaaactctgcggaatgaagactagtgttaacagtttgaaaatactttgtagggaaaaaattgttaatgcctccaatactaaggtccaggcattttaaaagtgcaggattcgagactctattaacatccctccttattaggaggtcgcgctcacgttccaaagagagacttaagttcttcctacccagcctctaagtctggaaccctctaggaggccgctcagcctcagagggtgtactggggcggggtctccgggctgggcaccgccctggtaggccagggggcggtggcgcccgggacctggtggcggcggcggcgctggcccggtgggcgggccttgctccctcaccacttccccattggtcaacaggataacccttgagcaaatttggtgccttccgccacggaaggtagtcctcctcaaaagggcagtcccgcctaccctgagcttctctcaggaggtgcgggcgccccgttgagaggcggggcgccgccggccgcagcccggattgggcgaggggcggggctgcggagggattgcggcggcccgcagctgtga

SEQ ID NO: 42543 - DNA, 348 bp, Mus musculus
  source 1..348: mol_type = other DNA
tacacacatatgttgtagtgtgcatgtgcataggtacacacacatgtggaagccgaagctgcccaggggttaccccaacctgaaaaaagttgggattctcagaagtcagctaacagctgtttagcccagctatttggaggtgtgacctcagaagctcctgggaggccccacctgcccaagggaagaacatttccttcctcctgagttgagacatttttgaaatagtttggctattgtggttccaccttcacctctaacatttgataaaggatccggtggcctttcccagaacctgagagtttacactgcctgggcactgtgtccttcctcctgggtggggcaggaggc

SEQ ID NO: 42544 - DNA, 317 bp, Mus musculus
  source 1..317: mol_type = other DNA
ccccaacctgaaaaaagttgggattctcagaagtcagctaacagctgtttagcccagctatttggaggtgtgacctcagaagctcctgggaggccccacctgcccaagggaagaacatttccttcctcctgagttgagacatttttgaaatagtttggctattgtggttccaccttcacctctaacatttgataaaggatccggtggcctttcccagaacctgagagtttacactgcctgggcactgtgtccttcctcctgggtggggcaggaggctccactctgcccgaatgaagatgatgtttttctgcctatca

SEQ ID NO: 42545 - DNA, 558 bp, Mus musculus
  source 1..558: mol_type = other DNA
aagcgccgcggctaatcccggcggtactccggcgctgctggcggggcgtctccgccggggcggggcggggcagccctccgggagccaagagcgggagacgtgggccgggccaggccaggcggcagggccgctgggtgctggggcgggtcttcctctggctgcgccgcggtggccaccacagccccttccttcggcggtagccgcggtgggcccagtcgcctcagggtccgagagagcggcggccgcgcatcccccgccctgtcagagagactccgcccggactgggcaggcacatcccccgccgcaccccggctaaaccgcggtccctgcttttgcccggggaccgggtcctctcaggcctgcgcgcccccgaccccgctcacgcggccccgccccgcgcggctctccagcagcagccgagcaggcgcgcgcgcacttacctcccacgccccctggccccggacagccccgcccggccccgcctccgcacgtgacgctgctggagcgggctgcctgcgcttgcgcggacacgtcgtaaggttggaaaggcaaactctg

SEQ ID NO: 42546 - DNA, 452 bp, Mus musculus
  source 1..452: mol_type = other DNA
agcacttcaaaagagcggatattttttcattttcttctaatattctggattttacagcatagaaacaactcagtgaaaagtgtctgcgtggaagggaggaggcgtcttacctattcctcaggagctctgtactggccggaaagtgagacttaaggtcgtaatcccagagtttgcctttccaaccttacgacgtgtccgcgcaagcgcaggcagcccgctccagcagcgtcacgtgcggaggcggggccgggcggggctgtccggggccagggggcgtgggaggtaagtgcgcgcgcgcctgctcggctgctgctggagagccgcgcggggcggggccgcgtgagcggggtcgggggcgcgcaggcctgagaggacccggtccccgggcaaaagcagggaccgcggtttagccggggtgcggcgggggatgtgcctgcccagtccgggcggag

SEQ ID NO: 42547 - DNA, 309 bp, Mus musculus
  source 1..309: mol_type = other DNA
agggcagatggggatgggcatctcttcctgcacatcatcccattcattcgggcctaggtgtgttgaccaaaatcctctcttcctctgggagtcaggtaccaggagacacagacgcgtgagtcttccgtggggcaaggccccaagccacagggtaggtgggatgtgtaacaccctcctcacccccaataatagacagctgagagcatgtggtctcagccaagctccttgctccccaggcatgttaggcagcctaggaatcagggctgactggctcccaggggcacctgggagttgatcccctcatacact

SEQ ID NO: 42548 - DNA, 288 bp, Mus musculus
  source 1..288: mol_type = other DNA
gggggtgaggagggtgttacacatcccacctaccctgtggcttggggccttgccccacggaagactcacgcgtctgtgtctcctggtacctgactcccagaggaagagaggattttggtcaacacacctaggcccgaatgaatgggatgatgtgcaggaagagatgcccatccccatctgcccttgcctcacagtgggataggacgagtttgcccgtgttagaacctggggcatggcctcctaagtgggcttaaccctcactatgacagggctgaggacaggagcctc

SEQ ID NO: 42549 - DNA, 424 bp, Mus musculus
  source 1..424: mol_type = other DNA
agaagtgggttttgaaccaacacatgtctgtgcttttggactttgaatcatactattacagaacaaagctgatgtttggagttcttcaggcttctgcaggtctggatggtcactctgagtctgctaagacttaatatactggtttaagtgctatgacaagcaagtggcatgctggtgagatttctacaactatcaaatggatggaaaggggaatgcagacatccacccacctatatcccagggctggcaacttgtgcatgccccgggtctccgcttctccagtctgctgctgcagtgctgcagcccactgcctcctgcctgcctcagtggaggaggcagagccatccccctgcattcattctgagtgcttaccttggaccccttttcatgaatgaggccagatgcacccagctggctggggaga

SEQ ID NO: 42550 - DNA, 516 bp, Mus musculus
  source 1..516: mol_type = other DNA
aaatagttttaaaactttatatcagtattgaatatggtcagaccttgatttttgtctttatctactagagatagatggtacactgtccatttacctaacatgtacagtacatgaggcagatatatatgtgtgtgtgtgtgtatgtgtatgtatatatatatatatatatatatatatatatatatatacacacacacatacatacatacatatatatgttatatacaaataccatgacattttatatgagaatacactgtatctattagactcgattctgcctgaatccagcagggaagggcacggaaggcactcccaggcttgcatttggcacatggtgaatgcaggataaacttgttcccaagtcctgtgttttttggtcagctccaaaaacacgctgagcctctttgagcctttttaaatagttccccgcccgggtgacaaaacacagctctgtgcagactgctggttggggccagaggagaggccccagctccggggaccaaggctccagct

SEQ ID NO: 42551 - DNA, 350 bp, Mus musculus
  source 1..350: mol_type = other DNA
ggaaagatatagaagctactgcttcaccttcctgtcccagcctctggggctgtatgatggtacctgcggccgcctttcagtattgactaagagcaacatttaaaaatactgcaggaacatttttttagcatatgttaaagtatacagtctaaacttttattctgtgcatctatttccaacagtttgagaataatgaggtaaatggctttgaatttgagtgcccttttgaaaagtgactttgagcaagcccggatcacactgcctgtgctacagtaaatgctgaagaagcatcctggcatccttcccgagagctcgaaggaagctagccgcagtgatccctgcttcctcca

SEQ ID NO: 42552 - DNA, 300 bp, Mus musculus
  source 1..300: mol_type = other DNA
tgcccgcaggggcctcaggaaagctgcctttccagctcttccctgcgatcttgccaggaaaacaggcagcaaatcaaacttcccgcgggccatggttgccatagccaccgattttcaagcggcctggccccacagatactccccgaggctagccgcccggacggcctggtaacccctgagcgggttgctgccatgattcccggaaaatcaaataacgtctattgtctcattgaggctagggtgggctagtccaaagcactctgagagtttttgaatatcccgagcggaattgagaaagga

SEQ ID NO: 42553 - DNA, 224 bp, Mus musculus
  source 1..224: mol_type = other DNA
aaatgtcagttacatttaatccacaaatggtcatagtgcccgcaggggcctcaggaaagctgcctttccagctcttccctgcgatcttgccaggaaaacaggcagcaaatcaaacttcccgcgggccatggttgccatagccaccgattttcaagcggcctggccccacagatactccccgaggctagccgcccggacggcctggtaacccctgagcgggttgc

SEQ ID NO: 42554 - DNA, 218 bp, Mus musculus
  source 1..218: mol_type = other DNA
tattacagaaagaatattgttctggtgactggagttaatttttggatgtgtctcctaaatgtcagttacatttaatccacaaatggtcatagtgcccgcaggggcctcaggaaagctgcctttccagctcttccctgcgatcttgccaggaaaacaggcagcaaatcaaacttcccgcgggccatggttgccatagccaccgattttcaagcggcctg

SEQ ID NO: 42555 - DNA, 460 bp, Mus musculus
  source 1..460: mol_type = other DNA
ctgtcccctaccttggggtcctacagcaaagcaaacacacgtgtatgtcgaagaccttcgatgaagagcttcgtggtcacccaataaatacttaagtgctgtctcaacactacctcaattcagtttgaaacttagaatgctctaacatcattgagggctcctttaagatgcagctcctataagcttctatgccagaggagctaacggtagagctttctcaccttggcgggtttgtcagggagacaagcctgacttgtgcctgtctccgctagtccagcccaaagccagaagccagcagagctgcgtctctgcgccgggcgccaccggacctggtctgggttttaccccgggacaggcctgtggagcgcgggggagtagtccctgagcgagtgctcagggcggtgcccgccgtgcggcgtggggcggatcgcgacccccgtccctccccggggccgagtct

SEQ ID NO: 42556 - DNA, 309 bp, Mus musculus
  source 1..309: mol_type = other DNA
ttcagacttctgagtcagatgcttatgcctgttgtgtctacaaaaagaacaaagcactttaaaaacataatattttacattttttgagaatttcatatacaatatatttcagttatatttatcttcaagaagagagcatcacctctcctgggtcctggatgggatatgtttagcctataagtctaggctggatttctctaaccttagaccggcgctgtgccacgctgcatagctgaagttccccaacttttcctccagaggggagaggtcagaaccgaccccaccccagccaggagacgggcccgattg

SEQ ID NO: 42557 - DNA, 495 bp, Mus musculus
  source 1..495: mol_type = other DNA
tcgtagccaggagggccccaactccgttcgggcccggagcactgctgaggaacccgccttggcaaggctgcggccaggacgtagctgtccccggcaagagccccaaatggggctagccgcactactgagcctgttgtccgcagactgccaggcccttccatctgcgcggcccgccaagccagagttctcagacttccccctcgccggcagctttatcggtcctaaatcttttgaagtgaaaacattaaactgacaaagtgattctgtttgttttatagtatctaattgggctgctttgcaaccctaatgagattagaggggggttaccagccacaggtacccgccaaataattatttgctagtagatcgtggcaggactataatatatatctatttattatatgtctttcgtcgcgcctggcggcgcccagtcgcagtccgagtcccgtggccccacgtgggagcctcgcactcccattggccaacgctaggcga

SEQ ID NO: 42558 - DNA, 402 bp, Mus musculus
  source 1..402: mol_type = other DNA
gcaagagccccaaatggggctagccgcactactgagcctgttgtccgcagactgccaggcccttccatctgcgcggcccgccaagccagagttctcagacttccccctcgccggcagctttatcggtcctaaatcttttgaagtgaaaacattaaactgacaaagtgattctgtttgttttatagtatctaattgggctgctttgcaaccctaatgagattagaggggggttaccagccacaggtacccgccaaataattatttgctagtagatcgtggcaggactataatatatatctatttattatatgtctttcgtcgcgcctggcggcgcccagtcgcagtccgagtcccgtggccccacgtgggagcctcgcactcccattggccaacgctaggcga

SEQ ID NO: 42559 - DNA, 620 bp, Mus musculus
  source 1..620: mol_type = other DNA
agccgcagagctcccgggctcgggctacgtctccccctccggtgctctccagcctgcgcgctcctaggcggcaggacgcagaccgctcctcgccagagacgcggccggaggagccgaggcttcctatgccggctgggaggctggcggcggcggcaggagcagacggaacagcaggctctcctctccgaggggggtgggggggcgtcgaagcgtcctcgctgggctctagccctcacccccgcgagctccgggcccgaccgcctctgggatctgacccgcgcgccccggatgctccgggctgcccagacgcgcccccctccgcgacccgtgaggggacaggagaatcccccttcccgcaaacccccggcctcgggattccgcactggagccgccagggagcccggcttctgttcacgcagccgggggaaggcggccggccgcagccggccgagccctaggcgcacaaagcgcgagcccgccgacgactttgccacgcccgactctgggatttcgctgcgagagcgggctgggggggccgggggcgagctctcggttccccggccgccccccgctcgggggagcgcttccaagctctcggccgcaaggcagatatttaagca

SEQ ID NO: 42560 - DNA, 321 bp, Mus musculus
  source 1..321: mol_type = other DNA
gattagaattttattaactttaaagaaaccacttaatctagtatgcactacattctagttgcaagtttctaaaacgttttataattagtactttaaagagtggacctctgtcaggatcagagcccctgaacctgagagctgcatttcaatgtaatgaattaaacattaaccacgatatattgcatttgatatgcaactccgggtcccgggtggtatttatcaaccggcgcgcacgcccggggtgagggcaaatccggaactgcgttctgcagacgcgcctctcgagtcgggcatgatggtcggcgcggtcccataagaagc

SEQ ID NO: 42561 - DNA, 428 bp, Mus musculus
  source 1..428: mol_type = other DNA
agactaatgtccagtaatatggacattaactatggatattaaactgcatctctgtatatccaggaaacatcaaaatcaagaatttgaaggttaaggatgtgttgcctaacattgtgaggctctaggtttgacacacacacacacacacagagagagagagagagagcaggttgtctgccaagttggtcactgtaagtgtgaggccagcctgctctcgtctgttctcaggacaaagactgggagatctcagcttctgcgtcagaacggaagggcggaagggccgggatttcccctctgccctcctcagcctccggctggcgcccttgggttgccaaggagacgagcgcccctgctggccgtgccagcgctccccgaggccccgccccttcgccgcaggcggccgctgattggccgccgggcgggcgcgc

SEQ ID NO: 42562 - DNA, 443 bp, Mus musculus
  source 1..443: mol_type = other DNA
ctttgctcaaggtcagagttgactagagtctgggacagtctcctattcttcctggtgtgcatacctgccagcaaggcaggtcagggaggaccacggagtctgcccaccttcagcacctggaagaaccagcttccagcttcgctggtagagggccatgttccaatctgggaacctaggaccagagacaccgagcctgcggacaaggtggcaggggccatcatcagccgggggcctctcagcagaggagagggcctacgggctcccagacctcagatctaaggaccttgtgtacctcaaatttcagctaaggggcacctgaggctacgaggcctggcgaggccagggagctgggaggagagcccatcgctcggctcctcccagaggccgccctgccccgcccctgccgggacagcctgggcggggacccgcgacaggagggcgcg

SEQ ID NO: 42563 - DNA, 371 bp, Mus musculus
  source 1..371: mol_type = other DNA
acaagtaattgtagaatcacatcgcatattaaattacagagtgactgtggcatacatagtctatgcattacattatttactctgaacaatatcaagtgttccatgatattatctggcttaaacttaaaagtattctgactgctatattgaaaatagacttggtcatttgggtctcaagtgagcaacaaggaattgtgagcttatttggcttacaactaaagataccagttaaatctagcttagatagagaatttgggataccagtctaggactagaaggcctggccaagaccagttctttggtcttaactactttaaaaatagaactgtaagatgtttcttttaagacagggtgccaccacctcccaacta

SEQ ID NO: 42564 - DNA, 253 bp, Mus musculus
  source 1..253: mol_type = other DNA
catctttgtggaagactttaagtagaacgcacaaatgaaaaggtccttttgacgatatcatcgccgtttgaaatgggacctccctgttcacttcagagagcagtgaaaacgcacggatgcccaggtgcaatttattgatgataggcggggctgacggagctgccattcgaagagcccctcgccccttaccgtggctgggatctcgcgggaagagccgcgggcacggcggcggctcggctccccagtagcgcgc

SEQ ID NO: 42565 - DNA, 253 bp, Mus musculus; identical to SEQ ID NO: 42564
  source 1..253: mol_type = other DNA

SEQ ID NO: 42566 - DNA, 247 bp, Mus musculus
  source 1..247: mol_type = other DNA
gactggaatctaagttccttgtttctaagacagacatttcattacatgtgagttttaatgattaatcatacagaaaaaaaagtatagttctacagatttttggtctaaatcaggccccgtacagcagcctgtgcctgtaaactcaggagctattcttcgatcagacatactgaaggcttgaagtgccacttatcgagcttctctagccccaggacgcatgcgtaacacgcgcggccgccctgccccc

SEQ ID NO: 42567 - DNA, 387 bp, Mus musculus
  source 1..387: mol_type = other DNA
ggtttcttaaaaaacgtaagtttggctctgagaatcggcagttccactctcggggaattctggggtcgagatcgcgccctcgctcctttggagctccaaaaatgcgcgccctccttgggcctgccttgtgcccgcgcgccccaggcctcgtccgcccggcccccgcaaggaccccgcccctcccgtgtccacgcacctgcggccccgcccccggccacgaaccttcaggtccaaggtgcagccgcgctcctcttcggcggccccggtatctaaaggggtccatggctgagcctccctggcccgctgcgcaggatgcccattggaccctgccccccactattggctggcgtccgaagcctcgccaggagccgcaggtcccgcctctac

SEQ ID NO: 42568 - DNA, 597 bp, Mus musculus
  source 1..597: mol_type = other DNA
cctccggggcaggctcttcagaacccccggggggggggggagagagagagagagatgctccaaatacctcattccctcaaaccggttttgcccaggtactcgcatggccatattcaggcaattgtacttgaaattcctgcagctgctacactccccaggtgaacactcttgaggagggtcggtcctgcctctcttacagagagctctctaagaagcttgccaccaagcagagagcctctgggcgagtctggcgagccaactgggcccaatgaggagtgcttccacgagccctcctggccaccctgaactcgtgtggcagctgcgggacccgtagcgggtggggaacctccagggggcgaccagccctgggaaggcatctccggccgcgcgccgcgcccgtccagcttgtgacttcaccgggcgcccggagccaacgcggcaccgaaggccgggtccccgcccacggccccggccgcaggtgccaggagcccgagggggcagcgcctggacgcgcggggctggggaccgtcaggcgcccggactgcactcccgcctcggtcggtcctccccgccccccgcgcggcccgccgcccgccg

SEQ ID NO: 42569 - DNA, 536 bp, Mus musculus
  source 1..536: mol_type = other DNA
gtaactcacagacacaagtcctggctctgtcactgtgtcagacccattcttagggatgccccccgggatctatgccaaagcactttatagtagttttctagacagctgcggaatggagcaggcatcctacctccctgttcctgcaccttcctccggggcaggctcttcagaacccccggggggggggggagagagagagagagatgctccaaatacctcattccctcaaaccggttttgcccaggtactcgcatggccatattcaggcaattgtacttgaaattcctgcagctgctacactccccaggtgaacactcttgaggagggtcggtcctgcctctcttacagagagctctctaagaagcttgccaccaagcagagagcctctgggcgagtctggcgagccaactgggcccaatgaggagtgcttccacgagccctcctggccaccctgaactcgtgtggcagctgcgggacccgtagcgggtggggaacctccagggggcgaccagccctgggaaggcatctccggccgc

SEQ ID NO: 42570 - DNA, 305 bp, Mus musculus
  source 1..305: mol_type = other DNA
ctcttctgctcctgaagacaaggagttgaaacaaatatgttagtttctgcacatttgcatccagggttccaagaagcactgtggccttgacattttaaagcccaggtgtcacagagtggccctgggtcatcttaggttctcaggtaccaagctggcaaggtggctggctcccagaagccatggggcagcagcctgccaccggctcaggtggcagaggggcctagactggcctggagccagggccgccgctgtgtccgcgcccctccccgccgctggagccctcccacttcctctgcgctgctgtc

SEQ ID NO: 42571 - DNA, 404 bp, Mus musculus
  source 1..404: mol_type = other DNA
ctaaccaaagccttgttgaatggcttatagcattctttggataaatgctcttttcaaatcggctcataatagccctaacgcgcgtgaatcactggcagacagtatcccacaagcatcctagggtcctgtggggatcaggcgcaccgccggtcggtttaggaagcaatacctacttaagcggtgctggtgctgccggcgcggtccgcgaacacccacgcgcggctcacgggagccccgctcgccagcggaccctttcgatcgccggtgggcgagtgcccgcggtaggccgttccagaccctccggcccggcgcgggcaggcgtgcacatcgctcgctatccagggcgtgcgcgggcctctcgagaccccagcggcgacccgtagctcgggcgcgcgcctgtcgca

SEQ ID NO: 42572 - DNA, 271 bp, Mus musculus
  source 1..271: mol_type = other DNA
cataccagctagtctctggacagggtgtggcctgtttggccttactgccgaagcgcttctgaacagggctcataggttcctgcacagaacttacgaggttcttattctggaccacctcgttgtcctccaactaggagagaattcactattctcttcacctatcaaagcacagtggatagtttatcgagcagtctttaatctgaggaaggagggctcaaagaccccgggtcttctgatgacctcagcttcctgacctctgggacataagtta

SEQ ID NO: 42573 - DNA, 247 bp, Mus musculus
  source 1..247: mol_type = other DNA
tgtgtagtacacaggctatgtgaccacacacagtgactgaggcccccaccctttttcctgtctcaggggacggggagaggaaaggaacttcctgcctggtcgtgtgtgtgtgcgcgcgcgtgcgtgtgcgcgcgtgctatctggctccagcaaggagcccagctctcagacggagtgctgcagagccccagcctccgggggcaggggcctccaggagagtctccgtggcagcggaggatttattacc

SEQ ID NO: 42574 - DNA, 223 bp, Mus musculus
  source 1..223: mol_type = other DNA
gtgtgtgtgtgcacacgcgtgtgcgtgcctccacagaactcaagcctgggtctctgtgctctctggccaggcctaagacagggcctcagtgcggtgattcagaacagggaagccctcagctcagactgagctacccctaatccctgcactcgggaggcagaggcaggggttctaggacagcctggactacacagagaaactctgtctcgccagcctggcgaaa

SEQ ID NO: 42575 - DNA, 501 bp, Mus musculus
  source 1..501: mol_type = other DNA
ctggtcaggacctggccttcttgaattcagataacccaaatgttaagaggattttgatagtaaaaagttgatcagttaaaaaactgttcatcaccattagtaattatatcttaatagttcacagatctgtaccccatgttcagaatccctcagagcttttatttcggaaaagataccatgggaatgatatatatatatatatatatatttttttttttttttcttttttgcctcatcatgaggatctgcgtaaacccagtcgctccttagacaaaactgactaatgcagaacgcatcttgcgcatgggggcgcgccgtggcttcagtcaactggggctcagagggcagccaggccaacacctccccagatgtggcctcttccctgggcgctactggctcggccagtgtgggggcggggaggtcgcagctgtgcgtgcccggggcggggcagcgagctcctggagttccgctagaggggaggttccagcgcggcccccggcg

SEQ ID NO: 42576 - DNA, 645 bp, Mus musculus
  source 1..645: mol_type = other DNA
cgacgtcgaccaagtagtttgccttaaacctgttagagataagagatactggggttggggcacaaacccaagtccccccagagtcaggagccttggggcgctgcgcctgctcccagtctggacggcccgtctgagcccggcttcgggccctcggtggcaatggctagctttggaccctagcgtggggggcgggggggactttctgatcccctccatcccttccggcctctctggctcgcgcagggccgcaggtgcgagccgcgggccgcaggtgggcggccgcttacctggggcgcacaggccctggggctgcggagaggcggcgggcgcggcgcgtggcccgcgggcgggcgcacccggggagggcgcgagggacagcgaggggtggtgggtgtggcgccccggctcgcagctgtcaggcgctcccgcccagcgccggcctcgccactcccgcctgtgaccgaggccgtgcccgccgctgcggccagtccccggcctcgggggcggcggttccgggcaccgggctccgttccggggaccctggcgccccgtgcctgttgagagcgggaggggccgcgggtggcagcgcggggagcggggttgcgcggctgtgcgcgcgcgcggggaggggccgcgccgtcaccc

SEQ ID NO: 42577 - DNA, 295 bp, Mus musculus
  source 1..295: mol_type = other DNA
acaaattttggtattacattgaaaatgatcaacatttaattgttcctcctttccggggaaagtggaatttaattacaaataaatacctacacgttgccatttgtaagcaattcttttgtatagacacactttaaaatgcatttgatatttttgcaacggttgaataagatagaagaaggggcataaaaacatgcttttttttttttttttctttttttaataaaaaggtgtaacacatggcgccccaggaggcgggtcccacatgtcggctccccgggttccggcgccatcgcgt

SEQ ID NO: 42578 - DNA, 501 bp, Mus musculus
  source 1..501: mol_type = other DNA
cttgaattttcagcaaataattgttatatagttcctagcagaaagtctgagaaatgcttcccttacactttcatgggtaacactaaatgctcagccttttcagggctgtgattccaggcaagcgccacatctggcttgggaccctatcttgcactatctaggtaggattcagtctggacagtgaacacgactgtgaggacatctgcacatacgtgcagtagcccgggcaaaggccaggccttggtgtcagctcatgcacacctcaagcacctcagcatccctgaggaagcgcctgacagccagaccgggtttgtcgctgtggcctgctccgaggttacctgaggccagaggtgaccccgtcctgtgcgcacgcgccgcacctcaaggcgctctcacccgcgcgctgcccgctgggtgtcccccgccctggcctagggtggtgaggggaacacgcatgcgcacactcgcctgaccccgcccccagaggcccggccccagggg

SEQ ID NO: 42579 - DNA, 583 bp, Mus musculus
  source 1..583: mol_type = other DNA
cccttgctgtaggcctcagacaccaactgataaaattcttagcctttgggggagttctggtctggcagaacactaacgcgcgtgcattttgctgagcacttcagttcacaagaggaatcttagggggtgcttgccaccacccctgaggcgggaggtcagaaaccggcctcagaaggttaagcgcctggcgccgagacctgcggaggagccggagcctagggcccagctcgggcagagcccgggagaggtcgccggccctgcgcccatggctctgaactgggccttgcagcccggctcagacgtcgggttactcacgttgcaccagccggtccccggtgaaggtggcggagcagctggtaaccagcgcgcagggtacaccggcagccatcgctgcggcagagcgggttccgcgccggcgctgcttccgccttgggccgtaccactgcagcgggcacgcgggggagatgatccgggcacgcgcgctgggcggggccgcgcgctgggcagccgaggctccggctggccctcacaccccccttccccgctcctccagtggagcgcgccggtcgcgcgcgccgcgttg

SEQ ID NO: 42580 - DNA, 758 bp, Mus musculus
  source 1..758: mol_type = other DNA
ttatcttcaggaatatagatactaaaggatcttaaaagacagcatcttttaagtctaacctgagaaaatatgatgtctggagagaacctactgcttttagcaaaacacaattgctgagatttcacagaaagacaaagaaactttaaaagtccgtccagttttttgtgctgccctgggcagggttctcccgggtggacagcctcaggggtgctgcaagcagcccaccggggatgcgaagggccggccctggagagcgagcagcgtgcttgtgggccagcggccgccctgggatggaggagtgcctgggtcagacgagggcgccgccactcacccaggttgatgaccttgagcgcggtgaagaagcggtcctgcggggccaggtcctgccagggcgccttggagcagtgtggtagttggcgcccagcaccggccaattgaagtgcgacaggccgaactggtcgttgtggaccgcactgtagggcacgcagaaggaagtccagtgcggcagccgccgctgcagcaggtgctgcgtcagcacctccgaggcgcggggcttcgggcgggaggcggcgcccgaggcccagggccggcacagcagcagccgcagcgtagcctcgtgggccctccgcagggcctccatggccggggcacgccggggagccggccctgggcccctggggccgggcctctgggggcggggtcaggcgagtgtgcgcatgcgtgttcccctcaccaccctaggccagggcgggggacac

SEQ ID NO: 42581 - DNA, 561 bp, Mus musculus
  source 1..561: mol_type = other DNA
gttggaggccagcctggtctacagagtgagttccaggacagccagggctacacagagaaactctgtctcaaaaattttaaaaaaagcttaagcacggctttaaacatttcataatttatttttaaatggtgcccaggcctgcctggattgtagagggtgctccaagacagtcaatgaccatctggtaaagcacttgcttggcgctagcatgacccccagagcatgatgccctaagtctgtgcggccgccagcccggcctgtttcccacctgatggatccaatggggtcgctgtcctcctgggcctgcgccatgactaaggagggcagaagctaggctccggaggtatggcctcctgcggagcgctcctagatggtgcgggcacccgtcaccatagcaacgcggcgcgcgcgaccggcgcgctccactggaggagcggggaaggggggtgtgagggccagccggagcctcggctgcccagcgcgcggccccgcccagcgcgcgtgcccggatcatctcccccgcgtgcccgctgcagtggtacggcccaaggcggaagcagc

SEQ ID NO: 42582 - DNA, 508 bp, Mus musculus
  source 1..508: mol_type = other DNA
aaacagtcgaatttcggaacttcagtaagactgcaaaaagcttggttcactgggcccaagggacccctggctccagctattcagcgtcttcctgggcccggagcttttctgaacccctcaccgcgcccgagtcctctccggagtgcagccagcccttgacggacagtgcctctgtggggcggcgagtccccaggagtccggtccctcggcacttggcagagctggcggccgccctacccggtggcccacgtgggcgcgcttggcggcgctgggcggggaaggccgcgggtcctccccggagcagggcgcgggggaggagcggggagccccggcagcgagggggcggcgactgcgctggaggctgcacgcggagctgcgtgcgggagaggagcgggtagcgcggctgctcggccctggctggccctgcaaggcggcgatcgcagaaccaaagccatccaggccagcaaagtttggctgggggttggactttccttcccggaggcggcac

SEQ ID NO: 42583 - DNA, 335 bp, Mus musculus
  source 1..335: mol_type = other DNA
caagcacgcccgaggaggtaccccgccgcgccggctccagggcaggagcggccttaacagtgaaacagggctggcggaggagccaacccgccccccagtgtagcctaggcgccccccaactccccagagacggagggcaggctaaagtttttctcggagtccgggtcgcggtgggttcacccagatccgtgcccaaggcacgacgtgagcttgagagtgagtcgcgggcactgtcagcctcggggcgggggtgctggggcgggcgaggggcgggggcccgcgttcggcccgccccgggaaccagccccctcggagcctcgggctcagactccgcg

SEQ ID NO: 42584 - DNA, 319 bp, Mus musculus
  source 1..319: mol_type = other DNA
catactgagtgtttaagtgcttacacacacacacacacacacacaattgaaatcccagtgggacactacagtcttgatggtatctctcttaaagtgaggaagtgaaagcatgcagatctctcacttcctgtgagttggccaaagccaggacgcaaggtttgacctggtttaagcagacactgtatactgtatttctcttaaattggattatagtctctattggcctcaaactctgcccttaagggagtgcagtctggcttcaaactacacagccaacgctggccttgaactcacagttctccaccatacccagtgtggg

SEQ ID NO: 42585 - DNA, 242 bp, Mus musculus
  source 1..242: mol_type = other DNA
tttctctgtgtagccctggctccaggctggcctcgcaccaccactgcctgccagggcaacaggcatacctctgtaccccaggggagcagggctcctaggacttccgggaggcgcctctgatggaggctctttgctaacagagctgctttactcccagagggagctgggaggacgaggtcacctcccccgatgccgcccttcttccttgggaaggagccagctggatgcccaggcccagtgcc

SEQ ID NO: 42586 - DNA, 455 bp, Mus musculus
  source 1..455: mol_type = other DNA
gaaattgtcttaaagaggtgaaggcaatcttcctggaaagcataaattttctttgaagacaatttctccgaaagcacatgacccgccacggcctgtgcggagttgtcatcggacgatctccagcaaccctgcttagaactaagcaaagcttagaactaagatgcctctaagatggcgccgccccccagaccagggggaagcccagtgtagaagacctccactcaccatgacggggagaggagaaggccacgctcctctctacccggggaaagacttctacatgtaaaaatttcaaaaggtaatattattgcgtgacgtgtgttaaaattatgtattcattttttttaaagttaaaaagagtgattagaaaggagctttttcgcggaataatttcgcgagagctctactaaattaaagcaatgtgttagcgttgagtactcatggcctctgacgtc

SEQ ID NO: 42587 - DNA, 390 bp, Mus musculus
  source 1..390: mol_type = other DNA
gtgagtcgctgacttagatttatttcacttcggcatcaggaggctgccgagccgatgacatctagctctctgtgtcccaggatagaagcgtgtactccggaggccggcagtagcctaggcctccgcagagccctggctgcctctcacatcccaggtccaggaaagccggcagccagccaggggagggacaagtaccatccccgccgcgcgggacgtcagaggccatgagtactcaacgctaacacattgctttaatttagtagagctctcgcgaaattattccgcgaaaaagctcctttctaatcactctttttaactttaaaaaaaatgaatacataattttaacacacgtcacgcaataatattaccttttgaaatttttacatgtag

SEQ ID NO: 42588 - DNA, 449 bp, Mus musculus
  source 1..449: mol_type = other DNA
agattggcctgtatatggcctcaaatattgggacttttacttctgtatttacatatttgtctccagatatcaagctcttgacatttaattattgttgtcaatataagtactcttgattatttttaagtgaatccattattattattataacattatatggttttattggcattgaatgtgggctttaaaatctaggtttcaaatacaggagatggtacttcctctaatgtcactttgccagctgtgttcaaagctcccattcgaccagatattgtgaacttcgttcaccagacagccctatgccgtcagtgaattggccgaattccaagagttcgaggtggtggggtatccttgattagtgctcttggcaactgaccaactggacttaggctaattaatatttgaatcatgtttaaacatactagagtctctctagacaaaaatctgga

SEQ ID NO: 42589 - DNA, 376 bp, Mus musculus
  source 1..376: mol_type = other DNA
tattaaaaattgttaataaatcaaacatgtggtgacaaacaagccccttgaaattaacaaacttaggtcatcagaattatagaacaaaattttttaaataaaatttcattctctaggctgctttgttccacatggtagtctactttataaactgaacagccactagaccacagctatggccactgtgtctgtagaggtgcagtgttagtctgatcatcctagaattatcatcgtttcctcttgccttgatgttaaaactgctagcagttcctaaaggttagtagcattcctgtccttactaggcgaagaatctccatgctctttgggattccacgtgggagctaagcgcccggcgctggtctccgcagtcggcggt

SEQ ID NO: 42590 - DNA, 425 bp, Mus musculus
  source 1..425: mol_type = other DNA
tacaatgacagaaatagtctacatggtatttaaactgtactgaattttagttaatttagatataaatagctatatgtgggtaatgtctagtttagaaaagtacaacactacaaaatcctcctgcattttactgatgttagccgaggcctgacctaggctctaacctagatctctggtaaccgtttgggggtccccagcagtgggcaagcctctggtgatggaagggtcggtgcctccggaaccactgccaaaacacctgtcacttgtttctgctttccctgctaaagatggtaaggctttttaatatgaaaatggcttagatttttttttttaattaccacactcagaaatagggatgcaacaaattccatttatggttaacccaggagttatttagttaccaatattaagtcatggagggtcaa

SEQ ID NO: 42591 - DNA, 367 bp, Mus musculus
  source 1..367: mol_type = other DNA
tgtgtttgggtatgtacacaagagtacatgtaccctcagaggcacaggtggttgtgattctttgctgaccccattaattagtgtgtacctccattttagtagaattaaaatagaaaaatcatgtcagtttagtttaaggagtctcttgacaagtgagactgggtccaagctggcttcgaatgcgtacacatcggacacgaaaagggcttttgtctgggtcaaaatgacccagcagccacctggataccgctggtcagcagagggcgcccggaagcctctgaggctagtccccattggctgtcggcgaagccgtgagggaagcgctgcagcccccgtgggggcggggcctgctcgtttccccgcccct

SEQ ID NO: 42592 - DNA, 349 bp, Mus musculus
  source 1..349: mol_type = other DNA
caaagattaaaggtaaacactggatccaatactttttttttttaatacttttaaagaaaacagggaaccctcctttttttgttgttgacatacttttttctttcttaaagatttattttatgtatgtgagtacactgtagctgtcttcagacactccagggctctagtcactgagccctctctcctcatatctttatttaattaacaaaattcatagtcgtggcattttgcctccgagtgctgggattccaggcgtgcactattatgccagacattccggatgggtaggcgggcttccgagcgcggtgggcggggctcagacccttaggctcctcccacgccagcttgt

SEQ ID NO: 42593 - DNA, 352 bp, Mus musculus
  source 1..352: mol_type = other DNA
atattaaataagcagtcttacttcttatggctacagactcagcaccctcgtgtctgcatacatttctgcacacactgaaggcccagtatggacagatcttgccagggctgggtagcctagtgcacagagcaccctggggccagtccccaggacacttgttgtgtttgcatctcatttgcatggtccatacagactcactttcagctctgcagttctcaaggtaaaaatgtagtgcttttcctgaaggtcattataataagcctttttaactttcttcacggaattcagggaaatcttccagctgtcaggtaaaatccctggggggccccctgctcctctagttcctgggctt

SEQ ID NO: 42594 - DNA, 469 bp, Mus musculus
  source 1..469: mol_type = other DNA
cagtgcttggagaatccagggtgtgtggtctcccaagataccgtcctttttgtcaaacactacaagcacagtacttaggctataaaagttgtagagtagtgtttgaatgtttacgtgtattaaaatttaaaataagcatatttttgaagaggaaaaccggtttggccagcagggttaccagctttgcttttcaattctttcagatactgcaaaaacaaggacgagaaaactctacagttattacctctggtttttgacaaaaaaataataataaaaataaaaataataatccttttacacttcgggtgaagtttatctacacttttcccgcccggggacaatgggcccggaggattctcagccctggctaggtcgctcccggtagcggtagcgggaacgtgaacgctgctgcctgcccgaccaggcccgaggggcgggcctcaggcctcggtctcgcctgagcctgccg

SEQ ID NO: 42595 - DNA, 327 bp, Mus musculus
  source 1..327: mol_type = other DNA
ttgagtcttaacactgatatttgctaacatgggaattgccattcttcttgtgttaaaatttatttaatcgggcttagctatctttattccttaactgaagctgaggctgataaattgattagtgtagtcgcagatataacaaggttattctattattcaatatgagctaaagaatacaatcagagatttgaactcggatcgctggattcagagtccagagtgctaatgcctttacacttcgcttctctgagaacaagccaaaggctccaaggaccattttaggattgtttacctccggaagtactttctgcgaggggctgggggcgg

SEQ ID NO: 42596 - DNA, 299 bp, Mus musculus
  source 1..299: mol_type = other DNA
aagtgtgggaccccacctgccctcatatcttggaaaggagtaggggtgaccagcaggtgttcccaccacctggctaagtctaaagtgtcacctgactgaagacttccaggtggctctgggtgcagtgccaggcctctgaccttgaagtctacaagaagccccgctggtttaagtccagcctttggagttgagtccagcctttggagttgaccacagcatggcaagttcttactctcactttacctggtgcagctcagcttgttctgcggtgggggctgccgtggcagcagtcgcagcgg

SEQ ID NO: 42597 - DNA, 321 bp, Mus musculus
  source 1..321: mol_type = other DNA
cactaagatttttggataacttcaacctagaggaatttttttttaaaaggatttctgagtaactctgtagaggtaatcaaaaaggcatcttgccaatagccattaacagtagttttaagtaggatccaattaatcaatgtaatggacaccctttcaatcaacaatagctgttttatcaacgcgcttttcagagaacccctcttttggtgggcggatctcagctcagaccactgcaccaagcagcggtacagtgcgccttgttcttactcgcgctcgaggggaaccacgacgcgacccagcggcccgcccacttgcgggacc

SEQ ID NO: 42598 - DNA, 413 bp, Mus musculus
  source 1..413: mol_type = other DNA
agatttttggataacttcaacctagaggaatttttttttaaaaggatttctgagtaactctgtagaggtaatcaaaaaggcatcttgccaatagccattaacagtagttttaagtaggatccaattaatcaatgtaatggacaccctttcaatcaacaatagctgttttatcaacgcgcttttcagagaacccctcttttggtgggcggatctcagctcagaccactgcaccaagcagcggtacagtgcgccttgttcttactcgcgctcgaggggaaccacgacgcgacccagcggcccgcccacttgcgggaccactcccaagatggcgccggccgcggcgggttcggcggctggtgctcccgtctgactgagacggctgggcggagcgccgggccgggagatgagctaag

SEQ ID NO: 42599 - DNA, 240 bp, Mus musculus
  source 1..240: mol_type = other DNA
agtgatgtatttataaaaagcatacctggctgttgccaggtaactggctagagcttcgagaggctcaggagccagcatcttcagtccctaagggttttcttttggcttaataaaacacattccaaaatgctttcttcaacttgattttcatactcaccctacatctaggtggaacgggtgttactgtctccacatttacatctaagcatggaagccctaaatggccggaggtggtctccc

SEQ ID NO: 42600 - DNA, 332 bp, Mus musculus
  source 1..332: mol_type = other DNA
ggctttctctgccacctctaatagaaagaggaaacgcaagttgtggtcttccttttgcaacccataagcttaaagaaagccatatgcctaagactttacagggagctctgtaagtattggtctttgaaccataactactccctgaggcatatgctaagatctacttagactcagggcccaggtgcttacagtctgagcactcaggaagagcatcctactgttctgtcggtgtgactgagaattctgaatagacactggccccccgcagggctcagcctgggagccgggagagccacaacccagcgcccgtgggctggaagccccgcccagcc

SEQ ID NO: 42601 - DNA, 239 bp, Mus musculus
  source 1..239: mol_type = other DNA
gaactacttctgaacatctcaagtgctgagattacaggtgttcaccactagtcctgagtgctattggggatcaaacccactaccgactaggctatagtcctctagtcctgcctgtctgcagcatccaggtcctcaaatgctcaggacggggctccaaggaacaggtggatctggtctaccttcaggtaaggacctcctctgatccgaaggccactgagccgctgatcacgtggcgcagc

SEQ ID NO: 42602 - DNA, 287 bp, Mus musculus
  source 1..287: mol_type = other DNA
tatacataaaataaataatcaattagttaaactgggcactgccgtagctaggagccgggacaggacccaccgtattttagtgctactgacgtaaataaaatgtaaaaagaaaagaaaaatttctgtatccaaattcacatttgtttgtttgtcaaaaaggcaggaggcccaggtgcctacatgaagtttatttacttacgtgcggcacctcctcccgccgctcggtggcgctgtggggccccctcgcgcacagaagcgagctagccttcctctgtcggagggcgggg

SEQ ID NO: 42603 - DNA, 428 bp, Mus musculus
  source 1..428: mol_type = other DNA
gtgggtaccggaaccaagcatcattttaaatagacgtttatgaggcaactaacctggccagctcagttggggctcaacaccattagcaggccctgcacctgctgcttttcccagtatgcaggcgttgtccctcacagaggtggaacacagtaccagcctgtggagaggctaaacaggattggtgacccgaggagcgggaggctcccgcgtgctgagtgagccgcaggagcaggctggtggcgcgcgggcgcgtgtcccctgtggtgcagggtggccacactggcggggcgcccccgcgtgggccgctagcccaagatggcgatggaggggcgggcgagctggccgcggccccggcccccgcgccggcccccgctcgggccccggccccggaggccgcgcccccgcccgcggcgccgcgcctcccggag

SEQ ID NO: 42604 - DNA, 261 bp, Mus musculus
  source 1..261: mol_type = other DNA
aaagatttatttattatacataagtgcactgtagccttcaagtggttgtgaacatacgttcacatgtgggcacacttgagccttggtgttagaggccttcgaaggaggaggaaaatcgaaaccgatttactggctcaacccggacaattccccggggcgggtcccggggcggtttcccgcattgggcacctttgcccagcacccggggcagctgggatcctccgggacctgtgggcgggcgcgagctgagcaagggcgcgg

SEQ ID NO: 42605 - DNA, 312 bp, Mus musculus
  source 1..312: mol_type = other DNA
gaagacctgagttcagttcccagtactcatgtcacagttgattaacggtgggaaaaattacctccctttagcatatgaaaaaacactgcatttaatatgcaaaatcttatctacgttggttttactacagaaactactgttctcagtaaaagcagagagagtacaatgccaacagctttgaaatttatttaaaggaagaagcccacgggaactgggccaatgcaaatattttcgtgaaaagatcttccattactcgaagttttaaaactaaaaacaaaatattatttcaaaagatcatgaagaaatttctgt

SEQ ID NO: 42606 - DNA, 518 bp, Mus musculus
  source 1..518: mol_type = other DNA
ttttgatggactcccccatcaagttggaccccaacatatgtctgcatagaagagctgtcttcccatatgtgagacatcagatacgatagcaaagagaagttgctggcgactgtaccttccagtgtgctgacccagctacaggtcatttacctggacccttgctcttaagtccgcaaagttgtttcagaccaactcagtgagaatgactgggcttctcacctacgggagtgccctaacttagccttgagaagccagtcttgaagctacatttgagcagttttaagggaattgtctttaaaaacacagagggacgcaaacacctcagttttgcgtgtccggacggtgcagtccgggtcggcgcggcagctcccgctgcagttcaaagcgcagggggcgcgtccgctgcgcagccgggaatgtccggccgcttaaagcgctcgccggctcttttgttccccagacccggcctccagggagagggggctggggggcggtgcgggcgcgggcggagtgcggag

SEQ ID NO: 42607 - DNA, 321 bp, Mus musculus
  source 1..321: mol_type = other DNA
caactcggtagtctcatctccaggccacctaaatttgttgatgatatatatataattactctggcataaattccaaagacagccaaggttaagctagctctatccataattattatgacggatcacttaaaaaagatcctcaccaagaagcgtagggtcaactcccgacacggcgcgtgtctctttgggtctaaaactttttaagaaattaggcgaccgcaaaattttgggttcggcatgcgcagcgtaaactcacgcctcctcctgggtctaggacgcaagcgcgcgcacgctccccggccggggtgggcggggaatggg

SEQ ID NO: 42608 - DNA, 398 bp, Mus musculus
  source 1..398: mol_type = other DNA
aggcttacaagtagacatacatatgtgtacacacacacaatgaaccattcccagcctggttccagggagattctgagggtctctgagtgctctttcaaaggccagagaagctgagtcattgctcagtaggaccaagcacacccatccacagaagctgaggtgacttgtgtgccagagtttctgagcaagtgctaagaccttgttgtccatgggctggccagctagggaatgtggagggtcagcaaagcttaagctggctcacaccacgactgtctgtggcacccaggctgtggcccacttggcctaaggatcttgatgtcacagttgctgctgctgctgctgctgctgcttcgtggctggctgccatgggctgagccaccagctgtgctatataagac

SEQ ID NO: 42609 - DNA, 423 bp, Mus musculus
  source 1..423: mol_type = other DNA
tgtccttggccagagttaatccctagctacttcctagcaacagttaatcaaagattagtttgattgtttcagatgtactttcaaactgtttgtgatcaatggggaaacccctgatgtatgaggtagtttaatgacggagctccgggccgacatatatctccctcaggagacagaggtgtcgaccacacggttcgaaacgtatctcacacaggagacagtggtttcgagttcatttaaacataggggggcatgtcctggccttcaaagctcacaaacaactctttgggctatttgacataaattacatgaatcacatgtctcaagttttatttttttctataaaaactgatccttggtggtttgggaaggttcaagcttcctggcacgtccgggaagtgagtcaagcaccggtcgcatcctgga

SEQ ID NO: 42610 - DNA, 322 bp, Mus musculus
  source 1..322: mol_type = other DNA
tcagcagctgactctggagaaaagctgttcccctctactctcaagccactgtttctttccgaaagatgcaggtgtttacctaaattctccttatattaaacatcaatgaataaaatggagaaataagattcaaagattaatcagaaagcaaactaattgttaacttatcacatttttaatttttaaaaaaattgatttgcttgcactacgtgcatgcccaggagggatcaaaccctgagtcctctagaagattgattacattatatgaacaaaataaaacggagttagctgcaacaagccagctggtttaatcacgataaga

SEQ ID NO: 42611 - DNA, 340 bp, Mus musculus
  source 1..340: mol_type = other DNA
gggtgattttctttactcctgtcagggagaaaaagtattccaggatggattagatttctggaagccaaacctgtagaaagctttacgttttagtggcatttatcaattatacataataatgagtcttgatgtgacattttcacacatgcattggcgagccaatgagttcacatgtaacttaagctaccctgggctaggtcatgaacaggcgatgctacttcgccccaccaggaggcaaggagtgcaaccctggttgcagggtgctcagcggcttttaaaaggcagttggagcatggaggccacgccccgtccacgcccctcctccagcggggcgtgcaac

SEQ ID NO: 42612 - DNA, 361 bp, Mus musculus
  source 1..361: mol_type = other DNA
aagactgctccagggcctctggctttcaggccatgtgactatctgcacaccatggtcttcagaggtcctatggcatcccacatgggaggcctgagaatctaagagtcttggattcctgaagtgacttcagacaggtgagcaaacacaggacccctcgttgcagagatggctcagcagttaagagcactcatggcagctcaactgtctccaaaaataaattaaaaaaaaatttgtaaagttttaaaaaatagtttcttttaaaggtttgttttattcattctgcagtgttctttgaagagcttggctgaataatacacatcaccacgcctccaaagcggcaggccccgccttgtcgtctgcg

SEQ ID NO: 42613 - DNA, 221 bp, Mus musculus
  source 1..221: mol_type = other DNA
taacacaaaaggcagctttggttgttggttcttccacacagcaggtaatcaacagttactgaatggatgcattaccactttttaagtcaaagaggaccttggacttggcacccaggtgtgtgcactgacaactgtcggaactgacctggtctggctcatatcatgaccttcgccatgagaaagcatcctggatggttaacgatggatccctggactggcag

SEQ ID NO: 42614 - DNA, 311 bp, Mus musculus
  source 1..311: mol_type = other DNA
attaaaagtaataataataaaaaatatttttaaaagtccctaaaacattaggatcttgctttaggaaccttacaaattttcaaacaagattgacaggtcactcaatattattatgcattatttcagagcaaagctgtaagctaactgaaaggtgttgtggcatctgccacatctctcctttatataggtatcaaaatgtcctaattaagccattgtaatgaactgatatatactaatgttttaaaaagactatgtcaaggcctattcagtcagaagatctggtcccgcctcctcggaacccggaagcggga

SEQ ID NO: 42615 - DNA, 400 bp, Mus musculus
  source 1..400: mol_type = other DNA
gagcctagttgtcaccaagacaggagcacaaggctgggcccaggtttatctgggtctgtctttcaggccctgaaagcctttccttagatacaaagtgtgcatctgtgtttgagaggcactgagtacatggagcacagaggtcaggcctttgtctgcagtgccatgtacactgccttgtgtgcagatatcacttggcatgtgctaggtgggttggccaacctgtttatacagctgccctcgctcaagggccctcgcagtggggctccccagaggccctgcagatcctctgcctggcctctagctggccaggaggtcatgtgacccctttttttctctctaatcaaataaacaaagactcaccctgtccatgaggtcacagacagtggctgccaggaagcag

SEQ ID NO: 42616 - DNA, 398 bp, Mus musculus
  source 1..398: mol_type = other DNA
tctgggtgctgtagcatgcagcgcgcgcgcgcgcttggctgtgacagtcactctccgagcctgtttcttcaaaataaaaatttgggatttcagagaccctctattaaggaaccgagtccaaacttgattctggtcataaattccaagctcatggccggcccggacccaacccaggcccactgggttaggccccgggcttgcttggtcagccgcgcccccgccccgccccgccggagctgaagacaggccccgcccaggatccgccctggccccgcccacccggccatgctcctcacccagctgcgggcgggggcttggaggccgctgtatccctccctggccccgcccccagcccggaagcccggctccagccccgccccccgaagtttcttgggccc

SEQ ID NO: 42617 - DNA, 537 bp, Mus musculus
  source 1..537: mol_type = other DNA
accactgggtgggagtctaggcgaccccgccctaggcgtcagccggctcttccctcccccaccctggggttcggaattgcttcacctcctcttttgaggtgagaatttgtattctaatccccaccaactgggctggaatcctctggccagataggggaagtgatttcggtccccggctgcttcgcgcgaagagaaccgctggcccggacccgacaggaattcggggcgacacctctgaaaccgggagccccgctgccgccgccgccgccctcgccctggctggggatgcaacgtgcgggtttaagaaaagttctctgagagagttcatcaaagtttaaaaaacttgtcggccggagcgtcgcggcccgggccggggctggggaccgggccggggccggggcgagcccgcactgggctgcggggattggctgcgcgttcccccggagaccgcgcgcggggcgggggcggggcgggggaggggcgggccgggccccagctgaggccggttccggcgcccgccccctcctccggcgcccg

SEQ ID NO: 42618 - DNA, 473 bp, Mus musculus
  source 1..473: mol_type = other DNA
agtaagatttagtgatacctaagcctaaggatctaagtttgatccctaaaaccaaatggtggagggaacgactcctgcaaattgtaacgtgcgccacgacacgtgtcctttacttaaaatagtttgccgaactaagcacagttaagagctgtgcacttgtcttcttctttcctctttctagaaaacatctagcttctccagagacttttcggtgagaagtgacccaggacttagctcctgcatccaggttcgctccagactccatagcgcacggaatccggatccgagagcacgagaatccagtgtccaggtcttccaggctgccctggttgtcccggatcgcggcggcggcggcggcggtggcggcggcggcggcggcggcggcggcagctgagggacccgcagccccggacacagcggccccggccaggcggggcggagcggcgcggggaggggcggaccggggcggggag

SEQ ID NO: 42619 - DNA, 295 bp, Mus musculus
  source 1..295: mol_type = other DNA
gaatttagtttgtagtggctattctatgtaatttcaaacttcagtgaaggaaaaataataattaaaagtaagttttcaaagctggaaggatcccttaaggccaggaatttttaaaaccagcctacacggatttctttcgaggccagcctggtctacaaagtgagttccaggacagccaaggcttcgttctgtgggtgggaacagggtctccccaaagccaagcaggttctcaaatcttagcaaaaagcctgcttctggttaactgtccccgcccctatttaaagaccaggccggt

SEQ ID NO: 42620 - DNA, 290 bp, Mus musculus
  source 1..290: mol_type = other DNA
agtctctactgactgcagtctaagttgactgcacgcctggcctctgtgattagagggccaggtaagacagggattgaagcagcttgcaccgattggctaagccactgtcattgtggaggtttggccacacaccaaaagcagcaagtgcccagtgtggtgaggcacactatttccagcacttgtccctcctgtgccaggggatctgacaatgtgtataaaaaataaacatacataaatctgcgcccaggcggggcggtgcttcgccctcccaggacaccaagcggcgctgc

SEQ ID NO: 42621 - DNA, 395 bp, Mus musculus
  source 1..395: mol_type = other DNA
actgcctggcatataataatattttaaagacagggtttcactagtaactaggctggcctcaaaagttaaaagcatgtgctagcacactcggctaatgtaatttatttttccaagatttttaatttaaaaattttttgtttaattaaaaatttttttatgtgtaagtgctgcacatatgtatgttggtatagcaatgagattctagtcccaattacagatactcaggagatttattttgagaaagggcctcgctaaaaaagactcgttttaaatctataatcagaatcagactagatttgaaggctaagctgagcgaagcctgcgcgaccgagcggggcggtgcaagcttgcggaaccttcatcgacgaggtcggcgctgcgaagtccagggcggg

SEQ ID NO: 42622 - DNA, 548 bp, Mus musculus
  source 1..548: mol_type = other DNA
ctctgcctgactttaaaatctttaaattgaatatactattaattgttgatttggttcactgcagaaaagtagttctgtaacatgctgaagggtcatcttttaaacaacagcatcggttttgtttcgtgcatggcattcagaacaaacacaaattcttaggaatattgtaatttgaaatatgggtcagacaatagcatttaaaaaattctttggccatgttttttaaattttatttacttatttttatatgtgtatggacaatatgcgatctgaaaacggtttttaaaacactgtaaactaaataaactaaattgagttttcctttccttaggatactaaactttagttatgatttacatagaaaagtccacttaattttcactttcagtgtttaattatcatggatttaactctggtaacttttgaagaaattttacgatggactgactggccagcaaaaccttaagtctcgaggctgtcactgctggacgctgtcaattggtccagagtgaaggcgcggatcgaggttctcaagcgcttggagcgcg

SEQ ID NO: 42623 - DNA, 312 bp, Mus musculus
  source 1..312: mol_type = other DNA
catgccaggcaagttttgtatcacagacctaaatccccagcctaaatgagggtttttatttatggaataacaataataatattactctggtcaattttcatagactcaaatatagctaggttaaaactttcttacccacttcactgttcgacttctggagccggttcagaacgaagctcccgcaaggggcagagaccaactgatggaagcagctacgttgggcctactacctgctgcagggggaaggggggtatttaaaggcacttccgcttagcaaccccacgctgttgctaaggaggggccgcagcatac

SEQ ID NO: 42624 - DNA, 420 bp, Mus musculus
  source 1..420: mol_type = other DNA
atgcacaagagctctttcattttgagacaggatctctacctcaatcgtcataaagtatggccatgatctgcttttagagctgggtccaaattcaggtcctcatgattactatattatgcttaatagccagaaactaactctttctgcttctttaaagagacgtgcaaccatgactggtcgtgttcgttttaagacaaggtctcactctagtccaaaaagaactaccctgcccagtgctgggatgacgcatctttgcacgccgtgacaaaagggctgtaacgtggcagccacccgcagccccgcccccggcagcgcctaccactcggcgtcgctgcgcagggagaacgtggcgcgctcctggcgctacgagaccgcccgcggccccgggtccaccccacgcctgggcggccacgcgcacgc

SEQ ID NO: 42625 - DNA, 288 bp, Mus musculus
  source 1..288: mol_type = other DNA
atagggcgcccgggtggagggaggtctcattacccactcttccagagagtccgggacgagctggcactccaggtgggaaactcccggtctgcattggccgaagtccctgcttcagaaagggcgcctcctgcgacccagggaccctggtcccaggcccgcgccccacccgggattcccgagttgttccaagggggcgggcgcggtcccctccccgaggcgcctagtatgctgcggcccctccttagcaacagcgtggggttgctaagcggaagtgcctttaaatacccc

SEQ ID NO: 42626 - DNA, 289 bp, Mus musculus
  source 1..289: mol_type = other DNA
atgagagcagctggggccaccgcctctacataaggaagccactattgggtcctggctgggtttcaaacagggtgctttacagctgtgcagaaactcaagggcaaactacactacctcagttggagtcttcaggtggtgctaccaccaggtgaaattttagagagaccaggtaaaatgtacctcggaccctgctgaaggtcaggatagtgagccagggaacaccctgggcgtggcgagggcgggctcccgttggggcggagcctacggcccgggggcagggcctggagcc

SEQ ID NO: 42627 - DNA, 474 bp, Mus musculus
  source 1..474: mol_type = other DNA
ctgcctaaggtggtttcaaccagaaaagcaaaccacctctgaaggatcatcaagtccgtgataacataacctatgttatctttaaaatagccctggctgtcctggagagggctgggattaaaggcgtgtcaccacgcccgctcaaaaaatcgataacttctttttattgttgcacactgtaacactgagtgtgtttatttgtgtttgtatttgaaacgcacagtaaggtgatatgttaaatgaattaatgtcccagccctcaatcaaaaatatttattgaatctctcagagaacactgtgcttggcgagcagtggcatgcagaggttttcaaacattgttagtcacagactttattcggaggaactcctcaccagtgcagccttgcggttcagtgcttggattggctgagcagcagcccaggccccgccctaggtccctccccaggttccgccccgatggtccctctgggtcca

SEQ ID NO: 42628 - DNA, 335 bp, Mus musculus
  source 1..335: mol_type = other DNA
cagaggtggtttgcttttctggttgaaaccaccttaggcagttacaggcatgagccaccaggcctagcaaagttggctgtttacaactgcaaacttcctgcatacacattgtgtatggcaaattaagtgtctaataaatatttgaggtggaaactctgacacaaaaaaaaggttaagaaatgcttttttaggatgttcatctccgttatcattactacatagtgaacacagataaagttctctcgctgtaatttcgaactaactaggcacacttccggcctggtcagaaaagaaaaatttgtttcttcctatgcaatgcgcctaacgggccgtaa

SEQ ID NO: 42629 - DNA, 275 bp, Mus musculus
  source 1..275: mol_type = other DNA
ggcctagcaaagttggctgtttacaactgcaaacttcctgcatacacattgtgtatggcaaattaagtgtctaataaatatttgaggtggaaactctgacacaaaaaaaaggttaagaaatgcttttttaggatgttcatctccgttatcattactacatagtgaacacagataaagttctctcgctgtaatttcgaactaactaggcacacttccggcctggtcagaaaagaaaaatttgtttcttcctatgcaatgcgcctaacgggccgtaa

SEQ ID NO: 42630 - DNA, 468 bp, Mus musculus
  source 1..468: mol_type = other DNA
ctctgttcacagagagccctctaatgaaaggtcacgcaaaggtctgggatcttcccggaggctgtccagcaatggtcagagaagagcagccctcactaacatctagggctggtctcactaaagctctggaaacacaatctagaaattcctataggcatacccagaggtttatctcctgattgtaaatccagtcacattgacagtgttagctgtcacagtgacttagggtgtctctggtcttgaatggagaccattgaacttcagttttattttctccttctgataatttgcaaaaggaagggagaatccttcattaagacaggcttgtcctcacctcggggcggtcccgcgggggttccagcagggggcgccccgagctccgggccgagtgtccgggcgcgcctccagccggcgcctgggaccgggctggccgctccgccccctctgctcctcggcggctctgcgggc

SEQ ID NO: 42631 - DNA, 430 bp, Mus musculus
  source 1..430: mol_type = other DNA
gaaaacaaaaacaaattcatgtgtatgtgtgggtatgttagtcactctgtaagagatagccctcttaaccgctctctctccagaaaaaccttttgctgaaggtgcgcctacatctatgctagacgttgggctagatgaccaaggtcagggtcaagacctgtactaaaagttggtcaacttaaacacttgcttgggcgtaaacttaaccagcctgtggccggccagccccgaggcctcggcagcacgggcacacgtgactccgcgagtagagtgtccccagtaccctcacaggaagggtctcccggccggcgcctcccacctcccgcgcgaggcccggaggaggcaggaccagcgcctgatctcgcgagagttccctcataagtcccgcgagactcgcctgccgctgccgctgccgccgtcgctgccgccg

SEQ ID NO: 42632 - DNA, 414 bp, Mus musculus
  source 1..414: mol_type = other DNA
tacaacattttgaaattaaatctttttgcagcggaagtattgcccttgtggcattattggcagacagaaaaaaaaggtaggtttcatactgtttgagtacggtcttctatagattaaaatcatgtcttcaaaagacgtttcttaagtttggaatataaaaaagttacagagacacacaccagcgaaaatgtaccagttagtgtagttacagataatggcttgaattaacatacatgatcaggttctttaatacaatttaagtagaaatagtatggaagatgactctttgaaaggactgctatataattactatttaaccttccctcttaatctagttcctttactagatgttaagattcagtttttaaaatgatttacttatgactgagtattggaacccaaggcctagcgcat

SEQ ID NO: 42633 - DNA, 243 bp, Mus musculus
  source 1..243: mol_type = other DNA
ccagatctgcagcacagcttcctaaaaagcagggcagcttcagacttgcagttcacttccagttatttacacttcaattaagtgttcaaaccagtctgtctgtctcacacacacgtgctagcttttaaaataacatttcagatgaatcttaactgtcccctgtgctcaacacttatcagctcagaggaaaagaaatcccttttaaggaaaacttgtaacttcgagtaagtctggatcctgaca

SEQ ID NO: 42634 - DNA, 496 bp, Mus musculus
  source 1..496: mol_type = other DNA
aaagcaaattatactcttggtttcactttttgttaaaaaggggactgcctggctgggagccaggtgggcttctaacaaatgttacaccgaacacaggcgttccggtgggcccagcactcaggccagagttcagaactcagaacagttccggaccccgcctgctaccgggagcacgaaagtcaggacagccggctgggccatcgagggccacgcccgccgaccgctctgccctgtcgggcccaagaatcggctgcagcggccgggggcggtgcaccaatgccccgcccactgactagtgtgggggcggggcccgggctggcctgggggcgtaaccagcagggtgggcggggccgccggagaaggcggaagcctactgtccctgggcggcggcagaaccaggagtccggattttcacgttctccggagcggggcgccgggagacggcggatggcaaaacccggcgcccggaagcccttgctttcttaaggctcgggac

SEQ ID NO: 42635 - DNA, 416 bp, Mus musculus
  source 1..416: mol_type = other DNA
gagaatgtgaggtggcaggctctctaccttttctagagaaaagcaaattatactcttggtttcactttttgttaaaaaggggactgcctggctgggagccaggtgggcttctaacaaatgttacaccgaacacaggcgttccggtgggcccagcactcaggccagagttcagaactcagaacagttccggaccccgcctgctaccgggagcacgaaagtcaggacagccggctgggccatcgagggccacgcccgccgaccgctctgccctgtcgggcccaagaatcggctgcagcggccgggggcggtgcaccaatgccccgcccactgactagtgtgggggcggggcccgggctggcctgggggcgtaaccagcagggtgggcggggccgccggagaaggcggaagcctactgt

SEQ ID NO: 42636 - DNA, 258 bp, Mus musculus
  source 1..258: mol_type = other DNA
gaatgaagattctgcatgaccatttgtaatatatatgtcaagtattacagctttctaggcctaatgtctgtctgagcttgctctggctggagtagggcggcgctctgagctcgctctgcaggcgctgacaggtctgggagcgactcaaagccccgcctcccaggctccgacctggctccggtttgactgggcgtggggctccgaggagagctccagaggacctcgaggtcctgcatgcgcaccgaaggctccgctcag

SEQ ID NO: 42637 - DNA, 258 bp, Mus musculus
  source 1..258: mol_type = other DNA
tgcacaaggagtaagccttgtctacatgcctcccaagaaaagcgactcatttctgtcagaccctgaatgaggctttggcccaaacagcattctatgacagaccacagtcaatagggaagtgagtgctgcacgggtaacctgtggcccagaggaccgccgcagtgggccactgaggaccacttaagtcaggacctcaactcacctcggacctggggctcctgccctccggtaggctgggctttctgccccgccctcctg

SEQ ID NO: 42638 - DNA, 537 bp, Mus musculus
  source 1..537: mol_type = other DNA
ttgtcaaatacaaaccttgttactatactaaatcgtgacttatgtaccagaataatgagtagatggaaaatgcctaatacatatattcttgtgcctcatatttcaccacaagtacagtgtactgttagtagtccaaaactgctttacttttgtaaaaacactggttaatttgtatattatatagctttttatgctttagagattaaatatcatgggggaaactaattatttttgcatttctttttaatcaaaagcctattcacaaatgaatatttaggctgaaagaatttaacttttatctttaccttgttttggctaattgaaaaggtttctaagaagttttgttcattttctgatcaatgacctttaaaattcctgttgattttctttgtgctcgaaaggaataaaatctttttatccaaaaaaaaaaaaacaataaagatgtattaagatatgttctgggatgtctcagggaaggcatcccttcctctgaggggcccttttatagtgggccaggcctacctaactgttgccagg

SEQ ID NO: 42639 - DNA, 358 bp, Mus musculus
  source 1..358: mol_type = other DNA
gggctgttggtgtagccctttgcctctcggaggtctaggcgcccgcccagttcggcgggcaactttcattgccgagtgctctgaagaactgcccagccctcaaggccccgccccgcagtctgacggcacgtggagtcccaggaggccgcgttgctgcccagcctgcccgcacgaggccgccccggttctgacagcacgtggagcccctcgaggaaccgcctctctgacagcttctcgatgctcagcgcctggagcacctcctggtgctgtggagcagctcgaggacccgcctcctcatctagagcgccgctccgccctcgcacctcgaggccccgcctcccggagcccggagtacctg

SEQ ID NO: 42640 - DNA, 286 bp, Mus musculus
  source 1..286: mol_type = other DNA
tcccgcggtgcgcgaggcccgctaacatcactccttgagctctataattgaagggcggctgggtaatactctgcagctaattcacaaactgcaggacttagattccgaggtcttggtcccttggcaaaagaagaggagtttgaaacgaagcgtcttttccctgtaaggatggaaagtcccctacatgggcgaggcacgcccgcggctctcccaggagcgagcctgtcgcctcaagcggggcggggcgcgggtggcttggcagacacgccccctcgccagaggcccc

SEQ ID NO: 42641 - DNA, 449 bp, Mus musculus
  source 1..449: mol_type = other DNA
atgcaaattgagtattatacacctaccacgttttctgagacagaaatgggatttgtttaaaaaactatttcaagttaaaaattatttatttcaaccccaaaatcagatttttaaatttaattatgagtgtgtgtgtgcgcgcgcgcgcatagggagtgcagaaaagacctgcagatctccctggagttggaggcagtttcgaaccgcccagctcggttctgaaaaccaaacccagatcgttgtttgtaatacagcgaagaacaaagattattgttccgtgtgtccccctgtccgctgccccgcacaatgaacaggggagaccaggctagcccgggcctccgaagcccggcctgggtgcagggcggagtcggagcttggcccggcggtcagggcgggagccgtaccactgagacgggagcctagagcggtcgcccccgcctccactcctc

SEQ ID NO: 42642 - DNA, 283 bp, Mus musculus
  source 1..283: mol_type = other DNA
tgtcagacaacacaaccaatctccagagcagttacgatgattaatgtttgagaatgaaaaaaacccacatcaggtttgctttttcccacttttgtgtgtgtgcatgtatatacatgcatattagcatttgtctaactctggggatttgaattccattttaaccactgtgcatctcagtcaaaacgaggaccaggcgctcgatgcgctcgtcgctcacccaggccttgactgagaggtactgtaaagccccgcctcagccccgccccctcgtcccgcccgccgc

SEQ ID NO: 42643 - DNA, 444 bp, Mus musculus
  source 1..444: mol_type = other DNA
aaccagaggctctgtcacaggttcctgtggtcgtacagaatatcaggttatatagtttgagtccttaaatatgtaaggcattgttaaatgttttatatcatctgataattgtcaacagccctaaactaaaaaagctgtatttagaacagttagtaatttacacttggtgaactctggtaaatcgggattacagagtgctccgagcatccaggagttgtcaatgcctttagcattactacttggcccaggctcagcggagtggatgcaacagccatccccgcgcgcacgcgcagtggttccatgggcagctagttcccggggtccaccgggccccgcccgcctgcccgccgcgcctgtcccctgcgctcgcgcacccgcccgcggctcttgtgcggcccaggagccgtcggcctgcttcttagccgcagggggcgccggcgttac

SEQ ID NO: 42644 - DNA, 429 bp, Mus musculus
  source 1..429: mol_type = other DNA
ttgaagctgttagcacagcgcaggcacttttgggccttaagtccctaaagtattttactgtgcagagagacagggtctctgagtgctgccacaaggacccagctgggtaccgagagctcccaggcccagaggggaggggcagtggccgtgactggcagcccccggaccttaggcagagtgagccggtgcgcacacaccacctgccctattccgggtggttccgggcaggctcttctggggaccttgaccgccagactagagactctcgcccagtgccgggctcctctccagcgaggtcccggaggcgtgataggacggcctcgcccggccgcggcctcggaggctcgggtgggaggccggcaggcggcagcgaatgggcgtgcgggcccccgcgggttttcctcctgcccccctgggcatatcagggag

SEQ ID NO: 42645 - DNA, 202 bp, Mus musculus
  source 1..202: mol_type = other DNA
gctggacatcacggccgcaactgcagacaggatttggtcaccctgcctatactggtgctggccactctatacatttacttatggtcacatgtccattcatgtctctccaacccacgggcctgtgatagatctgattgccagactaggagctcctgcggaacactgccccccccctcgagaggggagtggatcactcgggcct

SEQ ID NO: 42646 - DNA, 312 bp, Mus musculus
  source 1..312: mol_type = other DNA
tgcagcacttcttaacatcatggtatttacccgctcctaaaaatccttttgcttttttaaaaatctagtctgagattttcttagaaagcacttaataaacgtcactttaaaaaactgcataatcatgagggctggattccactggttgtgtacatacaccaaccatctgttcacacacatagctaaattaacaaataaatgatttagatttaaaataataatgatatctagaccagctctgcagagcagtgtcaccgtcagggctgagactgagtgtggggctccaatgctcagacatggactgcccattga

SEQ ID NO: 42647 - DNA, 309 bp, Mus musculus
  source 1..309: mol_type = other DNA
tttatctcagaaaataagagtgtctttggtaattttggaaaatcaagtatttttagggatctgcccaaaagctaactaagctgctgacccgggacttagtcagtatttgaattaaagtgaatgcaaccactttacttcgaatccaagcagtctggatatgttaaacgtaggcggactaaatttcgcaaagacatgccaagtttagtctgtgcttgggccctttactcatctgtaaatggcgctccagcaaagggacagccaatgtaagtccgagccagctcctgcgacacctatacagctagcagctgg

SEQ ID NO: 42648 - DNA, 290 bp, Mus musculus
  source 1..290: mol_type = other DNA
ttacctgtatgttctgtatgcaaaacacacacaggacaactaactcattcaacactgcttgaagaggccattgaatcgagctgcacacagtgtgcttaaaaattagcatcctgcttaagaaggctgtggttttttttattttaaaatatatatcttaagtgtacactggatgatttctttacataggaatacacccctgtaacacagagtgcttctgtgcactcacgttcacagctcagcaaatccatccacgtggcaggggacctggggttccaagcagcagcgtgaca

SEQ ID NO: 42649 - DNA, 307 bp, Mus musculus
  source 1..307: mol_type = other DNA
ccttgtactcacttgcatgcatgcaaggtatacaacttgcaccattgagtttcagaattgaactcaaatcatctctattgtattacttaaaaaaaataattcttaatacagcctagtctggtctggaactgacttatagccaaggatgaccttgattccttgttgcccccccccccccccgcaatcgcggaggtgggggtggggtcacgcctgcgcactggcggcgtcgcgcacgcgcggcgcggggcggggcggggcggggcgggccgcagctgtcagtctctgcgccggccacagccctcccctg

SEQ ID NO: 42650 - DNA, 263 bp, Mus musculus
  source 1..263: mol_type = other DNA
ctcagtatgttgtaagcatggagtattactgtattcaaaacaccatgagaccagggctcaacatgcctaataggatacactctattacctcctgataactatcagtatcaatgcttccattgagaaagctcagtttcagatattaagcaatgtctacagctccccttttttctttttctttttttcaaaaaaaaaaatgcatacaggcctggctctaagtcagctccatcagccagtggcccagccaccaggtctgtgctggc

SEQ ID NO: 42651 - DNA, 346 bp, Mus musculus
  source 1..346: mol_type = other DNA
tgccaacgtttaaaccatgatttacgtaaatgcagtaaaaagtttcaaacattgacctggggaccagtggctcaaattgtctggcacctgggcgggatgctgcgggagtacgcagcccggaacctccgtcccaaaactggtgtcagttccgggcctgggggctggacgggcccctgggagcgcaggggggcagcactgtgtcggggtgggccgttcccggtcacctgcccgcgggggcggagcgcggcgcccaggcgcacccgcctcccgcctcttgctcccgccccgggaggaagcggaggggcgcggtgtaaacagagcggcggccgtgatgtcagccggtcac

SEQ ID NO: 42652 - DNA, 417 bp, Mus musculus
  source 1..417: mol_type = other DNA
agtttatcgccatccctttgaaaatgctggaaaggaggattctgaatgctccctgtgaatcaattttaagtgttcaacatgacagatgcatgtttacatgtactgaaaaggcacactgtcccttatgatttatacacagctgttcagtgtcaattaaaagcttaaaaatgttagcaaccaagttaaagactttaaaatataaatatatgcctatggcttagatgacgttaggcataaaggaatacctggagtctaagcttgggcaaggtggaggggaaatcctgccttcacagggaatgcccagagcaaaccaggaggagcctgccttacctagttctgctgggttcgggtttgatcccattgatgtccaatcccgactggtctggggagggctggctgctgacggctgagtcggcc

SEQ ID NO: 42653 - DNA, 381 bp, Mus musculus
  source 1..381: mol_type = other DNA
gtcttaaaagatttatttttatttaaatggagctggataacaaatgtttgtgagccacctcatgtgggtgctgaggattaaagtggctcggtcccaaaaatcagaagttctggaaaagccggttttagttttggtccttcttgcactcaacaccaaacagaaaatatttgtgcttaatccatctctttttaatgaattgctgcaagaaagacattggcctataatatacccttatctgtatgtaataaaaattgatgatacaccatggggtgtggtggtctgtaatcccaacactcattgagacactatttctaagacagacagacaaagcctgaagttacagcctgggtctacctggattcgcgcgcaggcccgtcccgc

SEQ ID NO: 42654 - DNA, 242 bp, Mus musculus
  source 1..242: mol_type = other DNA
gatagctagtctaagaaccaaaactagtgtttaaggtatttccagctctcttgctagcttgaagttaacacagttcactactgcgttgtttcctggaaaagcaaggaaggaggtaccttctagccttaccatttacaaggcggagtagactgtgtaatgagcagggccctgtactctggctacgttccaagttggatgagtcacccagcagggtgtgggaggatggggcgggtataaaagcc

SEQ ID NO: 42655 - DNA, 429 bp, Mus musculus
  source 1..429: mol_type = other DNA
cagagaggaagaaaaataaaagggatttttttttcacagcttgaacaacactacaatttcttttttaaattaagcaggtcacaatggaacaactattgggttgttctttgtttgtttgtttgttttctgtcaattacctagaatgctaaaaggaacatatgcattttacacagtgtaaatcattcctattttagcttcacggaaaagttcttttaacagaaagatctgtccagaggacatctctgctgttcctttcttttctctttcatcaaaataaatagctaaaaaggtctctaaatagtaagaaagttaacatcccaattattacatttttttttaaaccgcgcgctttgtaaacaataacggagccggggaaagtagcggtccgcccatcccggcctgatgggcggaggcgatcttttcaggacc

SEQ ID NO: 42656 - DNA, 370 bp, Mus musculus
  source 1..370: mol_type = other DNA
aaaacgtattaaagcagaacctaatacattcatccattcttttcaaagagatggctcagccgttaaaggctaggctcacaaccaatatatatatattgaatatatatatattcaaaacggacttatccacccagctgtccaaatatatctatctatatgcgtctattaactcctttttaaagcgacagacaaatttctacctgcctcttgcaggaattctcagagtgagtggtcacctgccagccggctccgcgcgctgctccattgcgcacaccggtaggcgctgcccgctccccgcgggcggcagaggctctgtgaaagaaaccagcgctggccaggctctctctcctacattaatgaagcgccgcta

SEQ ID NO: 42657 - DNA, 569 bp, Mus musculus
  source 1..569: mol_type = other DNA
gactgttgactgtgataataaaatattttacatttactgacttcacttttatttaaaagcatgttttaaagcaatagttctaaactttcctaaagctgggaccctttagtacagttcctcatgttgtggagacccccaaccacaagttgcaacttcagaacagtaatattgctacagtcgtgaatcgtaatgaaatttcctatgatctcgggaccttcggaaggtccggagttcaaatcccagcaaccacatggtgggaacggaaatctaccacaatgtggtaacaatcatgtagattttcaaggttatttcagatactctctcagaagcattactggagagaaaaactattcacgtcggaaaattctatcaaagtagattcttctaggacctggctcattcactctgtaatatagttaatataatgtcaagtaaagtcgcccagcaagccaaagccttagctggcccgggacagaagggctcacggctgcgcatgcgcacgccccgcccccgcttcctccctcggccgcgcccggcgccggtccggaggtggtcacttccgccggggc

SEQ ID NO: 42658 - DNA, 470 bp, Mus musculus
  source 1..470: mol_type = other DNA
ttacacatgctactgcagcattaatgcatttgaataaattagttggaatatacaaatcgttaacttttacactgaagaatttcaaacatcgggcctttacaatcctgcagtgtggatgagtcctggctgtccgggaactcaccctgtagaccaggctggcctcgttttaattgataacaagttcagcctgtttacaatcttaacactatttgaactttaatcagatctgtatttcatagtttggaaattatttaatgagtttgggttgcaaggatatgattttaaaaggctaaaaaggaagctggagtgtttgcatccgaagtcacaattcatgtgctcactgccatctgcagtacctatagctgctgttttgaaagcagaaaaattctggaaactcagaatatccacgtacaggagagaccacgccccttctcggaaacggcggtgggggccggcagtggctcctgtgg

SEQ ID NO: 42659 - DNA, 460 bp, Mus musculus
  source 1..460: mol_type = other DNA
gttctgccagcgctgcgtgttctcccgaagcgatgaacttgtagatctcgctgagcggcagcatcttctggatggccatggcggtcagtcgctgtacgtgttgcggcccggccgcttgctcagggtccgcgcggcccggaggactggtaactcggtccgcatccgggatggcgtggctggtggccgagtccctccctgcgcgcgaccggagcgcagcgtcggggagcagtgagactcgctgccagctaggcttggactcagcccggtagagctcctctccgcgggctgcgcagcgcgctcgtgggtcgtgcgccctgctgggagaccgaactcggctgcggagtgcccgtgaggacagtggcagacgccgcctcagggatccagaggacgctgcaccctcgaaccatctgatagttttaagcggtgtagcggcgcttcattaatgtaggagagagagcct

SEQ ID NO: 42660 - DNA, 227 bp, Mus musculus
  source 1..227: mol_type = other DNA
atgtagcccatgctggccctagatctaagtcttctagtctcttgaaaacaagggaatttgcctcttttcttccagcagtgattgctttagagagagaatgaatcaatccttgggtatttatgttatctctgcctcctgagatgtcctctgagaacaggaagtcaaaaggtgagtgacagagccacctgctgctctctcctttgcatagtgtactgttaatttgcacc

SEQ ID NO: 42661 - DNA, 233 bp, Mus musculus
  source 1..233: mol_type = other DNA
agcttcccgccattctttattaaaaatctgacgacagtttccatgtagatttttgtagatttattcacaatgtcactttgaagtcaggtattttgatttagaattccattcagatttagatgaagactccaaagaatttgtaggtcacttaggagaatttctagataaaagttaacattcttcagaaacttgagaagcaggttccaatctggtccatgctggcctccaggatc

SEQ ID NO: 42662 - DNA, 329 bp, Mus musculus
  source 1..329: mol_type = other DNA
gcccatgcctctacgtaagagctaaggtgagcaaaggtgggatcctccactcttcttaaaccccaccggagaaacgggcattttcccaggggtcctttccatcacctgtgcagggaggtgggagcaagtccccgcccgctgactccctgcagcgaactgggtggggacccgcggcgccgcggggcgccggcgggctgggcgcgggcgcgcggggaaagcctccagctcgggctgccacggcaaccgcgtccaggcaacgcgcccggaagaggctctgggaggcgcgcggcggctcgcgcccttccagggtgggggagccgcgaaccccg

SEQ ID NO: 42663 - DNA, 279 bp, Mus musculus
  source 1..279: mol_type = other DNA
ctctctctctctctctctgtgtgtgtgtgtgtgtgtactttacaggcgagttaattacgcccatgcctctacgtaagagctaaggtgagcaaaggtgggatcctccactcttcttaaaccccaccggagaaacgggcattttcccaggggtcctttccatcacctgtgcagggaggtgggagcaagtccccgcccgctgactccctgcagcgaactgggtggggacccgcggcgccgcggggcgccggcgggctgggcgcgggcgcgcggggaaagcct

SEQ ID NO: 42664 - DNA, 302 bp, Mus musculus
  source 1..302: mol_type = other DNA
atgggatataaatagttatttctgctccttctttagactcagattggaaatgtcagataaatcttgtgcacatcagaagtcacacaaatcacgtagtgctgtggagacgatggcttctttccaggaagttctctggttaaagacatatgtccttaggtgaaaaattaagacaatcttttccagtaggaggaaaaattattttatttaatatcagggactagaatttgaaaataagaaacaacaaagcctggtggcctcgctggttgctatgagggttgcgcgcgccctgcgtgcgtctaccc

SEQ ID NO: 42665 - DNA, 267 bp, Mus musculus
  source 1..267: mol_type = other DNA
gtcagactccctaatctacctggcttcctgaaaccggacaccgcgaggttcccaaggaaattaattcaggtacaaaagacgggtggaggaagtattttcgacttcccaaagaaaaaggatttcctttgagctctttgtgatcttttaagcagttaaaaatatttctttaaaaaaaagaatctaacagcggcgcgctctgcggggtagcgaggccgcaggactacaggatccagaggcctttgtaaactcctgaggagtgacgctgag

SEQ ID NO: 42666 - DNA, 653 bp, Mus musculus
  source 1..653: mol_type = other DNA
gaccggaaatctgtctgattgcaatcttctgggtttctaataatacatttgaaatgattttgaaaattcacttcaccagtgagatgagatctctgttttgggctgctgagaaagacactaacccgtgtttttttgtttttaacttagtcccactgggccaacagttcgcctaagccaactgggacgcaggggggcggtccctggcccgcacatgcgcagacatactgctgtgagagggcgtgagggtccggagcgctcgctttccgaactgtcgtaaaagggccccggtgtcgcgctcgcgcagtcggggagggccggcccaggctgcggcggcggcgacggcgatggtggcggggcgctggtgctgcgcggcgtaaggcacgccggccgttcagggtcgcgagcgcgcgtgggccgcgatcgggtgctcggagccgggtccagccgagccaggctcagcctcacgctccgcggcggcggtgttgacagacgccctcctgaggagagccgcccggcccgcctcagcctcacccggccgagcgctgttccccagccccgcgccagcgagtccgggacctggccgcacggggcctgcggactcgggtgagggcgccagcggcgcggtggcgcttgcgcgcggcgggggaggggcc

SEQ ID NO: 42667 - DNA, 531 bp, Mus musculus
  source 1..531: mol_type = other DNA
atttcttcttcttttaaaatttaaaaatactcctctctgagtctctggagagccagggctacacagagaaactctggattattaatgcttgttaaatacttaattggtaatataaggtactttaagtcgtcatatttgacctcacaagatcattttgaagcatataaggctatcatgttttataactgagatttataaagtgttaataagtcagcttggctttgctttctgaccggaaatctgtctgattgcaatcttctgggtttctaataatacatttgaaatgattttgaaaattcacttcaccagtgagatgagatctctgttttgggctgctgagaaagacactaacccgtgtttttttgtttttaacttagtcccactgggccaacagttcgcctaagccaactgggacgcaggggggcggtccctggcccgcacatgcgcagacatactgctgtgagagggcgtgagggtccggagcgctcgctttccgaactgtcgtaaaagggccccggtgtcgcgctcgcg

SEQ ID NO: 42668 - DNA, 492 bp, Mus musculus
  source 1..492: mol_type = other DNA
tctatagatatttacgctgtgatgattaataatattaaaattactaagagatactatgcgggctatttctccataaagtggcccctatcagcaacatatacttttaagttatccgtcggacgtttgcctggtagtttagcttcagggggtcacagcgtgacactgtcccctgggctctcggcctcaggtttcgctgggcgttccggggcggaacccgccgacttcttccgggaaggctggcttcggtgaagagtctccctaccgcggagactttcccgggaccacgccagaggccgagccaccggtccgctgcgagctccgcccccatgcctgctcagtgcgcacgcgcacccgtcatccgggtgccgctgcaggttgcgctgggctcattgtgcgcagcgtagcgcggcgccgctggccgcccggggcccgggttggaagttggtgctgccgcggccaccgcctccaccgccgctgcctcctcctccgccg

SEQ ID NO: 42669 - DNA, 441 bp, Mus musculus
  source 1..441: mol_type = other DNA
ctattctatactagaccagtgggatgcctcagcatcagccggatgaggcagtccctctctatagatatttacgctgtgatgattaataatattaaaattactaagagatactatgcgggctatttctccataaagtggcccctatcagcaacatatacttttaagttatccgtcggacgtttgcctggtagtttagcttcagggggtcacagcgtgacactgtcccctgggctctcggcctcaggtttcgctgggcgttccggggcggaacccgccgacttcttccgggaaggctggcttcggtgaagagtctccctaccgcggagactttcccgggaccacgccagaggccgagccaccggtccgctgcgagctccgcccccatgcctgctcagtgcgcacgcgcacccgtcatccgggtgccgctgcaggttgcgctgg

SEQ ID NO: 42670 - DNA, 450 bp, Mus musculus
  source 1..450: mol_type = other DNA
atgatctatatcctcttgccaataaataagtaagaataaataagaagtcaattctaattttaaaagtcattttttcgggaagagaagcttcccactctgtgcaaagagagctggttgggagcgcagcgattctcagccaaaacctttcctaagaaatgcttccaattctcaacattagggcgcgcagcggggatgccccggagttccggcagcacacttttcctagtggcgctgcggctctccgagccgcgcccctgaccacgccctcagccacgcccctggcctcgctctgccttccctagcctgaacgcgcgggaggggcgtggcctcgggggagaagcgctccccgagtgggtccgggcgcttcaacgagcgcagtcacgcggaggcacgctccgagcgggcgggcgggggcacgcgcgcgcgctcccgccgccctctacggtgacg

SEQ ID NO: 42671 - DNA, 558 bp, Mus musculus
  source 1..558: mol_type = other DNA
cagactctccttttccaggagaaagttagcctctgatgtctacatgcatccagtacacacaataataatagtaataataataataataattctttataattcaatggtaattgaaagaacaaaattcaaaatgttaattatcagaatgaattcatgagaagctgctggacagcatccttcccatgccaggctgcaattccaaaagtcaatccagttaaaaatgagaaagggtcacctgctctgctgtgcatagaacttttgggtacatataccatgcatgtttattataaagtcttcgatatgacaattcgatagcagtgaaactctaaatgatttttacactaagaagtaataaatcatatatgaagtttatcatagattaaaaagctaaactagttttctgataataagaaatgacttgtgtaagattccattcctttggaatcagtaagatgtccaagacagtttatttctagccttataagctttagtcttaaatgacaactactttttaatctaaacactccatgaaacctcaaaatacaagaaatactttta

SEQ ID NO: 42672 - DNA, 404 bp, Mus musculus
  source 1..404: mol_type = other DNA
aaaggtttgcaatttattcttattatcaataatataaactcatattctttgagtcaaccgaagcagagttaagtatgatggcagccccgctactcctaaagttgtagttcttgaatacgagtataaagaatatttattattatggctaaggcctagtaggatacagatacccctacttggcagctgcagagcttcactttcacagggaaaagagcgctcccgcccggggcggtgggcggagtctccagcggccccgccctcccaggccaatccctgctctccgccagcggacaggaagcagcggcggggcctagcggcccgggcgctcgcctcggcacgcatgcgcattatcccggggcgcctcggtgccgtcgcgtcacgtggcgagaaaggaggcggagggc

SEQ ID NO: 42673 - DNA, 323 bp, Mus musculus
  source 1..323: mol_type = other DNA
gtgctaggcaagcacttttatttacacagtggtgttcaacacacagcatttatttgttcagtgtgtccatactaaatcaaggccctcagcgagactttcatctctctttgggattggcatgcgactagaaagaacactacctcccattcaagtactatggggggggcacccagctgacctttggtcaaatgtccaaacacactctcaattgattgattctgaactatgagcttggctcaagaggaaagaagacctggcgaggtgttttatttccaaaacttatcgagataaaaagtgctttgggtcaatctagatattgatag

SEQ ID NO: 42674 - DNA, 255 bp, Mus musculus
  source 1..255: mol_type = other DNA
aggctgactttgaactcactgtggagtcagaaatgaccttggagggtttcatgcgtgctaggcaagcactctttatttacacagtggtgttcaacacacagcatttatttgttcagtgtgtccatactaaatcaaggccctcagcgagactttcatctctctttgggattggcatgcgactagaaagaacactacctcccattcaagtactatggggggggcacccagctgacctttggtcaaatgtccaaacac

SEQ ID NO: 42675 - DNA, 380 bp, Mus musculus
  source 1..380: mol_type = other DNA
tcttgaatcctaaactctgtttaccagatagggagaccacttcagtgaacaagagggagttcccatcttaccaggctgggcccttgaactcacagagatcagcgctgggattaaaactacacttccataagttaatttagttatttctggagcccttcagaaagactccagcagtcccatgaagaggcactactaggaagaaaaccttcaggagagaatgttcacagtgaaggtggtttggcaagcatctcttttctcatctcctggaaaaaaaaaaaaaaaagattaatctgtcaagtacaaaaagagtcattttgaggatttggaattataactcattaatgcaaacaaatcagttcctaattaggacaggctctctg

SEQ ID NO: 42676 - DNA, 493 bp, Mus musculus
  source 1..493: mol_type = other DNA
gaacacatctaaagtaagtgttttgtagtgaaaagcagttgctagaggcagaaagccctataaagagctatctatatgggctctactgattcctgatcagccggcctcaggcacaactaggccgcggggccggcacaccccacccagcggccacgcgcccctcgcgccacgcggaaggctgagcgaaagctctttcgggctgctcgggaccccgggggaggagaagaagggcgcggggctcggcggggccgcggctcgggcgcctctcctcccggccgaccagcgctaaggctcgcggggctgccatcggccagcgcggtcccgccgaggctgcgctccggccgtcgaggcccccccgggcgcgcccgcgggagcgtgggccgcggacttgaccgtgcgggcgccgcgcgcggccgtatgcaaatgtcctcctgggccggccccccgcgcctgtgggccgcacgtccaataacgccccccgccctatatacag

SEQ ID NO: 42677 - DNA, 372 bp, Mus musculus
  source 1..372: mol_type = other DNA
atgttgacagtgacttgatctgtgatcattaagaactgaaaacaattccaacagttgacatggtcgacctttctaattcctgatatctgacttgctcaaatattcaaatcttgttttgtttgagacagagtcactttgcaacctcgaattctatgtagatcaggctggccttgaactcagtcagccagacttaaaggcatgcacgaccatacctgactatattgtttctaatatgcattttattatagctagctacctggagctgcagtctaaaggctgtgattaatgtccattcaggaatccctgtaaattttttgtccaaaactttgattgatttcccagtgcacggcggtgatgtaacttccgcccctg

SEQ ID NO: 42678 - DNA, 365 bp, Mus musculus
  source 1..365: mol_type = other DNA
atggagatactgtgtcctcccgttaaaggcctaagcactcacacaccaggttcttagtgacttcctggcactgtgacaggacagatctgcccttgccttgcttatctctgctagggggcagcagagccctaggggctgacagggtaggtcacctctgaatcagttcacatggggtggataatgacacggtggacacacagcaatcactgaatgaatgtggacagcctgttttctaccacagaaatgacaactgtcttctctcagggtcaccattagaccaagggtcccagtagtccttgggggctgcttgactagtctggcagaatccctcccaggccccgcctcctgggctccagccctgcgga

SEQ ID NO: 42679 - DNA, 379 bp, Mus musculus
  source 1..379: mol_type = other DNA
gaacagaaacagatcttaacttctgagccatttctcagttttcctacaaaataatcactattactttttgaaatctttttattcaacatgtttgtcagtaaacatttacttattaaaatactgtaagacacagcctcgctcactttaatgacaccctggccttcccagttggcaatgtaatgccaccttccctggaatgctgctaccaggagccaggtgacctcagagctagggcccgggactgtccgcgaggggccgcagtcctcggtccgccgggtcctgggtcgctgggagggtccggacgcagacccgcctgctcctcctcccgggagggcgggcgactgcagggcggggcggggctggcgcggcctcctggcga

SEQ ID NO: 42680 - DNA, 553 bp, Mus musculus
  source 1..553: mol_type = other DNA
atacttctagtaagccatatttacttttctagctagttaaattataacactttttcctgttccatcaccaaattgtttattacatactagatgttctaaagaatgcattcctttgtaaactcttcattagtgtaatgagaaatcgaaggaactttataaaaaatctttattcattaaacttttccttttcaagaatgtcattttaagcataggtaatttttttcccaagcataggtaatttgttttgaagataatttctaattttaagaatttttttcacaatgtaacaaaacaaacaacaaatctatcttatcagagttgaaagcaactttagaccatgccacaaggcttcctttcacaagtgcactaatttaattcaaactaaactctctctctctctctctcacacacacacacacacacagagagagagagagagagagaggatacagtatttctttttatttaaatacagtgtgtgacctttgtatatttatttcaacattccaaagtttgtctctttggtatcttccaccaatgctaggatttggtg

SEQ ID NO: 42681 - DNA, 194 bp, Mus musculus
  source 1..194: mol_type = other DNA
catggcggctccaggggacctgacatcctcttatgccctagccctggctgtcctggaactcactttgtagaccaggctggcctcgaactcagaaatccgcctgcctctttttttttttttttttttttttttaacaaaacaaaactctcagaacctttctagaagaaactcagcctagtaccagtcgtaccaga

SEQ ID NO: 42682 - DNA, 317 bp, Mus musculus
  source 1..317: mol_type = other DNA
tgcagtaagtacagcaatggcacatttagggacggcacgctcaggtgagcaagctgatgagcgcgggcggctccacagccggcctcgcctcccgcgtccggcgtggctgagctccggaatggctgcgggtggcagatccagatgctgcccagctgcgtccccgtcgcggcacttcggggcgcagtgagcttgaggagacggccgccgcccgccgtgggctttgtccgtccgccgccccctccgcggtcccacttcctcggcgcgggaggcgggagcgcgccgggcagcgaggggttaagccgacgcgcttgaggcgc
